(19) United States
(12) Patent Application Publication
(10) Pub. No.: US 2004/0052799 A1
(43) Pub. Date: Mar. 18, 2004

(54) Nucleic acid and amino acid sequences relating to Helicobacter pylori for diagnostics and therapeutics

(75) Inventors: Douglas Smith, Gloucester, MA (US); Richard A. Alm, Ashland, MA (US); O. Thomas Berglindh, Uppsala (SE); Bjorn L. Mellgard, Goteborg (SE); Steven R. Thomas, Mission (CA); Eric Brown, Cambridge, MA (US); Donald T. Moir, Lexington, MA (US); Lo See Ling, Arlington, MA (US); Gilles Carmel, Waltham, MA (US); Braydon C. Guild, Concord, MA (US); Peter C. Doig, Acton, MA (US); Zita Kabok, Natick, MA (US); Lillian Marie Castriotta, Newton, MA (US)

Correspondence Address: LAHIVE & COCKFIELD, LLP., 28 STATE STREET, BOSTON, MA, 02109, US

(73) Assignee: Astra Aktiebolag

(21) Appl. No.: 10/335,977

(22) Filed: Dec. 30, 2002

Related U.S. Application Data
(63) Continuation of application No. 08/993,002, filed on Dec. 17, 1997, now abandoned.
Application No. 08/993,002 is a continuation-in-part of application No. 08/821,931, filed on Mar. 21, 1997, now abandoned.
Application No. 08/821,931 is a continuation of application No. 08/761,184, filed on Dec. 5, 1996, now abandoned.

(30) Foreign Application Priority Data
Oct. 28, 1997 (WO) PCT/US97/19575
Dec. 5, 1997 (WO) PCT/US97/22104
Nov. 15, 1996 (WO) PCT/US96/18542

(51) Int. Cl. A61K 39/00; A61K 39/38

(52) U.S. Cl. 424/184.1

(57) ABSTRACT

Recombinant or substantially pure preparations of H. pylori polypeptides are described. The nucleic acids encoding the polypeptides also are described. The H. pylori polypeptides are useful for diagnostics and vaccine compositions.

### RELATED APPLICATIONS

[0001] The contents, including the Sequence Listings and Figures, of each of the following related applications listed by serial number and filing date is incorporated herein by reference.

[0002] This application is a continuation-in-part of U.S. Ser. No. 08/821,931, filed Mar. 21, 1997, which is a continuation of U.S. Ser. No. 08/761,184, filed Dec. 6, 1996 now abandoned, which is a continuation-in-part of U.S. Ser. No. 08/759,739, filed Dec. 6, 1996, which is a continuation-in-part of U.S. Ser. No. 08/736,791, filed Oct. 25, 1996, which is a continuation-in-part of U.S. Ser. No. 08/739,150, filed Oct. 28, 1996, which is a continuation-in-part of 08/660,742, filed Jun. 6, 1996, which is a continuation-in-part of U.S. Ser. No. 08/630,405, filed Apr. 1, 1996, which is a continuation-in-part of U.S. Ser. No. 08/561,469, filed Nov. 17, 1995, which is a continuation-in-part of U.S. Ser. No. 08/487,032, filed Jun. 7, 1995. This application also claims priority to PCT application PCT/US97/19575, filed Oct. 28, 1997, and PCT application PCT/US96/18542, filed Nov. 15, 1996. This application is also a continuation-in-part of U.S. Ser. No. 08/625,431 filed Mar. 26, 1996 which is a continuation-in-part of U.S. Ser. No. 08/621,425, filed Mar. 25, 1996, which is a continuation-in-part of U.S. Ser. No. 08/561,469, filed Nov. 17, 1995, which is a continuation-in-part of U.S. Ser. No. 08/487,032, filed Jun. 7, 1995. This application is also a continuation-in-part of U.S. Ser. No. 08/824,132, filed Mar. 27, 1997, which is a continuation-in-part of U.S. Ser. No. 08/761,318, filed Dec. 6, 1996, which is a continuation-in-part of U.S. Ser. No. 08/738,859, filed Oct. 28, 1996 now abandoned, which is a continuation-in-part of U.S. Ser. No. 08/625,811, filed Mar. 29, 1996. This application is also a continuation-in-part of U.S. Ser. No. 08/769,224, filed Dec. 6, 1996, which is a continuation-in-part of U.S. Ser. No. 08/736,905, filed Oct. 25, 1996 now abandoned, which is a continuation-in-part of U.S. Ser. No. 08/758,731, filed Apr. 2, 1996. This application is also a continuation-in-part of U.S. Ser. No. 08/823,745, filed Mar. 25, 1997, which is a continuation-in-part of U.S. Ser. No. 08/759,625, filed Dec. 5, 1996. This application also claims priority to a PCT application, number not yet available, filed Dec. 5, 1997, (Atty. Docket No. GTN-011CP2PC). This application is also a continuation-in-part of U.S. Ser. No. 08/761,066, filed Dec. 5, 1996. This application is also a continuation-in-part of U.S. Ser. No. 08/891,928, filed Jul. 14, 1997. This application is also a continuation-in-part of U.S. Ser. No. 08/892,020, filed Jul. 14, 1997.

[0003] It should be understood that all of the Sequence Listings and Figures of all of the aforementioned applications are considered to be part of the contents which are incorporated by reference herein. For example, FIG. 1 (pages 1-1199), which contains H. pylori genomic DNA, of U.S. Ser. No. 08/621,425, filed Mar. 25, 1996 is incorporated herein by reference. FIG. 1 (pages 1-1199), which contains H. pylori genomic DNA, and FIGS. 2-809 and FIG. 810 (pages 908-2700), which contain H. pylori amino acid sequences, of U.S. Ser. No. 08/625,431, filed Mar. 26, 1996 also are incorporated herein by reference.

### BACKGROUND OF THE INVENTION

[0004] Helicobacter pylori is a gram-negative, S-shaped, microaerophilic bacterium that was discovered and cultured from a human gastric biopsy specimen. (Warren, J. R. and B. Marshall, (1983) Lancet 1: 1273-1275; and Marshall et al., (1984) Microbios Lett. 25: 83-88). H. pylori has been strongly linked to chronic gastritis and duodenal ulcer disease. (Rathbone et. al., (1986) Gut 27: 635-641). Moreover, evidence is accumulating for an etiologic role of H. pylori in nonulcer dyspepsia, gastric ulcer disease, and gastric adenocarcinoma. (Blaser M. J., (1993) Trends Microbiol. 1: 255-260). Transmission of the bacteria occurs via the oral route, and the risk of infection increases with age. (Taylor, D. N. and M. J. Blaser, (1991) Epidemiol. Rev 13: 42-50). H. pylori colonizes the human gastric mucosa, establishing an infection that usually persists for decades. Infection by H. pylori is prevalent worldwide. Developed countries have infection rates over 50% of the adult population, while developing countries have infection rates reaching 90% of the adults over the age of 20. (Hopkins R. J. and J. G. Morris (1994) Am. J. Med. 97: 265-277).

[0005] The bacterial factors necessary for colonization of the gastric environment, and for virulence of this pathogen, are poorly understood. Examples of the putative virulence factors include the following: urease, an enzyme that may play a role in neutralizing gastric acid pH (Eaton et al., (1991) Infect. Immunol. 59: 2470-2475; Ferrero, R. L. and A. Lee (1991) Microb. Ecol. Hlth. Dis. 4: 121-134; Labigne et al., (1991) J. Bacteriol. 173: 1920-1931); the bacterial flagellar proteins responsible for motility across the mucous layer. (Hazell et al., (1986) J. Inf. Dis. 153: 658-663; Leying et al., (1992) Mol. Microbiol. 6: 2863-2874; and Haas et al., (1993) Mol. Microbiol. 8: 753-760); Vac A, a bacterial toxin that induces the formation of intracellular vacuoles in epithelial cells (Schmitt, W. and R. Haas, (1994) Molecular Microbiol. 12(2): 307-319); and several gastric tissue-specific adhesins. (Boren et al., (1993) Science 262: 1892-1895; Evans et al., (1993) J. Bacteriol. 175: 674-683; and Falk et al., (1993) Proc. Natl. Acad. Sci. USA 90: 2035-203).

[0006] Numerous therapeutic agents are currently available that eradicate H. pylori infections in vitro. (Huesca et. al., (1993) Zbl. Bakt. 280: 244-252; Hopkins, R. J. and J. G. Morris, supra). However, many of these treatments are suboptimally effective in vivo because of bacterial resistance, altered drug distribution, patient non-compliance or poor drug availabilty. (Hopkins, R. J. and J. G. Morris, supra). Treatment with antibiotics combined with bismuth are part of the standard regime used to treat H. pylori infection. (Malfertheiner, P. and J. E. Dominguez-Munoz (1993) Clinical Therapeutics 15 Supp. B: 37-48). Recently, combinations of a proton pump inhibitors and a single antibiotic have been shown to ameliorate duodenal ulcer disease. (Malfertheiner, P. and J. E. Dominguez-Munoz supra). However, methods employing antibiotic agents can have the problem of the emergence of bacterial strains which are resistant to these agents. (Hopkins, R. J. and J. G. Morris, supra). These limitations demonstrate that new more effective methods are needed to combat H. pylori infections in vivo. In particular, the design of new vaccines that may prevent infection by this bacterium is highly desirable.

### SUMMARY OF THE INVENTION

[0007] This invention relates to novel genes, e.g., genes encoding polypeptides such as bacterial surface proteins, from the organism Helicobacter pylori (H. pylori), and other related genes, their products, and uses thereof. The nucleic acids and peptides of the present invention have utility for diagnostic and therapeutics for H. pylori and other Helicobacter species. They can also be used to detect the presence of H. pylori and other Helicobacter species in a sample; and for use in screening compounds for the ability to interfere with the H. pylori life cycle or to inhibit H. pylori infection. More specifically, this invention features compositions of nucleic acids corresponding to entire coding sequences of H. pylori proteins, including surface or secreted proteins or parts thereof, nucleic acids capable of binding mRNA from H. pylori proteins to block protein translation, and methods for producing H. pylori proteins or parts thereof using peptide synthesis and recombinant DNA techniques. This invention also features antibodies and nucleic acids useful as probes to detect H. pylori infection. In addition, compositions, including vaccine compositions, and methods for the protection or treatment of infection by H. pylori are within the scope of this invention.

### DETAILED DESCRIPTION OF THE DRAWINGS

[0008] FIG. 1 is a bar graph that depicts the antibody titer in serum of mice following immunization with specific H. pylori antigens.

[0009] FIG. 2 is a bar graph that depicts the antibody titer in mucous of mice following immunization with specific H. pylori antigens.

[0010] FIG. 3 is a bar graph that depicts therapeutic immunization of H. pylori infected mice with specific antigens dissolved in HEPES buffer.

[0011] FIG. 4 is a bar graph that depicts therapeutic immunization of H. pylori infected mice with specific antigens dissolved in buffer containing DOC.

[0012] FIG. 5 is a graph depicting the activity of recombinant PPIase.

[0013] FIG. 6 is a graph depicting PPIase activity in an H. pylori extract.

[0014] FIG. 7 is a graph depicting inhibition of glutamate racemase activity by L-Serine-O-Sulfate.

[0015] FIG. 8 is a graph depicting the results of an assay of the 3-deoxy-D-manno-2-octulosonic-8-phosphate (KDO-8-P) catalyzed reaction.

[0016] FIG. 9 is a graph depicting the stability of 3-deoxy-D-manno-2-octulosonic-8-phosphate (KDO-8-P) after purification.

[0017] FIG. 10 depicts predicted amphipathic beta-sheet regions at the C-terminus as well as additional amino acid sequence motifs of ten H. pylori outer membrane proteins.

[0018] FIG. 11 depicts predicted amphipathic beta-sheet regions at the C-terminus as well as additional amino acid sequence motifs of five H. pylori outer membrane proteins.

[0019] FIG. 12 depicts predicted amphipathic beta-sheet regions at the C-terminus as well as additional amino acid sequence motifs of five H. pylori outer membrane proteins.

[0020] FIG. 13 depicts amino acid sequence motifs of twelve H. pylori outer membranes.

[0021] FIG. 14 depicts sequence similarities in the N-terminal portion of six H. pylori proteins.

[0022] FIG. 15 depicts two members of a family of H. pylori outer membrane proteins which share significant homology across most of their sequences.

[0023] FIG. 16 depicts two members of a family of H. pylori outer membrane proteins which share significant homology across most of their sequences.

[0024] FIG. 17 depicts five members of a family of H. pylori outer membrane proteins which share significant homology across most of their sequences.

### DETAILED DESCRIPTION OF THE INVENTION

[0025] In one aspect, the invention features a recombinant or substantially pure preparation of H. pylori polypeptide of SEQ ID NO: 4763. The invention also includes substantially pure nucleic acid encoding an H. pylori polypeptide of SEQ ID NO: 4763, such nucleic acid is contained in SEQ ID NO: 1. The H. pylori polypeptide sequences of the invention described herein are contained in the Sequence Listing, and the nucleic acids encoding H. pylori polypeptides of the invention are contained in the Sequence Listing.

[0026] In another aspect, the invention features a recombinant or substantially pure preparation of H. pylori polypeptide selected from the group consisting of H. pylori polypeptides of SEQ ID NO: 4763 through SEQ ID NO: 5012. The invention also includes substantially pure nucleic acid encoding an H. pylori polypeptide selected from the group consisting of SEQ ID NO: 4763 through SEQ ID NO: 5012, such nucleic acids are contained in SEQ ID NO: 1 through SEQ ID NO:250.

[0027] In another aspect, the invention features a recombinant or substantially pure preparation of H. pylori polypeptide selected from the group consisting of H. pylori polypeptides of SEQ ID NO: 5013 through SEQ ID NO: 5262. The invention also includes substantially pure nucleic acid encoding an H. pylori polypeptide selected from the group consisting of SEQ ID NO: 5013 through SEQ ID NO: 5262, such nucleic acids are contained in SEQ ID NO: 251 through SEQ ID NO:500.

[0028] In another aspect, the invention features a recombinant or substantially pure preparation of H. pylori polypeptide selected from the group consisting of H. pylori polypeptides of SEQ ID NO: 5263 through SEQ ID NO: 5512. The invention also includes substantially pure nucleic acid encoding an H. pylori polypeptide selected from the group consisting of SEQ ID NO: 5263 through SEQ ID NO: 5512, such nucleic acids are contained in SEQ ID NO: 501 through SEQ ID NO:750.

[0029] In another aspect, the invention features a recombinant or substantially pure preparation of H. pylori polypeptide selected from the group consisting of H. pylori polypeptides of SEQ ID NO: 5513 through SEQ ID NO: 5762. The invention also includes substantially pure nucleic acid encoding an H. pylori polypeptide selected from the group consisting of SEQ ID NO: 5513 through SEQ ID NO: 5762, such nucleic acids are contained in SEQ ID NO: 751 through SEQ ID NO:1000.

[0030] In another aspect, the invention features a recombinant or substantially pure preparation of H. pylori polypeptide selected from the group consisting of H. pylori polypeptides of SEQ ID NO: 5763 through SEQ ID NO: 6012. The invention also includes substantially pure nucleic acid encoding an H. pylori polypeptide selected from the group consisting of SEQ ID NO: 5763 through SEQ ID NO: 6012, such nucleic acids are contained in SEQ ID NO: 1001 through SEQ ID NO:1250.

[0031] In another aspect, the invention features a recombinant or substantially pure preparation of H. pylori polypeptide selected from the group consisting of H. pylori polypeptides of SEQ ID NO: 6013 through SEQ ID NO: 6262 The invention also includes substantially pure nucleic acid encoding an H. pylori polypeptide selected from the group consisting of SEQ ID NO: 6013 through SEQ ID NO: 6262, such nucleic acids are contained in SEQ ID NO: 1125 through SEQ ID NO:1500.

[0032] In another aspect, the invention features a recombinant or substantially pure preparation of H. pylori polypeptide selected from the group consisting of H. pylori polypeptides of SEQ ID NO: 6263 through SEQ ID NO: 6512. The invention also includes substantially pure nucleic acid encoding an H. pylori polypeptide selected from the group consisting of SEQ ID NO: 6263 through SEQ ID NO: 6512, such nucleic acids are contained in SEQ ID NO: 1501 through SEQ ID NO:1750.

[0033] In another aspect, the invention features a recombinant or substantially pure preparation of H. pylori polypeptide selected from the group consisting of H. pylori polypeptides of SEQ ID NO: 6513 through SEQ ID NO: 6762. The invention also includes substantially pure nucleic acid encoding an H. pylori polypeptide selected from the group consisting of SEQ ID NO: 6513 through SEQ ID NO: 6762, such nucleic acids are contained in SEQ ID NO: 1751 through SEQ ID NO:2000.

[0034] In another aspect, the invention features a recombinant or substantially pure preparation of H. pylori polypeptide selected from the group consisting of H. pylori polypeptides of SEQ ID NO: 6763 through SEQ ID NO: 7012. The invention also includes substantially pure nucleic acid encoding an H. pylori polypeptide selected from the group consisting of SEQ ID NO: 6763 through SEQ ID NO: 7012, such nucleic acids are contained in SEQ ID NO: 2001 through SEQ ID NO:2250.

[0035] In another aspect, the invention features a recombinant or substantially pure preparation of H. pylori polypeptide selected from the group consisting of H. pylori polypeptides of SEQ ID NO: 7013 through SEQ ID NO: 7262. The invention also includes substantially pure nucleic acid encoding an H. pylori polypeptide selected from the group consisting of SEQ ID NO: 7013 through SEQ ID NO: 7262, such nucleic acids are contained in SEQ ID NO: 2251 through SEQ ID NO:2500.

[0036] In another aspect, the invention features a recombinant or substantially pure preparation of H. pylori polypeptide selected from the group consisting of H. pylori polypeptides of SEQ ID NO: 7263 through SEQ ID NO:7512. The invention also includes substantially pure nucleic acid encoding an H. pylori polypeptide selected from the group consisting of SEQ ID NO: 7263 through SEQ ID NO: 7512, such nucleic acids are contained in SEQ ID NO: 2501 through SEQ ID NO:2750.

[0037] In another aspect, the invention features a recombinant or substantially pure preparation of H. pylori polypeptide selected from the group consisting of H. pylori polypeptides of SEQ ID NO:7513 through SEQ ID NO:7762. The invention also includes substantially pure nucleic acid encoding an H. pylori polypeptide selected from the group consisting of SEQ ID NO: 7513 through SEQ ID NO: 7762, such nucleic acids are contained in SEQ ID NO: 2751 through SEQ ID NO:3000.

[0038] In another aspect, the invention features a recombinant or substantially pure preparation of H. pylori polypeptide selected from the group consisting of H. pylori polypeptides of SEQ ID NO:7763 through SEQ ID NO:8012. The invention also includes substantially pure nucleic acid encoding an H. pylori polypeptide selected from the group consisting of SEQ ID NO: 7763 through SEQ ID NO: 8012, such nucleic acids are contained in SEQ ID NO: 3001 through SEQ ID NO:3250.

[0039] In another aspect, the invention features a recombinant or substantially pure preparation of H. pylori polypeptide selected from the group consisting of H. pylori polypeptides of SEQ ID NO:8013 through SEQ ID NO:8262. The invention also includes substantially pure nucleic acid encoding an H. pylori polypeptide selected from the group consisting of SEQ ID NO:8013 through SEQ ID NO: 8262, such nucleic acids are contained in SEQ ID NO: 3251 through SEQ ID NO:3500.

[0040] In another aspect, the invention features a recombinant or substantially pure preparation of H. pylori polypeptide selected from the group consisting of H. pylori polypeptides of SEQ ID NO:8263 through SEQ ID NO:8512. The invention also includes substantially pure nucleic acid encoding an H. pylori polypeptide selected from the group consisting of SEQ ID NO:8263 through SEQ ID NO: 8512, such nucleic acids are contained in SEQ ID NO: 3501 through SEQ ID NO:3750.

[0041] In another aspect, the invention features a recombinant or substantially pure preparation of H. pylori polypeptide selected from the group consisting of H. pylori polypeptides of SEQ ID NO:8513 through SEQ ID NO:8762 The invention also includes substantially pure nucleic acid encoding an H. pylori polypeptide selected from the group consisting of SEQ ID NO:8513 through SEQ ID NO: 8762, such nucleic acids are contained in SEQ ID NO: 3751 through SEQ ID NO:4000.

[0042] In another aspect, the invention features a recombinant or substantially pure preparation of H. pylori polypeptide selected from the group consisting of H. pylori polypeptides of SEQ ID NO:8763 through SEQ ID NO:9012. The invention also includes substantially pure nucleic acid encoding an H. pylori polypeptide selected from the group consisting of SEQ ID NO:8763 through SEQ ID NO: 9012, such nucleic acids are contained in SEQ ID NO: 4001 through SEQ ID NO:4250.

[0043] In another aspect, the invention features a recombinant or substantially pure preparation of H. pylori polypeptide selected from the group consisting of H. pylori polypeptides of SEQ ID NO:9013 through SEQ ID NO:9262 The invention also includes substantially pure nucleic acid encoding an H. pylori polypeptide selected from the group consisting of SEQ ID NO:9013 through SEQ ID NO: 9262, such nucleic acids are contained in SEQ ID NO: 4251 through SEQ ID NO:4500.

[0044] In another aspect, the invention features a recombinant or substantially pure preparation of H. pylori polypeptide selected from the group consisting of H. pylori polypeptides of SEQ ID NO:9263 through SEQ ID NO:9512. The invention also includes substantially pure nucleic acid encoding an H. pylori polypeptide selected from the group consisting of SEQ ID NO:9263 through SEQ ID NO: 9512, such nucleic acids are contained in SEQ ID NO: 4501 through SEQ ID NO:4750.

[0045] In another aspect, the invention features a recombinant or substantially pure preparation of H. pylori polypeptide selected from the group consisting of H. pylori polypeptides of SEQ ID NO:9513 through SEQ ID NO:9524. The invention also includes substantially pure nucleic acid encoding an H. pylori polypeptide selected from the group consisting of SEQ ID NO:9513 through SEQ ID NO: 9524, such nucleic acids are contained in SEQ ID NO: 4751 through SEQ ID NO:4762.

[0046] In another aspect, the invention features a recombinant or substantially pure preparation of H. pylori polypeptide selected from the group consisting of H. pylori polypeptides of SEQ ID NO:9637 through SEQ ID NO: 9798. The invention also includes substantially pure nucleic acid encoding an H. pylori polypeptide selected from the group consisting of SEQ ID NO: 9637 through SEQ ID NO: 9798, such nucleic acids are contained in SEQ ID NO: 9525 through SEQ ID 9636.

[0047] In another aspect, the invention features a recombinant or substantially pure preparation of an H. pylori polypeptide selected from the group consisting of H. pylori polypeptides as set forth in the Sequence Listing. The invention also includes substantially pure nucleic acid encoding an H. pylori polypeptide selected from the group consisting of H. pylori polypeptides as set forth in the Sequence Listing. It should be understood that this invention encompasses each of the H. pylori polypeptides and nucleic acids encoding such polypeptides as identified in the Sequence Listing by a given sequence identification number. For example, a representative H. pylori polypeptide is contained in SEQ ID NO: 4763. Therefore, this invention encompasses a recombinant or substantially pure preparation of an H. pylori polypeptide of SEQ ID NO: 4763. The invention also includes substantially pure nucleic acid encoding an H. pylori polypeptide of SEQ ID NO: 4763.

[0048] In another aspect, the invention pertains to any individual H. pylori polypeptide member or nucleic acid encoding such member from the above-identified groups of H. pylori polypeptides (e.g., SEQ ID NO: 4763-SEQ ID NO: 9524 and SEQ ID NO: 9637-SEQ ID NO: 9748) or nucleic acids (e.g., SEQ ID NO: 1-SEQ ID NO: 4762 and SEQ ID NO: 9525-SEQ ID NO: 9636), as well as any subgroups from within the above-identified groups. Furthermore, the subgroups can preferably consist of 1, 3, 5, 10, 15, 20, 30, 40, 50, 75, 100, 125, 150, 175, 200 or 225 members of any of the groups identified above, as well as, any combinations thereof. For example, the group consisting of H. pylori polypeptides SEQ ID NO: 4763 through SEQ ID NO: 5012 can be divided into one or more subgroups as follows: SEQ ID NO: 4763-SEQ ID NO: 4800; SEQ ID NO: 4801-SEQ ID NO: 4860; SEQ ID NO: 4861-SEQ ID NO: 4950; SEQ ID NO: 4951-SEQ ID NO: 5012; or any combinations thereof.

[0049] Particularly preferred H. pylori polypeptide or fragments thereof comprises a purified H. pylori murI polypeptide or a fragment thereof, wherein the polypeptide comprises the amino acid sequence of SEQ ID NO: 7635. The invention also includes an isolated nucleic acid encoding a H. pylori murI polypeptide, which nucleic acid comprises the nucleotide sequence of SEQ ID NO: 2873.

[0050] Particularly preferred H. pylori polypeptide or fragments thereof comprises a purified H. pylori murC polypeptide or a fragment thereof, wherein the polypeptide comprises the amino acid sequence of SEQ ID NO: 7607. The invention also includes an isolated nucleic acid encoding a H. pylori murC polypeptide, which nucleic acid comprises the nucleotide sequence of SEQ ID NO: 2845.

[0051] In another aspect, the invention features an isolated nucleic acid having a nucleotide sequence encoding an H. pylori polypeptide at least about 60% homologous to an amino acid sequence selected from the group consisting of SEQ ID NO: 4763-SEQ ID NO: 9524 and SEQ ID NO: 9637-SEQ ID NO: 9748. In a preferred embodiment, the isolated nucleic acid includes a nucleotide sequence selected from the group consisting of SEQ ID NO: 1-SEQ ID NO: 4762 and SEQ ID NO: 9525-SEQ ID NO: 9636, or a complement thereof.

[0052] In another aspect, the invention features an isolated nucleic acid having a nucleotide sequence encoding an H. pylori polypeptide selected from the group consisting of SEQ ID NO: 4763-SEQ ID NO: 9524 and SEQ ID NO: 9637-SEQ ID NO: 9748.

[0053] In another aspect, the invention features an isolated nucleic acid which encodes an H. pylori polypeptide, having a nucleotide sequence at least about 60% homologous to a nucleotide sequence selected from the group consisting of SEQ ID NO: 1-SEQ ID NO: 4762 and SEQ ID NO: 9525-SEQ ID NO: 9636, or a complement thereof.

[0054] In another aspect, the invention features an isolated nucleic acid molecule encoding an H. pylori polypeptide, having a nucleotide sequence which hybridizes under stringent hybridization conditions to a nucleic acid molecule having the nucleotide sequence selected from the group consisting of SEQ ID NO: 1-SEQ ID NO: 4762 and SEQ ID NO: 9525-SEQ ID NO: 9636, or a complement thereof.

[0055] In another aspect, the invention features an isolated nucleic acid having a nucleotide sequence of at least 8 nucleotides in length, wherein the sequence hybridizes under stringent hybridization conditions to a nucleic acid having a nucleotide sequence selected from the group consisting of SEQ ID NO: 1-SEQ ID NO: 4762 and SEQ ID NO: 9525-SEQ ID NO: 9636, or a complement thereof.

[0056] Particularly preferred is an isolated nucleic acid having a nucleotide sequence encoding an H. pylori cell envelope polypeptide or a fragment thereof, the nucleic acid selected from the group consisting of SEQ ID NO: 1; SEQ ID NO: 2; SEQ ID NO: 3; SEQ ID NO: 4; SEQ ID NO: 5; SEQ ID NO: 6; SEQ ID NO: 7; SEQ ID NO: 8; SEQ ID NO: 9; SEQ ID NO: 10; SEQ ID NO: 11; SEQ ID NO: 12; SEQ ID NO: 13; SEQ ID NO: 14; SEQ ID NO: 15; SEQ ID NO: 16; SEQ ID NO: 17; SEQ ID NO: 18; SEQ ID NO: 19; SEQ ID NO: 20; SEQ ID NO: 21; SEQ ID NO: 22; SEQ ID NO: 23; SEQ ID NO: 24; SEQ ID NO: 25; SEQ ID NO: 26; SEQ ID NO: 27; SEQ ID NO: 28; SEQ ID NO: 29; SEQ ID NO: 30; SEQ ID NO: 31; SEQ ID NO: 32; SEQ ID NO: 33; SEQ ID NO: 34; SEQ ID NO: 35; SEQ ID NO: 36; SEQ ID NO: 37; SEQ ID NO: 38; SEQ ID NO: 39; SEQ ID NO: 40; SEQ ID NO: 41; SEQ ID NO: 42; SEQ ID NO: 43; SEQ ID NO: 44; SEQ ID NO: 45; SEQ ID NO: 46; SEQ ID NO: 47; SEQ ID NO: 48; SEQ ID NO: 49; SEQ ID NO: 50; SEQ ID NO: 51; SEQ ID NO: 52; SEQ ID NO: 53; SEQ ID NO: 54; SEQ ID NO: 55; SEQ ID NO: 56; SEQ ID NO: 57; SEQ ID NO: 58; SEQ ID NO: 59; SEQ ID NO: 60; SEQ ID NO: 61; SEQ ID NO: 62; SEQ ID NO: 63; SEQ ID NO: 64; SEQ ID NO: 65; SEQ ID NO: 66; SEQ ID NO: 67; SEQ ID NO: 68; SEQ ID NO: 69; SEQ ID NO: 70; SEQ ID NO: 71; SEQ ID NO: 72; SEQ ID NO: 73; SEQ ID NO: 74; SEQ ID NO: 75; SEQ ID NO: 76; SEQ ID NO: 77; SEQ ID NO: 78; SEQ ID NO: 79; SEQ ID NO: 80; SEQ ID NO: 81; SEQ ID NO: 82; SEQ ID NO: 83; SEQ ID NO: 84; SEQ ID NO: 85; SEQ ID NO: 86; SEQ ID NO: 87; SEQ ID NO: 88; SEQ ID NO: 89; SEQ ID NO: 90; SEQ ID NO: 91; SEQ ID NO: 92; SEQ ID NO: 93; SEQ ID NO: 94; SEQ ID NO: 95; SEQ ID NO: 96; SEQ ID NO: 97; SEQ ID NO: 98; SEQ ID NO: 99; SEQ ID NO: 100; SEQ ID NO: 101; SEQ ID NO: 102; SEQ ID NO: 103; SEQ ID NO: 104; SEQ ID NO: 105; SEQ ID NO: 106; SEQ ID NO: 107; SEQ ID NO: 108; SEQ ID NO: 109; SEQ ID NO: 110; SEQ ID NO: 11; SEQ ID NO: 112; SEQ ID NO: 113; SEQ ID NO: 114; SEQ ID NO: 115; SEQ ID NO: 116; SEQ ID NO: 117; SEQ ID NO: 118; SEQ ID NO: 119; SEQ ID NO: 120; SEQ ID NO: 121; SEQ ID NO: 122; SEQ ID NO: 123; SEQ ID NO: 124; SEQ ID NO: 125; SEQ ID NO: 126; SEQ ID NO: 127; SEQ ID NO: 128; SEQ ID NO: 129; SEQ ID NO: 130; SEQ ID NO: 131; SEQ ID NO: 132; SEQ ID NO: 133; SEQ ID NO: 134; SEQ ID NO: 135; SEQ ID NO: 136; SEQ ID NO: 137; SEQ ID NO: 138; SEQ ID NO: 139; SEQ ID NO: 140; SEQ ID NO: 141; SEQ ID NO: 142; SEQ ID NO: 143; SEQ ID NO: 144; SEQ ID NO: 145; SEQ ID NO: 146; SEQ ID NO: 147; SEQ ID NO: 148; SEQ ID NO: 149; SEQ ID NO: 150; SEQ ID NO: 151; SEQ ID NO: 152; SEQ ID NO: 153; SEQ ID NO: 154; SEQ ID NO: 155; SEQ ID NO: 156; SEQ ID NO: 157; SEQ ID NO: 158; SEQ ID NO: 159; SEQ ID NO: 160; SEQ ID NO: 161; SEQ ID NO: 162; SEQ ID NO: 163; SEQ ID NO: 164; SEQ ID NO: 165; SEQ ID NO: 166; SEQ ID NO: 167; SEQ ID NO: 168; SEQ ID NO: 169; SEQ ID NO: 170; SEQ ID NO: 171; SEQ ID NO: 172; SEQ ID NO: 173; SEQ ID NO: 174; SEQ ID NO: 175; SEQ ID NO: 176; SEQ ID NO: 177; SEQ ID NO: 178; SEQ ID NO: 179; SEQ ID NO: 180; SEQ ID NO: 181; SEQ ID NO: 182; SEQ ID NO: 183; SEQ ID NO: 184; SEQ ID NO: 185; SEQ ID NO: 186; SEQ ID NO: 187; SEQ ID NO: 188; SEQ ID NO: 189; SEQ ID NO: 190; SEQ ID NO: 191; SEQ ID NO: 192; SEQ ID NO: 193; SEQ ID NO: 194; SEQ ID NO: 195; SEQ ID NO: 196; SEQ ID NO: 197; SEQ ID NO: 198; SEQ ID NO: 199; SEQ ID NO: 200; SEQ ID NO: 201; SEQ ID NO: 202; SEQ ID NO: 203; SEQ ID NO: 204; SEQ ID NO: 205; SEQ ID NO: 206; SEQ ID NO: 207; SEQ ID NO: 208; SEQ ID NO: 209; SEQ ID NO: 210; SEQ ID NO: 211; SEQ ID NO: 212; SEQ ID NO: 213; SEQ ID NO: 214; SEQ ID NO: 215; SEQ ID NO: 216; SEQ ID NO: 217; SEQ ID NO: 218; SEQ ID NO: 219; SEQ ID NO: 220; SEQ ID NO: 221; SEQ ID NO: 222; SEQ ID NO: 223; SEQ ID NO: 224; SEQ ID NO: 225; SEQ ID NO: 226; SEQ ID NO: 227; SEQ ID NO: 228; SEQ ID NO: 229; SEQ ID NO: 230; SEQ ID NO: 231; SEQ ID NO: 232; SEQ ID NO: 233; SEQ ID NO: 234; SEQ ID NO: 235; SEQ ID NO: 236; SEQ ID NO: 237; SEQ ID NO: 238; SEQ ID NO: 239; SEQ ID NO: 240; SEQ ID NO: 241; SEQ ID NO: 242; SEQ ID NO: 243; SEQ ID NO: 244; SEQ ID NO: 245; SEQ ID NO: 246; SEQ ID NO: 247; SEQ ID NO: 248; SEQ ID NO: 249; SEQ ID NO: 250; SEQ ID NO: 251; SEQ ID NO: 252; SEQ ID NO: 253; SEQ ID NO: 254; SEQ ID NO: 255; SEQ ID NO: 256; SEQ ID NO: 257; SEQ ID NO: 258; SEQ ID NO: 259; SEQ ID NO: 260; SEQ ID NO: 261; SEQ ID NO: 262; SEQ ID NO: 263; SEQ ID NO: 264; SEQ ID NO: 265; SEQ ID NO: 266; SEQ ID NO: 267; SEQ ID NO: 268; SEQ ID NO: 269; SEQ ID NO: 270; SEQ ID NO: 271; SEQ ID NO: 272; SEQ ID NO: 273; SEQ ID NO: 274; SEQ ID NO: 275; SEQ ID NO: 276; SEQ ID NO: 277; SEQ ID NO: 278; SEQ ID NO: 279; SEQ ID NO: 280; SEQ ID NO: 281; SEQ ID NO: 282; SEQ ID NO: 283; SEQ ID NO: 284; SEQ ID NO: 285; SEQ ID NO: 286; SEQ ID NO: 287; SEQ ID NO: 288; SEQ ID NO: 289; SEQ ID NO: 290; SEQ ID NO: 291; SEQ ID NO: 292; SEQ ID NO: 293; SEQ ID NO: 294; SEQ ID NO: 295; SEQ ID NO: 296; SEQ ID NO: 297; SEQ ID NO: 298; SEQ ID NO: 299; SEQ ID NO: 300; SEQ ID NO: 301; SEQ ID NO: 302; SEQ ID NO: 303; SEQ ID NO: 304; SEQ ID NO: 305; SEQ ID NO: 306; SEQ ID NO: 307; SEQ ID NO: 308; SEQ ID NO: 309; SEQ ID NO: 310; SEQ ID NO: 311; SEQ ID NO: 312; SEQ ID NO: 313; SEQ ID NO: 314; SEQ ID NO: 315; SEQ ID NO: 316; SEQ ID NO: 317; SEQ ID NO: 318; SEQ ID NO: 319; SEQ ID NO: 320; SEQ ID NO: 321; SEQ ID NO: 322; SEQ ID NO: 323; SEQ ID NO: 324; SEQ ID NO: 325; SEQ ID NO: 326; SEQ ID NO: 327; SEQ ID NO: 328; SEQ ID NO: 329; SEQ ID NO: 330; SEQ ID NO: 331; SEQ ID NO: 332; SEQ ID NO: 333; SEQ ID NO: 334; SEQ ID NO: 335; SEQ ID NO: 336; SEQ ID NO: 337; SEQ ID NO: 338; SEQ ID NO: 339; SEQ ID NO: 340; SEQ ID NO: 341; SEQ ID NO: 342; SEQ ID NO: 343; SEQ ID NO: 344; SEQ ID NO: 345; SEQ ID NO: 346; SEQ ID NO: 347; SEQ ID NO: 348; SEQ ID NO: 349; SEQ ID NO: 350; SEQ ID NO: 351; SEQ ID NO: 352; SEQ ID NO: 353; SEQ ID NO: 354; SEQ ID NO: 355; SEQ ID NO: 356; SEQ ID NO: 357; SEQ ID NO: 358; SEQ ID NO: 359; SEQ ID NO: 360; SEQ ID NO: 361; SEQ ID NO: 362; SEQ ID NO: 363; SEQ ID NO: 364; SEQ ID NO: 365; SEQ ID NO: 366; SEQ ID NO: 367; SEQ ID NO: 368; SEQ ID NO: 369; SEQ ID NO: 370; SEQ ID NO: 371; SEQ ID NO: 372; SEQ ID NO: 373; SEQ ID NO: 374; SEQ ID NO: 375; SEQ ID NO: 376; SEQ ID NO: 377; SEQ ID NO: 378; SEQ ID NO: 379; SEQ ID NO: 380; SEQ ID NO: 381; SEQ ID NO: 382; SEQ ID NO: 383; SEQ ID NO: 384; SEQ ID NO: 385; SEQ ID NO: 386; SEQ ID NO: 387; SEQ ID NO: 388; SEQ ID NO: 389; SEQ ID NO: 390; SEQ ID NO: 391; SEQ ID NO: 392; SEQ ID NO: 393; SEQ ID NO: 394; SEQ ID NO: 395; SEQ ID NO: 396; SEQ ID NO: 397; SEQ ID NO: 398; SEQ ID NO: 399; SEQ ID NO: 400; SEQ ID NO: 401; SEQ ID NO: 402; SEQ ID NO: 403; SEQ ID NO: 404; SEQ ID NO: 405; SEQ ID NO: 406; SEQ ID NO: 407; SEQ ID NO: 408; SEQ ID NO: 409; SEQ ID NO: 410; SEQ ID NO: 411; SEQ ID NO: 412; SEQ ID NO: 413; SEQ ID NO: 414; SEQ ID NO: 415; SEQ ID NO: 416; SEQ ID NO: 417; SEQ ID NO: 418; SEQ ID NO: 419; SEQ ID NO: 420; SEQ ID NO: 421; SEQ ID NO: 422; SEQ ID NO: 423; SEQ ID NO: 424; SEQ ID NO: 425; SEQ ID NO: 426; SEQ ID NO: 427; SEQ ID NO: 428; SEQ ID NO: 429; SEQ ID NO: 430; SEQ ID NO: 431; SEQ ID NO: 432; SEQ ID NO: 433; SEQ ID NO: 434; SEQ ID NO: 435; SEQ ID NO: 436; SEQ ID NO: 437; SEQ ID NO: 438; SEQ ID NO: 439; SEQ ID NO: 440; SEQ ID NO: 441; SEQ ID NO: 442; SEQ ID NO: 443; SEQ ID NO: 444; SEQ ID NO: 445; SEQ ID NO: 446; SEQ ID NO: 447; SEQ ID NO: 448; SEQ ID NO: 449; SEQ ID NO: 450; SEQ ID NO: 451; SEQ ID NO: 452; SEQ ID NO: 453; SEQ ID NO: 454; SEQ ID NO: 455; SEQ ID NO: 456; SEQ ID NO: 457; SEQ ID NO: 458; SEQ ID NO: 459; SEQ ID NO: 460; SEQ ID NO: 461; SEQ ID NO: 462; SEQ ID NO: 463; SEQ ID NO: 464; SEQ ID NO: 465; SEQ ID NO: 466; SEQ ID NO: 467; SEQ ID NO: 468; SEQ ID NO: 469; SEQ ID NO: 470; SEQ ID NO: 471; SEQ ID NO: 472; SEQ ID NO: 473; SEQ ID NO: 474; SEQ ID NO: 475; SEQ ID NO: 476; SEQ ID NO: 477; SEQ ID NO: 478; SEQ ID NO: 479; SEQ ID NO: 480; SEQ ID NO: 481; SEQ ID NO: 482; SEQ ID NO: 483; SEQ ID NO: 484; SEQ ID NO: 485; SEQ ID NO: 486; SEQ ID NO: 487; SEQ ID NO: 488; SEQ ID NO: 489; SEQ ID NO: 490; SEQ ID NO: 491; SEQ ID NO: 492; SEQ ID NO: 493; SEQ ID NO: 494; SEQ ID NO: 495; SEQ ID NO: 496; SEQ ID NO: 497; SEQ ID NO: 498; SEQ ID NO: 499; SEQ ID NO: 500; SEQ ID NO: 501; SEQ ID NO: 502; SEQ ID NO: 503; SEQ ID NO: 504; SEQ ID NO: 505; SEQ ID NO: 506; SEQ ID NO: 507; SEQ ID NO: 508; SEQ ID NO: 509; SEQ ID NO: 510; SEQ ID NO: 511; SEQ ID NO: 512; SEQ ID NO: 513; SEQ ID NO: 514; SEQ ID NO: 515; SEQ ID NO: 516; SEQ ID NO: 517; SEQ ID NO: 518; SEQ ID NO: 519; SEQ ID NO: 520; SEQ ID NO: 521; SEQ ID NO: 522; SEQ ID NO: 523; SEQ ID NO: 524; SEQ ID NO: 525; SEQ ID NO: 526; SEQ ID NO: 527; SEQ ID NO: 528; SEQ ID NO: 529; SEQ ID NO: 530; SEQ ID NO: 531; SEQ ID NO: 532; SEQ ID NO: 533; SEQ ID NO: 534; SEQ ID NO: 535; SEQ ID NO: 536; SEQ ID NO: 537; SEQ ID NO: 538; SEQ ID NO: 539; SEQ ID NO: 540; SEQ ID NO: 541; SEQ ID NO: 542; SEQ ID NO: 543; SEQ ID NO: 544; SEQ ID NO: 545; SEQ ID NO: 546; SEQ ID NO: 547; SEQ ID NO: 548; SEQ ID NO: 549; SEQ ID NO: 550; SEQ ID NO: 551; SEQ ID NO: 552; SEQ ID NO: 553; SEQ ID NO: 554; SEQ ID NO: 555; SEQ ID NO: 556; SEQ ID NO: 557; SEQ ID NO: 558; SEQ ID NO: 559; SEQ ID NO: 560; SEQ ID NO: 561; SEQ ID NO: 562; SEQ ID NO: 563; SEQ ID NO: 564; SEQ ID NO: 565; SEQ ID NO: 566; SEQ ID NO: 567; SEQ ID NO: 568; SEQ ID NO: 569; SEQ ID NO: 570; SEQ ID NO: 571; SEQ ID NO: 572; SEQ ID NO: 573; SEQ ID NO: 574; SEQ ID NO: 575; SEQ ID NO: 576; SEQ ID NO: 577; SEQ ID NO: 578; SEQ ID NO: 579; SEQ ID NO: 580; SEQ ID NO: 581; SEQ ID NO: 582; SEQ ID NO: 583; SEQ ID NO: 584; SEQ ID NO: 585; SEQ ID NO: 586; SEQ ID NO: 587; SEQ ID NO: 588; SEQ ID NO: 589; SEQ ID NO: 590; SEQ ID NO: 591; SEQ ID NO: 592; SEQ ID NO: 593; SEQ ID NO: 594; SEQ ID NO: 595; SEQ ID NO: 596; SEQ ID NO: 597; SEQ ID NO: 598; SEQ ID NO: 599; SEQ ID NO: 600; SEQ ID NO: 601; SEQ ID NO: 602; SEQ ID NO: 603; SEQ ID NO: 604; SEQ ID NO: 605; SEQ ID NO: 606; SEQ ID NO: 607; SEQ ID NO: 608; SEQ ID NO: 609; SEQ ID NO: 610; SEQ ID NO: 611; SEQ ID NO: 612; SEQ ID NO: 613; SEQ ID NO: 614; SEQ ID NO: 615; SEQ ID NO: 616; SEQ ID NO: 617; SEQ ID NO: 618; SEQ ID NO: 619; SEQ ID NO: 620; SEQ ID NO: 621; SEQ ID NO: 622; SEQ ID NO: 623; SEQ ID NO: 624; SEQ ID NO: 625; SEQ ID NO: 626; SEQ ID NO: 627; SEQ ID NO: 628; SEQ ID NO: 629; SEQ ID NO: 630; SEQ ID NO: 631; SEQ ID NO: 632; SEQ ID NO: 633; SEQ ID NO: 634; SEQ ID NO: 635; SEQ ID NO: 636; SEQ ID NO: 637; SEQ ID NO: 638; SEQ ID NO: 639; SEQ ID NO: 640; SEQ ID NO: 641; SEQ ID NO: 642; SEQ ID NO: 643; SEQ ID NO: 644; SEQ ID NO: 645; SEQ ID NO: 646; SEQ ID NO: 647; SEQ ID NO: 648; SEQ ID NO: 649; SEQ ID NO: 650; SEQ ID NO: 651; SEQ ID NO: 652; SEQ ID NO: 653; SEQ ID NO: 654; SEQ ID NO: 655; SEQ ID NO: 656; SEQ ID NO: 657; SEQ ID NO: 658; SEQ ID NO: 659; SEQ ID NO: 660; SEQ ID NO: 661; SEQ ID NO: 662; SEQ ID NO: 663; SEQ ID NO: 664; SEQ ID NO: 665; SEQ ID NO: 666; SEQ ID NO: 667; SEQ ID NO: 668; SEQ ID NO: 669; SEQ ID NO: 670; SEQ ID NO: 671; SEQ ID NO: 672; SEQ ID NO: 673; SEQ ID NO: 674; SEQ ID NO: 675; SEQ ID NO: 676; SEQ ID NO: 677; SEQ ID NO: 678; SEQ ID NO: 679; SEQ ID NO: 680; SEQ ID NO: 681; SEQ ID NO: 682; SEQ ID NO: 683; SEQ ID NO: 684; SEQ ID NO: 685; SEQ ID NO: 686; SEQ ID NO: 687; SEQ ID NO: 688; SEQ ID NO: 689; SEQ ID NO: 690; SEQ ID NO: 691; SEQ ID NO: 692; SEQ ID NO: 693; SEQ ID NO: 694; SEQ ID NO: 695; SEQ ID NO: 696; SEQ ID NO: 697; SEQ ID NO: 698; SEQ ID NO: 699; SEQ ID NO: 700; SEQ ID NO: 701; SEQ ID NO: 702; SEQ ID NO: 703; SEQ ID NO: 704; SEQ ID NO: 705; SEQ ID NO: 706; SEQ ID NO: 707; SEQ ID NO: 708; SEQ ID NO: 709; SEQ ID NO: 710; SEQ ID NO: 711; SEQ ID NO: 712; SEQ ID NO: 713; SEQ ID NO: 714; SEQ ID NO: 715; SEQ ID NO: 716; SEQ ID NO: 717; SEQ ID NO: 718; SEQ ID NO: 719; SEQ ID NO: 720; SEQ ID NO: 721; SEQ ID NO: 722; SEQ ID NO: 723; SEQ ID NO: 724; SEQ ID NO: 725; SEQ ID NO: 726; SEQ ID NO: 727; SEQ ID NO: 728; SEQ ID NO: 729; SEQ ID NO: 730; SEQ ID NO: 731; SEQ ID NO: 732; SEQ ID NO: 733; SEQ ID NO: 734; SEQ ID NO: 735; SEQ ID NO: 736; SEQ ID NO: 737; SEQ ID NO: 738; SEQ ID NO: 739; SEQ ID NO: 740; SEQ ID NO: 741; SEQ ID NO: 742; SEQ ID NO: 743; SEQ ID NO: 744; SEQ ID NO: 745; SEQ ID NO: 746; SEQ ID NO: 747; SEQ ID NO: 748; SEQ ID NO: 749; SEQ ID NO: 750; SEQ ID NO: 751; SEQ ID NO: 752; SEQ ID NO: 753; SEQ ID NO: 754; SEQ ID NO: 755; SEQ ID NO: 756; SEQ ID NO: 757; SEQ ID NO: 758; SEQ ID NO: 759; SEQ ID NO: 760; SEQ ID NO: 761; SEQ ID NO: 762; SEQ ID NO: 763; SEQ ID NO: 764; SEQ ID NO: 765; SEQ ID NO: 766; SEQ ID NO: 767; SEQ ID NO: 768; SEQ ID NO: 769; SEQ ID NO: 770; SEQ ID NO: 771; SEQ ID NO: 772; SEQ ID NO: 773; SEQ ID NO: 774; SEQ ID NO: 775; SEQ ID NO: 776; SEQ ID NO: 777; SEQ ID NO: 778; SEQ ID NO: 779; SEQ ID NO: 780; SEQ ID NO: 781; SEQ ID NO: 782; SEQ ID NO: 783; SEQ ID NO: 784; SEQ ID NO: 785; SEQ ID NO: 786; SEQ ID NO: 787; SEQ ID NO: 788; SEQ ID NO: 789; SEQ ID NO: 790; SEQ ID NO: 791; SEQ ID NO: 792; SEQ ID NO: 793; SEQ ID NO: 794; SEQ ID NO: 795; SEQ ID NO: 796; SEQ ID NO: 797; SEQ ID NO: 798; SEQ ID NO: 799; SEQ ID NO: 800; SEQ ID NO: 801; SEQ ID NO: 802; SEQ ID NO: 803; SEQ ID NO: 804; SEQ ID NO: 805; SEQ ID NO: 806; SEQ ID NO: 807; SEQ ID NO: 808; SEQ ID NO: 809; SEQ ID NO: 810; SEQ ID NO: 811; SEQ ID NO: 812; SEQ ID NO: 813; SEQ ID NO: 814; SEQ ID NO: 815; SEQ ID NO: 816; SEQ ID NO: 817; SEQ ID NO: 818; SEQ ID NO: 819; SEQ ID NO: 820; SEQ ID NO: 821; SEQ ID NO: 822; SEQ ID NO: 823; SEQ ID NO: 824; SEQ ID NO: 825; SEQ ID NO: 826; SEQ ID NO: 827; SEQ ID NO: 828; SEQ ID NO: 829; SEQ ID NO: 830; SEQ ID NO: 831; SEQ ID NO: 832; SEQ ID NO: 833; SEQ ID NO: 834; SEQ ID NO: 835; SEQ ID NO: 836; SEQ ID NO: 837; SEQ ID NO: 838; SEQ ID NO: 839; SEQ ID NO: 840; SEQ ID NO: 841; SEQ ID NO: 842; SEQ ID NO: 843; SEQ ID NO: 844; SEQ ID NO: 845; SEQ ID NO: 846; SEQ ID NO: 847; SEQ ID NO: 848; SEQ ID NO: 849; SEQ ID NO: 850; SEQ ID NO: 851; SEQ ID NO: 852; SEQ ID NO: 853; SEQ ID NO: 854; SEQ ID NO: 855; SEQ ID NO: 856; SEQ ID NO: 857; SEQ ID NO: 858; SEQ ID NO: 859; SEQ ID NO: 860; SEQ ID NO: 861; SEQ ID NO: 862; SEQ ID NO: 863; SEQ ID NO: 864; SEQ ID NO: 865; SEQ ID NO: 866; SEQ ID NO: 867; SEQ ID NO: 868; SEQ ID NO: 869; SEQ ID NO: 870; SEQ ID NO: 871; SEQ ID NO: 872; SEQ ID NO: 873; SEQ ID NO: 874; SEQ ID NO: 875; SEQ ID NO: 876; SEQ ID NO: 877; SEQ ID NO: 878; SEQ ID NO: 879; SEQ ID NO: 880; SEQ ID NO: 881; SEQ ID NO: 882; SEQ ID NO: 883; SEQ ID NO: 884; SEQ ID NO: 885; SEQ ID NO: 886; SEQ ID NO: 887; SEQ ID NO: 888; SEQ ID NO: 889; SEQ ID NO: 890; SEQ ID NO: 891; SEQ ID NO: 892; SEQ ID NO: 893; SEQ ID NO: 894; SEQ ID NO: 895; SEQ ID NO: 896; SEQ ID NO: 897; SEQ ID NO: 898; SEQ ID NO: 899; SEQ ID NO: 900; SEQ ID NO: 901; SEQ ID NO: 902; SEQ ID NO: 903; SEQ ID NO: 904; SEQ ID NO: 905; SEQ ID NO: 906; SEQ ID NO: 907; SEQ ID NO: 908; SEQ ID NO: 909; SEQ ID NO: 910; SEQ ID NO: 911; SEQ ID NO: 912; SEQ ID NO: 913; SEQ ID NO: 914; SEQ ID NO: 915; SEQ ID NO: 916; SEQ ID NO: 917; SEQ ID NO: 918; SEQ ID NO: 919; SEQ ID NO: 920; SEQ ID NO: 921; SEQ ID NO: 922; SEQ ID NO: 923; SEQ ID NO: 924; SEQ ID NO: 925; SEQ ID NO: 926; SEQ ID NO: 927; SEQ ID NO: 928; SEQ ID NO: 929; SEQ ID NO: 930; SEQ ID NO: 931; SEQ ID NO: 932; SEQ ID NO: 933; SEQ ID NO: 934; SEQ ID NO: 935; SEQ ID NO: 936; SEQ ID NO: 937; SEQ ID NO: 938; SEQ ID NO: 939; SEQ, ID NO: 940; SEQ ID NO: 941; SEQ ID NO: 942; SEQ ID NO: 943; SEQ ID NO: 944; SEQ ID NO: 945; SEQ ID NO: 946; SEQ ID NO: 947; SEQ ID NO: 948; SEQ ID NO: 949; SEQ ID NO: 950; SEQ ID NO: 951; SEQ ID NO: 952; SEQ ID NO: 953; SEQ ID NO: 954; SEQ ID NO: 955; SEQ ID NO: 956; SEQ ID NO: 957; SEQ ID NO: 958; SEQ ID NO: 959; SEQ ID NO: 960; SEQ ID NO: 961; SEQ ID NO: 962; SEQ ID NO: 963; SEQ ID NO: 964; SEQ ID NO: 965; SEQ ID NO: 966; SEQ ID NO: 967; SEQ ID NO: 968; SEQ ID NO: 969; SEQ ID NO: 970; SEQ ID NO: 971; SEQ ID NO: 972; SEQ ID NO: 973; SEQ ID NO: 974; SEQ ID NO: 975; SEQ ID NO: 976; SEQ ID NO: 977; SEQ ID NO: 978; SEQ ID NO: 979; SEQ ID NO: 980; SEQ ID NO: 981; SEQ ID NO: 982; SEQ ID NO: 983; SEQ ID NO: 984; SEQ ID NO: 985; SEQ ID NO: 986; SEQ ID NO: 987; SEQ ID NO: 988; SEQ ID NO: 989; SEQ ID NO: 990; SEQ ID NO: 991; SEQ ID NO: 992; SEQ ID NO: 993; SEQ ID NO: 994; SEQ ID NO: 995; SEQ ID NO: 996; SEQ ID NO: 997; SEQ ID NO: 998; SEQ ID NO: 999; SEQ ID NO: 1000; SEQ ID NO: 1001; SEQ ID NO: 1002; SEQ ID NO: 1003; SEQ ID NO: 1004; SEQ ID NO: 1005; SEQ ID NO: 1006; SEQ ID NO: 1007; SEQ ID NO: 1008; SEQ ID NO: 1009; SEQ ID NO: 1010; SEQ ID NO: 1011; SEQ ID NO: 1012; SEQ ID NO: 1013; SEQ ID NO: 1014; SEQ ID NO: 1015; SEQ ID NO: 1016; SEQ ID NO: 10.7, SEQ ID NO: 1018; SEQ ID NO: 1019; SEQ ID NO: 1020; SEQ ID NO: 1021; SEQ ID NO: 1022; SEQ ID NO: 1023; SEQ ID NO: 1024; SEQ ID NO: 1025; SEQ ID NO: 1026; SEQ ID NO: 1027; SEQ ID NO: 1028; SEQ ID NO: 1029; SEQ ID NO: 1030; SEQ ID NO: 1031; SEQ ID NO: 1032; SEQ ID NO: 1033; SEQ ID NO: 1034; SEQ ID NO: 1035; SEQ ID NO: 1036; SEQ ID NO: 1037; SEQ ID NO: 1038; SEQ ID NO: 1039; SEQ ID NO: 1040; SEQ ID NO: 1041; SEQ ID NO: 1042; SEQ ID NO: 1043; SEQ ID NO: 1044; SEQ ID NO: 1045; SEQ ID NO: 1046; SEQ ID NO: 1047; SEQ ID NO: 1048; SEQ ID NO: 1049; SEQ ID NO: 1050; SEQ ID NO: 1051; SEQ ID NO: 1052; SEQ ID NO: 1053; SEQ ID NO: 1054; SEQ ID NO: 1055; SEQ ID NO: 1056; SEQ ID NO: 1057; SEQ ID NO: 1058; SEQ ID NO: 1059; SEQ ID NO: 1060; SEQ ID NO: 1061; SEQ ID NO: 1062; SEQ ID NO: 1063; SEQ ID NO: 1064; SEQ ID NO: 1065; SEQ ID NO: 1066; SEQ ID NO: 1067; SEQ ID NO: 1068; SEQ ID NO: 1069; SEQ ID NO: 1070; SEQ ID NO: 1071; SEQ ID NO: 1072; SEQ ID NO: 1073; SEQ ID NO: 1074; SEQ ID NO: 1075; SEQ ID NO: 1076; SEQ ID NO: 1077; SEQ ID NO: 1078; SEQ ID NO: 1079; SEQ ID NO: 1080; SEQ ID NO: 1081; SEQ ID NO: 1082; SEQ ID NO: 1083; SEQ ID NO: 1084; SEQ ID NO: 1085; SEQ ID NO: 1086; SEQ ID NO: 1087; SEQ ID NO: 1088; SEQ ID NO: 1089; SEQ ID NO: 1090; SEQ ID NO: 1091; SEQ ID NO: 1092; SEQ ID NO: 1093; SEQ ID NO: 1094; SEQ ID NO: 1095; SEQ ID NO: 1096; SEQ ID NO: 1097; SEQ ID NO: 1098; SEQ ID NO: 1099; SEQ ID NO: 1100; SEQ ID NO: 1101; SEQ ID NO: 1102; SEQ ID NO: 1103; SEQ ID NO: 1104; SEQ ID NO: 1105; SEQ ID NO: 1106; SEQ ID NO: 1107; SEQ ID NO: 1108; SEQ ID NO: 1109; SEQ ID NO: 1110; SEQ ID NO: 1111; SEQ ID NO: 1112; SEQ ID NO: 1113; SEQ ID NO: 1114; SEQ ID NO: 1115; SEQ ID NO: 1116; SEQ ID NO: 1117; SEQ ID NO: 1118; SEQ ID NO: 1119; SEQ ID NO: 1120; SEQ ID NO: 1121; SEQ ID NO: 1122; SEQ ID NO: 1123; SEQ ID NO: 1124; SEQ ID NO: 1125; SEQ ID NO: 1126; SEQ ID NO: 1127; SEQ ID NO: 1128; SEQ ID NO: 1129; SEQ ID NO: 1130; SEQ ID NO: 1131; SEQ ID NO: 1132; SEQ ID NO: 1133; SEQ ID NO: 1134; SEQ ID NO: 1135; SEQ ID NO: 1136; SEQ ID NO: 1137; SEQ ID NO: 1138; SEQ ID NO: 1139; SEQ ID NO: 1140; SEQ ID NO: 1141; SEQ ID NO: 1142; SEQ ID NO: 1143; SEQ ID NO: 1144; SEQ ID NO: 1145; SEQ ID NO: 1146; SEQ ID NO: 1147; SEQ ID NO: 1148; SEQ ID NO: 1149; SEQ ID NO: 1150; SEQ ID NO: 1151; SEQ ID NO: 1152; SEQ ID NO: 1153; SEQ ID NO: 1154; SEQ ID NO: 1155; SEQ ID NO: 1156; SEQ ID NO: 1157; SEQ ID NO: 1158; SEQ ID NO: 1159; SEQ ID NO: 1160; SEQ ID NO: 1161; SEQ ID NO: 1162; SEQ ID NO: 1163; SEQ ID NO: 1164; SEQ ID NO: 1165; SEQ ID NO: 1166; SEQ ID NO: 1167; SEQ ID NO: 1168; SEQ ID NO: 1169; SEQ ID NO:1170; SEQ ID NO:1171; SEQ ID NO:1172; SEQ ID NO: 1173; SEQ ID NO: 1174; SEQ ID NO: 1175; SEQ ID NO: 1176; SEQ ID NO: 1177; SEQ ID NO: 1178; SEQ ID NO: 1179; SEQ ID NO: 1180; SEQ ID NO:1181; SEQ ID NO: 1182; SEQ ID NO: 1183; SEQ ID NO: 1184; SEQ ID NO: 1185; SEQ ID NO: 1'186; SEQ ID NO: 1187; SEQ ID NO: 1188; SEQ ID NO: 1189; SEQ ID NO: 1190; SEQ ID NO: 1191; SEQ ID NO: 1192; SEQ ID NO: 1193; SEQ ID NO: 1194; SEQ ID NO: 1195; SEQ ID NO: 1196; SEQ ID NO: 1197; SEQ ID NO: 1198; SEQ ID NO: 1199; SEQ ID NO: 1200; SEQ ID NO: 1201; SEQ ID NO: 1202; SEQ ID NO: 1203; SEQ ID NO: 1204; SEQ ID NO: 1205; SEQ ID NO: 1206; SEQ ID NO: 1207; SEQ ID NO: 1208; SEQ ID NO: 1209; SEQ ID NO: 1210; SEQ ID NO: 1121; SEQ ID NO: 1212; SEQ ID NO:1213; SEQ ID NO:1214; SEQ ID NO: 1215; SEQ ID NO:1216; SEQ ID NO: 1217; SEQ ID NO: 1218; SEQ ID NO: 1219; SEQ ID NO: 1220; SEQ ID NO: 1221; SEQ ID NO: 1222; SEQ ID NO: 1223; SEQ ID NO: 1224; SEQ ID NO: 1225; SEQ ID NO: 1226; SEQ ID NO: 1227; SEQ ID NO: 1228; SEQ ID NO: 1229; SEQ ID NO: 1230; SEQ ID NO: 1231; SEQ ID NO: 1232; SEQ ID NO: 1233; SEQ ID NO: 1234; SEQ ID NO: 1235; SEQ ID NO: 1236; SEQ ID NO: 1237; SEQ ID NO: 1238; SEQ ID NO: 1239; SEQ ID NO: 1240; SEQ ID NO: 1241; SEQ ID NO: 1242; SEQ ID NO: 1243; SEQ ID NO: 1244; SEQ ID NO: 1245; SEQ ID NO: 1246; SEQ ID NO: 1247; SEQ ID NO: 1248; SEQ ID NO: 1249; SEQ ID NO: 1250; SEQ ID NO: 1251; SEQ ID NO: 1252; SEQ ID NO: 1253; SEQ ID NO: 1254; SEQ ID NO: 1255; SEQ ID NO: 1256; SEQ ID NO: 1257; SEQ ID NO: 1258; SEQ ID NO: 1259; SEQ ID NO: 1260; SEQ ID NO: 1261; SEQ ID NO: 1262; SEQ ID NO: 1263; SEQ ID NO: 1264; SEQ ID NO: 1265; SEQ ID NO: 1266; SEQ ID NO: 1267; SEQ ID NO: 1268; SEQ ID NO: 1269; SEQ ID NO: 1270; SEQ ID NO: 1271; SEQ ID NO: 1272; SEQ ID NO: 1273; SEQ ID NO: 1274; SEQ ID NO: 1275; SEQ ID NO: 1276; SEQ ID NO: 1277; SEQ ID NO: 1278; SEQ ID NO: 1279; SEQ ID NO: 1280; SEQ ID NO: 1281; SEQ ID NO: 1282; SEQ ID NO: 1283; SEQ ID NO: 1284; SEQ ID NO: 1285; SEQ ID NO: 1286; SEQ ID NO: 1287; SEQ ID NO: 1288; SEQ ID NO: 1289; SEQ ID NO: 1290; SEQ ID NO: 1291; SEQ ID NO: 1292; SEQ ID NO: 1293; SEQ ID NO: 1294; SEQ ID NO: 1295; SEQ ID NO: 1296; SEQ ID NO: 1297; SEQ ID NO: 1298; SEQ ID NO: 1299; SEQ ID NO: 1300; SEQ ID NO: 1301; SEQ ID NO: 1302; SEQ ID NO: 1303; SEQ ID NO: 1304; SEQ ID NO: 1305; SEQ ID NO: 1306; SEQ ID NO: 1307; SEQ ID NO: 1308; SEQ ID NO: 1309; SEQ ID NO: 1310; SEQ ID NO: 1311; SEQ ID NO:1312; SEQ ID NO: 1313; SEQ ID NO:1314; SEQ ID NO:1315; SEQ ID NO: 1316; SEQ ID NO: 1317; SEQ ID NO: 1318; SEQ ID NO: 1319; SEQ ID NO: 1320; SEQ ID NO: 1321; SEQ ID NO: 1322; SEQ ID NO: 1323; SEQ ID NO: 1324; SEQ ID NO: 1325; SEQ ID NO: 1326; SEQ ID NO: 1327; SEQ ID NO: 1328; SEQ ID NO: 1329; SEQ ID NO: 1330; SEQ ID NO: 1331; SEQ ID NO: 1332; SEQ ID NO: 1333; SEQ ID NO: 1334; SEQ ID NO: 1335; SEQ ID NO: 1336; SEQ ID NO: 1337; SEQ ID NO: 1338; SEQ ID NO: 1339; SEQ ID NO: 1340; SEQ ID NO: 1341; SEQ ID NO: 1342; SEQ ID NO: 1343; SEQ ID NO: 1344; SEQ ID NO: 1345; SEQ ID NO: 1346; SEQ ID NO: 1347; SEQ ID NO: 1348; SEQ ID NO: 1349; SEQ ID NO: 1350; SEQ ID NO: 1351; SEQ ID NO: 1352; SEQ ID NO: 1353; SEQ ID NO: 1354; SEQ ID NO: 1355; SEQ ID NO: 1356; SEQ ID NO: 1357; SEQ ID NO: 1358; SEQ ID NO: 1359; SEQ ID NO: 1360; SEQ ID NO: 1361; SEQ ID NO: 1362; SEQ ID NO: 1363; SEQ ID NO: 1364; SEQ ID NO: 1365; SEQ ID NO: 1366; SEQ ID NO: 1367; SEQ ID NO: 1368; SEQ ID NO: 1369; SEQ ID NO: 1370; SEQ ID NO: 1371; SEQ ID NO: 1372; SEQ ID NO: 1373; SEQ ID NO: 1374; SEQ ID NO: 1375; SEQ ID NO: 1376; SEQ ID NO: 1377; SEQ ID NO: 1378; SEQ ID NO: 1379; SEQ ID NO: 1380; SEQ ID NO: 1381; SEQ ID NO: 1382; SEQ ID NO: 1383; SEQ ID NO: 1384; SEQ ID NO: 1385; SEQ ID NO: 1386; SEQ ID NO: 1387; SEQ ID NO: 1388; SEQ ID NO: 1389; SEQ ID NO: 1390; SEQ ID NO: 1391; SEQ ID NO: 1392; SEQ ID NO: 1393; SEQ ID NO: 1394; SEQ ID NO: 1395; SEQ ID NO: 1396; SEQ ID NO: 1397; SEQ ID NO: 1398; SEQ ID NO: 1399; SEQ ID NO: 1400; SEQ ID NO: 1401; SEQ ID NO: 1402; SEQ ID NO: 1403; SEQ ID NO: 1404; SEQ ID NO: 1405; SEQ ID NO: 1406; SEQ ID NO: 1407; SEQ ID NO: 1408; SEQ ID NO: 1409; SEQ ID NO: 1410; SEQ ID NO: 1411; SEQ ID NO: 1412; SEQ ID NO: 1413; SEQ ID NO: 1414; SEQ ID NO: 1415; SEQ ID NO: 1416; SEQ ID NO: 1417; SEQ ID NO: 1418; SEQ ID NO: 1419; SEQ ID NO: 1420; SEQ ID NO: 1421; SEQ ID NO: 1422; SEQ ID NO: 1423; SEQ ID NO: 1424; SEQ ID NO: 1425; SEQ ID NO: 1426; SEQ ID NO: 1427; SEQ ID NO: 1428; SEQ ID NO: 1429; SEQ ID NO: 1430; SEQ ID NO: 1431; SEQ ID NO: 1432; SEQ ID NO: 1433; SEQ ID NO: 1434; SEQ ID NO: 1435; SEQ ID NO: 1436; SEQ ID NO: 1437; SEQ ID NO: 1438; SEQ ID NO: 1439; SEQ ID NO: 1440; SEQ ID NO: 1441; SEQ ID NO: 1442; SEQ ID NO: 1443; SEQ ID NO: 1444; SEQ ID NO: 1445; SEQ ID NO: 1446; SEQ ID NO: 1447; SEQ ID NO: 1448; SEQ ID NO: 1449; SEQ ID NO: 1450; SEQ ID NO: 1451; SEQ ID NO: 1452; SEQ ID NO: 1453; SEQ ID NO: 1454; SEQ ID NO: 1455; SEQ ID NO: 1456; SEQ ID NO: 1457; SEQ ID NO: 1458; SEQ ID NO: 1459; SEQ ID NO: 1460; SEQ ID NO: 1461; SEQ ID NO: 1462; SEQ ID NO: 1463; SEQ ID NO: 1464; SEQ ID NO: 1465; SEQ ID NO: 1466; SEQ ID NO: 1467; SEQ ID NO: 1468; SEQ ID NO: 1469; SEQ ID NO: 1470; SEQ ID NO: 1471; SEQ ID NO: 1472; SEQ ID NO: 1473; SEQ ID NO: 1474; SEQ ID NO: 1475; SEQ ID NO: 1476; SEQ ID NO: 1477; SEQ ID NO: 1478; SEQ ID NO: 1479; SEQ ID NO: 1480; SEQ ID NO: 1481; SEQ ID NO: 1482; SEQ ID NO: 1483; SEQ ID NO: 1484; SEQ ID NO: 1485; SEQ ID NO: 1486; SEQ ID NO: 1487; SEQ ID NO: 1488; SEQ ID NO: 1489; SEQ ID NO: 1490; SEQ ID NO: 1491; SEQ ID NO: 1492; SEQ ID NO: 1493; SEQ ID NO: 1494; SEQ ID NO: 1495; SEQ ID NO: 1496; SEQ ID NO: 1497; SEQ ID NO: 1498; SEQ ID NO: 1499; SEQ ID NO: 1500; SEQ ID NO: 1501; SEQ ID NO: 1502; SEQ ID NO: 1503; SEQ ID NO: 1504; SEQ ID NO: 1505; SEQ ID NO: 1506; SEQ ID NO: 1507; SEQ ID NO: 1508; SEQ ID NO: 1509; SEQ ID NO: 1510; SEQ ID NO: 1511; SEQ ID NO: 1512, S2Q ID NO: 1513; SEQ ID NO: 1514; SEQ ID NO: 1515; SEQ ID NO: 1516; SEQ ID NO: 1517; SEQ ID NO: 1518; SEQ ID NO: 1519; SEQ ID NO: 1520; SEQ ID NO: 1521; SEQ ID NO: 1522; SEQ ID NO: 1523; SEQ ID NO: 1524; SEQ ID NO: 1525; SEQ ID NO: 1526; SEQ ID NO: 1527; SEQ ID NO: 1528; SEQ ID NO: 1529; SEQ ID NO: 1530; SEQ ID NO: 1531; SEQ ID NO: 1532; SEQ ID NO: 1533; SEQ ID NO: 1534; SEQ ID NO: 1535; SEQ ID NO: 1536; SEQ ID NO: 1537; SEQ ID NO: 1538; SEQ ID NO: 1539; SEQ ID NO: 1540; SEQ ID NO: 1541; SEQ ID NO: 1542; SEQ ID NO: 1543; SEQ ID NO: 1544; SEQ ID NO: 1545; SEQ ID NO: 1546; SEQ ID NO: 1547; SEQ ID NO: 1548; SEQ ID NO: 1549; SEQ ID NO: 1550; SEQ ID NO: 1551; SEQ ID NO: 1552; SEQ ID NO: 1553; SEQ ID NO: 1554; SEQ ID NO: 1555; SEQ ID NO: 1556; SEQ ID NO: 1557; SEQ ID NO: 1558; SEQ ID NO: 1559; SEQ ID NO: 1560; SEQ ID NO: 1561; SEQ ID NO: 1562; SEQ ID NO: 1563; SEQ ID NO: 1564; SEQ ID NO: 1565; SEQ ID NO: 1566; SEQ ID NO: 1567; SEQ ID NO: 1568; SEQ ID NO: 1569; SEQ ID NO: 1570; SEQ ID NO: 1571; SEQ ID NO: 1572; SEQ ID NO: 1573; SEQ ID NO: 1574; SEQ ID NO: 1575; and SEQ ID NO: 9525; SEQ ID NO: 9526; SEQ ID NO: 9527; SEQ ID NO: 9528; SEQ ID NO: 9529; SEQ ID NO: 9530; SEQ ID NO: 9531; SEQ ID NO: 9532; SEQ ID NO: 9533; SEQ ID NO: 9534; SEQ ID NO: 9535; SEQ ID NO: 9536; SEQ ID NO: 9537; SEQ ID NO: 9538; SEQ ID NO: 9539; SEQ ID NO: 9540; SEQ ID NO: 9541; SEQ ID NO: 9542; SEQ ID NO: 9543; SEQ ID NO: 9544; SEQ ID NO: 9545; SEQ ID NO: 9546; SEQ ID NO: 9547; SEQ ID NO: 9548; SEQ ID NO: 9549; SEQ ID NO: 9550; SEQ ID NO: 9551; SEQ ID NO: 9552; SEQ ID NO: 9553; SEQ ID NO: 9554; SEQ ID NO: 9555; SEQ ID NO: 9556; SEQ ID NO: 9557; SEQ ID NO: 9558; SEQ ID NO: 9559; SEQ ID NO: 9560; SEQ ID NO: 9561; SEQ ID NO: 9562; SEQ ID NO: 9563; SEQ ID NO: 9564; SEQ ID NO: 9565; SEQ ID NO: 9566; SEQ ID NO: 9567; SEQ ID NO: 9568; SEQ ID NO: 9569; SEQ ID NO: 9570; SEQ ID NO: 9571; SEQ ID NO: 9572; SEQ ID NO: 9573; SEQ ID NO: 9574; SEQ ID NO: 9575; SEQ ID NO: 9576; SEQ ID NO: 9577; SEQ ID NO: 9578; SEQ ID NO: 9579; SEQ ID NO: 9580; SEQ ID NO: 9581; SEQ ID NO: 9582; SEQ ID NO: 9583; SEQ ID NO: 9584; SEQ ID NO: 9585; SEQ ID NO: 9586; SEQ ID NO: 9587; SEQ ID NO: 9588; SEQ ID NO: 9589; SEQ ID NO: 9590; SEQ ID NO: 9591; SEQ ID NO:9592, or a complement thereof.

[0057] In one embodiment, the H. pylori cell envelope polypeptide or a fragment thereof is an H. pylori flagella-associated polypeptide or a fragment thereof encoded by a nucleic acid having a nucleotide sequence selected from the group consisting of SEQ ID NO: 1; SEQ ID NO: 2; SEQ ID NO: 3; SEQ ID NO: 4; SEQ ID NO: 5; SEQ ID NO: 6; SEQ ID NO: 7; SEQ ID NO: 8; SEQ ID NO: 9; SEQ ID NO: 10; SEQ ID NO:11; SEQ ID NO: 12; SEQ ID NO: 13; SEQ ID NO: 14; SEQ ID NO: 15; SEQ ID NO: 16; SEQ ID NO: 17; SEQ ID NO: 18; SEQ ID NO: 19; SEQ ID NO: 20; SEQ ID NO: 21; SEQ ID NO: 22; SEQ ID NO: 23; SEQ ID NO: 24; SEQ ID NO: 25; SEQ ID NO: 26; SEQ ID NO: 27; SEQ ID NO: 28; SEQ ID NO: 29; SEQ ID NO: 30; SEQ ID NO: 31; SEQ ID NO: 32; SEQ ID NO: 33; SEQ ID NO: 34; SEQ ID NO: 35; SEQ ID NO: 36; SEQ ID NO: 37; SEQ ID NO: 38; SEQ ID NO: 39; SEQ ID NO: 40; SEQ ID NO: 41; SEQ ID NO: 42; SEQ ID NO: 43; SEQ ID NO: 44; SEQ ID NO: 45; SEQ ID NO: 46; SEQ ID NO: 47; SEQ ID NO: 48; SEQ ID NO: 49; SEQ ID NO: 50; SEQ ID NO: 51; SEQ ID NO: 52; SEQ ID NO: 53; SEQ ID NO: 54; SEQ ID NO: 55; SEQ ID NO: 56; SEQ ID NO: 57; SEQ ID NO: 58; SEQ ID NO: 59; SEQ ID NO: 60; SEQ ID NO: 61; SEQ ID NO: 62; SEQ ID NO: 63; SEQ ID NO: 64; SEQ ID NO: 65; SEQ ID NO: 66; SEQ ID NO: 67; SEQ ID NO: 68; SEQ ID NO: 69; SEQ ID NO: 70; SEQ ID NO: 71; SEQ ID NO: 72; SEQ ID NO: 73; SEQ ID NO: 74; SEQ ID NO: 75; SEQ ID NO: 76; SEQ ID NO: 77; SEQ ID NO: 78; SEQ ID NO: 79; SEQ ID NO: 80; SEQ ID NO: 81; SEQ ID NO: 82; SEQ ID NO: 83; SEQ ID NO: 84; SEQ ID NO: 85; SEQ ID NO: 86; SEQ ID NO: 87; SEQ ID NO: 88; SEQ ID NO: 89; SEQ ID NO: 90; SEQ ID NO: 91; SEQ ID NO: 92; SEQ ID NO: 93; SEQ ID NO: 94; SEQ ID NO: 95; SEQ ID NO: 96; SEQ ID NO: 97; SEQ ID NO: 98; SEQ ID NO: 99, SEQ ID NO: 100; SEQ ID NO: 101; SEQ ID NO: 102; SEQ ID NO: 103; and SEQ ID NO: 9525; SEQ ID NO: 9526; SEQ ID NO: 9527, or a complement thereof. In another embodiment, the H. pylori cell envelope polypeptide or a fragment thereof is an H. pylori outer membrane polypeptide or a fragment thereof encoded by a nucleic acid having a nucleotide sequence selected from the group consisting of SEQ ID NO: 104; SEQ ID NO: 105; SEQ ID NO: 106; SEQ ID NO: 107; SEQ ID NO: 108; SEQ ID NO: 109; SEQ ID NO: 110; SEQ ID NO: 111; SEQ ID NO: 112; SEQ ID NO: 113; SEQ ID NO: 114; SEQ ID NO: 115; SEQ ID NO: 116; SEQ ID NO: 117; SEQ ID NO: 118; SEQ ID NO: 119; SEQ ID NO: 120; SEQ ID NO: 121; SEQ ID NO: 122; SEQ ID NO: 123; SEQ ID NO: 124; SEQ ID NO: 125; SEQ ID NO: 126; SEQ ID NO: 127; SEQ ID NO: 128; SEQ ID NO: 129; SEQ ID NO: 130; SEQ ID NO: 131; SEQ ID NO: 132; SEQ ID NO: 133; SEQ ID NO: 134; SEQ ID NO: 135; SEQ ID NO: 136; SEQ ID NO: 137; SEQ ID NO: 138; SEQ ID NO: 139; SEQ ID NO: 140; SEQ ID NO: 141; SEQ ID NO: 142; SEQ ID NO: 143; SEQ ID NO: 144; SEQ ID NO: 145; SEQ ID NO: 146; SEQ ID NO: 147; SEQ ID NO: 148; SEQ ID NO: 149; SEQ ID NO: 150; SEQ ID NO: 151; SEQ ID NO: 152; SEQ ID NO: 153; SEQ ID NO: 154; SEQ ID NO: 155; SEQ ID NO: 156; SEQ ID NO: 157; SEQ ID NO: 158; SEQ ID NO: 159; SEQ ID NO: 160; SEQ ID NO: 161; SEQ ID NO: 162; SEQ ID NO: 163; SEQ ID NO: 164; SEQ ID NO: 165; SEQ ID NO: 166; SEQ ID NO: 167; SEQ ID NO: 168; SEQ ID NO: 169; SEQ ID NO: 170; SEQ ID NO: 171; SEQ ID NO: 172; SEQ ID NO: 173; SEQ ID NO: 174; SEQ ID NO: 175; SEQ ID NO: 176; SEQ ID NO: 177; SEQ ID NO: 178; SEQ ID NO: 179; SEQ ID NO: 180; SEQ ID NO: 181; SEQ ID NO: 182; SEQ ID NO: 183; SEQ ID NO: 184; SEQ ID NO: 185; SEQ ID NO: 186; SEQ ID NO: 187, SEQ ID NO: 188; SEQ ID NO: 189; SEQ ID NO: 190; SEQ ID NO: 191; SEQ ID NO: 192; SEQ ID NO: 193; SEQ ID NO: 194; SEQ ID NO: 195; SEQ ID NO: 196; SEQ ID NO: 197; SEQ ID NO: 198; SEQ ID NO: 199; SEQ ID NO: 200; SEQ ID NO: 201; SEQ ID NO: 202; SEQ ID NO: 203; SEQ ID NO: 204; SEQ ID NO: 205; SEQ ID NO: 206; SEQ ID NO: 207; SEQ ID NO: 208; SEQ ID NO: 209; SEQ ID NO: 210; SEQ ID NO: 211; SEQ ID NO: 212; SEQ ID NO: 213; SEQ ID NO: 214; SEQ ID NO: 215; SEQ ID NO: 216; SEQ ID NO: 217; SEQ ID NO: 218; SEQ ID NO: 219; SEQ ID NO: 220; SEQ ID NO: 221; SEQ ID NO: 222; SEQ ID NO: 223; SEQ ID NO: 224; SEQ ID NO: 225; SEQ ID NO: 226; SEQ ID NO: 227; SEQ ID NO: 228; SEQ ID NO: 229; SEQ ID NO: 230; SEQ ID NO: 231; SEQ ID NO: 232; SEQ ID NO: 233; SEQ ID NO: 234; SEQ ID NO: 235; SEQ ID NO: 236; SEQ ID NO: 237; SEQ ID NO: 238; SEQ ID NO: 239; SEQ ID NO: 240; SEQ ID NO: 241; SEQ ID NO: 242; SEQ ID NO: 243; SEQ ID NO: 244; SEQ ID NO: 245; SEQ ID NO: 246; SEQ ID NO: 247; SEQ ID NO: 248; SEQ ID NO: 249; SEQ ID NO: 250; SEQ ID NO: 251; SEQ ID NO: 252; SEQ ID NO: 253; SEQ ID NO: 254; SEQ ID NO: 255; SEQ ID NO: 256; SEQ ID NO: 257; SEQ ID NO: 258; SEQ ID NO: 259; SEQ ID NO: 260; SEQ ID NO: 261; SEQ ID NO: 262; SEQ ID NO: 263; SEQ ID NO: 264; SEQ ID NO: 265; SEQ ID NO: 266; SEQ ID NO: 267; SEQ ID NO: 268; SEQ ID NO: 269; SEQ ID NO: 270; SEQ ID NO: 271; SEQ ID NO: 272; SEQ ID NO: 273; SEQ ID NO: 274; SEQ ID NO: 275; SEQ ID NO: 276; SEQ ID NO: 277; SEQ ID NO: 278; SEQ ID NO: 279; SEQ ID NO: 280; SEQ ID NO: 281; SEQ ID NO: 282; SEQ ID NO: 283; SEQ ID NO: 284; SEQ ID NO: 285; SEQ ID NO: 286; SEQ ID NO: 287; SEQ ID NO: 288; SEQ ID NO: 289; SEQ ID NO: 290; SEQ ID NO: 291; SEQ ID NO: 292; SEQ ID NO: 293; SEQ ID NO: 294; SEQ ID NO: 295; SEQ ID NO: 296; SEQ ID NO: 297; SEQ ID NO: 298; SEQ ID NO: 299; SEQ ID NO: 300; SEQ ID NO: 301; SEQ ID NO: 302; SEQ ID NO: 303; SEQ ID NO: 304; SEQ ID NO: 305; SEQ ID NO: 306; SEQ ID NO: 307; SEQ ID NO: 308; SEQ ID NO: 309; SEQ ID NO: 310; SEQ ID NO: 311; SEQ ID NO: 312; SEQ ID NO: 313; SEQ ID NO: 314; SEQ ID NO: 315; SEQ ID NO: 316; SEQ ID NO: 317; SEQ ID NO: 318; SEQ ID NO: 319; SEQ ID NO: 320; SEQ ID NO: 321; SEQ ID NO: 322; SEQ ID NO: 323; SEQ ID NO: 324; SEQ ID NO: 325; SEQ ID NO: 326; SEQ ID NO: 327; SEQ ID NO: 328; SEQ ID NO: 329; SEQ ID NO: 330; SEQ ID NO: 331; SEQ ID NO: 332; SEQ ID NO: 333; SEQ ID NO: 334; SEQ ID NO: 335; SEQ ID NO: 336; SEQ ID NO: 337; SEQ ID NO: 338; SEQ ID NO: 339; SEQ ID NO: 340; SEQ ID NO: 341; SEQ ID NO: 342; SEQ ID NO: 343; SEQ ID NO: 344; SEQ ID NO: 345; SEQ ID NO: 346; SEQ ID NO: 347; SEQ ID NO: 348; SEQ ID NO: 349; SEQ ID NO: 350; SEQ ID NO: 351; SEQ ID NO: 352; SEQ ID NO: 353; SEQ ID NO: 354; SEQ ID NO: 355; SEQ ID NO: 356; SEQ ID NO: 357; SEQ ID NO: 358; SEQ ID NO: 359; SEQ ID NO: 360; SEQ ID NO: 361; SEQ ID NO: 362; SEQ ID ND. 363; SEQ ID NO: 364; SEQ ID NO: 365; SEQ ID NO: 366; SEQ ID NO: 367; SEQ ID NO: 368; SEQ ID NO: 369; SEQ ID NO: 370; SEQ ID NO: 371; SEQ ID NO: 372; SEQ ID NO: 373; SEQ ID NO: 374; SEQ ID NO: 375; SEQ ID NO: 376; SEQ ID NO: 377; SEQ ID NO: 378; SEQ ID NO: 379; SEQ ID NO: 380; SEQ ID NO: 381; SEQ ID NO: 382; SEQ ID NO: 383; SEQ ID NO: 384; SEQ ID NO: 385; SEQ ID NO: 386; SEQ ID NO: 387; SEQ ID NO: 388; SEQ ID NO: 389; SEQ ID NO: 390; SEQ ID NO: 391; SEQ ID NO: 392; SEQ ID NO: 393; SEQ ID NO: 394; SEQ ID NO: 395; SEQ ID NO: 396; SEQ ID NO: 397; SEQ ID NO: 398; SEQ ID NO: 399; SEQ ID NO: 400; SEQ ID NO: 401; SEQ ID NO: 402; SEQ ID NO: 403; SEQ ID NO: 404; SEQ ID NO: 405; SEQ ID NO: 406; SEQ ID NO: 407; SEQ ID NO: 408; SEQ ID NO: 409; SEQ ID NO: 410; SEQ ID NO: 411; SEQ ID NO: 412; SEQ ID NO: 413; SEQ ID NO: 414; SEQ ID NO: 415; SEQ ID NO: 416; SEQ ID NO: 417; SEQ ID NO: 418; SEQ ID NO: 419; SEQ ID NO: 420; SEQ ID NO: 421; SEQ ID NO: 422; SEQ ID NO: 423; SEQ ID NO: 424; SEQ ID NO: 425; SEQ ID NO: 426; SEQ ID NO: 427; SEQ ID NO: 428; SEQ ID NO: 429; SEQ ID NO: 430; SEQ ID NO: 431; SEQ ID NO: 432; SEQ ID NO: 433; SEQ ID NO: 434; SEQ ID NO: 435; SEQ ID NO: 436; SEQ ID NO: 437; SEQ ID NO: 438; SEQ ID NO: 439; SEQ ID NO: 440; SEQ ID NO: 441; SEQ ID NO: 442; SEQ ID NO: 443; SEQ ID NO: 444; SEQ ID NO: 445; SEQ ID NO: 446; SEQ ID NO: 447; SEQ ID NO: 448; SEQ ID NO: 449; SEQ ID NO: 450; SEQ ID NO: 451; SEQ ID NO: 452; SEQ ID NO: 453; SEQ ID NO: 454; SEQ ID NO: 455; SEQ ID NO: 456; SEQ ID NO: 457; SEQ ID NO: 458; SEQ ID NO: 459; SEQ ID NO: 460; SEQ ID NO: 461; SEQ ID NO: 462; SEQ ID NO: 463; SEQ ID NO: 464; SEQ ID NO: 465; SEQ ID NO: 466; SEQ ID NO: 467; SEQ ID NO: 468; SEQ ID NO: 469; SEQ ID NO: 470; SEQ ID NO: 471; SEQ ID NO: 472; SEQ ID NO: 473; SEQ ID NO: 474; SEQ ID NO: 475; SEQ ID NO: 476; SEQ ID NO: 477; SEQ ID NO: 478; SEQ ID NO: 479; SEQ ID NO: 480; SEQ ID NO: 481; SEQ ID NO: 482; SEQ ID NO: 483; SEQ ID NO: 484; SEQ ID NO: 485; SEQ ID NO: 486; SEQ ID NO: 487; SEQ ID NO: 488; SEQ ID NO: 489; SEQ ID NO: 490; SEQ ID NO: 491; SEQ ID NO: 492; SEQ ID NO: 493; SEQ ID NO: 494; SEQ ID NO: 495; SEQ ID NO: 496; SEQ ID NO: 497; SEQ ID NO: 498; SEQ ID NO: 499; SEQ ID NO: 500; SEQ ID NO: 501; SEQ ID NO: 502; SEQ ID NO: 503; SEQ ID NO: 504; SEQ ID NO: 505; SEQ ID NO: 506; SEQ ID NO: 507; SEQ ID NO: 508; SEQ ID NO: 509; SEQ ID NO: 510; and SEQ ID NO: 9528; SEQ ID NO: 9529; SEQ ID NO: 9530; SEQ ID NO: 9531; SEQ ID NO: 9532; SEQ ID NO: 9533; SEQ ID NO: 9534; SEQ ID NO: 9535; SEQ ID NO: 9536, or a complement thereof.

[0058] In another embodiment, the H. pylori outer membrane polypeptide or a fragment thereof is an H. pylori polypeptide having a terminal phenylalanine residue or a fragment thereof encoded by a nucleic acid having a nucleotide sequence selected from the group consisting of SEQ ID NO: 104; SEQ ID NO: 105; SEQ ID NO: 106; SEQ ID NO: 107; SEQ ID NO: 108; SEQ ID NO: 109; SEQ ID NO: 110; SEQ ID NO: 111; SEQ ID NO: 112; SEQ ID NO: 113; SEQ ID NO: 114; SEQ ID NO: 115; SEQ ID NO: 116; SEQ ID NO: 117; SEQ ID NO: 118; SEQ ID NO: 119; SEQ ID NO: 120; SEQ ID NO: 121; SEQ ID NO: 122; SEQ ID NO: 123; SEQ ID NO: 124; SEQ ID NO: 125; SEQ ID NO: 126; SEQ ID NO: 127; SEQ ID NO: 128; SEQ ID NO: 129; SEQ ID NO: 130; SEQ ID NO: 131; SEQ ID NO: 132; SEQ ID NO: 133; SEQ ID NO: 134; SEQ ID NO: 135; SEQ ID NO: 136; SEQ ID NO: 137; SEQ ID NO: 138; SEQ ID NO: 139; SEQ ID NO: 140; SEQ ID NO: 141; SEQ ID NO: 142; SEQ ID NO: 143; SEQ ID NO: 144; SEQ ID NO: 145; SEQ ID NO: 146; SEQ ID NO: 147; SEQ ID NO: 148; SEQ ID NO: 149; SEQ ID NO: 150; SEQ ID NO: 151; SEQ ID NO: 152; SEQ ID NO: 153; SEQ ID NO: 154; SEQ ID NO: 155; SEQ ID NO: 156; SEQ ID NO: 157; SEQ ID NO: 158; SEQ ID NO: 159; SEQ ID NO: 160; SEQ ID NO: 161; SEQ ID NO: 162; SEQ ID NO: 163; SEQ ID NO: 164; SEQ ID NO: 165; SEQ ID NO: 166; SEQ ID NO: 167; SEQ ID NO: 168; SEQ ID NO: 169; SEQ ID NO: 170; SEQ ID NO: 171; SEQ ID NO: 172; SEQ ID NO: 173; SEQ ID NO: 174; SEQ ID NO: 175; SEQ ID NO: 176; SEQ ID NO: 177; SEQ ID NO: 178; SEQ ID NO: 179; SEQ ID NO: 180; SEQ ID NO: 181; SEQ ID NO: 182; SEQ ID NO: 183; SEQ ID NO: 184; SEQ ID NO: 185; SEQ ID NO: 186; SEQ ID NO: 187; SEQ ID NO: 188; SEQ ID NO: 189; SEQ ID NO: 190; SEQ ID NO: 191; SEQ ID NO: 192; SEQ ID NO: 193; SEQ ID NO: 194; SEQ ID NO: 195; SEQ ID NO: 196; SEQ ID NO: 197; SEQ ID NO: 198; SEQ ID NO: 199; SEQ ID NO: 200; SEQ ID NO: 201; SEQ ID NO: 202; SEQ ID NO: 203; SEQ ID NO: 204; SEQ ID NO: 205; SEQ ID NO: 206; SEQ ID NO: 207; SEQ ID NO: 208; SEQ ID NO: 209; SEQ ID NO: 210; SEQ ID NO: 211; SEQ ID NO: 212; SEQ ID NO: 213; SEQ ID NO: 214; SEQ ID NO: 215; SEQ ID NO: 216; SEQ ID NO: 217; SEQ ID NO: 218; SEQ ID NO: 219; SEQ ID NO: 220; SEQ ID NO: 221; SEQ ID NO: 222; SEQ ID NO: 223; SEQ ID NO: 224; SEQ ID NO: 225; SEQ ID NO: 226; SEQ ID NO: 227; SEQ ID NO: 228; SEQ ID NO: 229; SEQ ID NO: 230; SEQ ID NO: 231; SEQ ID NO: 232; SEQ ID NO: 233; SEQ ID NO: 234; SEQ ID NO: 235; SEQ ID NO: 236; SEQ ID NO: 237; SEQ ID NO: 238; SEQ ID NO: 239; SEQ ID NO: 240; SEQ ID NO: 241; SEQ ID NO: 242; SEQ ID NO: 243; SEQ ID NO: 244; SEQ ID NO: 245; SEQ ID NO: 246; SEQ ID NO: 247; SEQ ID NO: 248; SEQ ID NO: 249; SEQ ID NO: 250; SEQ ID NO: 251; SEQ ID NO: 252; SEQ ID NO: 253; SEQ ID NO: 254; SEQ ID NO: 255; SEQ ID NO: 256; SEQ ID NO: 257; SEQ ID NO: 258; SEQ ID NO: 259; SEQ ID NO: 260; SEQ ID NO: 261; SEQ ID NO: 262; SEQ ID NO: 263; SEQ ID NO: 264; SEQ ID NO: 265; SEQ ID NO: 266; SEQ ID NO: 267; SEQ ID NO: 268; SEQ ID NO: 269; SEQ ID NO: 270; SEQ ID NO: 271; SEQ ID NO: 272; SEQ ID NO: 273; SEQ ID NO: 274; SEQ ID NO: 275; SEQ ID NO: 276; SEQ ID NO: 277; SEQ ID NO: 278; SEQ ID NO: 279; SEQ ID NO: 280; SEQ ID NO: 281; SEQ ID NO: 282; SEQ ID NO: 283; SEQ ID NO: 284; SEQ ID NO: 285; SEQ ID NO: 286; SEQ ID NO: 287; SEQ ID NO: 288; SEQ ID NO: 289; SEQ ID NO: 290; SEQ ID NO: 291; SEQ ID NO: 292; SEQ ID NO: 293; SEQ ID NO: 294; SEQ ID NO: 295; SEQ ID NO: 296; SEQ ID NO: 297; SEQ ID NO: 298; SEQ ID NO: 299; SEQ ID NO: 300; SEQ ID NO: 301; SEQ ID NO: 302; SEQ ID NO: 303; SEQ ID NO: 304; SEQ ID NO: 305; SEQ ID NO: 306; SEQ ID NO: 307; SEQ ID NO: 308; SEQ ID NO: 309; SEQ ID NO: 310; SEQ ID NO: 311; SEQ ID NO: 312; SEQ ID NO: 313; SEQ ID NO:314; SEQ ID NO:315; SEQ ID NO:316; SEQ ID NO: 317; SEQ ID NO: 318; SEQ ID NO: 319; SEQ ID NO: 320; SEQ ID NO: 321; SEQ ID NO: 322; SEQ ID NO: 323; SEQ ID NO: 324; SEQ ID NO: 325; SEQ ID NO: 326; SEQ ID NO: 327; SEQ ID NO: 328; SEQ ID NO: 329; SEQ ID NO: 330; SEQ ID NO: 331; SEQ ID NO: 332; SEQ ID NO: 333; SEQ ID NO: 342; SEQ ID NO: 343; SEQ ID NO: 344; SEQ ID NO: 345; SEQ ID NO: 346; SEQ ID NO: 347; SEQ ID NO: 348; SEQ ID NO: 349; SEQ ID NO: 350; SEQ ID NO: 351; SEQ ID NO: 352; SEQ ID NO: 353; SEQ ID NO: 354; SEQ ID NO: 355; SEQ ID NO: 356; SEQ ID NO: 357; SEQ ID NO: 358; SEQ ID NO: 359; SEQ ID NO: 360; SEQ ID NO: 361; SEQ ID NO: 362; SEQ ID NO: 369; SEQ ID NO: 370; SEQ ID NO: 371; SEQ ID NO: 372; SEQ ID NO: 373; SEQ ID NO: 374; SEQ ID NO: 375; SEQ ID NO: 376; SEQ ID NO: 377; SEQ ID NO: 378; SEQ ID NO: 379; SEQ ID NO: 380; SEQ ID NO: 381; SEQ ID NO: 382; SEQ ID NO: 383; SEQ ID NO: 384; SEQ ID NO: 385; SEQ ID NO: 386; SEQ ID NO: 387; SEQ ID NO: 388; SEQ ID NO: 389; SEQ ID NO: 390; SEQ ID NO: 391; SEQ ID NO: 392; SEQ ID NO: 393; SEQ ID NO: 394; SEQ ID NO: 395; SEQ ID NO: 396; SEQ ID NO: 397; SEQ ID NO: 9528; SEQ ID NO: 9529; SEQ ID NO: 9530; SEQ ID NO: 9531; SEQ ID NO: 9532; SEQ ID NO: 9533; SEQ ID NO: 9534; SEQ ID NO: 9535, and SEQ ID NO: 9636 or a complement thereof.

[0059] In another embodiment, the H. pylori outer membrane polypeptide or a fragment thereof is an H. pylori polypeptide having a terminal phenylalanine residue and a C-terminal tyrosine cluster or a fragment thereof encoded by a nucleic acid having a nucleotide sequence selected from the group consisting of SEQ ID NO: 326; SEQ ID NO: 327; SEQ ID NO: 328; SEQ ID NO: 329; SEQ ID NO: 330; SEQ ID NO: 331; SEQ ID NO: 332; SEQ ID NO: 333; SEQ ID NO: 342; SEQ ID NO: 343; SEQ ID NO: 344; SEQ ID NO: 345; SEQ ID NO: 346; SEQ ID NO: 347; SEQ ID NO: 348; SEQ ID NO: 349; SEQ ID NO: 350; SEQ ID NO: 351; SEQ ID NO: 352; SEQ ID NO: 353; SEQ ID NO: 354; SEQ ID NO: 355; SEQ ID NO: 356; SEQ ID NO: 357; SEQ ID NO: 358; SEQ ID NO: 359; SEQ ID NO: 360; SEQ ID NO: 361; SEQ ID NO: 362; SEQ ID NO: 369; SEQ ID NO: 370; SEQ ID NO: 371; SEQ ID NO: 372; SEQ ID NO: 373; SEQ ID NO: 374; SEQ ID NO: 375; SEQ ID NO: 376; SEQ ID NO: 377; SEQ ID NO: 378; SEQ ID NO: 379; SEQ ID NO: 380; SEQ ID NO: 381; SEQ ID NO: 382; SEQ ID NO: 383; SEQ ID NO: 384; SEQ ID NO: 385; SEQ ID NO: 386; SEQ ID NO: 387; SEQ ID NO: 388; SEQ ID NO: 389; SEQ ID NO: 390; SEQ ID NO: 391; SEQ ID NO: 392; SEQ ID NO: 393; SEQ ID NO: 394; SEQ ID NO: 395; SEQ ID NO: 396; SEQ ID NO: 397 and SEQ ID NO: 9536, or a complement thereof.

[0060] In another embodiment, the H. pylori outer membrane polypeptide or a fragment thereof is an H. pylori polypeptide having a terminal tyrosine cluster motif or a fragment thereof encoded by a nucleic acid having a nucleotide sequence selected from the group consisting of SEQ ID NO: 326; SEQ ID NO: 327; SEQ ID NO: 328; SEQ ID NO: 329; SEQ ID NO: 330; SEQ ID NO: 331; SEQ ID NO: 332; SEQ ID NO: 333; SEQ ID NO: 334; SEQ ID NO: 335; SEQ ID NO: 336; SEQ ID NO: 337; SEQ ID NO: 338; SEQ ID NO: 339; SEQ ID NO: 340; SEQ ID NO: 341; SEQ ID NO: 342; SEQ ID NO: 343; SEQ ID NO: 344; SEQ ID NO: 345; SEQ ID NO: 346; SEQ ID NO: 347; SEQ ID NO: 348; SEQ ID NO: 349; SEQ ID NO: 350; SEQ ID NO: 351; SEQ ID NO: 352; SEQ ID NO: 353; SEQ ID NO: 354; SEQ ID NO: 355; SEQ ID NO: 356; SEQ ID NO: 357; SEQ ID NO: 358; SEQ ID NO: 359; SEQ ID NO: 360; SEQ ID NO: 361; SEQ ID NO: 362; SEQ ID NO: 363; SEQ ID NO: 364; SEQ ID NO: 365; SEQ ID NO: 366; SEQ ID NO: 367; SEQ ID NO: 368; SEQ ID NO: 369; SEQ ID NO: 370; SEQ ID NO: 371; SEQ ID NO: 372; SEQ ID NO: 373; SEQ ID NO: 374; SEQ ID NO: 375; SEQ ID NO: 376; SEQ ID NO: 377; SEQ ID NO: 378; SEQ ID NO: 379; SEQ ID NO: 380; SEQ ID NO: 381; SEQ ID NO: 382; SEQ ID NO: 383; SEQ ID NO: 384; SEQ ID NO: 385; SEQ ID NO: 386; SEQ ID NO: 387; SEQ ID NO: 388; SEQ ID NO: 389; SEQ ID NO: 390; SEQ ID NO: 391; SEQ ID NO: 392; SEQ ID NO: 393; SEQ ID NO: 394; SEQ ID NO: 395; SEQ ID NO: 396; SEQ ID NO: 397; SEQ ID NO: 398; SEQ ID NO: 399; SEQ ID NO: 400; SEQ ID NO: 401; SEQ ID NO: 402; SEQ ID NO: 403; SEQ ID NO: 404; SEQ ID NO: 405; SEQ ID NO: 406; SEQ ID NO: 407; SEQ ID NO: 408; SEQ ID NO: 409; SEQ ID NO:410; SEQ ID NO:411; SEQ ID NO:412; SEQ ID NO: 413; SEQ ID NO: 414; SEQ ID NO: 415; SEQ ID NO: 416; SEQ ID NO: 398; SEQ ID NO: 399; SEQ ID NO: 400; SEQ ID NO: 401; SEQ ID NO: 402; SEQ ID NO: 403; SEQ ID NO: 404; SEQ ID NO: 405; SEQ ID NO: 406; SEQ ID NO: 407; SEQ ID NO: 408; SEQ ID NO: 409; SEQ ID NO: 410; SEQ ID NO: 411; SEQ ID NO: 412; SEQ ID NO: 413; SEQ ID NO: 414; SEQ ID NO: 415; SEQ ID NO: 416; SEQ ID NO: 424; SEQ ID NO: 425 and SEQ ID NO: 9536, or a complement thereof.

[0061] In another embodiment, the H. pylori cell envelope polypeptide or a fragment thereof is an H. pylori inner membrane polypeptide or a fragment thereof encoded by a nucleic acid having a nucleotide sequence selected from the group consisting of SEQ ID NO: 511; SEQ ID NO: 512; SEQ ID NO: 513; SEQ ID NO: 514; SEQ ID NO: 515; SEQ ID NO: 516; SEQ ID NO: 517; SEQ ID NO: 518; SEQ ID NO: 519; SEQ ID NO: 520; SEQ ID NO: 521; SEQ ID NO: 522; SEQ ID NO: 523; SEQ ID NO: 524; SEQ ID NO: 525; SEQ ID NO: 526; SEQ ID NO: 527; SEQ ID NO: 528; SEQ ID NO: 529; SEQ ID NO: 530; SEQ ID NO: 531; SEQ ID NO: 532; SEQ ID NO: 533; SEQ ID NO: 534; SEQ ID NO: 535; SEQ ID NO: 536; SEQ ID NO: 537; SEQ ID NO: 538; SEQ ID NO: 539; SEQ ID NO: 540; SEQ ID NO: 541; SEQ ID NO: 542; SEQ ID NO: 543; SEQ ID NO: 544; SEQ ID NO: 545; SEQ ID NO: 546; SEQ ID NO: 547; SEQ ID NO: 548; SEQ ID NO: 549; SEQ ID NO: 550; SEQ ID NO: 551; SEQ ID NO: 552; SEQ ID NO: 553; SEQ ID NO: 554; SEQ ID NO: 555; SEQ ID NO: 556; SEQ ID NO: 557; SEQ ID NO: 558; SEQ ID NO: 559; SEQ ID NO: 560; SEQ ID NO: 561; SEQ ID NO: 562; SEQ ID NO: 563; SEQ ID NO: 564; SEQ ID NO: 565; SEQ ID NO: 566; SEQ ID NO: 567; SEQ ID NO: 568; SEQ ID NO: 569; SEQ ID NO: 570; SEQ ID NO: 571; SEQ ID NO: 572; SEQ ID NO: 573; SEQ ID NO: 574; SEQ ID NO: 575; SEQ ID NO: 576; SEQ ID NO: 577; SEQ ID NO: 578; SEQ ID NO: 579; SEQ ID NO: 580; SEQ ID NO: 581; SEQ ID NO: 582; SEQ ID NO: 583; SEQ ID NO: 584; SEQ ID NO: 585; SEQ ID NO: 586; SEQ ID NO: 587; SEQ ID NO: 588; SEQ ID NO: 589; SEQ ID NO: 590; SEQ ID NO: 591; SEQ ID NO: 592; SEQ ID NO: 593; SEQ ID NO: 594; SEQ ID NO: 595; SEQ ID NO: 596; SEQ ID NO: 597; SEQ ID NO: 598; SEQ ID NO: 599; SEQ ID NO: 600; SEQ ID NO: 601; SEQ ID NO: 602; SEQ ID NO: 603; SEQ ID NO: 604; SEQ ID NO: 605; SEQ ID NO: 606; SEQ ID NO: 607; SEQ ID NO: 608; SEQ ID NO: 609; SEQ ID NO: 610; SEQ ID NO: 611; SEQ ID NO: 612; SEQ ID NO: 613; SEQ ID NO: 614; SEQ ID NO: 615; SEQ ID NO: 616; SEQ ID NO: 617; SEQ ID NO: 618; SEQ ID NO: 619; SEQ ID NO: 620; SEQ ID NO: 621; SEQ ID NO: 622; SEQ ID NO: 623; SEQ ID NO: 624; SEQ ID NO: 625; SEQ ID NO: 626; SEQ ID NO: 627; SEQ ID NO: 628; SEQ ID NO: 629; SEQ ID NO: 630; SEQ ID NO: 631; SEQ ID NO: 632; SEQ ID NO: 633; SEQ ID NO: 634; SEQ ID NO: 635; SEQ ID NO: 636; SEQ ID NO: 637; SEQ ID NO: 638; SEQ ID NO: 639; SEQ ID NO: 640; SEQ ID NO: 641; SEQ ID NO: 642; SEQ ID NO: 643; SEQ ID NO: 644; SEQ ID NO: 645; SEQ ID NO: 646; SEQ ID NO: 647; SEQ ID NO: 648; SEQ ID NO: 649; SEQ ID NO: 650; SEQ ID NO: 651; SEQ ID NO: 652; SEQ ID NO: 653; SEQ ID NO: 654; SEQ ID NO: 655; SEQ ID NO: 656; SEQ ID NO: 657; SEQ ID NO: 658; SEQ ID NO: 659; SEQ ID NO: 660; SEQ ID NO: 661; SEQ ID NO: 662; SEQ ID NO: 663; SEQ ID NO: 664; SEQ ID NO: 665; SEQ ID NO: 666; SEQ ID NO: 667; SEQ ID NO: 668; SEQ ID NO: 669; SEQ ID NO: 670; SEQ ID NO: 671; SEQ ID NO: 672; SEQ ID NO: 673; SEQ ID NO: 674; SEQ ID NO: 675; SEQ ID NO: 676; SEQ ID NO: 677; SEQ ID NO: 678; SEQ ID NO: 679; SEQ ID NO: 680; SEQ ID NO: 681; SEQ ID NO: 682; SEQ ID NO: 683; SEQ ID NO: 684; SEQ ID NO: 685; SEQ ID NO: 686; SEQ ID NO: 687; SEQ ID NO: 688; SEQ ID NO: 689; SEQ ID NO: 690; SEQ ID NO: 691; SEQ ID NO: 692; SEQ ID NO: 693; SEQ ID NO: 694; SEQ ID NO: 695; SEQ ID NO: 696; SEQ ID NO: 697; SEQ ID NO: 698; SEQ ID NO: 699; SEQ ID NO: 700; SEQ ID NO: 701; SEQ ID NO: 702; SEQ ID NO: 703; SEQ ID NO: 704; SEQ ID NO: 705; SEQ ID NO: 706; SEQ ID NO: 707; SEQ ID NO: 708; SEQ ID NO: 709; SEQ ID NO: 710; SEQ ID NO: 711; SEQ ID NO: 712; SEQ ID NO: 713; SEQ ID NO: 714; SEQ ID NO: 715; SEQ ID NO: 716; SEQ ID NO: 717; SEQ ID NO: 718; SEQ ID NO: 719; SEQ ID NO: 720; SEQ ID NO: 721; SEQ ID NO: 722; SEQ ID NO: 723; SEQ ID NO: 724; SEQ ID NO: 725; SEQ ID NO: 726; SEQ ID NO: 727; SEQ ID NO: 728; SEQ ID NO: 729; SEQ ID NO: 730; SEQ ID NO: 731; SEQ ID NO: 732; SEQ ID NO: 733; SEQ ID NO: 734; SEQ ID NO: 735; SEQ ID NO: 736; SEQ ID NO: 737; SEQ ID NO: 738; SEQ ID NO: 739; SEQ ID NO: 740; SEQ ID NO: 741; SEQ ID NO: 742; SEQ ID NO: 743; SEQ ID NO: 744; SEQ ID NO: 745; SEQ ID NO: 746; SEQ ID NO: 747; SEQ ID NO: 748; SEQ ID NO: 749; SEQ ID NO: 750; SEQ ID NO: 751; SEQ ID NO: 752; SEQ ID NO: 753; SEQ ID NO: 754; SEQ ID NO: 755; SEQ ID NO: 756; SEQ ID NO: 757; SEQ ID NO: 758; SEQ ID NO: 759; SEQ ID NO: 760; SEQ ID NO: 761; SEQ ID NO: 762; SEQ ID NO: 763; SEQ ID NO: 764; SEQ ID NO: 765; SEQ ID NO: 766; SEQ ID NO: 767; SEQ ID NO: 768; SEQ ID NO: 769; SEQ ID NO: 770; SEQ ID NO: 771; SEQ ID NO: 772; SEQ ID NO: 773; SEQ ID NO: 774; SEQ ID NO: 775; SEQ ID NO: 776; SEQ ID NO: 777; SEQ ID NO: 778; SEQ ID NO: 779; SEQ ID NO: 780; SEQ ID NO: 781; SEQ ID NO: 782; SEQ ID NO: 783; SEQ ID NO: 784; SEQ ID NO: 785; SEQ ID NO: 786; SEQ ID NO: 787; SEQ ID NO: 788; SEQ ID NO: 789; SEQ ID NO: 790; SEQ ID NO: 791; SEQ ID NO: 792; SEQ ID NO: 793; SEQ ID NO: 794; SEQ ID NO: 795; SEQ ID NO: 796; SEQ ID NO: 797; SEQ ID NO: 798; SEQ ID NO: 799; SEQ ID NO: 800; SEQ ID NO: 801; SEQ ID NO: 802; SEQ ID NO: 803; SEQ ID NO: 804; SEQ ID NO: 805; SEQ ID NO: 806; SEQ ID NO: 807; SEQ ID NO: 808; SEQ ID NO: 809; SEQ ID NO: 810; SEQ ID NO: 811; SEQ ID NO: 812; SEQ ID NO: 813; SEQ ID NO: 814; SEQ ID NO: 815; SEQ ID NO: 816; SEQ ID NO: 817; SEQ ID NO: 818; SEQ ID NO: 819; SEQ ID NO: 820; SEQ ID NO: 821; SEQ ID NO: 822; SEQ ID NO: 823; SEQ ID NO: 824; SEQ ID NO: 825; SEQ ID NO: 826; SEQ ID NO: 827; SEQ ID NO: 828; SEQ ID NO: 829; SEQ ID NO: 830; SEQ ID NO: 831; SEQ ID NO: 832; SEQ ID NO: 833; SEQ ID NO: 834; SEQ ID NO: 835; SEQ ID NO: 836; SEQ ID NO: 837; SEQ ID NO: 838; SEQ ID NO: 839; SEQ ID NO: 840; SEQ ID NO: 841; SEQ ID NO: 842; SEQ ID NO: 843; SEQ ID NO: 844; SEQ ID NO: 845; SEQ ID NO: 846; SEQ ID NO: 847; SEQ ID NO: 848; SEQ ID NO: 849; SEQ ID NO: 850; SEQ ID NO: 851; SEQ ID NO: 852; SEQ ID NO: 853; SEQ ID NO: 854; SEQ ID NO: 855; SEQ ID NO: 856; SEQ ID NO: 857; SEQ ID NO: 858; SEQ ID NO: 859; SEQ ID NO: 860; SEQ ID NO: 861; SEQ ID NO: 862; SEQ ID NO: 863; SEQ ID NO: 864; SEQ ID NO: 865; SEQ ID NO: 866; SEQ ID NO: 867; SEQ ID NO: 868; SEQ ID NO: 869; SEQ ID NO: 870; SEQ ID NO: 871; SEQ ID NO: 872; SEQ ID NO: 873; SEQ ID NO: 874; SEQ ID NO: 875; SEQ ID NO: 876; SEQ ID NO: 877; SEQ ID NO: 878; SEQ ID NO: 879; SEQ ID NO: 880; SEQ ID NO: 881; SEQ ID NO: 882; SEQ ID NO: 883; SEQ ID NO: 884; SEQ ID NO: 885; SEQ ID NO: 886; SEQ ID NO: 887; SEQ ID NO: 888; SEQ ID NO: 889; SEQ ID NO: 890; SEQ ID NO: 891; SEQ ID NO: 892; SEQ ID NO:893; SEQ ID NO: 894; SEQ ID NO: 895; SEQ ID NO: 896; SEQ ID NO: 897; SEQ ID NO: 898; SEQ ID NO: 899; SEQ ID NO: 900; SEQ ID NO: 901; SEQ ID NO: 902; SEQ ID NO: 903; SEQ ID NO: 904; SEQ ID NO: 905; SEQ ID NO: 906; SEQ ID NO: 907; SEQ ID NO: 908; SEQ ID NO: 909; SEQ ID NO: 910; SEQ ID NO: 911; SEQ ID NO: 912; SEQ ID NO: 913; SEQ ID NO: 914; SEQ ID NO: 915; SEQ ID NO: 916; SEQ ID NO: 917; SEQ ID NO: 918; SEQ ID NO: 919; SEQ ID NO: 920; SEQ ID NO: 921; SEQ ID NO: 922; SEQ ID NO: 923; SEQ ID NO: 924; SEQ ID NO: 925; SEQ ID NO: 926; SEQ ID NO: 927; SEQ ID NO: 928; SEQ ID NO: 929; SEQ ID NO: 930; SEQ ID NO: 931; SEQ ID NO: 932; SEQ ID NO: 933; SEQ ID NO: 934; SEQ ID NO: 935; SEQ ID NO: 936; SEQ ID NO: 937; SEQ ID NO: 938; SEQ ID NO: 939; SEQ ID NO: 940; SEQ ID NO: 941; SEQ ID NO: 942; SEQ ID NO: 943; SEQ ID NO: 944; SEQ ID NO: 945; SEQ ID NO: 946; SEQ ID NO: 947; SEQ ID NO: 948; SEQ ID NO: 949; SEQ ID NO: 950; SEQ ID NO: 951; SEQ ID NO: 952; SEQ ID NO: 953; SEQ ID NO: 954; SEQ ID NO: 955; SEQ ID NO: 956; SEQ ID NO: 957; SEQ ID NO: 958; SEQ ID NO: 959; SEQ ID NO: 960; SEQ ID NO: 961; SEQ ID NO: 962; SEQ ID NO: 963; SEQ ID NO: 964; SEQ ID NO: 965; SEQ ID NO: 966; SEQ ID NO: 967; SEQ ID NO: 968; SEQ ID NO: 969; SEQ ID NO: 970; SEQ ID NO: 971; SEQ ID NO: 972; SEQ ID NO: 973; SEQ ID NO: 974; SEQ ID NO: 975; SEQ ID NO: 976; SEQ ID NO: 977; SEQ ID NO: 978; SEQ ID NO: 979; SEQ ID NO: 980; SEQ ID NO: 981; SEQ ID NO: 982; SEQ ID NO: 983; SEQ ID NO: 984; SEQ ID NO: 985; SEQ ID NO: 986; SEQ ID NO: 987; SEQ ID NO: 988; SEQ ID NO: 989; SEQ ID NO: 990; SEQ ID NO: 991; SEQ ID NO: 992; SEQ ID NO: 993; SEQ ID NO: 994; SEQ ID NO: 995; SEQ ID NO: 996; SEQ ID NO: 997; SEQ ID NO: 998; SEQ ID NO: 999; SEQ ID NO: 1000; SEQ ID NO: 1001; SEQ ID NO: 1002; SEQ ID NO: 1003; SEQ ID NO: 1004; SEQ ID NO: 1005; SEQ ID NO: 1006; SEQ ID NO: 1007; SEQ ID NO: 1008; SEQ ID NO: 1009; SEQ ID NO: 1010; SEQ ID NO: 1011; SEQ ID NO: 1012; SEQ ID NO: 1013; SEQ ID NO: 1014; SEQ ID NO: 1015; SEQ ID NO: 1016; SEQ ID NO: 1017; SEQ ID NO: 1018; SEQ ID NO: 1019; SEQ ID NO: 1020; SEQ ID NO: 1021; SEQ ID NO: 1022; SEQ ID NO: 1023; SEQ ID NO: 1024; SEQ ID NO: 1025; SEQ ID NO: 1026; SEQ ID NO: 1027; SEQ ID NO: 1028; SEQ ID NO: 1029; SEQ ID NO: 1030; SEQ ID NO: 1031; SEQ ID NO: 1032; SEQ ID NO: 1033; SEQ ID NO: 1034; SEQ ID NO: 1035; SEQ ID NO: 1036; SEQ ID NO: 1037; SEQ ID NO: 1038; SEQ ID NO: 1039; SEQ ID NO: 1040; SEQ ID NO: 1041; SEQ ID NO: 1042; SEQ ID NO: 1043; SEQ ID NO: 1044; SEQ ID NO: 1045; SEQ ID NO: 1046; SEQ ID NO: 1047; SEQ ID NO: 1048; SEQ ID NO: 1049; SEQ ID NO: 1050; SEQ ID NO: 1051; SEQ ID NO: 1052; SEQ ID NO: 1053; SEQ ID NO: 1054; SEQ ID NO: 1055; SEQ ID ND 1056; SEQ ID NO: 1057; SEQ ID NO: 1058; SEQ ID NO: 1059; SEQ ID NO: 1060; SEQ ID NO: 1061; SEQ ID NO: 1062; SEQ ID NO: 1063; SEQ ID NO: 1064; SEQ ID NO: 1065; SEQ ID NO: 1066; SEQ ID NO: 1067; SEQ ID NO: 1068; SEQ ID NO: 1069; SEQ ID NO: 1070; SEQ ID NO: 1071; SEQ ID NO: 1072; SEQ ID NO: 1073; SEQ ID NO: 1074; SEQ ID NO: 1075; SEQ ID NO: 1076; SEQ ID NO: 1077; SEQ ID NO: 1078; SEQ ID NO: 1079; SEQ ID NO: 1080; SEQ ID NO: 1081; SEQ ID NO: 1082; SEQ ID NO: 1083; SEQ ID NO: 1084; SEQ ID NO: 1085; SEQ ID NO: 1086; SEQ ID NO: 1087; SEQ ID NO: 1088; SEQ ID NO: 1089; SEQ ID NO: 1090; SEQ ID NO: 1091; SEQ ID NO: 1092; SEQ ID NO: 1093; SEQ ID NO: 1094; SEQ ID NO: 1095; SEQ ID NO: 1096; SEQ ID NO: 1097; SEQ ID NO: 1098; SEQ ID NO: 1099; SEQ ID NO: 1100; SEQ ID NO: 1101; SEQ ID NO: 1102; SEQ ID NO: 1103; SEQ ID NO: 1104; SEQ ID NO: 1105; SEQ ID NO: 1106; SEQ ID NO: 1107; SEQ ID NO: 1108; SEQ ID NO: 1109; SEQ ID NO: 1110; SEQ ID NO: 1111; SEQ ID NO: 1112; SEQ ID NO: 1113; SEQ ID NO: 1114; SEQ ID NO: 1115; SEQ ID NO: 1116; SEQ ID NO: 1117; SEQ ID NO: 1118; SEQ ID NO: 1119; SEQ ID NO: 1120; SEQ ID NO: 1121; SEQ ID NO: 1122; SEQ ID NO: 1123; SEQ ID NO: 1124; SEQ ID NO: 1125; SEQ ID NO: 1126; SEQ ID NO: 1127; SEQ ID NO: 1128; SEQ ID NO: 1129; SEQ ID NO: 1130; SEQ ID NO: 1131; SEQ ID NO: 1132; SEQ ID NO: 1133; SEQ ID NO: 1134; SEQ ID NO: 1135; SEQ ID NO: 1136; SEQ ID NO: 1137; SEQ ID NO: 1138; SEQ ID NO: 1139; SEQ ID NO: 1140; SEQ ID NO: 1141; SEQ ID NO: 1142; SEQ ID NO: 1143; SEQ ID NO: 1144; SEQ ID NO: 1145; SEQ ID NO: 1146; SEQ ID NO: 1147; SEQ ID NO: 1148; SEQ ID NO: 1149; SEQ ID NO: 1150; SEQ ID NO: 1151; SEQ ID NO: 1152; SEQ ID NO: 1153; SEQ ID NO: 1154; SEQ ID NO: 1155; SEQ ID NO: 1156; SEQ ID NO: 1157; SEQ ID NO: 1158; SEQ ID NO: 1159; SEQ ID NO: 1160; SEQ ID NO: 1161; SEQ ID NO: 1162; SEQ ID NO: 1163; SEQ ID NO: 1164; SEQ ID NO: 1165; SEQ ID NO: 1166; SEQ ID NO: 1167; SEQ ID NO: 1168; SEQ ID NO: 1169; SEQ ID NO: 1170; SEQ ID NO: 1171; SEQ ID NO: 1172; SEQ ID NO: 1173; SEQ ID NO: 1174; SEQ ID NO: 1175; SEQ ID NO: 1176; SEQ ID NO: 1177; SEQ ID NO: 1178; SEQ ID NO: 1179; SEQ ID NO: 1180; SEQ ID NO: 1181; SEQ ID NO: 1182; SEQ ID NO: 1183; SEQ ID NO: 1184; SEQ ID NO: 1185; SEQ ID NO: 1186; SEQ ID NO: 1187; SEQ ID NO: 1188; SEQ ID NO: 118Q9 SEQ ID NO: 1190; SEQ ID NO: 1191; SEQ ID NO: 1192; SEQ ID NO: 1193; SEQ ID NO: 1194; SEQ ID NO: 1195; SEQ ID NO: 1196; SEQ ID NO: 1197; SEQ ID NO: 1198; SEQ ID NO: 1199; SEQ ID NO: 1200; SEQ ID NO: 1201; SEQ ID NO: 1202; SEQ ID NO: 1203; SEQ ID NO: 1204; SEQ ID NO: 1205; SEQ ID NO: 1206; SEQ ID NO: 1207; SEQ ID NO: 1208; SEQ ID NO: 1209; SEQ ID NO: 1210; SEQ ID NO: ¹²¹I; SEQ ID NO: 1212; SEQ ID NO: 1213; SEQ ID NO: 1214; SEQ ID NO: 1215; SEQ ID NO: 1216; SEQ ID NO: 1217; SEQ ID NO: 1218; SEQ ID NO: 1219; SEQ ID NO: 1220; SEQ ID NO: 1221; SEQ ID NO: 1222; SEQ ID NO: 1223; SEQ ID NO: 1224; SEQ ID NO: 1225; SEQ ID NO: 1226; SEQ ID NO: 1227; SEQ ID NO: 1228; SEQ ID NO: 1229; SEQ ID NO: 1230; SEQ ID NO: 1231; SEQ ID NO: 1232; SEQ ID NO: 1233; SEQ ID NO: 1234; SEQ ID NO: 1235; SEQ ID NO: 1236; SEQ ID NO: 1237; SEQ ID NO: 1238; SEQ ID NO: 1239; SEQ ID NO: 1240; SEQ ID NO: 1241; SEQ ID NO: 1242; SEQ ID NO: 1243; SEQ ID NO: 1244; SEQ ID NO: 1245; SEQ ID NO: 1246; SEQ ID NO: 1247; SEQ ID NO: 1248; SEQ ID NO: 1249; SEQ ID NO: 1250; SEQ ID NO: 1251; SEQ ID NO: 1252; SEQ ID NO: 1253; SEQ ID NO: 1254; SEQ ID NO: 1255; SEQ ID NO: 1256; SEQ ID NO: 1257; SEQ ID NO: 1258; SEQ ID NO: 1259; SEQ ID NO: 1260; SEQ ID NO: 1261; SEQ ID NO: 1262; SEQ ID NO: 1263; SEQ ID NO: 1264; SEQ ID NO: 1265; SEQ ID NO: 1266; SEQ ID NO: 1267; SEQ ID NO: 1268; SEQ ID NO: 1269; SEQ ID NO: 1270; SEQ ID NO: 1271; SEQ ID NO: 1272; SEQ ID NO: 1273; SEQ ID NO: 1274; SEQ ID NO: 1275; SEQ ID NO: 1276; SEQ ID NO: 1277; SEQ ID NO: 1278; SEQ ID NO: 1279; SEQ ID NO: 1280; SEQ ID NO: 1281; SEQ ID NO: 1282; SEQ ID NO: 1283; SEQ ID NO: 1284; SEQ ID NO: 1285; SEQ ID NO: 1286; SEQ ID NO: 1287; SEQ ID NO: 1288; SEQ ID NO: 1289; SEQ ID NO: 1290; SEQ ID NO: 1291; SEQ ID NO: 1292; SEQ ID NO: 1293; SEQ ID NO: 1294; SEQ ID NO: 1295; SEQ ID NO: 1296; SEQ ID NO: 1297; SEQ ID NO: 1298; SEQ ID NO: 1299; SEQ ID NO: 1300; SEQ ID NO: 1301; SEQ ID NO: 1302; SEQ ID NO: 1303; SEQ ID NO: 1304; SEQ ID NO: 1305; SEQ ID NO: 1306; SEQ ID NO: 1307; SEQ ID NO: 1308; SEQ ID NO: 1309; SEQ ID NO: 1310; SEQ ID NO: ¹³¹I; SEQ ID NO: 1312; SEQ ID NO: 1313; SEQ ID NO: 1314; SEQ ID NO: 1315; SEQ ID NO: 1316; SEQ ID NO: 1317; SEQ ID NO: 1318; SEQ ID NO: 1319; SEQ ID NO: 1320; SEQ ID NO: 1321; SEQ ID NO: 1322; SEQ ID NO: 1323; SEQ ID NO: 1324; SEQ ID NO: 1325; SEQ ID NO: 1326; SEQ ID NO: 1327; SEQ ID NO: 1328; SEQ ID NO: 1329; SEQ ID NO: 1330; SEQ ID NO: 1331; SEQ ID NO: 1332; SEQ ID NO: 1333; SEQ ID NO: 1334; SEQ ID NO: 1335; SEQ ID NO: 1336; SEQ ID NO: 1337; SEQ ID NO: 1338; SEQ ID NO: 1339; SEQ ID NO: 1340; SEQ ID NO: 1341; SEQ ID NO: 1342; SEQ ID NO: 1343; SEQ ID NO: 1344; SEQ ID NO: 1345; SEQ ID NO: 1346; SEQ ID NO: 1347; SEQ ID NO: 1348; SEQ ID NO: 1349; SEQ ID NO: 1350; SEQ ID NO: ¹³⁵I; SEQ ID NO: 1352; SEQ ID NO: 1353; SEQ ID NO: 1354; SEQ ID NO: 1355; SEQ ID NO: 1356; SEQ ID NO: 1357; SEQ ID NO: 1358; SEQ ID NO: 1359; SEQ ID NO: 1360; SEQ ID NO: 1361; SEQ ID NO: 1362; SEQ ID NO: 1363; SEQ ID NO: 1364; SEQ ID NO: 1365; SEQ ID NO: 1366; SEQ ID NO: 1367; SEQ ID NO: 1368; SEQ ID NO: 1369; SEQ ID NO: 1370; SEQ ID NO: 1371; SEQ ID NO: 1372; SEQ ID NO: 1373; SEQ ID NO: 1374; SEQ ID NO: 1375; SEQ ID NO: 1376; SEQ ID NO: 1377; SEQ ID NO: 1378; SEQ ID NO: 1379; SEQ ID NO: 1380; SEQ ID NO: 1381; SEQ ID NO: 1382; SEQ ID NO: 1383; SEQ ID NO: 1384; SEQ ID NO: 1385; SEQ ID NO: 1386; SEQ ID NO: 1387; SEQ ID NO: 1388; SEQ ID NO: 1389; SEQ ID NO: 1390; SEQ ID NO: 1391; SEQ ID NO: 1392; SEQ ID NO: 1393; SEQ ID NO: 1394; SEQ ID NO: 1395; SEQ ID NO: 1396; SEQ ID NO: 1397; SEQ ID NO: 1398; SEQ ID NO: 1399; SEQ ID NO: 1400; SEQ ID NO: 1401; SEQ ID NO: 1402; SEQ ID NO: 1403; SEQ ID NO: 1404; SEQ ID NO: 1405; SEQ ID NO: 1406; SEQ ID NO: 1407; SEQ ID NO: 1408; SEQ ID NO: 1409; SEQ ID NO: 1410; SEQ ID NO: 1411; SEQ ID NO: 1412; SEQ ID NO: 1413; SEQ ID NO: 1414; SEQ ID NO: 1415; SEQ ID NO: 1416; SEQ ID NO: 1417; SEQ ID NO: 1418; SEQ ID NO: 1419; SEQ ID NO: 1420; SEQ ID NO: 1421; SEQ ID NO: 1422; SEQ ID NO: 1423; SEQ ID NO: 1424; SEQ ID NO: 1425; SEQ ID NO: 1426; SEQ ID NO: 1427; SEQ ID NO: 1428; SEQ ID NO: 1429; SEQ ID NO: 1430; SEQ ID NO: 1431; SEQ ID NO: 1432; SEQ ID NO: 1433; SEQ ID NO: 1434; SEQ ID NO: 1435; SEQ ID NO: 1436; SEQ ID NO: 1437; SEQ ID NO: 1438; SEQ ID NO: 1439; SEQ ID NO: 1440; SEQ ID NO: 1441; SEQ ID NO: 1442; SEQ ID NO: 1443; SEQ ID NO: 1444; SEQ ID NO: 1445; SEQ ID NO: 1446; SEQ ID NO: 1447; SEQ ID NO: 1448; SEQ ID NO: 1449; SEQ ID NO: 1450; SEQ ID NO: 1451; SEQ ID NO: 1452; SEQ ID NO: 1453; SEQ ID NO: 1454; SEQ ID NO: 1455; SEQ ID NO: 1456; SEQ ID NO: 1457; SEQ ID NO: 1458; SEQ ID NO: 1459; SEQ ID NO: 1460; SEQ ID NO: 1461; SEQ ID NO: 1462; SEQ ID NO: 1463; SEQ ID NO: 1464; SEQ ID NO: 1465; SEQ ID NO: 1466; SEQ ID NO: 1467; SEQ ID NO: 1468; SEQ ID NO: 1469; SEQ ID NO: 1470; SEQ ID NO: 1471; SEQ ID NO: 1472; SEQ ID NO: 1473; SEQ ID NO: 1474; SEQ ID NO: 1475; SEQ ID NO: 1476; SEQ ID NO: 1477; SEQ ID NO: 1478; SEQ ID NO: 1479; SEQ ID NO: 1480; SEQ ID NO: 1481; SEQ ID NO: 1482; SEQ ID NO: 1483; SEQ ID NO: 1484; SEQ ID NO: 1485; SEQ ID NO: 1486; SEQ ID NO: 1487; SEQ ID NO: 1488; SEQ ID NO: 1489; SEQ ID NO: 1490; SEQ ID NO: 1491; SEQ ID NO: 1492; SEQ ID NO: 1493; SEQ ID NO: 1494; SEQ ID NO: 1495; SEQ ID NO: 1496; SEQ ID NO: 1497; SEQ ID NO: 1498; SEQ ID NO: 1499; SEQ ID NO: 1500; SEQ ID NO: 1501; SEQ ID NO: 1502; SEQ ID NO: 1503; SEQ ID NO: 1504; SEQ ID NO: 1505; SEQ ID NO: 1506; SEQ ID NO: 1507; SEQ ID NO: 1508; SEQ ID NO: 1509; SEQ ID NO: 1510; SEQ ID NO: 1511; SEQ ID NO: 1512; SEQ ID NO: 1513; SEQ ID NO: 1514; and SEQ ID NO: 9537; SEQ ID NO: 9538; SEQ ID NO: 9539; SEQ ID NO: 9540; SEQ ID NO: 9541; SEQ ID NO: 9542; SEQ ID NO: 9543; SEQ ID NO: 9544; SEQ ID NO: 9545; SEQ ID NO: 9546; SEQ ID NO: 9547; SEQ ID NO: 9548; SEQ ID NO: 9549; SEQ ID NO: 9550; SEQ ID NO: 9551; SEQ ID NO: 9552; SEQ ID NO: 9553; SEQ ID NO: 9554; SEQ ID NO: 9555; SEQ ID NO: 9556; SEQ ID NO: 9557; SEQ ID NO: 9558; SEQ ID NO: 9559; SEQ ID NO: 9560; SEQ ID NO: 9561; SEQ ID NO: 9562; SEQ ID NO: 9563; SEQ ID NO: 9564; SEQ ID NO: 9565; SEQ ID NO: 9566; SEQ ID NO: 9567; SEQ ID NO: 9568; SEQ ID NO: 9569; SEQ ID NO: 9570; SEQ ID NO: 9571; SEQ ID NO: 9572; SEQ ID NO: 9573; SEQ ID NO: 9574; SEQ ID NO: 9575; SEQ ID NO: 9576; SEQ ID NO: 9577; SEQ ID NO: 9578; SEQ ID NO: 9579; SEQ ID NO: 9580; SEQ ID NO: 9581; SEQ ID NO: 9582; SEQ ID NO: 9583; SEQ ID NO: 9584; SEQ ID NO: 9585; SEQ ID NO: 9586; SEQ ID NO: 9587; SEQ ID NO: 9588; SEQ ID NO: 9589; SEQ ID NO: 9590; and SEQ ID NO: 9591, or a complement thereof.

[0062] In another embodiment, the H. pylori cell envelope polypeptide or a fragment thereof is an H. pylori inner membrane polypeptide or a fragment thereof involved in transport encoded by a nucleic acid having a nucleotide sequence selected from the group consisting of SEQ ID NO: 511; SEQ ID NO: 512; SEQ ID NO: 513; SEQ ID NO: 514; SEQ ID NO: 515; SEQ ID NO: 516; SEQ ID NO: 517; SEQ ID NO: 518; SEQ ID NO: 519; SEQ ID NO: 520; SEQ ID NO: 521; SEQ ID NO: 522; SEQ ID NO: 523; SEQ ID NO: 524; SEQ ID NO: 525; SEQ ID NO: 526; SEQ ID NO: 527; SEQ ID NO: 528; SEQ ID NO: 529; SEQ ID NO: 530; SEQ ID NO: 531; SEQ ID NO: 532; SEQ ID NO: 533; SEQ ID NO: 534; SEQ ID NO: 535; SEQ ID NO: 536; SEQ ID NO: 537; SEQ ID NO: 538; SEQ ID NO: 539; SEQ ID NO: 540; SEQ ID NO: 541; SEQ ID NO: 542; SEQ ID NO: 543; SEQ ID NO: 544; SEQ ID NO: 545; SEQ ID NO: 546; SEQ ID NO: 547; SEQ ID NO: 548; SEQ ID NO: 549; SEQ ID NO: 550, SEQ ID NO: 551; SEQ ID NO: 552; SEQ ID NO: 553; SEQ ID NO: 554; SEQ ID NO: 555; SEQ ID NO: 556; SEQ ID NO: 557; SEQ ID NO: 558; SEQ ID NO: 559; SEQ ID NO: 560; SEQ ID NO: 561; SEQ ID NO: 562; SEQ ID NO: 563; SEQ ID NO: 564; SEQ ID NO: 565; SEQ ID NO: 566; SEQ ID NO: 567; SEQ ID NO: 568; SEQ ID NO: 569; SEQ ID NO: 570; SEQ ID NO: 571; SEQ ID NO: 572; SEQ ID NO: 573; SEQ ID NO: 574; SEQ ID NO: 575; SEQ ID NO: 576; SEQ ID NO: 577; SEQ ID NO: 578; SEQ ID NO: 579; SEQ ID NO: 580; SEQ ID NO: 581; SEQ ID NO: 582; SEQ ID NO: 583; SEQ ID NO: 584; SEQ ID NO: 585; SEQ ID NO: 586; SEQ ID NO: 587; SEQ ID NO: 588; SEQ ID NO: 589; SEQ ID NO: 590; SEQ ID NO: 591; SEQ ID NO: 592; SEQ ID NO: 593; SEQ ID NO: 594; SEQ ID NO: 595; SEQ ID NO: 596; SEQ ID NO: 597; SEQ ID NO: 598; SEQ ID NO: 599; SEQ ID NO: 600; SEQ ID NO: 601; SEQ ID NO: 602; SEQ ID NO: 603; SEQ ID NO: 604; SEQ ID NO: 605; SEQ ID NO: 606; SEQ ID NO: 607; SEQ ID NO: 608; SEQ ID NO: 609; SEQ ID NO: 610; SEQ ID NO: 611; SEQ ID NO: 612; SEQ ID NO: 613; SEQ ID NO: 614; SEQ ID NO: 615; SEQ ID NO: 616; SEQ ID NO: 617; SEQ ID NO: 618; SEQ ID NO: 619; SEQ ID NO: 620; SEQ ID NO: 621; SEQ ID NO: 622; SEQ ID NO: 623; SEQ ID NO: 624; SEQ ID NO: 625; SEQ ID NO: 626; SEQ ID NO: 627; SEQ ID NO: 628; SEQ ID NO: 629; SEQ ID NO: 630; SEQ ID NO: 631; SEQ ID NO: 632; SEQ ID NO: 633; SEQ ID NO: 634; SEQ ID NO: 635; SEQ ID NO: 636; SEQ ID NO: 637; SEQ ID NO: 638; SEQ ID NO: 639; SEQ ID NO: 640; SEQ ID NO: 641; SEQ ID NO: 642; SEQ ID NO: 643; SEQ ID NO: 644; SEQ ID NO: 645; SEQ ID NO: 646; SEQ ID NO: 647; SEQ ID NO: 648; SEQ ID NO: 649; SEQ ID NO: 650; SEQ ID NO: 651; SEQ ID NO: 652; SEQ ID NO: 653; SEQ ID NO: 654; SEQ ID NO: 655; SEQ ID NO: 656; SEQ ID NO: 657; SEQ ID NO: 658; SEQ ID NO: 659; SEQ ID NO: 660; SEQ ID NO: 661; SEQ ID NO: 662; SEQ ID NO: 663; SEQ ID NO: 664; SEQ ID NO: 665; SEQ ID NO: 666; SEQ ID NO: 667; SEQ ID NO: 668; SEQ ID NO: 669; SEQ ID NO: 670; SEQ ID NO: 671; SEQ ID NO: 672; SEQ ID NO: 673; SEQ ID NO: 674; SEQ ID NO: 675; SEQ ID NO: 676; SEQ ID NO: 677; SEQ ID NO: 678; SEQ ID NO: 679; SEQ ID NO: 680; SEQ ID NO: 681; SEQ ID NO: 682; SEQ ID NO: 683; SEQ ID NO: 684; SEQ ID NO: 685; SEQ ID NO: 686; SEQ ID NO: 687; SEQ ID NO: 688; SEQ ID NO: 689; SEQ ID NO: 690; SEQ ID NO: 691; SEQ ID NO: 692; SEQ ID NO: 693; SEQ ID NO: 694; SEQ ID NO: 695; SEQ ID NO: 696; SEQ ID NO: 697; SEQ ID NO: 698; SEQ ID NO: 699; SEQ ID NO: 700; SEQ ID NO: 701; SEQ ID NO: 702; SEQ ID NO: 703; SEQ ID NO: 704; SEQ ID NO: 705; SEQ ID NO: 706; SEQ ID NO: 707; SEQ ID NO: 708; SEQ ID NO: 709; SEQ ID NO: 710; SEQ ID NO: 711; SEQ ID NO: 712; SEQ ID NO: 713; SEQ ID NO: 714; SEQ ID NO: 715; SEQ ID NO: 716; SEQ ID NO: 717; SEQ ID NO: 718; SEQ ID NO: 719; SEQ ID NO: 720; SEQ ID NO: 721; SEQ ID NO: 722; SEQ ID NO: 723; SEQ ID NO: 724; SEQ ID NO: 725; SEQ ID NO: 726; SEQ ID NO: 727; SEQ ID NO: 728; SEQ ID NO: 729; SEQ ID NO: 730; SEQ ID NO: 731; SEQ ID NO: 732; SEQ ID NO: 733; SEQ ID NO: 734; SEQ ID NO: 735; SEQ ID NO: 736; SEQ ID NO: 737; SEQ ID NO: 738; SEQ ID NO: 739; SEQ ID NO: 740; SEQ ID NO: 741; SEQ ID NO: 742; SEQ ID NO: 743; SEQ ID NO: 744; SEQ ID NO: 745; SEQ ID NO: 746; SEQ ID NO: 747; SEQ ID NO: 748; SEQ ID NO: 749; SEQ ID NO: 750; SEQ ID NO: 751; SEQ ID NO: 752; SEQ ID NO: 753; SEQ ID NO: 754; SEQ ID NO: 755; SEQ ID NO: 756; SEQ ID NO: 757; SEQ ID NO: 758; SEQ ID NO: 759; SEQ ID NO: 760; SEQ ID NO: 761; SEQ ID NO: 762; SEQ ID NO: 763; SEQ ID NO: 764; SEQ ID NO: 765; SEQ ID NO: 766; SEQ ID NO: 767; SEQ ID NO: 768; SEQ ID NO: 769; SEQ ID NO: 770; SEQ ID NO: 771; SEQ ID NO: 772; SEQ ID NO: 773; SEQ ID NO: 774; SEQ ID NO: 775; SEQ ID NO: 776; SEQ ID NO: 777; SEQ ID NO: 778; SEQ ID NO: 779; SEQ ID NO: 780; SEQ ID NO: 781; SEQ ID NO: 782; SEQ ID NO: 783; SEQ ID NO: 784; SEQ ID NO: 785; SEQ ID NO: 786; SEQ ID NO: 787; SEQ ID NO: 788; SEQ ID NO: 789; SEQ ID NO: 790; SEQ ID NO: 791; SEQ ID NO: 792; SEQ ID NO: 793; SEQ ID NO: 794; SEQ ID NO: 795; SEQ ID NO: 796; SEQ ID NO: 797; SEQ ID NO: 798; SEQ ID NO: 799; SEQ ID NO: 800; SEQ ID NO: 801; SEQ ID NO: 802; and SEQ ID NO: 9537; SEQ ID NO: 9538; SEQ ID NO: 9539; SEQ ID NO: 9540; SEQ ID NO: 9541; SEQ ID NO: 9542; SEQ ID NO: 9543; SEQ ID NO: 9544; SEQ ID NO: 9545; SEQ ID NO: 9546; SEQ ID NO: 9547; SEQ ID NO: 9548; SEQ ID NO: 9549; SEQ ID NO: 9550; SEQ ID NO: 9551; SEQ ID NO: 9552; SEQ ID NO: 9553; and SEQ ID NO: 9554, or a complement thereof.

[0063] In another embodiment, the H. pylori cell envelope polypeptide or a fragment thereof is an H. pylori inner membrane polypeptide or a fragment thereof involved in amino acid metabolism and transport encoded by a nucleic acid having a nucleotide sequence selected from the group consisting of SEQ ID NO: 683; SEQ ID NO: 684; SEQ ID NO: 685; SEQ ID NO: 686; SEQ ID NO: 687; SEQ ID NO: 688; SEQ ID NO: 689; SEQ ID NO: 690; SEQ ID NO: 691; SEQ ID NO: 692; SEQ ID NO: 693; SEQ ID NO: 694; SEQ ID NO: 695; SEQ ID NO: 696; SEQ ID NO: 697; SEQ ID NO: 698; SEQ ID NO: 699; SEQ ID NO: 700; SEQ ID NO: 701; SEQ ID NO: 702; SEQ ID NO: 703; SEQ ID NO: 704; SEQ ID NO: 705; SEQ ID NO: 706; SEQ ID NO: 707; SEQ ID NO: 708; SEQ ID NO: 709; SEQ ID NO: 710; SEQ ID NO: 711; SEQ ID NO: 712; SEQ ID NO: 713; SEQ ID NO: 714; SEQ ID NO: 715; SEQ ID NO: 716; SEQ ID NO: 717; SEQ ID NO: 718; SEQ ID NO: 719; SEQ ID NO: 720; and SEQ ID NO: 9547 and SEQ ID NO: 9548, or a complement thereof.

[0064] In another embodiment, the H. pylori cell envelope polypeptide or a fragment thereof is an H. pylori inner membrane polypeptide or a fragment thereof involved in nucleotide, lipid, or cofactor metabolism and transport encoded by a nucleic acid having a nucleotide sequence selected from the group consisting of SEQ ID NO: 721; SEQ ID NO: 722; SEQ ID NO: 723; SEQ ID NO: 724; SEQ ID NO: 725; SEQ ID NO: 726; SEQ ID NO: 727; SEQ ID NO: 728; SEQ ID NO: 729; SEQ ID NO: 730; SEQ ID NO: 731; SEQ ID NO: 732; SEQ ID NO: 733; SEQ ID NO: 734; SEQ ID NO: 735; SEQ ID NO: 736; SEQ ID NO: 737; SEQ ID NO: 738; SEQ ID NO: 739; SEQ ID NO: 740; SEQ ID NO: 741; SEQ ID NO: 742; SEQ ID NO: 743; SEQ ID NO: 744; SEQ ID NO: 745; SEQ ID NO: 746; SEQ ID NO: 747; SEQ ID NO: 748; SEQ ID NO: 749; SEQ ID NO: 750; SEQ ID NO: 751; SEQ ID NO: 752; SEQ ID NO: 753; SEQ ID NO: 754; SEQ ID NO: 755; SEQ ID NO: 756; SEQ ID NO: 757; SEQ ID NO: 758; SEQ ID NO: 759; SEQ ID NO: 760; SEQ ID NO: 761; SEQ ID NO: 762; SEQ ID NO: 763; SEQ ID NO: 764 and SEQ ID NO: 9549, or a complement thereof.

[0065] In another embodiment, the H. pylori cell envelope polypeptide or a fragment thereof is an H. pylori inner membrane polypeptide or a fragment thereof involved in inorganic ion transport encoded by a nucleic acid having a nucleotide sequence selected from the group consisting of SEQ ID NO: 765; SEQ ID NO: 766; SEQ ID NO: 767; SEQ ID NO: 768; SEQ ID NO: 769; SEQ ID NO: 770; SEQ ID NO: 771; SEQ ID NO: 772; SEQ ID NO: 773; SEQ ID NO: 774; SEQ ID NO: 775; SEQ ID NO: 776; SEQ ID NO: 777; SEQ ID NO: 778; SEQ ID NO: 779; SEQ ID NO: 780; SEQ ID NO: 781; SEQ ID NO: 782; SEQ ID NO: 783; SEQ ID NO: 784; SEQ ID NO: 785; SEQ ID NO: 786; SEQ ID NO: 787; SEQ ID NO: 788; SEQ ID NO: 789; SEQ ID NO: 790; SEQ ID NO: 791; SEQ ID NQ: 792; SEQ ID NO: 793; SEQ ID NO: 794; SEQ ID NO: 795; SEQ ID NO: 796; SEQ ID NO: 797; SEQ ID NO: 798; SEQ ID NO: 799; and SEQ ID NO: SEQ ID NO: 9550; SEQ ID NO: 9551; SEQ ID NO: 9552; SEQ ID NO: 9553 and SEQ ID NO: 9554, or a complement thereof.

[0066] In another embodiment, the H. pylori cell envelope polypeptide or a fragment thereof is an H. pylori inner membrane polypeptide or a fragment thereof involved in carbohydrate metabolism and transport encoded by a nucleic acid having a nucleotide sequence selected from the group consisting of SEQ ID NO: 800; SEQ ID NO: 801 and SEQ ID NO: 802, or a complement thereof.

[0067] In another embodiment, the H. pylori cell envelope polypeptide or a fragment thereof is an H. pylori inner membrane polypeptide or a fragment thereof involved in outer membrane and cell wall formation encoded by a nucleic acid having a nucleotide sequence selected from the group consisting of SEQ ID NO: 803; SEQ ID NO: 804; SEQ ID NO: 805; SEQ ID NO: 806; SEQ ID NO: 807; SEQ ID NO: 808; SEQ ID NO: 809; SEQ ID NO: 810; SEQ ID NO: 811; SEQ ID NO: 812; SEQ ID NO: 813; SEQ ID NO: 814; SEQ ID NO: 815; SEQ ID NO: 816; SEQ ID NO: 817; SEQ ID NO: 818; SEQ ID NO: 819; SEQ ID NO: 820; SEQ ID NO: 821; SEQ ID NO: 822; SEQ ID NO: 823; SEQ ID NO: 824; SEQ ID NO: 825; SEQ ID NO: 826; SEQ ID NO: 827; SEQ ID NO: 828; SEQ ID NO: 829; SEQ ID NO: 830; SEQ ID NO: 831; SEQ ID NO: 832; SEQ ID NO: 833; SEQ ID NO: 834; SEQ ID NO: 835; SEQ ID NO: 836; SEQ ID NO: 837; SEQ ID NO: 838; SEQ ID NO: 839; SEQ ID NO: 840; SEQ ID NO: 841; SEQ ID NO: 842; SEQ ID NO: 843; SEQ ID NO: 844; SEQ ID NO: 845; SEQ ID NO: 846; SEQ ID NO: 847; SEQ ID NO: 848; and SEQ ID NO: 9555; SEQ ID NO: 9556; SEQ ID NO: 9557; SEQ ID NO: 9558; SEQ ID NO: 9559 and SEQ ID NO: 9560, or a complement thereof.

[0068] In another embodiment, the H. pylori cell envelope polypeptide or a fragment thereof is an H. pylori inner membrane polypeptide or a fragment thereof involved in energy conversion encoded by a nucleic acid having a nucleotide sequence selected from the group consisting of SEQ ID NO: 849; SEQ ID NO: 850; SEQ ID NO: 851; SEQ ID NO:852; SEQ ID NO: 853; SEQ ID NO: 854; SEQ ID NO: 855; SEQ ID NO: 856; SEQ ID NO: 857; SEQ ID NO: 858; SEQ ID NO: 859; SEQ ID NO: 860; SEQ ID NO: 861; SEQ ID NO: 862; SEQ ID NO: 863; SEQ ID NO: 864; SEQ ID NO: 865; SEQ ID NO: 866; SEQ ID NO: 867; SEQ ID NO: 868; SEQ ID NO: 869; SEQ ID NO: 870; SEQ ID NO: 871; SEQ ID NO: 872; SEQ ID NO: 873; SEQ ID NO: 874; SEQ ID NO: 875; SEQ ID NO: 876; SEQ ID NO: 877; SEQ ID NO: 878; SEQ ID NO: 879; SEQ ID NO: 880; SEQ ID NO: 881; SEQ ID NO: 882; SEQ ID NO: 883; SEQ ID NO: 884; SEQ ID NO: 885; SEQ ID NO: 886; SEQ ID NO: 887; SEQ ID NO: 888; SEQ ID NO: 889; SEQ ID NO: 890; SEQ ID NO: 891; SEQ ID NO: 892; SEQ ID NO: 893; SEQ ID NO: 894; SEQ ID NO: 895; SEQ ID NO: 896; SEQ ID NO: 897; SEQ ID NO: 898; SEQ ID NO: 899; SEQ ID NO: 900; SEQ ID NO: 901; SEQ ID NO: 902; SEQ ID NO: 903; SEQ ID NO: 904; SEQ ID NO: 905; SEQ ID NO: 906; SEQ ID NO: 907; SEQ ID NO: 908; SEQ ID NO: 909; SEQ ID NO: 910; SEQ ID NO: 911; SEQ ID NO: 912; SEQ ID NO: 913; SEQ ID NO: 914; SEQ ID NO: 915; SEQ ID NO: 916; SEQ ID NO: 917; SEQ ID NO: 918; SEQ ID NO: 919; SEQ ID NO: 920; SEQ ID NO: 921; SEQ ID NO: 922; SEQ ID NO: 923; SEQ ID NO: 924; SEQ ID NO: 925; SEQ ID NO: 926; SEQ ID NO: 927; SEQ ID NO: 928; SEQ ID NO: 929; SEQ ID NO: 930; SEQ ID NO: 931; SEQ ID NO: 932; SEQ ID NO: 933; SEQ ID NO: 934; SEQ ID NO: 935; SEQ ID NO: 936; SEQ ID NO: 937; SEQ ID NO: 938; SEQ ID NO: 939; SEQ ID NO: 940; SEQ ID NO: 941; SEQ ID NO: 942; SEQ ID NO: 943; SEQ ID NO: 944; SEQ ID NO: 945; SEQ ID NO: 946; SEQ ID NO: 947; SEQ ID NO: 948; SEQ ID NO: 949; SEQ ID NO: 950; SEQ ID NO: 951; SEQ ID NO: 952; SEQ ID NO: 953; SEQ ID NO: 954; SEQ ID NO: 955; SEQ ID NO: 956; SEQ ID NO: 957; SEQ ID NO: 958; SEQ ID NO: 959; SEQ ID NO: 960; SEQ ID NO: 961; SEQ ID NO: 962; SEQ ID NO: 963; SEQ ID NO: 964; SEQ ID NO: 965; SEQ ID NO: 966; SEQ ID NO: 967; SEQ ID NO: 968; SEQ ID NO: 969; SEQ ID NO: 970; SEQ ID NO: 971; SEQ ID NO: 972; SEQ ID NO: 973; SEQ ID NO: 974; SEQ ID NO: 975; SEQ ID NO: 976; SEQ ID NO: 977; SEQ ID NO: 978; SEQ ID NO: 979; SEQ ID NO: 980; SEQ ID NO: 981; SEQ ID NO: 982; SEQ ID NO: 983; SEQ ID NO: 984; SEQ ID NO: 985; SEQ ID NO: 986; SEQ ID NO: 987; SEQ ID NO: 988; SEQ ID NO: 989; SEQ ID NO: 990; SEQ ID NO: 991; SEQ ID NO: 992; SEQ ID NO: 993; SEQ ID NO: 994; SEQ ID NO: 995 and SEQ ID NO: 9561; SEQ ID NO: 9562; SEQ ID NO: 9563; SEQ ID NO: 9564 and SEQ ID NO: 9565, or a complement thereof.

[0069] In another embodiment, the H. pylori cell envelope polypeptide or a fragment thereof is an H. pylori inner membrane polypeptide or a fragment thereof involved in secretion and adhesion encoded by a nucleic acid having a nucleotide sequence selected from the group consisting of SEQ ID NO: 996; SEQ ID NO: 997; SEQ ID NO: 998; SEQ ID NO: 999; SEQ ID NO: 1000; SEQ ID NO: 1001; SEQ ID NO: 1002; SEQ ID NO: 1003; SEQ ID NO: 1004; SEQ ID NO: 1005; SEQ ID NO: 1006; SEQ ID NO: 1007 and SEQ ID NO: 9566, or a complement thereof.

[0070] In another embodiment, the H. pylori cell envelope polypeptide or a fragment thereof is an H. pylori inner membrane polypeptide or a fragment thereof involved in regulation encoded by a nucleic acid having a nucleotide sequence selected from the group consisting of SEQ ID NO: 1008; SEQ ID NO: 1009; SEQ ID NO: 1010; SEQ ID NO: 1011; SEQ ID NO: 1012; SEQ ID NO: 1013; SEQ ID NO: 1014; SEQ ID NO: 1015; SEQ ID NO: 1016; SEQ ID NO: 1017; SEQ ID NO: 1018; SEQ ID NO: 1019; SEQ ID NO: 1020; SEQ ID NO: 1021; SEQ ID NO: 1022; SEQ ID NO: 1023; SEQ ID NO: 1024; SEQ ID NO: 1025; SEQ ID NO: 1026 and SEQ ID NO: 1027, or a complement thereof.

[0071] In another embodiment, the H. pylori cell envelope polypeptide or a fragment thereof is an H. pylori inner membrane chaperone polypeptide or a fragment thereof encoded by a nucleic acid having a nucleotide sequence selected from the group consisting of SEQ ID NO: 1028; SEQ ID NO: 1029; SEQ ID NO: 1030; SEQ ID NO: 1031 and SEQ ID NO: 9567, or a complement thereof.

[0072] In another embodiment, the H. pylori cell envelope polypeptide or a fragment thereof is an H. pylori inner membrane polypeptide or a fragment thereof involved in cell division encoded by a nucleic acid having a nucleotide sequence selected from the group consisting of SEQ ID NO: 1032; SEQ ID NO: 1033; SEQ ID NO: 1034; SEQ ID NO: 1035; SEQ ID NO: 1036; SEQ ID NO: 1037; SEQ ID NO: 1038; SEQ ID NO: 1039; SEQ ID NO: 1040; SEQ ID NO: 1041; SEQ ID NO: 1042; SEQ ID NO: 1043; SEQ ID NO: 1044; SEQ ID NO: 1045; SEQ ID NO: 1046; SEQ ID NO: 1047; SEQ ID NO: 1048; SEQ ID NO: 1049; SEQ ID NO: 1050; SEQ ID NO: 1051; SEQ ID NO: 1052; and SEQ ID NO: 9568 and SEQ ID NO: 9569, or a complement thereof.

[0073] In another embodiment, the H. pylori cell envelope polypeptide or a fragment thereof is an H. pylori inner membrane polypeptide or a fragment thereof involved in motility encoded by a nucleic acid having a nucleotide sequence selected from the group consisting of SEQ ID NO: 1053 and SEQ ID NO: 1054, or a complement thereof.

[0074] Particularly preferred is an isolated nucleic acid having a nucleotide sequence encoding an H. pylori cytoplasmic polypeptide or a fragment thereof, the nucleic acid selected from the group consisting of SEQ ID NO: 1576; SEQ ID NO: 1577; SEQ ID NO: 1578; SEQ ID NO: 1579; SEQ ID NO: 1580; SEQ ID NO: 1581; SEQ ID NO: 1582; SEQ ID NO: 1583; SEQ ID NO: 1584; SEQ ID NO: 1585; SEQ ID NO: 1586; SEQ ID NO: 1587; SEQ ID NO: 1588; SEQ ID NO: 1589; SEQ ID NO: 1590; SEQ ID NO: 1591; SEQ ID NO: 1592; SEQ ID NO: 1593; SEQ ID NO: 1594; SEQ ID NO: 1595; SEQ ID NO: 1596; SEQ ID NO: 1597; SEQ ID NO: 1598; SEQ ID NO: 1599; SEQ ID NO: 1600; SEQ ID NO: 1601; SEQ ID NO: 1602; SEQ ID NO: 1603; SEQ ID NO: 1604; SEQ ID NO: 1605; SEQ ID NO: 1606; SEQ ID NO: 1607; SEQ ID NO: 1608; SEQ ID NO: 1609; SEQ ID NO: 1610; SEQ ID NO: 1611; SEQ ID NO: 1612; SEQ ID NO: 1613; SEQ ID NO: 1614; SEQ ID NO: 1615; SEQ ID NO: 1616; SEQ ID NO: 1617; SEQ ID NO: 1618; SEQ ID NO: 1619; SEQ ID NO: 1620; SEQ ID NO: 1621; SEQ ID NO: 1622; SEQ ID NO: 1623; SEQ ID NO: 1624; SEQ ID NO: 1625; SEQ ID NO: 1626; SEQ ID NO: 1627; SEQ ID NO: 1628; SEQ ID NO: 1629; SEQ ID NO: 1630; SEQ ID NO: 1631; SEQ ID NO: 1632; SEQ ID NO: 1633; SEQ ID NO: 1634; SEQ ID NO: 1635; SEQ ID NO: 1636; SEQ ID NO: 1637; SEQ ID NO: 1638; SEQ ID NO: 1639; SEQ ID NO: 1640; SEQ ID NO: 1641; SEQ ID NO: 1642; SEQ ID NO: 1643; SEQ ID NO: 1644; SEQ ID NO: 1645; SEQ ID NO: 1646; SEQ ID NO: 1647; SEQ ID NO: 1648; SEQ ID NO: 1649; SEQ ID NO: 1650; SEQ ID NO: 1651; SEQ ID NO: 1652; SEQ ID NO: 1653; SEQ ID NO: 1654; SEQ ID NO: 1655; SEQ ID NO: 1656; SEQ ID NO: 1657; SEQ ID NO: 1658; SEQ ID NO: 1659; SEQ ID NO: 1660; SEQ ID NO: 1661; SEQ ID NO: 1662; SEQ ID NO: 1663; SEQ ID NO: 1664; SEQ ID NO: 1665; SEQ ID NO: 1666; SEQ ID NO: 1667; SEQ ID NO: 1668; SEQ ID NO: 1669; SEQ ID NO: 1670; SEQ ID NO: 1671; SEQ ID NO: 1672; SEQ ID NO: 1673; SEQ ID NO: 1674; SEQ ID NO: 1675; SEQ ID NO: 1676; SEQ ID NO: 1677; SEQ ID NO: 1678; SEQ ID NO: 1679; SEQ ID NO: 1680; SEQ ID NO: 1681; SEQ ID NO: 1682; SEQ ID NO: 1683; SEQ ID NO: 1684; SEQ ID NO: 1685; SEQ ID NO: 1686; SEQ ID NO: 1687; SEQ ID NO: 1688; SEQ ID NO: 1689; SEQ ID NO: 1690; SEQ ID NO: 1691; SEQ ID NO: 1692; SEQ ID NO: 1693; SEQ ID NO: 1694; SEQ ID NO: 1695; SEQ ID NO: 1696; SEQ ID NO: 1697; SEQ ID NO: 1698; SEQ ID NO: 1699; SEQ ID NO: 1700; SEQ ID NO: 1701; SEQ ID NO: 1702; SEQ ID NO: 1703; SEQ ID NO: 1704; SEQ ID NO: 1705; SEQ ID NO: 1706; SEQ ID NO: 1707; SEQ ID NO: 1708; SEQ ID NO: 1709; SEQ ID NO: 1710; SEQ ID NO: 1711; SEQ ID NO: 1712; SEQ ID NO: 1713; SEQ ID NO: 1714; SEQ ID NO: 1715; SEQ ID NO: 1716; SEQ ID NO: 1717; SEQ ID NO: 1718; SEQ ID NO: 1719; SEQ ID NO: 1720; SEQ ID NO: 1721; SEQ ID NO: 1722; SEQ ID NO: 1723; SEQ ID NO: 1724; SEQ ID NO: 1725; SEQ ID NO: 1726; SEQ ID NO: 1727; SEQ ID NO: 1728; SEQ ID NO: 1729; SEQ ID NO: 1730; SEQ ID NO: 1731; SEQ ID NO: 1732; SEQ ID NO: 1733; SEQ ID NO: 1734; SEQ ID NO: 1735; SEQ ID NO: 1736; SEQ ID NO: 1737; SEQ ID NO: 1738; SEQ ID NO: 1739; SEQ ID NO: 1740; SEQ ID NO: 1741; SEQ ID NO: 1742; SEQ ID NO: 1743; SEQ ID NO: 1744; SEQ ID NO: 1745; SEQ ID NO: 1746; SEQ ID NO: 1747; SEQ ID NO: 1748; SEQ ID NO: 1749; SEQ ID NO: 1750; SEQ ID NO: 1751; SEQ ID NO: 1752; SEQ ID NO: 1753; SEQ ID NO: 1754; SEQ ID NO: 1755; SEQ ID NO: 1756; SEQ ID NO: 1757; SEQ ID NO: 1758; SEQ ID NO: 1759; SEQ ID NO: 1760; SEQ ID NO: 1761; SEQ ID NO: 1762; SEQ ID NO: 1763; SEQ ID NO: 1764; SEQ ID NO: 1765; SEQ ID NO: 1766; SEQ ID NO: 1767; SEQ ID NO: 1768; SEQ ID NO: 1769; SEQ ID NO: 1770; SEQ ID NO: 1771; SEQ ID NO: 1772; SEQ ID NO: 1773; SEQ ID NO: 1774; SEQ ID NO: 1775; SEQ ID NO: 1776; SEQ ID NO: 1777; SEQ ID NO: 1778; SEQ ID NO: 1779; SEQ ID NO: 1780; SEQ ID NO: 1781; SEQ ID NO: 1782; SEQ ID NO: 1783; SEQ ID NO: 1784; SEQ ID NO: 1785; SEQ ID NO: 1786; SEQ ID NO: 1787; SEQ ID NO: 1788; SEQ ID NO: 1789; SEQ ID NO: 1790; SEQ ID NO: 1791; SEQ ID NO: 1792; SEQ ID NO: 1793; SEQ ID NO: 1794; SEQ ID NO: 1795; SEQ ID NO: 1796; SEQ ID NO: 1797; SEQ ID NO: 1798; SEQ ID NO: 1799; SEQ ID NO: 1800; SEQ ID NO: 1801; SEQ ID NO: 1802; SEQ ID NO: 1803; SEQ ID NO: 1804; SEQ ID NO: 1805; SEQ ID NO: 1806; SEQ ID NO: 1807; SEQ ID NO: 1808; SEQ ID NO: 1809; SEQ ID NO: 1810; SEQ ID NO: 1811; SEQ ID NO: 1812; SEQ ID NO: 1813; SEQ ID NO: 1814; SEQ ID NO: 1815; SEQ ID NO: 1816; SEQ ID NO: 1817; SEQ ID NO: 1818; SEQ ID NO: 1819; SEQ ID NO: 1820; SEQ ID NO: 1821; SEQ ID NO: 1822; SEQ ID NO: 1823; SEQ ID NO: 1824; SEQ ID NO: 1825; SEQ ID NO: 1826; SEQ ID NO: 1827; SEQ ID NO: 1828; SEQ ID NO: 1829; SEQ ID NO: 1830; SEQ ID NO: 1831; SEQ ID NO: 1832; SEQ ID NO: 1833; SEQ ID NO: 1834; SEQ ID NO: 1835; SEQ ID NO: 1836; SEQ ID NO: 1837; SEQ ID NO: 1838; SEQ ID NO: 1839; SEQ ID NO: 1840; SEQ ID NO: 1841; SEQ ID NO: 1842; SEQ ID NO: 1843; SEQ ID NO: 1844; SEQ ID NO: 1845; SEQ ID NO: 1846; SEQ ID NO: 1847; SEQ ID NO: 1848; SEQ ID NO: 1849; SEQ ID NO: 1850; SEQ ID NO: 1851; SEQ ID NO: 1852; SEQ ID NO: 1853; SEQ ID NO: 1854; SEQ ID NO: 1855; SEQ ID NO: 1856; SEQ ID NO: 1857; SEQ ID NO: 1858; SEQ ID NO: 1859; SEQ ID NO: 1860; SEQ ID NO: 1861; SEQ ID NO: 1862; SEQ ID NO: 1863; SEQ ID NO: 1864; SEQ ID NO: 1865; SEQ ID NO: 1866; SEQ ID NO: 1867; SEQ ID NO: 1868; SEQ ID NO: 1869; SEQ ID NO: 1870; SEQ ID NO: 1871; SEQ ID NO: 1872; SEQ ID NO: 1873; SEQ ID NO: 1874; SEQ ID NO: 1875; SEQ ID NO: 1876; SEQ ID NO: 1877; SEQ ID NO: 1878; SEQ ID NO: 1879; SEQ ID NO: 1880; SEQ ID NO: 1881; SEQ ID NO: 1882; SEQ ID NO: 1883; SEQ ID NO: 1884; SEQ ID NO: 1885; SEQ ID NO: 1886; SEQ ID NO: 1887; SEQ ID NO: 1888; SEQ ID NO: 1889; SEQ ID NO: 1890; SEQ ID NO: 1891; SEQ ID NO: 1892; SEQ ID NO: 1893; SEQ ID NO: 1894; SEQ ID NO: 1895; SEQ ID NO: 1896; SEQ ID NO: 1897; SEQ ID NO: 1898; SEQ ID NO: 1899; SEQ ID NO: 1900; SEQ ID NO: 1901; SEQ ID NO: 1902; SEQ ID NO: 1903; SEQ ID NO: 1904; SEQ ID NO: 1905; SEQ ID NO: 1906; SEQ ID NO: 1907; SEQ ID NO: 1908; SEQ ID NO: 1909; SEQ ID NO: 1910; SEQ ID NO: 1911; SEQ ID NO: 1912; SEQ ID NO: 1913; SEQ ID NO: 1914; SEQ ID NO: 1915; SEQ ID NO: 1916; SEQ ID NO: 1917; SEQ ID NO: 1918; SEQ ID NO: 1919; SEQ ID NO: 1920; SEQ ID NO: 1921; SEQ ID NO: 1922; SEQ ID NO: 1923; SEQ ID NO: 1924; SEQ ID NO: 1925; SEQ ID NO: 1926; SEQ ID NO: 1927; SEQ ID NO: 1928; SEQ ID NO. 1929; SEQ ID NO: 1930; SEQ ID NO: 1931; SEQ ID NO: 1932; SEQ ID NO: 1933; SEQ ID NO: 1934; SEQ ID NO: 1935; SEQ ID NO: 1936; SEQ ID NO: 1937; SEQ ID NO: 1938; SEQ ID NO: 1939; SEQ ID NO: 1940; SEQ ID NO: 1941; SEQ ID NO: 1942; SEQ ID NO: 1943; SEQ ID NO: 1944; SEQ ID NO: 1945; SEQ ID NO: 1946; SEQ ID NO: 1947; SEQ ID NO: 1948; SEQ ID NO: 1949; SEQ ID NO: 1950; SEQ ID NO: 1951; SEQ ID NO: 1952; SEQ ID NO: 1953; SEQ ID NO: 1954; SEQ ID NO: 1955; SEQ ID NO: 1956; SEQ ID NO: 1957; SEQ ID NO: 1958; SEQ ID NO: 1959; SEQ ID NO: 1960; SEQ ID NO: 1961; SEQ ID NO: 1962; SEQ ID NO: 1963; SEQ ID NO: 1964; SEQ ID NO: 1965; SEQ ID NO: 1966; SEQ ID NO: 1967; SEQ ID NO: 1968; SEQ ID NO: 1969; SEQ ID NO: 1970; SEQ ID NO: 1971; SEQ ID NO: 1972; SEQ ID NO: 1973; SEQ ID NO: 1974; SEQ ID NO: 1975; SEQ ID NO: 1976; SEQ ID NO: 1977; SEQ ID NO: 1978; SEQ ID NO: 1979; SEQ ID NO: 1980; SEQ ID NO: 1981; SEQ ID NO: 1982; SEQ ID NO: 1983; SEQ ID NO: 1984; SEQ ID NO: 1985; SEQ ID NO: 1986; SEQ ID NO: 1987; SEQ ID NO: 1988; SEQ ID NO: 1989; SEQ ID NO: 1990; SEQ ID NO: 1991; SEQ ID NO: 1992; SEQ ID NO: 1993; SEQ ID NO: 1994; SEQ ID NO: 1995; SEQ ID NO: 1996; SEQ ID NO: 1997; SEQ ID NO: 1998; SEQ ID NO: 1999; SEQ ID NO: 2000; SEQ ID NO: 2001; SEQ ID NO: 2002; SEQ ID NO: 2003; SEQ ID NO: 2004; SEQ ID NO: 2005; SEQ ID NO: 2006; SEQ ID NO: 2007; SEQ ID NO: 2008; SEQ ID NO: 2009; SEQ ID NO: 2010; SEQ ID NO: 2011; SEQ ID NO: 2012; SEQ ID NO: 2013; SEQ ID NO: 2014; SEQ ID NO: 2015; SEQ ID NO: 2016; SEQ ID NO: 2017; SEQ ID NO: 2018; SEQ ID NO: 2019; SEQ ID NO: 2020; SEQ ID NO: 2021; SEQ ID NO: 2022; SEQ ID NO: 2023; SEQ ID NO: 2024; SEQ ID NO: 2025; SEQ ID NO: 2026; SEQ ID NO: 2027; SEQ ID NO: 2028; SEQ ID NO: 2029; SEQ ID NO: 2030; SEQ ID NO: 2031; SEQ ID NO: 2032; SEQ ID NO: 2033; SEQ ID NO: 2034; SEQ ID NO: 2035; SEQ ID NO: 2036; SEQ ID NO: 2037; SEQ ID NO: 2038; SEQ ID NO: 2039; SEQ ID NO: 2040; SEQ ID NO: 2041; SEQ ID NO: 2042; SEQ ID NO: 2043; SEQ ID NO: 2044; SEQ ID NO: 2045; SEQ ID NO: 2046; SEQ ID NO: 2047; SEQ ID NO: 2048; SEQ ID NO: 2049; SEQ ID NO: 2050; SEQ ID NO: 2051; SEQ ID NO: 2052; SEQ ID NO: 2053; SEQ ID NO: 2054; SEQ ID NO: 2055; SEQ ID NO: 2056; SEQ ID NO: 2057; SEQ ID NO: 2058; SEQ ID NO: 2059; SEQ ID NO: 2060; SEQ ID NO: 2061; SEQ ID NO: 2062; SEQ ID NO: 2063; SEQ ID NO: 2064; SEQ ID NO: 2065; SEQ ID NO: 2066; SEQ ID NO: 2067; SEQ ID NO: 2068; SEQ ID NO: 2069; SEQ ID NO: 2070; SEQ ID NO: 2071; SEQ ID NO: 2072; SEQ ID NO: 2073; SEQ ID NO: 2074; SEQ ID NO: 2075; SEQ ID NO: 2076; SEQ ID NO: 2077; SEQ ID NO: 2078; SEQ ID NO: 2079; SEQ ID NO: 2080; SEQ ID NO: 2081; SEQ ID NO: 2082; SEQ ID NO: 2083; SEQ ID NO: 2084; SEQ ID NO: 2085; SEQ ID NO: 2086; SEQ ID NO: 2087; SEQ ID NO: 2088; SEQ ID NO: 2089; SEQ ID NO: 2090; SEQ ID NO: 2091; SEQ ID NO: 2092; SEQ ID NO: 2093; SEQ ID NO: 2094; SEQ ID NO: 2095; SEQ ID NO: 2096; SEQ ID NO: 2097; SEQ ID NO: 2098; SEQ ID NO: 2099; SEQ ID NO: 2100; SEQ ID NO: 2101; SEQ ID NO: 2102; SEQ ID NO: 2103; SEQ ID NO: 2104; SEQ ID NO: 2105; SEQ ID NO: 2106; SEQ ID NO: 2107; SEQ ID NO: 2108; SEQ ID NO: 2109; SEQ ID NO: 2110; SEQ ID NO: 2111; SEQ ID NO: 2112; SEQ ID NO: 2113; SEQ ID NO: 2114; SEQ ID NO: 2115; SEQ ID NO: 2116; SEQ ID NO: 2117; SEQ ID NO: 2118; SEQ ID NO: 2119; SEQ ID NO: 2120; SEQ ID NO: 2121; SEQ ID NO: 2122; SEQ ID NO: 2123; SEQ ID NO: 2124; SEQ ID NO: 2125; SEQ ID NO: 2126; SEQ ID NO: 2127; SEQ ID NO: 2128; SEQ ID NO: 2129; SEQ ID NO: 2130; SEQ ID NO: 2131; SEQ ID NO: 2132; SEQ ID NO: 2133; SEQ ID NO: 2134; SEQ ID NO: 2135; SEQ ID NO: 2136; SEQ ID NO: 2137; SEQ ID NO: 2138; SEQ ID NO: 2139; SEQ ID NO: 2140; SEQ ID NO: 2141; SEQ ID NO: 2142; SEQ ID NO: 2143; SEQ ID NO: 2144; SEQ ID NO: 2145; SEQ ID NO: 2146; SEQ ID NO: 2147; SEQ ID NO: 2148; SEQ ID NO: 2149; SEQ ID NO: 2150; SEQ ID NO: 2151; SEQ ID NO: 2152; SEQ ID NO: 2153; SEQ ID NO: 2154; SEQ ID NO: 2155; SEQ ID NO: 2156; SEQ ID NO: 2157; SEQ ID NO: 2158; SEQ ID NO: 2159; SEQ ID NO: 2160; SEQ ID NO: 2161; SEQ ID NO: 2162; SEQ ID NO: 2163; SEQ ID NO: 2164; SEQ ID NO: 2165; SEQ ID NO: 2166; SEQ ID NO: 2167; SEQ ID NO: 2168; SEQ ID NO: 2169; SEQ ID NO: 2170; SEQ ID NO: 2171; SEQ ID NO: 2172; SEQ ID NO: 2173; SEQ ID NO: 2174; SEQ ID NO: 2175; SEQ ID NO: 2176; SEQ ID NO: 2177; SEQ ID NO: 2178; SEQ ID NO: 2179; SEQ ID NO: 2180; SEQ ID NO: 2181; SEQ ID NO: 2182; SEQ ID NO: 2183; SEQ ID NO: 2184; SEQ ID NO: 2185; SEQ ID NO: 2186; SEQ ID NO: 2187; SEQ ID NO: 2188; SEQ ID NO: 2189; SEQ ID NO: 2190; SEQ ID NO: 2191; SEQ ID NO: 2192; SEQ ID NO: 2193; SEQ ID NO: 2194; SEQ ID NO: 2195; SEQ ID NO: 2196; SEQ ID NO: 2197; SEQ ID NO: 2198; SEQ ID NO: 2199; SEQ ID NO: 2200; SEQ ID NO: 2201; SEQ ID NO: 2202; SEQ ID NO: 2203; SEQ ID NO: 2204; SEQ ID NO: 2205; SEQ ID NO: 2206; SEQ ID NO: 2207; SEQ ID NO: 2208; SEQ ID NO: 2209; SEQ ID NO: 2210; SEQ ID NO: 2211; SEQ ID NO: 2212; SEQ ID NO: 2213; SEQ ID NO: 2214; SEQ ID NO: 2215; SEQ ID NO: 2216; SEQ ID NO: 2217; SEQ ID NO: 2218; SEQ ID NO: 2219; SEQ ID NO: 2220; SEQ ID NO: 2221; SEQ ID NO: 2222; SEQ ID NO: 2223; SEQ ID NO: 2224; SEQ ID NO: 2225; SEQ ID NO: 2226; SEQ ID NO: 2227; SEQ ID NO: 2228; SEQ ID NO: 2229; SEQ ID NO: 2230; SEQ ID NO: 2231; SEQ ID NO: 2232; SEQ ID NO: 2233; SEQ ID NO: 2234; SEQ ID NO: 2235; SEQ ID NO: 2236; SEQ ID NO: 2237; SEQ ID NO: 2238; SEQ ID NO: 2239; SEQ ID NO: 2240; SEQ ID NO: 2241; SEQ ID NO: 2242; SEQ ID NO: 2243; SEQ ID NO: 2244; SEQ ID NO: 2245; SEQ ID NO: 2246; SEQ ID NO: 2247; SEQ ID NO: 2248; SEQ ID NO: 2249; SEQ ID NO: 2250; SEQ ID NO: 2251; SEQ ID NO: 2252; SEQ ID NO: 2253; SEQ ID NO: 2254; SEQ ID NO: 2255; SEQ ID NO: 2256; SEQ ID NO: 2257; SEQ ID NO: 2258; SEQ ID NO: 2259; SEQ ID NO: 2260; SEQ ID NO: 2261; SEQ ID NO: 2262; SEQ ID NO: 2263; SEQ ID NO: 2264; SEQ ID NO: 2265; SEQ ID NO: 2266; SEQ ID NO: 2267; SEQ ID NO: 2268; SEQ ID NO: 2269; SEQ ID NO: 2270; SEQ ID NO: 2271; SEQ ID NO: 2272; SEQ ID NO: 2273; SEQ ID NO: 2274; SEQ ID NO: 2275; SEQ ID NO: 2276; SEQ ID NO: 2277; SEQ ID NO: 2278; SEQ ID NO: 2279; SEQ ID NO: 2280; SEQ ID NO: 2281; SEQ ID NO: 2282; SEQ ID NO: 2283; SEQ ID NO: 2284; SEQ ID NO: 2285; SEQ ID NO: 2286; SEQ ID NO: 2287; SEQ ID NO: 2288; SEQ ID NO: 2289; SEQ ID NO: 2290; SEQ ID NO: 2291; SEQ ID NO: 2292; SEQ ID NO:2293; SEQ ID NO:2294; SEQ ID NO:2295; SEQ ID NO:2296; SEQ ID NO: 2297; SEQ ID NO: 2298; SEQ ID NO: 2299; SEQ ID NO: 2300; SEQ ID NO: 2301; SEQ ID NO: 2302; SEQ ID NO: 2303; SEQ ID NO: 2304; SEQ ID NO: 2305; SEQ ID NO: 2306; SEQ ID NO: 2307; SEQ ID NO: 2308; SEQ ID NO: 2309; SEQ ID NO: 2310; SEQ ID NO: 2311; SEQ ID NO: 2312; SEQ ID NO: 2313; SEQ ID NO: 2314; SEQ ID NO: 2315; SEQ ID NO: 2316; SEQ ID NO: 2317; SEQ ID NO: 2318; SEQ ID NO: 2319; SEQ ID NO: 2320; SEQ ID NO: 2321; SEQ ID NO: 2322; SEQ ID NO: 2323; SEQ ID NO: 2324; SEQ ID NO: 2325; SEQ ID NO: 2326; SEQ ID NO: 2327; SEQ ID NO: 2328; SEQ ID NO: 2329; SEQ ID NO: 2330; SEQ ID NO: 2331; SEQ ID NO: 2332; SEQ ID NO: 2333; SEQ ID NO: 2334; SEQ ID NO: 2335; SEQ ID NO: 2336; SEQ ID NO: 2337; SEQ ID NO: 2338; SEQ ID NO: 2339; SEQ ID NO: 2340; SEQ ID NO: 2341; SEQ ID NO: 2342; SEQ ID NO: 2343; SEQ ID NO: 2344; SEQ ID NO: 2345; SEQ ID NO: 2346; SEQ ID NO: 2347; SEQ ID NO: 2348; SEQ ID NO: 2349; SEQ ID NO: 2350; SEQ ID NO: 2351; SEQ ID NO: 2352; SEQ ID NO: 2353; SEQ ID NO: 2354; SEQ ID NO: 2355; SEQ ID NO: 2356; SEQ ID NO: 2357; SEQ ID NO: 2358; SEQ ID NO: 2359; SEQ ID NO: 2360; SEQ ID NO: 2361; SEQ ID NO: 2362; SEQ ID NO: 2363; SEQ ID NO: 2364; SEQ ID NO: 2365; SEQ ID NO: 2366; SEQ ID NO: 2367; SEQ ID NO: 2368; SEQ ID NO: 2369; SEQ ID NO: 2370; SEQ ID NO: 2371; SEQ ID NO: 2372; SEQ ID NO: 2373; SEQ ID NO: 2374; SEQ ID NO: 2375; SEQ ID NO: 2376; SEQ ID NO: 2377; SEQ ID NO: 2378; SEQ ID NO: 2379; SEQ ID NO: 2380; SEQ ID NO: 2381; SEQ ID NO: 2382; SEQ ID NO: 2383; SEQ ID NO: 2384; SEQ ID NO: 2385; SEQ ID NO: 2386; SEQ ID NO: 2387; SEQ ID NO: 2388; SEQ ID NO: 2389; SEQ ID NO: 2390; SEQ ID NO: 2391; SEQ ID NO: 2392; SEQ ID NO: 2393; SEQ ID NO: 2394; SEQ ID NO: 2395; SEQ ID NO: 2396; SEQ ID NO: 2397; SEQ ID NO: 2398; SEQ ID NO: 2399; SEQ ID NO: 2400; SEQ ID NO: 2401; SEQ ID NO: 2402; SEQ ID NO: 2403; SEQ ID NO: 2404; SEQ ID NO: 2405; SEQ ID NO: 2406; SEQ ID NO: 2407; SEQ ID NO: 2408; SEQ ID NO: 2409; SEQ ID NO: 2410; SEQ ID NO: 2411; SEQ ID NO: 2412; SEQ ID NO: 2413; SEQ ID NO: 2414; SEQ ID NO: 2415; SEQ ID NO: 2416; SEQ ID NO: 2417; SEQ ID NO: 2418; SEQ ID NO: 2419; SEQ ID NO: 2420; SEQ ID NO: 2421; SEQ ID NO: 2422; SEQ ID NO: 2423; SEQ ID NO: 2424; SEQ ID NO: 2425; SEQ ID NO: 2426; SEQ ID NO: 2427; SEQ ID NO: 2428; SEQ ID NO: 2429; SEQ ID NO: 2430; SEQ ID NO: 2431; SEQ ID NO: 2432; SEQ ID NO: 2433; SEQ ID NO: 2434; SEQ ID NO: 2435; SEQ ID NO: 2436; SEQ ID NO: 2437; SEQ ID NO: 2438; SEQ ID NO: 2439; SEQ ID NO: 2440; SEQ ID NO: 2441; SEQ ID NO: 2442; SEQ ID NO: 2443; SEQ ID NO: 2444; SEQ ID NO: 2445; SEQ ID NO: 2446; SEQ ID NO: 2447; SEQ ID NO: 2448; SEQ ID NO: 2449; SEQ ID NO: 2450; SEQ ID NO: 2451; SEQ ID NO: 2452; SEQ ID NO: 2453; SEQ ID NO: 2454; SEQ ID NO: 2455; SEQ ID NO: 2456; SEQ ID NO: 2457; SEQ ID NO: 2458; SEQ ID NO: 2459; SEQ ID NO: 2460; SEQ ID NO: 2461; SEQ ID NO: 2462; SEQ ID NO: 2463; SEQ ID NO: 2464; SEQ ID NO: 2465; SEQ ID NO: 2466; SEQ ID NO: 2467; SEQ ID NO: 2468; SEQ ID NO: 2469; SEQ ID NO: 2470; SEQ ID NO: 2471; SEQ ID NO: 2472; SEQ ID NO: 2473; SEQ ID NO: 2474; SEQ ID NO: 2475; SEQ ID NO: 2476; SEQ ID NO: 2477; SEQ ID NO: 2478; SEQ ID NO: 2479; SEQ ID NO: 2480; SEQ ID NO: 2481; SEQ ID NO: 2482; SEQ ID NO: 2483; SEQ ID NO: 2484; SEQ ID NO: 2485; SEQ ID NO: 2486; SEQ ID NO: 2487; SEQ ID NO: 2488; SEQ ID NO: 2489; SEQ ID NO: 2490; SEQ ID NO: 2491; SEQ ID NO: 2492; SEQ ID NO: 2493; SEQ ID NO: 2494; SEQ ID NO: 2495; SEQ ID NO: 2496; SEQ ID NO: 2497; SEQ ID NO: 2498; SEQ ID NO: 2499; SEQ ID NO: 2500; SEQ ID NO: 2501; SEQ ID NO: 2502; SEQ ID NO: 2503; SEQ ID NO: 2504; SEQ ID NO: 2505; SEQ ID NO: 2506; SEQ ID NO: 2507; SEQ ID NO: 2508; SEQ ID NO: 2509; SEQ ID NO: 2510; SEQ ID NO: 2511; SEQ ID NO: 2512; SEQ ID NO: 2513; SEQ ID NO: 2514; SEQ ID NO: 2515; SEQ ID NO: 2516; SEQ ID NO: 2517; SEQ ID NO: 2518; SEQ ID NO: 2519; SEQ ID NO: 2520; SEQ ID NO: 2521; SEQ ID NO: 2522; SEQ ID NO: 2523; SEQ ID NO: 2524; SEQ ID NO: 2525; SEQ ID NO: 2526; SEQ ID NO: 2527; SEQ ID NO: 2528; SEQ ID NO: 2529; SEQ ID NO: 2530; SEQ ID NO: 2531; SEQ ID NO: 2532; SEQ ID NO: 2533; SEQ ID NO: 2534; SEQ ID NO: 2535; SEQ ID NO: 2536; SEQ ID NO: 2537; SEQ ID NO: 2538; SEQ ID NO: 2539; SEQ ID NO: 2540; SEQ ID NO: 2541; SEQ ID NO: 2542; SEQ ID NO: 2543; SEQ ID NO: 2544; SEQ ID NO: 2545; SEQ ID NO: 2546; SEQ ID NO: 2547; SEQ ID NO: 2548; SEQ ID NO: 2549; SEQ ID NO: 2550; SEQ ID NO: 2551; SEQ ID NO: 2552; SEQ ID NO: 2553; SEQ ID NO: 2554; SEQ ID NO: 2555; SEQ ID NO: 2556; SEQ ID NO: 2557; SEQ ID NO: 2558; SEQ ID NO: 2559; SEQ ID NO: 2560; SEQ ID NO: 2561; SEQ ID NO: 2562; SEQ ID NO: 2563; SEQ ID NO: 2564; SEQ ID NO: 2565; SEQ ID NO: 2566; SEQ ID NO: 2567; SEQ ID NO: 2568; SEQ ID NO: 2569; SEQ ID NO: 2570; SEQ ID NO: 2571; SEQ ID NO: 2572; SEQ ID NO: 2573; SEQ ID NO: 2574; SEQ ID NO: 2575; SEQ ID NO: 2576; SEQ ID NO: 2577; SEQ ID NO: 2578; SEQ ID NO: 2579; SEQ ID NO: 2580; SEQ ID NO: 2581; SEQ ID NO: 2582; SEQ ID NO: 2583; SEQ ID NO: 2584; SEQ ID NO: 2585; SEQ ID NO: 2586; SEQ ID NO: 2587; SEQ ID NO: 2588; SEQ ID NO: 2589; SEQ ID NO: 2590; SEQ ID NO: 2591; SEQ ID NO: 2592; SEQ ID NO: 2593; SEQ ID NO: 2594; SEQ ID NO: 2595; SEQ ID NO: 2596; SEQ ID NO: 2597; SEQ ID NO: 2598; SEQ ID NO: 2599; SEQ ID NO: 2600; SEQ ID NO: 2601; SEQ ID NO: 2602; SEQ ID NO: 2603; SEQ ID NO: 2604; SEQ ID NO: 2605; SEQ ID NO: 2606; SEQ ID NO: 2607; SEQ ID NO: 2608; SEQ ID NO: 2609; SEQ ID NO: 2610; SEQ ID NO: 2611; SEQ ID NO: 2612; SEQ ID NO: 2613; SEQ ID NO: 2614; SEQ ID NO: 2615; SEQ ID NO: 2616; SEQ ID NO: 2617; SEQ ID NO: 2618; SEQ ID NO: 2619; SEQ ID NO: 2620; SEQ ID NO: 2621; SEQ ID NO: 2622; SEQ ID NO: 2623; SEQ ID NO: 2624; SEQ ID NO: 2625; SEQ ID NO: 2626; SEQ ID NO: 2627; SEQ ID NO: 2628; SEQ ID NO: 2629; SEQ ID NO: 2630; SEQ ID NO: 2631; SEQ ID NO: 2632; SEQ ID NO: 2633; SEQ ID NO: 2634; SEQ ID NO: 2635; SEQ ID NO: 2636; SEQ ID NO: 2637; SEQ ID NC: 638; SEQ ID NO: 2639; SEQ ID NO: 2640; SEQ ID NO: 2641; SEQ ID NO: 2642; SEQ ID NO: 2643; SEQ ID NO: 2644; SEQ ID NO: 2645; SEQ ID NO: 2646; SEQ ID NO: 2647; SEQ ID NO: 2648; SEQ ID NO: 2649; SEQ ID NO: 2650; SEQ ID NO: 2651; SEQ ID NO: 2652; SEQ ID NO: 2653; SEQ ID NO: 2654; SEQ ID NO: 2655; SEQ ID NO: 2656; SEQ ID NO: 2657; SEQ ID NO: 2658; SEQ ID NO: 2659; SEQ ID NO: 2660; SEQ ID NO: 2661; SEQ ID NO: 2662; SEQ ID NO: 2663; SEQ ID NO: 2664; SEQ ID NO: 2665; SEQ ID NO: 2666; SEQ ID NO: 2667; SEQ ID NO: 2668; SEQ ID NO: 2669; SEQ ID NO: 2670; SEQ ID NO: 2671; SEQ ID NO: 2672; SEQ ID NO: 2673; SEQ ID NO: 2674; SEQ ID NO: 2675; SEQ ID NO: 2676; SEQ ID NO: 2677; SEQ ID NO: 2678; SEQ ID NO: 2679; SEQ ID NO: 2680; SEQ ID NO: 2681; SEQ ID NO: 2682; SEQ ID NO: 2683; SEQ ID NO: 2684; SEQ ID NO: 2685; SEQ ID NO: 2686; SEQ ID NO: 2687; SEQ ID NO: 2688; SEQ ID NO: 2689; SEQ ID NO: 2690; SEQ ID NO: 2691; SEQ ID NO: 2692; SEQ ID NO: 2693; SEQ ID NO: 2694; SEQ ID NO: 2695; SEQ ID NO: 2696; SEQ ID NO: 2697; SEQ ID NO: 2698; SEQ ID NO: 2699; SEQ ID NO: 2700; SEQ ID NO: 2701; SEQ ID NO: 2702; SEQ ID NO: 2703; SEQ ID NO: 2704; SEQ ID NO: 2705; SEQ ID NO: 2706; SEQ ID NO: 2707; SEQ ID NO: 2708; SEQ ID NO: 2709; SEQ ID NO: 2710; SEQ ID NO: 2711; SEQ ID NO: 2712; SEQ ID NO: 2713; SEQ ID NO: 2714; SEQ ID NO: 2715; SEQ ID NO: 2716; SEQ ID NO: 2717; SEQ ID NO: 2718; SEQ ID NO: 2719; SEQ ID NO: 2720; SEQ ID NO: 2721; SEQ ID NO: 2722; SEQ ID NO: 2723; SEQ ID NO: 2724; SEQ ID NO: 2725; SEQ ID NO: 2726; SEQ ID NO: 2727; SEQ ID NO: 2728; SEQ ID NO: 2729; SEQ ID NO: 2730; SEQ ID NO: 2731; SEQ ID NO: 2732; SEQ ID NO: 2733; SEQ ID NO: 2734; SEQ ID NO: 2735; SEQ ID NO: 2736; SEQ ID NO: 2737; SEQ ID NO: 2738; SEQ ID NO: 2739; SEQ ID NO: 2740; SEQ ID NO: 2741; SEQ ID NO: 2742; SEQ ID NO: 2743; SEQ ID NO: 2744; SEQ ID NO: 2745; SEQ ID NO: 2746; SEQ ID NO: 2747; SEQ ID NO: 2748; SEQ ID NO: 2749; SEQ ID NO: 2750; SEQ ID NO: 2751; SEQ ID NO: 2752; SEQ ID NO: 2753; SEQ ID NO: 2754; SEQ ID NO: 2755; SEQ ID NO: 2756; SEQ ID NO: 2757; SEQ ID NO: 2758; SEQ ID NO: 2759; SEQ ID NO: 2760; SEQ ID NO: 2761; SEQ ID NO: 2762; SEQ ID NO: 2763; SEQ ID NO: 2764; SEQ ID NO: 2765; SEQ ID NO: 2766; SEQ ID NO: 2767; SEQ ID NO: 2768; SEQ ID NO: 2769; SEQ ID NO: 2770; SEQ ID NO: 2771; SEQ ID NO: 2772; SEQ ID NO: 2773; SEQ ID NO: 2774; SEQ ID NO: 2775; SEQ ID NO: 2776; SEQ ID NO: 2777; SEQ ID NO: 2778; SEQ ID NO: 2779; SEQ ID NO: 2780; SEQ ID NO: 2781; SEQ ID NO: 2782; SEQ ID NO: 2783; SEQ ID NO: 2784; SEQ ID NO: 2785; SEQ ID NO: 2786; SEQ ID NO: 2787; SEQ ID NO: 2788; SEQ ID NO: 2789; SEQ ID NO: 2790; SEQ ID NO: 2791; SEQ ID NO: 2792; SEQ ID NO: 2793; SEQ ID NO: 2794; SEQ ID NO: 2795; SEQ ID NO: 2796; SEQ ID NO: 2797; SEQ ID NO: 2798; SEQ ID NO: 2799; SEQ ID NO: 2800; SEQ ID NO: 2081; SEQ ID NO: 2802; SEQ ID NO: 2803; SEQ ID NO: 2804; SEQ ID NO: 2805; SEQ ID NO: 2806; SEQ ID NO: 2807; SEQ ID NO: 2808; SEQ ID NO: 2809; SEQ ID NO: 2810; SEQ ID NO: 2811; SEQ ID NO: 2812; SEQ ID NO: 2813; SEQ ID NO: 2814; SEQ ID NO: 2815; SEQ ID NO: 2816; SEQ ID NO: 2817; SEQ ID NO: 2818; SEQ ID NO: 2819; SEQ ID NO: 2820; SEQ ID NO: 2821; SEQ ID NO: 2822; SEQ ID NO: 2823; SEQ ID NO: 2824; SEQ ID NO: 2825; SEQ ID NO: 2826; SEQ ID NO: 2827; SEQ ID NO: 2828; SEQ ID NO: 2829; SEQ ID NO: 2830; SEQ ID NO: 2831; SEQ ID NO: 2832; SEQ ID NO: 2833; SEQ ID NO: 2834; SEQ ID NO: 2835; SEQ ID NO: 2836; SEQ ID NO: 2837; SEQ ID NO: 2838; SEQ ID NO: 2839; SEQ ID NO: 2840; SEQ ID NO: 2841; SEQ ID NO: 2842; SEQ ID NO: 2843; SEQ ID NO: 2844; SEQ ID NO: 2845; SEQ ID NO: 2846; SEQ ID NO: 2847; SEQ ID NO: 2848; SEQ ID NO: 2849; SEQ ID NO: 2850; SEQ ID NO: 2851; SEQ ID NO: 2852; SEQ ID NO: 2853; SEQ ID NO: 2854; SEQ ID NO: 2855; SEQ ID NO: 2856; SEQ ID NO: 2857; SEQ ID NO: 2858; SEQ ID NO: 2859; SEQ ID NO: 2860; SEQ ID NO: 2861; SEQ ID NO: 2862; SEQ ID NO: 2863; SEQ ID NO: 2864; SEQ ID NO: 2865; SEQ ID NO: 2866; SEQ ID NO: 2867; SEQ ID NO: 2868; SEQ ID NO: 2869; SEQ ID NO: 2870; SEQ ID NO: 2871; SEQ ID NO: 2872; SEQ ID NO: 2873; SEQ ID NO: 2874; SEQ ID NO: 2875; SEQ ID NO: 2876; SEQ ID NO: 2877; SEQ ID NO: 2878; SEQ ID NO: 2879; SEQ ID NO: 2880; SEQ ID NO: 2881; SEQ ID NO: 2882; SEQ ID NO: 2883; SEQ ID NO: 2884; SEQ ID NO: 2885; SEQ ID NO: 2886; SEQ ID NO: 2887; SEQ ID NO: 2888; SEQ ID NO: 2889; SEQ ID NO: 2890; SEQ ID NO: 2891; SEQ ID NO: 2892; SEQ ID NO: 2893; SEQ ID NO: 2894; SEQ ID NO: 2895; SEQ ID NO: 2896; SEQ ID NO: 2897; SEQ ID NO: 2898; SEQ ID NO: 2899; SEQ ID NO: 2900; SEQ ID NO: 2901; SEQ ID NO: 2902; SEQ ID NO: 2903; SEQ ID NO: 2904; SEQ ID NO: 2905; SEQ ID NO: 2906; SEQ ID NO: 2907; SEQ ID NO: 2908; SEQ ID NO: 2909; SEQ ID NO: 2910; SEQ ID NO: 2911; SEQ ID NO: 2912; SEQ ID NO: 2913; SEQ ID NO: 2914; SEQ ID NO: 2915; SEQ ID NO: 2916; SEQ ID NO: 2917; SEQ ID NO: 2918; SEQ ID NO: 2919; SEQ ID NO: 2920; SEQ ID NO: 2921; SEQ ID NO: 2922; SEQ ID NO: 2923; SEQ ID NO: 2924; SEQ ID NO: 2925; SEQ ID NO: 2926; SEQ ID NO: 2927; SEQ ID NO: 2928; SEQ ID NO: 2929; SEQ ID NO: 2930; SEQ ID NO: 2931; SEQ ID NO: 2932; SEQ ID NO: 2933; SEQ ID NO: 2934; SEQ ID NO: 2935; SEQ ID NO: 2936; SEQ ID NO: 2937; SEQ ID NO: 2938; SEQ ID NO: 2939; SEQ ID NO: 2940; SEQ ID NO: 2941; SEQ ID NO: 2942; SEQ ID NO: 2943; SEQ ID NO: 2944; SEQ ID NO: 2945; SEQ ID NO: 2946; SEQ ID NO: 2947; SEQ ID NO: 2948; SEQ ID NO: 2949; SEQ ID NO: 2950; SEQ ID NO: 2951; SEQ ID NO: 2952; SEQ ID NO: 2953; SEQ ID NO: 2954; SEQ ID NO: 2955; SEQ ID NO: 2956; SEQ ID NO: 2957; SEQ ID NO: 2958; SEQ ID NO: 2959; SEQ ID NO: 2960; SEQ ID NO: 2961; SEQ ID NO: 2962; SEQ ID NO: 2963; SEQ ID NO: 2964; SEQ ID NO: 2965; SEQ ID NO: 2966; SEQ ID NO: 2967; SEQ ID NO: 2968; SEQ ID NO: 2969; SEQ ID NO: 2970; SEQ ID NO: 2971; SEQ ID NO: 2972; SEQ ID NO: 2973; SEQ ID NO: 2974; SEQ ID NO: 2975; SEQ ID NO: 2976; SEQ ID NO: 2977; SEQ ID NO: 2978; SEQ ID NO: 2979; SEQ ID NO: 2980; SEQ ID NO: 2981; SEQ ID NO: 2982; SEQ ID NO: 2983; SEQ ID NO: 2984; SEQ ID NO: 2985; SEQ ID NO: 2986; SEQ ID NO: 2987; SEQ ID NO: 2988; SEQ ID NO: 2989; SEQ ID NO: 2990; SEQ ID NO: 2991; SEQ ID NO: 2992; SEQ ID NO: 2993; SEQ ID NO: 2994; SEQ ID NO: 2995; SEQ ID NO: 2996; SEQ ID NO: 2997; SEQ ID NO: 2998; SEQ ID NO: 2999; SEQ ID NO: 3000; SEQ ID NO: 3001; SEQ ID NO: 3002; SEQ ID NO: 3003; SEQ ID NO: 3004; SEQ ID NO: 3005; SEQ ID NO: 3006; SEQ ID NO: 3007; SEQ ID NO: 3008; SEQ ID NO: 3009; SEQ ID NO: 3010; SEQ ID NO: 3011; SEQ ID NO: 3012; SEQ ID NO: 3013; SEQ ID NO: 3014; SEQ ID NO: 3015; SEQ ID NO: 3016; SEQ ID NO: 3017; SEQ ID NO: 3018; SEQ ID NO: 3019; SEQ ID NO: 3020; SEQ ID NO: 3021; SEQ ID NO: 3022; SEQ ID NO: 3023; SEQ ID NO: 3024; SEQ ID NO: 3025; SEQ ID NO: 3026; SEQ ID NO: 3027; SEQ ID NO: 3028; SEQ ID NO: 3029; SEQ ID NO: 3030; SEQ ID NO: 3031; SEQ ID NO: 3032; SEQ ID NO: 3033; SEQ ID NO: 3034; SEQ ID NO: 3035; SEQ ID NO: 3036; SEQ ID NO: 3037; SEQ ID NO: 3038; SEQ ID NO: 3039; SEQ ID NO: 3040; SEQ ID NO: 3041; SEQ ID NO: 3042; SEQ ID NO: 3043; SEQ ID NO: 3044; SEQ ID NO: 3045; SEQ ID NO: 3046; SEQ ID NO: 3047; SEQ ID NO: 3048; SEQ ID NO: 3049; SEQ ID NO: 3050; SEQ ID NO: 3051; SEQ ID NO: 3052; SEQ ID NO: 3053; SEQ ID NO: 3054; SEQ ID NO: 3055; SEQ ID NO: 3056; SEQ ID NO: 3057; SEQ ID NO: 3058; SEQ ID NO: 3059; SEQ ID NO: 3060; SEQ ID NO: 3061; SEQ ID NO: 3062; SEQ ID NO: 3063; SEQ ID NO: 3064; SEQ ID NO: 3065; SEQ ID NO: 3066; SEQ ID NO: 3067; SEQ ID NO: 3068; SEQ ID NO: 3069; SEQ ID NO: 3070; SEQ ID NO: 3071; SEQ ID NO: 3072; SEQ ID NO: 3073; SEQ ID NO: 3074; SEQ ID NO: 3075; SEQ ID NO: 3076; SEQ ID NO: 3077; SEQ ID NO: 3078; SEQ ID NO: 3079; SEQ ID NO: 3080; SEQ ID NO: 3081; SEQ ID NO: 3082; SEQ ID NO: 3083; SEQ ID NO: 3084; SEQ ID NO: 3085; SEQ ID NO: 3086; SEQ ID NO: 3087; SEQ ID NO: 3088; SEQ ID NO: 3089; SEQ ID NO: 3090; SEQ ID NO: 3091; SEQ ID NO: 3092; SEQ ID NO: 3093; SEQ ID NO: 3094; SEQ ID NO: 3095; SEQ ID NO: 3096; SEQ ID NO: 3097; SEQ ID NO: 3098; SEQ ID NO: 3099; SEQ ID NO: 3100; SEQ ID NO: 3101; SEQ ID NO: 3102; SEQ ID NO: 3103; SEQ ID NO: 3104; SEQ ID NO: 3105; SEQ ID NO: 3106; SEQ ID NO: 3107; SEQ ID NO: 3108; SEQ ID NO: 3109; SEQ ID NO: 3110; SEQ ID NO: 3111; SEQ ID NO: 3112; SEQ ID NO: 3113; SEQ ID NO: 3114; SEQ ID NO: 3115; SEQ ID NO: 3116; SEQ ID NO: 3117; SEQ ID NO: 3118; SEQ ID NO: 3119; SEQ ID NO: 3120; SEQ ID NO: 3121; SEQ ID NO: 3122; SEQ ID NO: 3123; SEQ ID NO: 3124; SEQ ID NO: 3125; SEQ ID NO: 3126; SEQ ID NO: 3127; SEQ ID NO: 3128; SEQ ID NO: 3129; SEQ ID NO: 3130; SEQ ID NO: 3131; SEQ ID NO: 3132; SEQ ID NO: 3133; SEQ ID NO: 3134; SEQ ID NO: 3135; SEQ ID NO: 3136; SEQ ID NO: 3137; SEQ ID NO:3138; SEQ ID NO: 3139; SEQ ID NO: 3140; SEQ ID NO: 3141; SEQ ID NO: 3142; SEQ ID NO: 3143; SEQ ID NO: 3144; SEQ ID NO: 3145; SEQ ID NO: 3146; SEQ ID NO: 3147; SEQ ID NO: 3148; SEQ ID NO: 3149; SEQ ID NO: 3150; SEQ ID NO: 3151; SEQ ID NO: 3152; SEQ ID NO: 3153; SEQ ID NO: 3154; SEQ ID NO: 3155; SEQ ID NO: 3156; SEQ ID NO: 3157; SEQ ID NO: 3158; SEQ ID NO: 3159; SEQ ID NO: 3160; SEQ ID NO: 3161; SEQ ID NO: 3162; SEQ ID NO: 3163; SEQ ID NO: 3164; SEQ ID NO: 3165; SEQ ID NO: 3166; SEQ ID NO: 3167; SEQ ID NO: 3168; SEQ ID NO: 3169; SEQ ID NO: 3170; SEQ ID NO: 3171; SEQ ID NO: 3172; SEQ ID NO: 3173; SEQ ID NO: 3174; SEQ ID NO: 3175; SEQ ID NO: 3176; SEQ ID NO: 3177; SEQ ID NO: 3178; SEQ ID NO: 3179; SEQ ID NO: 3180; SEQ ID NO: 3181; SEQ ID NO: 3182; SEQ ID NO: 3183; SEQ ID NO: 3184; SEQ ID NO: 3185; SEQ ID NO: 3186; SEQ ID NO: 3187; SEQ ID NO: 3188; SEQ ID NO: 3189; SEQ ID NO: 3190; SEQ ID NO: 3191; SEQ ID NO: 3192; SEQ ID NO: 3193; SEQ ID NO: 3194; SEQ ID NO: 3195; SEQ ID NO: 3196; SEQ ID NO: 3197; SEQ ID NO: 3198; SEQ ID NO: 3199; SEQ ID NO: 3200; SEQ ID NO: 3201; SEQ ID NO: 3202; SEQ ID NO: 3203; SEQ ID NO: 3204; SEQ ID NO: 3205; SEQ ID NO: 3206; SEQ ID NO: 3207; SEQ ID NO: 3208; SEQ ID NO: 3209; SEQ ID NO: 3210; SEQ ID NO: 3211; SEQ ID NO: 3212; SEQ ID NO: 3213; SEQ ID NO: 3214; SEQ ID NO: 3215; SEQ ID NO: 3216; SEQ ID NO: 3217; SEQ ID NO: 3218; SEQ ID NO: 3219; SEQ ID NO: 3220; SEQ ID NO: 3221; SEQ ID NO: 3222; SEQ ID NO: 3223; SEQ ID NO: 3224; SEQ ID NO: 3225; SEQ ID NO: 3226; SEQ ID NO: 3227; SEQ ID NO: 3228; SEQ ID NO: 3229; SEQ ID NO: 3230; SEQ ID NO: 3231; SEQ ID NO: 3232; SEQ ID NO: 3233; SEQ ID NO: 3234; SEQ ID NO: 3235; SEQ ID NO: 3236; SEQ ID NO: 3237; SEQ ID NO: 3238; SEQ ID NO: 3239; SEQ ID NO: 3240; SEQ ID NO: 3241; SEQ ID NO: 3242; SEQ ID NO: 3243; SEQ ID NO: 3244; SEQ ID NO: 3245; SEQ ID NO: 3246; SEQ ID NO: 3247; SEQ ID NO: 3248; SEQ ID NO: 3249; SEQ ID NO: 3250; SEQ ID NO: 3251; SEQ ID NO: 3252; SEQ ID NO: 3253; SEQ ID NO: 3254; SEQ ID NO: 3255; SEQ ID NO: 3256; SEQ ID NO: 3257; SEQ ID NO: 3258; SEQ ID NO: 3259; SEQ ID NO: 3260; SEQ ID NO: 3261; SEQ ID NO: 3262; SEQ ID NO: 3263; SEQ ID NO: 3264; SEQ ID NO: 3265; SEQ ID NO: 3266; SEQ ID NO: 3267; SEQ ID NO: 3268; SEQ ID NO: 3269; SEQ ID NO: 3270; SEQ ID NO: 3271; SEQ ID NO: 3272; SEQ ID NO: 3273; SEQ ID NO: 3274; SEQ ID NO: 3275; SEQ ID NO: 3276; SEQ ID NO: 3277; SEQ ID NO: 3278; SEQ ID NO: 3279; SEQ ID NO: 3280; SEQ ID NO: 3281; SEQ ID NO: 3282; SEQ ID NO: 3283; SEQ ID NO: 3284; SEQ ID NO: 3285; SEQ ID NO: 3286; SEQ ID NO: 3287; SEQ ID NO: 3288; SEQ ID NO: 3289; SEQ ID NO: 3290; SEQ ID NO: 3291; SEQ ID NO: 3292; SEQ ID NO: 3293; SEQ ID NO: 3294; SEQ ID NO: 3295; SEQ ID NO: 3296; SEQ ID NO: 3297; SEQ ID NO: 3298; SEQ ID NO: 3299; SEQ ID NO: 3300; SEQ ID NO: 3301; SEQ ID NO: 3302; SEQ ID NO: 3303; SEQ ID NO: 3304; SEQ ID NO: 3305; SEQ ID NO: 3306; SEQ ID NO: 3307; SEQ ID NO: 3308; SEQ ID NO: 3309; SEQ ID NO: 3310; SEQ ID NO: 3311; SEQ ID NO: 3312; SEQ ID NO: 3313; SEQ ID NO: 3314; SEQ ID NO: 3315; SEQ ID NO: 3316; SEQ ID NO: 3317; SEQ ID NO: 3318; SEQ ID NO: 3319; SEQ ID NO: 3320; SEQ ID NO: 3321; SEQ ID NO: 3322; SEQ ID NO: 3323; SEQ ID NO: 3324; SEQ ID NO: 3325; SEQ ID NO: 3326; SEQ ID NO: 3327; SEQ ID NO: 3328; SEQ ID NO: 3329; SEQ ID NO: 3330; SEQ ID NO: 3331; SEQ ID NO: 3332; SEQ ID NO: 3333; SEQ ID NO: 3334; SEQ ID NO: 3335; SEQ ID NO: 3336; SEQ ID NO: 3337; SEQ ID NO: 3338; SEQ ID NO: 3339; SEQ ID NO: 3340; SEQ ID NO: 3341; SEQ ID NO: 3342; SEQ ID NO: 3343; SEQ ID NO: 3344; SEQ ID NO: 3345; SEQ ID NO: 3346; SEQ ID NO: 3347; SEQ ID NO: 3348; SEQ ID NO: 3349; SEQ ID NO: 3350; SEQ ID NO: 3351; SEQ ID NO: 3352; SEQ ID NO: 3353; SEQ ID NO: 3354; SEQ ID NO: 3355; SEQ ID NO: 3356; SEQ ID NO: 3357; SEQ ID NO: 3358; SEQ ID NO: 3359; SEQ ID NO: 3360; SEQ ID NO: 3361; SEQ ID NO: 3362; SEQ ID NO: 3363; SEQ ID NO: 3364; SEQ ID NO: 3365; SEQ ID NO: 3366; SEQ ID NO: 3367; SEQ ID NO: 3368; SEQ ID NO: 3369; SEQ ID NO: 3370; SEQ ID NO: 3371; SEQ ID NO: 3372; SEQ ID NO: 3373; SEQ ID NO: 3374; SEQ ID NO: 3375; SEQ ID NO: 3376; SEQ ID NO: 3377; SEQ ID NO: 3378; SEQ ID NO: 3379; SEQ ID NO: 3380; SEQ ID NO: 3381; SEQ ID NO: 3382; SEQ ID NO: 3383; SEQ ID NO: 3384; SEQ ID NO: 3385; SEQ ID NO: 3386; SEQ ID NO: 3387; SEQ ID NO: 3388; SEQ ID NO: 3389; SEQ ID NO: 3390; SEQ ID NO: 3391; SEQ ID NO: 3392; SEQ ID NO: 3393; SEQ ID NO: 3394; SEQ ID NO: 3395; SEQ ID NO: 3396; SEQ ID NO: 3397; SEQ ID NO: 3398; SEQ ID NO: 3399; SEQ ID NO: 3400; SEQ ID NO: 3401; SEQ ID NO: 3402; SEQ ID NO: 3403; SEQ ID NO: 3404; SEQ ID NO: 3405; SEQ ID NO: 3406; SEQ ID NO: 3407; SEQ ID NO: 3408; SEQ ID NO: 3409; SEQ ID NO: 3410; SEQ ID NO: 3411; SEQ ID NO: 3412; SEQ ID NO: 3413; SEQ ID NO: 3414; SEQ ID NO: 3415; SEQ ID NO: 3416; SEQ ID NO: 3417; SEQ ID NO: 3418; SEQ ID NO: 3419; SEQ ID NO: 3420; SEQ ID NO: 3421; SEQ ID NO: 3422; SEQ ID NO: 3423; SEQ ID NO: 3424; SEQ ID NO: 3425; SEQ ID NO: 3426; SEQ ID NO: 3427; SEQ ID NO: 3428; SEQ ID NO: 3429; SEQ ID NO: 3430; SEQ ID NO: 3431; SEQ ID NO: 3432; SEQ ID NO: 3433; SEQ ID NO: 3434; SEQ ID NO: 3435; SEQ ID NO: 3436; SEQ ID NO: 3437; SEQ ID NO: 3438; SEQ ID NO: 3439; SEQ ID NO: 3440; SEQ ID NO: 3441; SEQ ID NO: 3442; SEQ ID NO: 3443; SEQ ID NO: 3444; SEQ ID NO: 3445; SEQ ID NO: 3446; SEQ ID NO: 3447; SEQ ID NO: 3448; SEQ ID NO: 3449; SEQ ID NO: 3450; SEQ ID NO: 3451; SEQ ID NO: 3452; SEQ ID NO: 3453; SEQ ID NO: 3454; SEQ ID NO: 3455; SEQ ID NO: 3456; SEQ ID NO: 3457; SEQ ID NO: 3458; SEQ ID NO: 3459, SEQ ID NO: 3460; SEQ ID NO: 3461; SEQ ID NO: 3462; SEQ ID NO: 3463; SEQ ID NO: 3464; SEQ ID NO: 3465; SEQ ID NO: 3466; SEQ ID NO: 3467; SEQ ID NO: 3468; SEQ ID NO: 3469; SEQ ID NO: 3470; SEQ ID NO: 3471; SEQ ID NO: 3472; SEQ ID NO: 3473; SEQ ID NO: 3474; SEQ ID NO: 3475; SEQ ID NO: 3476; SEQ ID NO: 3477; SEQ ID NO: 3478; SEQ ID NO: 3479; SEQ ID NO: 3480; SEQ ID NO: 3481; SEQ ID NO: 3482; SEQ ID NO: 3483; SEQ ID NO: 3484; SEQ ID NO: 3485; SEQ ID NO: 3486; SEQ ID NO: 3487; SEQ ID NO: 3488; SEQ ID NO: 3489; SEQ ID NO: 3490; SEQ ID NO: 3491; SEQ ID NO: 3492; SEQ ID NO: 3493; SEQ ID NO: 3494; SEQ ID NO: 3495; SEQ ID NO: 3496; SEQ ID NO: 3497; SEQ ID NO: 3498; SEQ ID NO: 3499; SEQ ID NO: 3500; SEQ ID NO: 3501; SEQ ID NO: 3502; SEQ ID NO: 3503; SEQ ID NO: 3504; SEQ ID NO: 3505; SEQ ID NO: 3506; SEQ ID NO: 3507; SEQ ID NO: 3508; SEQ ID NO: 3509; SEQ ID NO: 3510; SEQ ID NO: 3511; SEQ ID NO: 3512; SEQ ID NO: 3513; SEQ ID NO: 3514; SEQ ID NO: 3515; SEQ ID NO: 3516; SEQ ID NO: 3517; SEQ ID NO: 3518; SEQ ID NO: 3519; SEQ ID NO: 3520; SEQ ID NO: 3521; SEQ ID NO: 3522; SEQ ID NO: 3523; SEQ ID NO: 3524; SEQ ID NO: 3525; SEQ ID NO: 3526; SEQ ID NO: 3527; SEQ ID NO: 3528; SEQ ID NO: 3529; SEQ ID NO: 3530; SEQ ID NO: 3531; SEQ ID NO: 3532; SEQ ID NO: 3533; SEQ ID NO: 3534; SEQ ID NO: 3535; SEQ ID NO: 3536; SEQ ID NO: 3537; SEQ ID NO: 3538; SEQ ID NO: 3539; SEQ ID NO: 3540; SEQ ID NO: 3541; SEQ ID NO: 3542; SEQ ID NO: 3543; SEQ ID NO: 3544; SEQ ID NO: 3545; SEQ ID NO: 3546; SEQ ID NO: 3547; SEQ ID NO: 3548; SEQ ID NO: 3549; SEQ ID NO: 3550; SEQ ID NO: 3551; SEQ ID NO: 3552; SEQ ID NO: 3553; SEQ ID NO: 3554; SEQ ID NO: 3555; SEQ ID NO: 3556; SEQ ID NO: 3557; SEQ ID NO: 3558; SEQ ID NO: 3559; SEQ ID NO: 3560; SEQ ID NO: 3561; SEQ ID NO: 3562; SEQ ID NO: 3563; SEQ ID NO: 3564; SEQ ID NO: 3565; SEQ ID NO: 3566; SEQ ID NO: 3567; SEQ ID NO: 3568; SEQ ID NO: 3569; SEQ ID NO: 3570; SEQ ID NO: 3571; SEQ ID NO: 3572; SEQ ID NO: 3573; SEQ ID NO: 3574; SEQ ID NO: 3575; SEQ ID NO: 3576; SEQ ID NO: 3577; SEQ ID NO: 3578; SEQ ID NO: 3579; SEQ ID NO: 3580; SEQ ID NO: 3581; SEQ ID NO: 3582; SEQ ID NO: 3583; SEQ ID NO: 3584; SEQ ID NO: 3585; SEQ ID NO: 3586; SEQ ID NO: 3587; SEQ ID NO: 3588; SEQ ID NO: 3589; SEQ ID NO: 3590; SEQ ID NO: 3591; SEQ ID NO: 3592; SEQ ID NO: 3593; SEQ ID NO: 3594; SEQ ID NO: 3595; SEQ ID NO: 3596; SEQ ID NO: 3597; SEQ ID NO: 3598; SEQ ID NO: 3599; SEQ ID NO: 3600; SEQ ID NO: 3601; SEQ ID NO: 3602; SEQ ID NO: 3603; SEQ ID NO: 3604; SEQ ID NO: 3605; SEQ ID NO: 3606; SEQ ID NO: 3607; SEQ ID NO: 3608; SEQ ID NO: 3609; SEQ ID NO: 3610; SEQ ID NO: 3611; SEQ ID NO: 3612; SEQ ID NO: 3613; SEQ ID NO: 3614; SEQ ID NO: 3615; SEQ ID NO: 3616; SEQ ID NO: 3617; SEQ ID NO: 3618; SEQ ID NO: 3619; SEQ ID NO: 3620; SEQ ID NO: 3621; SEQ ID NO: 3622; SEQ ID NO: 3623; SEQ ID NO: 3624; SEQ ID NO: 3625; SEQ ID NO: 3626; SEQ ID NO: 3627; SEQ ID NO: 3628; SEQ ID NO: 3629; SEQ ID NO: 3630; SEQ ID NO: 3631; SEQ ID NO: 3632; SEQ ID NO: 3633; SEQ ID NO: 3634; SEQ ID NO: 3635; SEQ ID NO: 3636; SEQ ID NO: 3637; SEQ ID NO: 3638; SEQ ID NO: 3639; SEQ ID NO: 3640; SEQ ID NO: 3641; SEQ ID NO: 3642; SEQ ID NO: 3643; SEQ ID NO: 3644; SEQ ID NO: 3645; SEQ ID NO: 3646; SEQ ID NO: 3647; SEQ ID NO: 3648; SEQ ID NO: 3649; SEQ ID NO: 3650; SEQ ID NO: 3651; SEQ ID NO: 3652; SEQ ID NO: 3653; SEQ ID NO: 3654; SEQ ID NO: 3655; SEQ ID NO: 3656; SEQ ID NO: 3657; SEQ ID NO: 3658; SEQ ID NO: 3659; SEQ ID NO: 3660; SEQ ID NO: 3661; SEQ ID NO: 3662; SEQ ID NO: 3663; SEQ ID NO: 3664; SEQ ID NO: 3665; SEQ ID NO: 3666; SEQ ID NO: 3667; SEQ ID NO: 3668; SEQ ID NO: 3669; SEQ ID NO: 3670; SEQ ID NO: 3671; SEQ ID NO: 3672; SEQ ID NO: 3673; SEQ ID NO: 3674; SEQ ID NO: 3675; SEQ ID NO: 3676; SEQ ID NO: 3677; SEQ ID NO: 3678; SEQ ID NO: 3679; SEQ ID NO: 3680; SEQ ID NO: 3681; SEQ ID NO: 3682; SEQ ID NO: 3683; SEQ ID NO: 3684; SEQ ID NO: 3685; SEQ ID NO: 3686; SEQ ID NO: 3687; SEQ ID NO: 3688; SEQ ID NO: 3689; SEQ ID NO: 3690; SEQ ID NO: 3691; SEQ ID NO: 3692; SEQ ID NO: 3693; SEQ ID NO: 3694; SEQ ID NO: 3695; SEQ ID NO: 3696; SEQ ID NO: 3697; SEQ ID NO: 3698; SEQ ID NO: 3699; SEQ ID NO: 3700; SEQ ID NO: 3701; SEQ ID NO: 3702; SEQ ID NO: 3703; SEQ ID NO: 3704; SEQ ID NO: 3705; SEQ ID NO: 3706; SEQ ID NO: 3707; SEQ ID NO: 3708; SEQ ID NO: 3709; SEQ ID NO: 3710; SEQ ID NO: 3711; SEQ ID NO: 3712; SEQ ID NO: 3713; SEQ ID NO: 3714; SEQ ID NO: 3715; SEQ ID NO: 3716; SEQ ID NO: 3717; SEQ ID NO: 3718; SEQ ID NO: 3719; SEQ ID NO: 3720; SEQ ID NO: 3721; SEQ ID NO: 3722; SEQ ID NO: 3723; SEQ ID NO: 3724; SEQ ID NO: 3725; SEQ ID NO: 3726; SEQ ID NO: 3727; SEQ ID NO: 3728; SEQ ID NO: 3729; SEQ ID NO: 3730; SEQ ID NO: 3731; SEQ ID NO: 3732; SEQ ID NO: 3733; SEQ ID NO: 3734; SEQ ID NO: 3735; SEQ ID NO: 3736; SEQ ID NO: 3737; SEQ ID NO: 3738; SEQ ID NO: 3739; SEQ ID NO: 3740; SEQ ID NO: 3741; SEQ ID NO: 3742; SEQ ID NO: 3743; SEQ ID NO: 3744; SEQ ID NO: 3745; SEQ ID NO: 3746; SEQ ID NO: 3747; SEQ ID NO: 3748; SEQ ID NO: 3749; SEQ ID NO: 3750; SEQ ID NO: 3751; SEQ ID NO: 3752; SEQ ID NO: 3753; SEQ ID NO: 3754; SEQ ID NO: 3755; SEQ ID NO: 3756; SEQ ID NO: 3757; SEQ ID NO: 3758; SEQ ID NO: 3759; SEQ ID NO: 3760; SEQ ID NO: 3761; SEQ ID NO: 3762; SEQ ID NO: 3763; SEQ ID NO: 3764; SEQ ID NO: 3765; SEQ ID NO: 3766; SEQ ID NO: 3767; SEQ ID NO: 3768; SEQ ID NO: 3769; SEQ ID NO: 3770; SEQ ID NO: 3771; SEQ ID NO: 3772; SEQ ID NO: 3773; SEQ ID NO: 3774; SEQ ID NO: 3775; SEQ ID NO: 3776; SEQ ID NO: 3777; SEQ ID NO: 3778; SEQ ID NO: 3779; SEQ ID NO: 3780; SEQ ID NO: 3781; SEQ ID NO: 3782; SEQ ID NO: 3783; SEQ ID NO: 3784; SEQ ID NO: 3785; SEQ ID NO: 3786; SEQ ID NO: 3787; SEQ ID NO: 3788; SEQ ID NO: 3789; SEQ ID NO: 3790; SEQ ID NO: 3791; SEQ ID NO: 3792; SEQ ID NO: 3793; SEQ ID NO: 3794; SEQ ID NO: 3795; SEQ ID NO: 3796; SEQ ID NO: 3797; SEQ ID NO: 3798; SEQ ID NO: 3799; SEQ ID NO: 3800; SEQ ID NO: 3801; SEQ ID NO: 3802; SEQ ID NO: 3803; SEQ ID NO: 3804; SEQ ID NO: 3805; SEQ ID NO: 3806; SEQ ID NO: 3807; SEQ ID NO: 3808; SEQ ID NO: 3809; SEQ ID NO: 3810; SEQ ID NO: 3811; SEQ ID NO: 3812; SEQ ID NO: 3813; SEQ ID NO: 3814; SEQ ID NO: 3815; SEQ ID NO: 3816; SEQ ID NO: 3817; SEQ ID NO: 3818; SEQ ID NO: 3819; SEQ ID NO: 3820; SEQ ID NO: 3821; SEQ ID NO: 3822; SEQ ID NO: 3823; SEQ ID NO: 3824; SEQ ID NO: 3825; SEQ ID NO: 3826; SEQ ID NO: 3827; SEQ ID NO: 3828; SEQ ID NO: 3829; SEQ ID NO: 3830; SEQ ID NO: 3831; SEQ ID NO: 3832; SEQ ID NO: 3833; SEQ ID NO: 3834; SEQ ID NO: 3835; SEQ ID NO: 3836; SEQ ID NO: 3837; SEQ ID NO: 3838; SEQ ID NO: 3839; SEQ ID NO: 3840; SEQ ID NO: 3841; SEQ ID NO: 3842; SEQ ID NO: 3843; SEQ ID NO: 3844; SEQ ID NO: 3845; SEQ ID NO: 3846; SEQ ID NO: 3847; SEQ ID NO: 3848; SEQ ID NO: 3849; SEQ ID NO: 3850; SEQ ID NO: 3851; SEQ ID NO: 3852; SEQ ID NO: 3853; SEQ ID NO: 3854; SEQ ID NO: 3855; SEQ ID NO: 3856; SEQ ID NO: 3857; SEQ ID NO: 3858; SEQ ID NO: 3859; SEQ ID NO: 3860; SEQ ID NO: 3861; SEQ ID NO: 3862; SEQ ID NO: 3863; SEQ ID NO: 3864; SEQ ID NO: 3865; SEQ ID NO: 3866; SEQ ID NO: 3867; SEQ ID NO: 3868; SEQ ID NO: 3869; SEQ ID NO: 3870; SEQ ID NO: 3871; SEQ ID NO: 3872; SEQ ID NO: 3873; SEQ ID NO: 3874; SEQ ID NO: 3875; SEQ ID NO: 3876; SEQ ID NO: 3877; SEQ ID NO: 3878; SEQ ID NO: 3879; SEQ ID NO: 3880; SEQ ID NO: 3881; SEQ ID NO: 3882; SEQ ID NO: 3883; SEQ ID NO: 3884; SEQ ID NO: 3885; SEQ ID NO: 3886; SEQ ID NO: 3887; SEQ ID NO: 3888; SEQ ID NO: 3889; SEQ ID NO: 3890; SEQ ID NO: 3891; SEQ ID NO: 3892; SEQ ID NO: 3893; SEQ ID NO: 3894; SEQ ID NO: 3895; SEQ ID NO: 3896; SEQ ID NO: 3897; SEQ ID NO: 3898; SEQ ID NO: 3899; SEQ ID NO: 3900; SEQ ID NO: 3901; SEQ ID NO: 3902; SEQ ID NO: 3903; SEQ ID NO: 3904; SEQ ID NO: 3905; SEQ ID NO: 3906; SEQ ID NO: 3907; SEQ ID NO: 3908; SEQ ID NO: 3909; SEQ ID NO: 3910; SEQ ID NO: 3911; SEQ ID NO: 3912; SEQ ID NO: 3913; SEQ ID NO: 3914; SEQ ID NO: 3915; SEQ ID NO: 3916; SEQ ID NO: 3917; SEQ ID NO: 3918; SEQ ID NO: 3919; SEQ ID NO: 3920; SEQ ID NO: 3921; SEQ ID NO: 3922; SEQ ID NO: 3923; SEQ ID NO: 3924; SEQ ID NO: 3925; SEQ ID NO: 3926; SEQ ID NO: 3927; SEQ ID NO: 3928; SEQ ID NO: 3929; SEQ ID NO: 3930; SEQ ID NO: 3931; SEQ ID NO: 3932; SEQ ID NO: 3933; SEQ ID NO: 3934; SEQ ID NO: 3935; SEQ ID NO: 3936; SEQ ID NO: 3937; SEQ ID NO: 3938; SEQ ID NO: 3939; SEQ ID NO: 3940; SEQ ID NO: 3941; SEQ ID NO: 3942; SEQ ID NO: 3943; SEQ ID NO: 3944; SEQ ID NO: 3945; SEQ ID NO: 3946; SEQ ID NO: 3947; SEQ ID NO: 3948; SEQ ID NO: 3949; SEQ ID NO: 3950; SEQ ID NO: 3951; SEQ ID NO: 3952; SEQ ID NO: 3953; SEQ ID NO: 3954; SEQ ID NO: 3955; SEQ ID NO: 3956; SEQ ID NO: 3957; SEQ ID NO: 3958; SEQ ID NO: 3959; SEQ ID NO: 3960; SEQ ID NO: 3961; SEQ ID NO: 3962; SEQ ID NO: 3963; SEQ ID NO: 3964; SEQ ID NO: 3965; SEQ ID NO: 3966; SEQ ID NO: 3967; SEQ ID NO: 3968; SEQ ID NO: 3969; SEQ ID NO: 3970; SEQ ID NO: 3971; SEQ ID NO: 3972; SEQ ID NO: 3973; SEQ ID NO: 3974; SEQ ID NO: 3975; SEQ ID NO: 3976; SEQ ID NO: 3977; SEQ ID NO: 3978; SEQ ID NO: 3979; SEQ ID NO: 3980; SEQ ID NO: 3981; SEQ ID NO: 3982; SEQ ID NO: 3983; SEQ ID NO: 3984; SEQ ID NO: 3985; SEQ ID NO: 3986; SEQ ID NO: 3987; SEQ ID NO: 3988; SEQ ID NO: 3989; SEQ ID NO: 3990; SEQ ID NO: 3991; SEQ ID NO: 3992; SEQ ID NO: 3993; SEQ ID NO: 3994; SEQ ID NO: 3995; SEQ ID NO: 3996; SEQ ID NO: 3997; SEQ ID NO: 3998; SEQ ID NO: 3999; SEQ ID NO: 4000; SEQ ID NO: 4001; SEQ ID NO: 4002; SEQ ID NO: 4003; SEQ ID NO: 4004; SEQ ID NO: 4005; SEQ ID NO: 4006; SEQ ID NO: 4007; SEQ ID NO: 4008; SEQ ID NO: 4009; SEQ ID NO: 4010; SEQ ID NO: 4011; SEQ ID NO: 4012; SEQ ID NO: 4013; SEQ ID NO: 4014; SEQ ID NO: 4015; and SEQ ID NO: 9593; SEQ ID NO: 9594; SEQ ID NO: 9595; SEQ ID NO: 9596; SEQ ID NO: 9597; SEQ ID NO: 9598; SEQ ID NO: 9599; SEQ ID NO: 9600; SEQ ID NO: 9601; SEQ ID NO: 9602; SEQ ID NO: 9603; SEQ ID NO: 9604; SEQ ID NO: 9605; SEQ ID NO: 9606; SEQ ID NO: 9607; SEQ ID NO: 9608; SEQ ID NO: 9609; SEQ ID NO: 9610; SEQ ID NO: 9611; SEQ ID NO: 9612; SEQ ID NO: 9613; SEQ ID NO: 9614; SEQ ID NO: 9615; SEQ ID NO: 9616; SEQ ID NO: 9617; SEQ ID NO: 9618; SEQ ID NO: 9619; SEQ ID NO: 9620; SEQ ID NO: 9621, or a complement thereof.

[0075] In one embodiment, the H. pylori cytoplasmic polypeptide or a fragment thereof is an H. pylori polypeptide or a fragment thereof involved in energy metabolism encoded by a nucleic acid having a nucleotide sequence selected from the group consisting of SEQ ID NO: 1576; SEQ ID NO: 1577; SEQ ID NO: 1578; SEQ ID NO: 1579; SEQ ID NO: 1580; SEQ ID NO: 1581; SEQ ID NO: 1582; SEQ ID NO: 1583; SEQ ID NO: 1584; SEQ ID NO: 1585; SEQ ID NO: 1586; SEQ ID NO: 1587; SEQ ID NO: 1588; SEQ ID NO: 1589; SEQ ID NO: 1590; SEQ ID NO: 1591; SEQ ID NO: 1592; SEQ ID NO: 1593; SEQ ID NO: 1594; SEQ ID NO: 1595; SEQ ID NO: 1596; SEQ ID NO: 1597; SEQ ID NO: 1598; SEQ ID NO: 1599; SEQ ID NO: 1600; SEQ ID NO: 1601; SEQ ID NO: 1602; SEQ ID NO: 1603; SEQ ID NO: 1604; SEQ ID NO: 1605; SEQ ID NO: 1606; SEQ ID NO: 1607; SEQ ID NO: 1608; SEQ ID NO: 1609; SEQ ID NO: 1610; SEQ ID NO: 1611; SEQ ID NO: 1612; SEQ ID NO: 1613; SEQ ID NO: 1614; SEQ ID NO: 1615; SEQ ID NO: 1616; SEQ ID NO: 1617; SEQ ID NO: 1618; SEQ ID NO: 1619; SEQ ID NO: 1620; SEQ ID NO: 1621; SEQ ID NO: 1622; SEQ ID NO: 1623; SEQ ID NO: 1624; SEQ ID NO: 1625; SEQ ID NO: 1626; SEQ ID NO: 1627; SEQ ID NO: 1628; SEQ ID NO: 1629; SEQ ID NO: 1630; SEQ ID NO: 1631; SEQ ID NO: 1632; SEQ ID NO: 1633; SEQ ID NO: 1634; SEQ ID NO: 1635; SEQ ID NO: 1636; SEQ ID NO: 1637; SEQ ID NO: 1638; SEQ ID NO: 1639; SEQ ID NO: 1640; SEQ ID NO: 1641; SEQ ID NO: 1642; SEQ ID NO: 1643; SEQ ID NO: 1644; SEQ ID NO: 1645; SEQ ID NO: 1646; SEQ ID NO: 1647; SEQ ID NO: 1648; SEQ ID NO: 1649; SEQ ID NO: 1650; SEQ ID NO: 1651; SEQ ID NO: 1652; SEQ ID NO: 1653; SEQ ID NO: 1654; SEQ ID NO: 1655; SEQ ID NO: 1656; SEQ ID NO: 1657; SEQ ID NO: 1658; SEQ ID NO: 1659; SEQ ID NO: 1660; SEQ ID NO: 1661; SEQ ID NO: 1662; SEQ ID NO: 1663; SEQ ID NO: 1664; SEQ ID NO: 1665; SEQ ID NO: 1666; SEQ ID NO: 1667; SEQ ID NO: 1668; SEQ ID NO: 1669; SEQ ID NO: 1670; SEQ ID NO: 1671; SEQ ID NO: 1672; SEQ ID NO: 1673; SEQ ID NO: 1674; SEQ ID NO: 1675; SEQ ID NO: 1676; SEQ ID NO: 1677; SEQ ID NO: 1678; SEQ ID NO: 1679; SEQ ID NO: 1680; SEQ ID NO: 1681; SEQ ID NO: 1682; SEQ ID NO: 1683; SEQ ID NO: 1684; SEQ ID NO: 1685; SEQ ID NO: 1686; SEQ ID NO: 1687; SEQ ID NO: 1688; SEQ ID NO: 1689; SEQ ID NO: 1690; SEQ ID NO: 1691; SEQ ID NO: 1692; SEQ ID NO: 1693; SEQ ID NO: 1694; SEQ ID NO: 1695; SEQ ID NO: 1696; SEQ ID NO: 1697; SEQ ID NO: 1698; SEQ ID NO: 1699; SEQ ID NO: 1700; SEQ ID NO: 1701; SEQ ID NO: 1702; SEQ ID NO: 1703; SEQ ID NO: 1704; SEQ ID NO: 1705; SEQ ID NO: 1706; SEQ ID NO: 1707; SEQ ID NO: 1708; SEQ ID NO: 1709; SEQ ID NO: 1710; SEQ ID NO: 1711; SEQ ID NO: 1712; SEQ ID NO: 1713; SEQ ID NO: 1714; SEQ ID NO: 1715; SEQ ID NO: 1716; SEQ ID NO: 1717; SEQ ID NO: 1718; SEQ ID NO: 1719; SEQ ID NO: 1720; SEQ ID NO: 1721; SEQ ID NO: 1722; SEQ ID NO: 1723; SEQ ID NO: 1724; SEQ ID NO: 1725; and SEQ ID NO: 9593; SEQ ID NO: 9594, or a complement thereof.

[0076] In another embodiment, the H. pylori cytoplasmic polypeptide or a fragment thereof is an H. pylori polypeptide or a fragment thereof involved in amino acid metabolism encoded by a nucleic acid having a nucleotide sequence selected from the group consisting of SEQ ID NO: 1726; SEQ ID NO: 1727; SEQ ID NO: 1728; SEQ ID NO: 1729; SEQ ID NO: 1730; SEQ ID NO: 1731; SEQ ID NO: 1732; SEQ ID NO: 1733; SEQ ID NO: 1734; SEQ ID NO: 1735; SEQ ID NO: 1736; SEQ ID NO: 1737; SEQ ID NO: 1738; SEQ ID NO: 1739; SEQ ID NO: 1740; SEQ ID NO: 1741; SEQ ID NO: 1742; SEQ ID NO: 1743; SEQ ID NO: 1744; SEQ ID NO: 1745; SEQ ID NO: 1746; SEQ ID NO: 1747; SEQ ID NO: 1748; SEQ ID NO: 1749; SEQ ID NO: 1750; SEQ ID NO: 1751; SEQ ID NO: 1752; SEQ ID NO: 1753; SEQ ID NO: 1754; SEQ ID NO: 1755; SEQ ID NO: 1756; SEQ ID NO: 1757; SEQ ID NO: 1758; SEQ ID NO: 1759; SEQ ID NO: 1760; SEQ ID NO: 1761; SEQ ID NO: 1762; SEQ ID NO: 1763; SEQ ID NO: 1764; SEQ ID NO: 1765; SEQ ID NO: 1766; SEQ ID NO: 1767; SEQ ID NO: 1768; SEQ ID NO: 1769; SEQ ID NO: 1770; SEQ ID NO: 1771; SEQ ID NO: 1772; SEQ ID NO: 1773; SEQ ID NO: 1774; SEQ ID NO: 1775; SEQ ID NO: 1776; SEQ ID NO: 1777; SEQ ID NO: 1778; SEQ ID NO: 1779; SEQ ID NO: 1780; SEQ ID NO: 1781; SEQ ID NO: 1782; SEQ ID NO: 1783; SEQ ID NO: 1784; SEQ ID NO: 1785; SEQ ID NO: 1786; SEQ ID NO: 1787; SEQ ID NO: 1788; SEQ ID NO: 1789; SEQ ID NO: 1790; SEQ ID NO: 1791; SEQ ID NO: 1792; SEQ ID NO: 1793; SEQ ID NO: 1794; SEQ ID NO: 1795; SEQ ID NO: 1796; SEQ ID NO: 1797; SEQ ID NO: 1798; SEQ ID NO: 1799; SEQ ID NO: 1800; SEQ ID NO: 1801; SEQ ID NO: 1802; SEQ ID NO: 1803; SEQ ID NO: 1804; SEQ ID NO: 1805; SEQ ID NO: 1806; SEQ ID NO: 1807; SEQ ID NO: 1808; SEQ ID NO: 1809; SEQ ID NO: 1810; SEQ ID NO: 1811; SEQ ID NO: 1812; SEQ ID NO: 1813; SEQ ID NO: 1814; SEQ ID NO: 1815; SEQ ID NO: 1816; SEQ ID NO: 1817; SEQ ID NO: 1818; SEQ ID NO: 1819; SEQ ID NO: 1820; SEQ ID NO: 1821; SEQ ID NO: 1822; SEQ ID NO: 1823; SEQ ID NO: 1824; SEQ ID NO: 1825; SEQ ID NO: 1826; SEQ ID NO: 1827; SEQ ID NO: 1828; SEQ ID NO: 1829; SEQ ID NO: 1830; SEQ ID NO: 1831; SEQ ID NO: 1832; SEQ ID NO: 1833; SEQ ID NO: 1834; SEQ ID NO: 1835; SEQ ID NO: 1836; SEQ ID NO: 1837; SEQ ID NO: 1838; SEQ ID NO: 1839; SEQ ID NO: 1840; SEQ ID NO: 1841; SEQ ID NO: 1842; SEQ ID NO: 1843; SEQ ID NO: 1844; SEQ ID NO: 1845; SEQ ID NO: 1846; SEQ ID NO: 1847; SEQ ID NO: 1848; SEQ ID NO: 1849; SEQ ID NO: 1850; SEQ ID NO: 1851; SEQ ID NO: 1852; SEQ ID NO: 1853; SEQ ID NO: 1854; SEQ ID NO: 1855; SEQ ID NO: 1856; SEQ ID NO: 1857; SEQ ID NO: 1858; SEQ ID NO: 1859; SEQ ID NO: 1860; SEQ ID NO: 1861; SEQ ID NO: 1862; SEQ ID NO: 1863; SEQ ID NO: 1864; SEQ ID NO: 1865; SEQ ID NO: 1866; SEQ ID NO: 1867; SEQ ID NO: 1868 and SEQ ID NO: 9595; SEQ ID NO: 9596, or a complement thereof.

[0077] In another embodiment, the H. pylori cytoplasmic polypeptide or a fragment thereof is an H. pylori polypeptide or a fragment thereof involved in cofactor metabolism encoded by a nucleic acid having a nucleotide sequence selected from the group consisting of SEQ ID NO: 1869; SEQ ID NO: 1870; SEQ ID NO: 1871; SEQ ID NO: 1872; SEQ ID NO: 1873; SEQ ID NO: 1874; SEQ ID NO: 1875; SEQ ID NO: 1876; SEQ ID NO: 1877; SEQ ID NO: 1878; SEQ ID NO: 1879; SEQ ID NO: 1880; SEQ ID NO: 1881; SEQ ID NO: 1882; SEQ ID NO: 1883; SEQ ID NO: 1884; SEQ ID NO: 1885; SEQ ID NO: 1886; SEQ ID NO: 1887; SEQ ID NO: 1888; SEQ ID NO: 1889; SEQ ID NO: 1890; SEQ ID NO: 1891; SEQ ID NO: 1892; SEQ ID NO: 1893; SEQ ID NO: 1894; SEQ ID NO: 1895; SEQ ID NO: 1896; SEQ ID NO: 1897; SEQ ID NO: 1898; SEQ ID NO: 1899; SEQ ID NO: 1900; SEQ ID NO: 1901; SEQ ID NO: 1902; SEQ ID NO: 1903; SEQ ID NO: 1904; SEQ ID NO: 1905;-SEQ ID NO: 1906; SEQ ID NO: 1907; SEQ ID NO: 1908; SEQ ID NO: 1909; SEQ ID NO: 1910; SEQ ID NO: 1911; SEQ ID NO: 1912; SEQ ID NO: 1913; SEQ ID NO: 1914; SEQ ID NO: 1915; SEQ ID NO: 1916; SEQ ID NO: 1917; SEQ ID NO: 1918; SEQ ID NO: 1919; SEQ ID NO: 1920; SEQ ID NO: 1921; SEQ ID NO: 1922; SEQ ID NO: 1923; SEQ ID NO: 1924; SEQ ID NO: 1925; SEQ ID NO: 1926; SEQ ID NC. 927; SEQ ID NO: 1928; SEQ ID NO: 1929; SEQ ID NO: 1930; SEQ ID NO: 1931; SEQ ID NO: 1932; SEQ ID NO: 1933; SEQ ID NO: 1934; SEQ ID NO: 1935; SEQ ID NO: 1936; SEQ ID NO: 1937; SEQ ID NO: 1938; SEQ ID NO: 1939; SEQ ID NO: 1940; SEQ ID NO: 1941; SEQ ID NO: 1942; SEQ ID NO: 1943; SEQ ID NO: 1944; SEQ ID NO: 1945; SEQ ID NO: 1946; SEQ ID NO: 1947; SEQ ID NO: 1948; SEQ ID NO: 1949; SEQ ID NO: 1950; SEQ ID NO: 1951; SEQ ID NO: 1952; SEQ ID NO: 1953; SEQ ID NO: 1954; SEQ ID NO: 1955; SEQ ID NO: 1956; SEQ ID NO: 1957; SEQ ID NO: 1958; SEQ ID NO: 1959; SEQ ID NO: 1960; SEQ ID NO: 1961; SEQ ID NO: 1962; SEQ ID NO: 1963; SEQ ID NO: 1964; SEQ ID NO: 1965; SEQ ID NO: 1966; SEQ ID NO: 1967; SEQ ID NO: 1968; SEQ ID NO: 1969; SEQ ID NO: 1970; SEQ ID NO: 1971; SEQ ID NO: 1972; SEQ ID NO: 1973; SEQ ID NO: 1974; SEQ ID NO: 1975; SEQ ID NO: 1976; SEQ ID NO: 1977; SEQ ID NO: 1978; SEQ ID NO: 1979; SEQ ID NO: 1980; SEQ ID NO: 1981; SEQ ID NO: 1982; SEQ ID NO: 1983; SEQ ID NO: 1984; SEQ ID NO: 1985; SEQ ID NO: 1986; SEQ ID NO: 1987; SEQ ID NO: 1988; SEQ ID NO: 1989; SEQ ID NO: 1990; SEQ ID NO: 1991; SEQ ID NO: 1992; SEQ ID NO: 1993; SEQ ID NO: 1994; SEQ ID NO: 1995; SEQ ID NO: 1996; SEQ ID NO: 1997; SEQ ID NO: 1998; SEQ ID NO: 1999; SEQ ID NO: 2000; SEQ ID NO: 2001; SEQ ID NO: 2002; SEQ ID NO: 2003; SEQ ID NO: 2004; SEQ ID NO: 2005; and SEQ ID NO: 9597, or a complement thereof.

[0078] In another embodiment, the H. pylori cytoplasmic polypeptide or a fragment thereof is an H. pylori polypeptide or a fragment thereof involved in carbohydrate metabolism encoded by a nucleic acid having a nucleotide sequence selected from the group consisting of SEQ ID NO: 2006; SEQ ID NO: 2007; SEQ ID NO: 2008; SEQ ID NO: 2009; SEQ ID NO: 2010; SEQ ID NO: 2011; SEQ ID NO: 2012; SEQ ID NO: 2013; SEQ ID NO: 2014; SEQ ID NO: 2015; SEQ ID NO: 2016; SEQ ID NO: 2017; SEQ ID NO: 2018; SEQ ID NO: 2019; SEQ ID NO: 2020; SEQ ID NO: 2021; SEQ ID NO: 2022; SEQ ID NO: 2023; SEQ ID NO: 2024; SEQ ID NO: 2025; SEQ ID NO: 2026; SEQ ID NO: 2027; SEQ ID NO: 2028; SEQ ID NO: 2029; SEQ ID NO: 2030; SEQ ID NO: 2031; SEQ ID NO: 2032; SEQ ID NO: 2033; SEQ ID NO: 2034; SEQ ID NO: 2035; SEQ ID NO: 2036; SEQ ID NO: 2037; SEQ ID NO: 2038; SEQ ID NO: 2039; SEQ ID NO: 2040; SEQ ID NO: 2041; SEQ ID NO: 2042; SEQ ID NO: 2043; SEQ ID NO: 2044; SEQ ID NO: 2045; SEQ ID NO: 2046; SEQ ID NO: 2047; SEQ ID NO: 2048; SEQ ID NO: 2049; SEQ ID NO: 2050; SEQ ID NO: 2051; SEQ ID NO: 2052; SEQ ID NO: 2053; SEQ ID NO: 2054; SEQ ID NO: 2055; SEQ ID NO: 2056; SEQ ID NO: 2057; SEQ ID NO: 2058; SEQ ID NO: 2059; SEQ ID NO: 2060; SEQ ID NO: 2061; SEQ ID NO: 2062; SEQ ID NO: 2063; SEQ ID NO: 2064; SEQ ID NO: 2065; SEQ ID NO: 2066; SEQ ID NO: 2067; SEQ ID NO: 2068; SEQ ID NO: 2069; SEQ ID NO: 2070; SEQ ID NO: 2071; SEQ ID NO: 2072; SEQ ID NO: 2073; SEQ ID NO: 2074; SEQ ID NO: 2075; SEQ ID NO: 2076; and SEQ ID NO: 9598; SEQ ID NO: 9599, or a complement thereof.

[0079] In another embodiment, the H. pylori cytoplasmic polypeptide or a fragment thereof is an H. pylori polypeptide or a fragment thereof involved in nucleic acid metabolism encoded by a nucleic acid having a nucleotide sequence selected from the group consisting of SEQ ID NO: 2077; SEQ ID NO: 2078; SEQ ID NO: 2079; SEQ ID NO: 2080; SEQ ID NO: 2081; SEQ ID NO: 2082; SEQ ID NO: 2083; SEQ ID NO: 2084; SEQ ID NO: 2085; SEQ ID NO: 2086; SEQ ID NO: 2087; SEQ ID NO: 2088; SEQ ID NO: 2089; SEQ ID NO: 2090; SEQ ID NO: 2091; SEQ ID NO: 2092; SEQ ID NO: 2093; SEQ ID NO: 2094; SEQ ID NO: 2095; SEQ ID NO: 2096; SEQ ID NO: 2097; SEQ ID NO: 2098; SEQ ID NO: 2099; SEQ ID NO: 2100; SEQ ID NO: 2101; SEQ ID NO: 2102; SEQ ID NO: 2103; SEQ ID NO: 2104; SEQ ID NO: 2105; SEQ ID NO: 2106; SEQ ID NO: 2107; SEQ ID NO: 2108; SEQ ID NO: 2109; SEQ ID NO: 2110; SEQ ID NO: 2111; SEQ ID NO: 2112; SEQ ID NO: 2113; SEQ ID NO: 2114; SEQ ID NO:2115; SEQ ID NO:2116; SEQ ID NO:2117; SEQ ID NO:2118; SEQ ID NO: 2119; SEQ ID NO: 2120; SEQ ID NO: 2121; SEQ ID NO: 2122; SEQ ID NO: 2123; SEQ ID NO: 2124; SEQ ID NO: 2125; SEQ ID NO: 2126; SEQ ID NO: 2127; SEQ ID NO: 2128; SEQ ID NO: 2129; SEQ ID NO: 2130; SEQ ID NO: 2131; SEQ ID NO: 2132; SEQ ID NO: 2133; SEQ ID NO: 2134; SEQ ID NO: 2135; SEQ ID NO: 2136; SEQ ID NO: 2137; SEQ ID NO: 2138; SEQ ID NO: 2139; SEQ ID NO: 2140; SEQ ID NO: 2141; SEQ ID NO: 2142; SEQ ID NO: 2143; SEQ ID NO: 2144; SEQ ID NO: 2145; SEQ ID NO: 2146; SEQ ID NO: 2147; SEQ ID NO: 2148; SEQ ID NO: 2149; SEQ ID NO: 2150; SEQ ID NO: 2151; SEQ ID NO: 2152; SEQ ID NO: 2153; SEQ ID NO: 2154; SEQ ID NO: 2155; SEQ ID NO: 2156; SEQ ID NO: 2157; SEQ ID NO: 2158; SEQ ID NO:2159; SEQ ID NO:2160; SEQ ID NO:2161; SEQ ID NO: 2162; SEQ ID NO: 2163; SEQ ID NO: 2164; SEQ ID NO: 2165; SEQ ID NO: 2166; SEQ ID NO: 2167; SEQ ID NO: 2168; SEQ ID NO: 2169; SEQ ID NO: 2170; SEQ ID NO: 2171; SEQ ID NO: 2172; SEQ ID NO: 2173; SEQ ID NO: 2174; SEQ ID NO: 2175; SEQ ID NO: 2176; SEQ ID NO: 2177; SEQ ID NO: 2178; SEQ ID NO: 2179; SEQ ID NO: 2180; SEQ ID NO: 2181; SEQ ID NO: 2182; and SEQ ID NO: 9600, or a complement thereof.

[0080] In another embodiment, the H. pylori cytoplasmic polypeptide or a fragment thereof is an H. pylori polypeptide or a fragment thereof involved in lipid metabolism encoded by a nucleic acid having a nucleotide sequence selected from the group consisting of SEQ ID NO: 2183; SEQ ID NO: 2184; SEQ ID NO: 2185; SEQ ID NO: 2186; SEQ ID NO: 2187; SEQ ID NO: 2188; SEQ ID NO: 2189; SEQ ID NO: 2190; SEQ ID NO: 2191; SEQ ID NO: 2192; SEQ ID NO: 2193; SEQ ID NO: 2194; SEQ ID NO 2195; SEQ ID NO: 2196; SEQ ID NO: 2197; SEQ ID NO: 2198; SEQ ID NO: 2199; SEQ ID NO: 2200; SEQ ID NO: 2201; SEQ ID NO: 2202; SEQ ID NO: 2203; SEQ ID NO: 2204; SEQ ID NO: 2205; SEQ ID NO: 2206; SEQ ID NO: 2207; SEQ ID NO: 2208; SEQ ID NO: 2209; SEQ ID NO: 2210; SEQ ID NO: 2211; SEQ ID NO: 2212; SEQ ID NO: 2213; SEQ ID NO: 2214; SEQ ID NO: 2215; SEQ ID NO: 2216; SEQ ID NO: 2217; SEQ ID NO: 2218; and SEQ ID NO: 9601; SEQ ID NO: 9602, or a complement thereof.

[0081] In another embodiment, the H. pylori cytoplasmic polypeptide or a fragment thereof is an H. pylori polypeptide or a fragment thereof involved in mRNA translation and ribosome biogenesis encoded by a nucleic acid having a nucleotide sequence selected from the group consisting of SEQ ID NO: 2219; SEQ ID NO: 2220; SEQ ID NO: 2221; SEQ ID NO: 2222; SEQ ID NO: 2223; SEQ ID NO: 2224; SEQ ID NO: 2225; SEQ ID NO: 2226; SEQ ID NO: 2227; SEQ ID NO: 2228; SEQ ID NO: 2229; SEQ ID NO: 2230; SEQ ID NO: 2231; SEQ ID NO: 2232; SEQ ID NO: 2233; SEQ ID NO: 2234; SEQ ID NO: 2235; SEQ ID NO: 2236; SEQ ID NO: 2237; SEQ ID NO: 2238; SEQ ID NO: 2239; SEQ ID NO: 2240; SEQ ID NO: 2241; SEQ ID NO: 2242; SEQ ID NO: 2243; SEQ ID NO: 2244; SEQ ID NO: 2245; SEQ ID NO: 2246; SEQ ID NO: 2247; SEQ ID NO: 2248; SEQ ID NO: 2249; SEQ ID NO: 2250; SEQ ID NO: 2251; SEQ ID NO: 2252; SEQ ID NO: 2253; SEQ ID NO: 2254; SEQ ID NO: 2255; SEQ ID NO: 2256; SEQ ID NO: 2257; SEQ ID NO: 2258; SEQ ID NO: 2259; SEQ ID NO: 2260; SEQ ID NO: 2261; SEQ ID NO: 2262; SEQ ID NO: 2263; SEQ ID NO: 2264; SEQ ID NO: 2265; SEQ ID NO: 2266; SEQ ID NO: 2267; SEQ ID NO: 2268; SEQ ID NO: 2269; SEQ ID NO: 2270; SEQ ID NO: 2271; SEQ ID NO: 2272; SEQ ID NO: 2273; SEQ ID NO: 2274; SEQ ID NO: 2275; SEQ ID NO: 2276; SEQ ID NO: 2277; SEQ ID NO: 2278; SEQ ID NO: 2279; SEQ ID NO: 2280; SEQ ID NO: 2281; SEQ ID NO: 2282; SEQ ID NO: 2283; SEQ ID NO: 2284; SEQ ID NO: 2285; SEQ ID NO: 2286; SEQ ID NO: 2287; SEQ ID NO: 2288; SEQ ID NO: 2289; SEQ ID NO: 2290; SEQ ID NO: 2291; SEQ ID NO: 2292; SEQ ID NO: 2293; SEQ ID NO: 2294; SEQ ID NO: 2295; SEQ ID NO: 2296; SEQ ID NO: 2297; SEQ ID NO: 2298; SEQ ID NO: 2299; SEQ ID NO: 2300; SEQ ID NO: 2301; SEQ ID NO: 2302; SEQ ID NO: 2303; SEQ ID NO: 2304; SEQ ID NO: 2305; SEQ ID NO: 2306; SEQ ID NO: 2307; SEQ ID NO: 2308; SEQ ID NO: 2309; SEQ ID NO: 2310; SEQ ID NO: 2311; SEQ ID NO: 2312; SEQ ID NO: 2313; SEQ ID NO: 2314; SEQ ID NO: 2315; SEQ ID NO: 2316; SEQ ID NO: 2317; SEQ ID NO: 2318; SEQ ID NO: 2319; SEQ ID NO: 2320; SEQ ID NO: 2321; SEQ ID NO: 2322; SEQ ID NO: 2323; SEQ ID NO: 2324; SEQ ID NO: 2325; SEQ ID NO: 2326; SEQ ID NO: 2327; SEQ ID NO: 2328; SEQ ID NO: 2329; SEQ ID NO: 2330; SEQ ID NO: 2331; SEQ ID NO: 2332; SEQ ID NO: 2333; SEQ ID NO: 2334; SEQ ID NO: 2335; SEQ ID NO: 2336; SEQ ID NO: 2337; SEQ ID NO: 2338; SEQ ID NO: 2339; SEQ ID NO: 2340; SEQ ID NO: 2341; SEQ ID NO: 2342; SEQ ID NO: 2343; SEQ ID NO: 2344; SEQ ID NO: 2345; SEQ ID NO: 2346; SEQ ID NO: 2347; SEQ ID NO: 2348; SEQ ID NO: 2349; SEQ ID NO: 2350; SEQ ID NO: 2351; SEQ ID NO: 2352; SEQ ID NO: 2353; SEQ ID NO: 2354; SEQ ID NO: 2355; SEQ ID NO: 2356; SEQ ID NO: 2357; SEQ ID NO: 2358; SEQ ID NO: 2359; SEQ ID NO: 2360; SEQ ID NO: 2361; SEQ ID NO: 2362; SEQ ID NO: 2363; SEQ ID NO: 2364; SEQ ID NO: 2365; SEQ ID NO: 2366; SEQ ID NO: 2367; SEQ ID NO: 2368; SEQ ID NO: 2369; SEQ ID NO: 2370; SEQ ID NO: 2371; SEQ ID NO: 2372; SEQ ID NO: 2373; SEQ ID NO: 2374; SEQ ID NO: 2375; SEQ ID NO: 2376; SEQ ID NO: 2377; SEQ ID NO: 2378; SEQ ID NO: 2379; SEQ ID NO: 2380; SEQ ID NO: 2381; SEQ ID NO: 2382; SEQ ID NO: 2383; SEQ ID NO: 2384; SEQ ID NO: 2385; SEQ ID NO: 2386; SEQ ID NO: 2387; SEQ ID NO: 2388; SEQ ID NO: 2389; SEQ ID NO: 2390; SEQ ID NO: 2391; SEQ ID NO: 2392; SEQ ID NO: 2393; SEQ ID NO: 2394; SEQ ID NO: 2395; SEQ ID NO: 2396; SEQ ID NO: 2397; SEQ ID NO: 2398; SEQ ID NO: 2399; SEQ ID NO: 2400; SEQ ID NO: 2401; SEQ ID NO: 2402; SEQ ID NO: 2403; SEQ ID NO: 2404; SEQ ID NO: 2405; SEQ ID NO: 2406; SEQ. ID NO: 2407; SEQ ID NO: 2408; SEQ ID NO: 2409; SEQ ID NO: 2410; SEQ ID NO: 2411; SEQ ID NO: 2412; SEQ ID NO: 2413; SEQ ID NO: 2414; SEQ ID NO: 2415; SEQ ID NO: 2416; SEQ ID NO: 2417; SEQ ID NO: 2418; SEQ ID NO: 2419; SEQ ID NO: 2420; SEQ ID NO: 2421; SEQ ID NO: 2422; SEQ ID NO: 2423; SEQ ID NO: 2424; SEQ ID NO: 2425; SEQ ID NO: 2426; SEQ ID NO: 2427; SEQ ID NO: 2428; SEQ ID NO: 2429; SEQ ID NO: 2430; SEQ ID NO: 2431; SEQ ID NO: 2432; SEQ ID NO: 2433; SEQ ID NO: 2434; SEQ ID NO: 2435; SEQ ID NO: 2436; SEQ ID NO: 2437; SEQ ID NO: 2438 and SEQ ID NO: 9603; SEQ ID NO: 9604, or a complement thereof.

[0082] In another embodiment, the H. pylori cytoplasmic polypeptide or a fragment thereof is an H. pylori polypeptide or a fragment thereof involved in genome replication, transcription, recombination and repair encoded by a nucleic acid having a nucleotide sequence selected from the group consisting of SEQ ID NO: 2439; SEQ ID NO: 2440; SEQ ID NO: 2441; SEQ ID NO: 2442; SEQ ID NO: 2443; SEQ ID NO: 2444; SEQ ID NO: 2445; SEQ ID NO: 2446; SEQ ID NO: 2447; SEQ ID NO: 2448; SEQ ID NO: 2449; SEQ ID NO: 2450; SEQ ID NO: 2451; SEQ ID NO: 2452; SEQ ID NO: 2453; SEQ ID NO: 2454; SEQ ID NO: 2455; SEQ ID NO: 2456; SEQ ID NO: 2457; SEQ ID NO: 2458; SEQ ID NO: 2459; SEQ ID NO: 2460; SEQ ID NO: 2461; SEQ ID NO: 2462; SEQ ID NO: 2463; SEQ ID NO: 2464; SEQ ID NO: 2465; SEQ ID NO: 2466; SEQ ID NO: 2467; SEQ ID NO: 2468; SEQ ID NO: 2469; SEQ ID NO: 2470; SEQ ID NO: 2471; SEQ ID NO: 2472; SEQ ID NO: 2473; SEQ ID NO: 2474; SEQ ID NO: 2475; SEQ ID NO: 2476; SEQ ID NO: 2477; SEQ ID NO: 2478; SEQ ID NO: 2479; SEQ ID NO: 2480; SEQ ID NO: 2481; SEQ ID NO: 2482; SEQ ID NO: 2483; SEQ ID NO: 2484; SEQ ID NO: 2485; SEQ ID NO: 2486; SEQ ID NO: 2487; SEQ ID NO: 2488; SEQ ID NO: 2489; SEQ ID NO: 2490; SEQ ID NO: 2491; SEQ ID NO: 2492; SEQ ID NO: 2493; SEQ ID NO: 2494; SEQ ID NO: 2495; SEQ ID NO: 2496; SEQ ID NO: 2497; SEQ ID NO: 2498; SEQ ID NO: 2499; SEQ ID NO: 2500; SEQ ID NO: 2501; SEQ ID NO: 2502; SEQ ID NO: 2503; SEQ ID NO: 2504; SEQ ID NO: 2505; SEQ ID NO: 2506; SEQ ID NO: 2507; SEQ ID NO: 2508; SEQ ID NO: 2509; SEQ ID NO: 2510; SEQ ID NO: 2511; SEQ ID NO: 2512; SEQ ID NO: 2513; SEQ ID NO: 2514; SEQ ID NO: 2515; SEQ ID NO: 2516; SEQ ID NO: 2517; SEQ ID NO: 2518; SEQ ID NO: 2519; SEQ ID NO: 2520; SEQ ID NO: 2521; SEQ ID NO: 2522; SEQ ID NO: 2523; SEQ ID NO: 2524; SEQ ID NO: 2525; SEQ ID NO: 2526; SEQ ID NO: 2527; SEQ ID NO: 2528; SEQ ID NO: 2529; SEQ ID NO: 2530; SEQ ID NO: 2531; SEQ ID NO: 2532; SEQ ID NO: 2533; SEQ ID NO: 2534; SEQ ID NO: 2535; SEQ ID NO: 2536; SEQ ID NO: 2537; SEQ ID NO: 2538; SEQ ID NO: 2539; SEQ ID NO: 2540; SEQ ID NO: 2541; SEQ ID NO: 2542; SEQ ID NO: 2543; SEQ ID NO: 2544; SEQ ID NO: 2545; SEQ ID NO: 2546; SEQ ID NO: 2547; SEQ ID NO: 2548; SEQ ID NO: 2549; SEQ ID NO: 2550; SEQ ID NO: 2551; SEQ ID NO: 2552; SEQ ID NO: 2553; SEQ ID NO: 2554; SEQ ID NO: 2555; SEQ ID NO: 2556; SEQ ID NO: 2557; SEQ ID NO: 2558; SEQ ID NO: 2559; SEQ ID NO: 2560; SEQ ID NO: 2561; SEQ ID NO: 2562; SEQ ID NO: 2563; SEQ ID NO: 2564; SEQ ID NO: 2565; SEQ ID NO: 2566; SEQ ID NO: 2567; SEQ ID NO: 2568; SEQ ID NO: 2569; SEQ ID NO: 2570; SEQ ID NO: 2571; SEQ ID NO: 2572; SEQ ID NO: 2573; SEQ ID NO: 2574; SEQ ID NO: 2575; SEQ ID NO: 2576; SEQ ID NO: 2577; SEQ ID NO: 2578; SEQ ID NO: 2579; SEQ ID NO: 2580; SEQ ID NO: 2581; SEQ ID NO: 2582; SEQ ID NO: 2583; SEQ ID NO: 2584; SEQ ID NO: 2585; SEQ ID NO: 2586; SEQ ID NO: 2587; SEQ ID NO: 2588; SEQ ID NO: 2589; SEQ ID NO: 2590; SEQ ID NO: 2591; SEQ ID NO: 2592; SEQ ID NO: 2593; SEQ ID NO: 2594; SEQ ID NO: 2595; SEQ ID NO: 2596; SEQ ID NO: 2597; SEQ ID NO: 2598; SEQ ID NO: 2599; SEQ ID NO: 2600; SEQ ID NO: 2601; SEQ ID NO: 2602; SEQ ID NO: 2603; SEQ ID NO: 2604; SEQ ID NO: 2605; SEQ ID NO: 2606; SEQ ID NO: 2607; SEQ ID NO: 2608; SEQ ID NO: 2609; SEQ ID NO: 2610; SEQ ID NO: 2611; SEQ ID NO: 2612; SEQ ID NO: 2613; SEQ ID NO: 2614; SEQ ID NO: 2615; SEQ ID NO: 2616; SEQ ID NO: 2617; SEQ ID NO: 2618; SEQ ID NO: 2619; SEQ ID NO: 2620; SEQ ID NO: 2621; SEQ ID NO: 2622; SEQ ID NO: 2623; SEQ ID NO: 2624; SEQ ID NO: 2625; SEQ ID NO: 2626; SEQ ID NO: 2627; SEQ ID NO: 2628; SEQ ID NO: 2629; SEQ ID NO: 2630; SEQ ID NO: 2631; SEQ ID NO: 2632; SEQ ID NO: 2633; SEQ ID NO: 2634; SEQ ID NO: 2635; SEQ ID NO: 2636; SEQ ID NO: 2637; SEQ ID NO: 2638; SEQ ID NO: 2639; SEQ ID NO: 2640; SEQ ID NO:2641; SEQ ID NO: 2642; SEQ ID NO: 2643; SEQ ID NO: 2644; SEQ ID NO: 2645; SEQ ID NO: 2646; SEQ ID NO: 2647; SEQ ID NO: 2648; SEQ ID NO: 2649; SEQ ID NO: 2650; SEQ ID NO: 2651; SEQ ID NO: 2652; SEQ ID NO: 2653; SEQ ID NO: 2654; SEQ ID NO: 2655; SEQ ID NO: 2656; SEQ ID NO: 2657; SEQ ID NO: 2658; SEQ ID NO: 2659; SEQ ID NO: 2660; SEQ ID NO: 2661; SEQ ID NO: 2662; SEQ ID NO: 2663; SEQ ID NO: 2664; SEQ ID NO: 2665; SEQ ID NO: 2666; SEQ ID NO: 2667; SEQ ID NO: 2668; SEQ ID NO: 2669; SEQ ID NO: 2670; SEQ ID NO: 2671; SEQ ID NO: 2672; SEQ ID NO: 2673; SEQ ID NO: 2674; SEQ ID NO: 2675; SEQ ID NO: 2676; SEQ ID NO: 2677; SEQ ID NO: 2678; SEQ ID NO: 2679; SEQ ID NO: 2680; SEQ ID NO: 2681; SEQ ID NO: 2682; SEQ ID NO: 2683; SEQ ID NO: 2684; SEQ ID NO: 2685; SEQ ID NO: 2686; SEQ ID NO: 2687; SEQ ID NO: 2688; SEQ ID NO: 2689; SEQ ID NO: 2690; SEQ ID NO: 2691; SEQ ID NO: 2692; SEQ ID NO: 2693; SEQ ID NO: 2694; SEQ ID NO: 2695; SEQ ID NO: 2696; SEQ ID NO: 2697; SEQ ID NO: 2698; SEQ ID NO: 2699; SEQ ID NO: 2700; SEQ ID NO: 2701; SEQ ID NO: 2702; SEQ ID NO: 2703; SEQ ID NO: 2704; SEQ ID NO: 2705; SEQ ID NO: 2706; SEQ ID NO: 2707; SEQ ID NO: 2708; SEQ ID NO: 2709; SEQ ID NO: 2710; SEQ ID NO: 2711; SEQ ID NO: 2712; SEQ ID NO: 2713; SEQ ID NO: 2714; SEQ ID NO: 2715; SEQ ID NO: 2716; SEQ ID NO: 2717; SEQ ID NO: 2718; SEQ ID NO: 2719; SEQ ID NO: 2720; SEQ ID NO: 2721; SEQ ID NO: 2722; SEQ ID NO: 2723; SEQ ID NO: 2724; SEQ ID NO: 2725; SEQ ID NO: 2726; SEQ ID NO: 2727; SEQ ID NO: 2728; SEQ ID NO: 2729; SEQ ID NO: 2730; SEQ ID NO: 2731; SEQ ID NO: 2732; SEQ ID NO: 2733; SEQ ID NO: 2734; SEQ ID NO: 2735; SEQ ID NO: 2736; SEQ ID NO: 2737; SEQ ID NO: 2738; SEQ ID NO: 2739; SEQ ID NO: 2740; SEQ ID NO: 2741; SEQ ID NO: 2742; SEQ ID NO: 2743; SEQ ID NO: 2744; SEQ ID NO: 2745; SEQ ID NO: 2746; SEQ ID NO: 2747; SEQ ID NO: 2748; SEQ ID NO: 2749; SEQ ID NO: 2750; SEQ ID NO: 2751; SEQ ID NO: 2752; SEQ ID NO: 2753; SEQ ID NO: 2754; SEQ ID NO: 2755; SEQ ID NO: 2756; SEQ ID NO: 2757; SEQ ID NO: 2758; SEQ ID NO: 2759; SEQ ID NO: 2760; SEQ ID NO: 2761; SEQ ID NO: 2762; SEQ ID NO: 2763; SEQ ID NO: 2764; SEQ ID NO: 2765; SEQ ID NO: 2766; SEQ ID NO: 2767; SEQ ID NO: 2768; SEQ ID NO: 2769; SEQ ID NO: 2770; SEQ ID NO: 2771; SEQ ID NO: 2772; SEQ ID NO: 2773; SEQ ID NO: 2774; SEQ ID NO: 2775; SEQ ID NO: 2776; SEQ ID NO: 2777; SEQ ID NO: 2778; SEQ ID NO: 2779; SEQ ID NO: 2780; SEQ ID NO: 2781; SEQ ID NO: 2782; SEQ ID NO: 2783; SEQ ID NO: 2784; SEQ ID NO: 2785; SEQ ID NO: 2786; SEQ ID NO: 2787; SEQ ID NO: 2788; SEQ ID NO: 2789; SEQ ID NO: 2790; SEQ ID NO: 2791; SEQ ID NO: 2792; SEQ ID NO: 2793; SEQ ID NO: 2794; SEQ ID NO: 2795; SEQ ID NO: 2796; SEQ ID NO: 2797; SEQ ID NO: 2798; SEQ ID NO: 2799; SEQ ID NO: 2800; SEQ ID NO: 2801; SEQ ID NO: 2802; SEQ ID NO: 2803; SEQ ID NO: 2804; SEQ ID NO: 2805; SEQ ID NO: 2806; SEQ ID NO: 2807; and SEQ ID NO: 9605; SEQ ID NO: 9606; SEQ ID NO: 9607 and SEQ ID NO: 9608, or a complement thereof.

[0083] In another embodiment, the H. pylori cytoplasmic polypeptide or a fragment thereof is an H. pylori polypeptide or a fragment thereof involved in secretion and adhesion encoded by a nucleic acid having a nucleotide sequence selected from the group consisting of SEQ ID NO: 2808; SEQ ID NO: 2809; SEQ ID NO: 2810; SEQ ID NO: 2811; SEQ ID NO: 2812; SEQ ID NO: 2813; SEQ ID NO: 2814; SEQ ID NO: 2815; SEQ ID NO: 2816; SEQ ID NO: 2817; SEQ ID NO: 2818; SEQ ID NO: 2819; SEQ ID NO: 2820; SEQ ID NO: 2821; SEQ ID NO: 2822; SEQ ID NO: 2823 and SEQ ID NO: 2824 or a complement thereof.

[0084] In another embodiment, the H. pylori cytoplasmic polypeptide or a fragment thereof is an H. pylori polypeptide or a fragment thereof involved in outer membrane and cell wall biogenesis encoded by a nucleic acid having a nucleotide sequence selected from the group consisting of SEQ ID NO: 2825; SEQ ID NO: 2826; SEQ ID NO: 2827; SEQ ID NO: 2828; SEQ ID NO: 2829; SEQ ID NO: 2830; SEQ ID NO: 2831; SEQ ID NO: 2832; SEQ ID NO: 2833; SEQ ID NO: 2834; SEQ ID NO:2835; SEQ ID NO: 2836; SEQ ID NO: 2837; SEQ ID NO: 2838; SEQ ID NO: 2839; SEQ ID NO: 2840; SEQ ID NO: 2841; SEQ ID NO: 2842; SEQ ID NO: 2843; SEQ ID NO: 2844; SEQ ID NO: 2845; SEQ ID NO: 2846; SEQ ID NO: 2847; SEQ ID NO: 2848; SEQ ID NO: 2849; SEQ ID NO: 2850; SEQ ID NO: 2851; SEQ ID NO: 2852; SEQ ID NO: 2853; SEQ ID NO: 2854; SEQ ID NO: 2855; SEQ ID NO: 2856; SEQ ID NO: 2857; SEQ ID NO: 2858; SEQ ID NO: 2859; SEQ ID NO: 2860; SEQ ID NO: 2861; SEQ ID NO: 2862; SEQ ID NO: 2863; SEQ ID NO: 2864; SEQ ID NO: 2865; SEQ ID NO: 2866; SEQ ID NO: 2867; SEQ ID NO: 2868; SEQ ID NO: 2869; SEQ ID NO: 2870; SEQ ID NO: 2871; SEQ ID NO: 2872; SEQ ID NO: 2873; SEQ ID NO: 2874; SEQ ID NO: 2875; SEQ ID NO: 2876; SEQ ID NO: 2877; and SEQ ID NO: 9609 and SEQ ID NO: 9610, or a complement thereof.

[0085] In another embodiment, the H. pylori cytoplasmic polypeptide or a fragment thereof is an H. pylori polypeptide or a fragment thereof involved in protein folding and stabilization encoded by a nucleic acid having a nucleotide sequence selected from the group consisting of SEQ ID NO: 2878; SEQ ID NO: 2879; SEQ ID NO: 2880; SEQ ID NO: 2881; SEQ ID NO: 2882; SEQ ID NO: 2883; SEQ ID NO: 2884; SEQ ID NO: 2885; SEQ ID NO: 2886; SEQ ID NO: 2887; SEQ ID NO: 2888; SEQ ID NO: 2889; SEQ ID NO: 2890; SEQ ID NO: 2891; SEQ ID NO: 2892; SEQ ID NO: 2893; SEQ ID NO: 2894; SEQ ID NO: 2895; SEQ ID NO: 2896; SEQ ID NO: 2897; SEQ ID NO: 2898; SEQ ID NO: 2899; SEQ ID NO: 2900; SEQ ID NO: 2901; SEQ ID NO: 2902; SEQ ID NO: 2903; SEQ ID NO: 2904; SEQ ID NO: 2905; SEQ ID NO: 2906; SEQ ID NO: 2907; SEQ ID NO: 2908; SEQ ID NO: 2909; SEQ ID NO: 2910; SEQ ID NO: 2911; SEQ ID NO: 2912; SEQ ID NO: 2913; SEQ ID NO: 2914; SEQ ID NO: 2915; SEQ ID NO: 2916; SEQ ID NO: 2917; SEQ ID NO: 2918; and SEQ ID NO: 9611 and SEQ ID NO: 9612, or a complement thereof.

[0086] Particularly preferred is an isolated nucleic acid having a nucleotide sequence encoding an H. pylori secreted polypeptide or a fragment thereof, the nucleic acid selected from the group consisting of SEQ ID NO: 4016; SEQ ID NO: 4017; SEQ ID NO: 4018; SEQ ID NO: 4019; SEQ ID NO: 4020; SEQ ID NO: 4021; SEQ ID NO: 4022; SEQ ID NO: 4023; SEQ ID NO: 4024; SEQ ID NO: 4025; SEQ ID NO: 4026; SEQ ID NO: 4027; SEQ ID NO: 4028; SEQ ID NO: 4029; SEQ ID NO: 4030; SEQ ID NO: 4031; SEQ ID NO: 4032; SEQ ID NO: 4033; SEQ ID NO: 4034; SEQ ID NO: 4035; SEQ ID NO: 4036; SEQ ID NO: 4037; SEQ ID NO: 4038; SEQ ID NO: 4039; SEQ ID NO: 4040; SEQ ID NO: 4041; SEQ ID NO: 4042; SEQ ID NO: 4043; SEQ ID NO: 4044; SEQ ID NO: 4045; SEQ ID NO: 4046; SEQ ID NO: 4047; SEQ ID NO: 4048; SEQ ID NO: 4049; SEQ ID NO: 4050; SEQ ID NO: 4051; SEQ ID NO: 4052; SEQ ID NO: 4053; SEQ ID NO: 4054; SEQ ID NO: 4055; SEQ ID NO: 4056; SEQ ID NO: 4057; SEQ ID NO: 4058; SEQ ID NO: 4059; SEQ ID NO: 4060; SEQ ID NO: 4061; SEQ ID NO: 4062; SEQ ID NO: 4063; SEQ ID NO: 4064; SEQ ID NO: 4065; SEQ ID NO: 4066; SEQ ID NO: 4067; SEQ ID NO: 4068; SEQ ID NO: 4069; SEQ ID NO: 4070; SEQ ID NO: 4071; SEQ ID NO: 4072; SEQ ID NO: 4073; SEQ ID NO: 4074; SEQ ID NO: 4075; SEQ ID NO: 4076; SEQ ID NO: 4077; SEQ ID NO: 4078; SEQ ID NO: 4079; SEQ ID NO: 4080; SEQ ID NO: 4081; SEQ ID NO: 4082; SEQ ID NO: 4083; SEQ ID NO: 4084; SEQ ID NO: 4085; SEQ ID NO: 4086; SEQ ID NO: 4087; SEQ ID NO: 4088; SEQ ID NO: 4089; SEQ ID NO: 4090; SEQ ID NO: 4091; SEQ ID NO: 4092; SEQ ID NO: 4093; SEQ ID NO: 4094; SEQ ID NO: 4095; SEQ ID NO: 4096; SEQ ID NO: 4097; SEQ ID NO: 4098; SEQ ID NO: 4099; SEQ ID NO: 4100; SEQ ID NO: 4101; SEQ ID NO: 4102; SEQ ID NO: 4103; SEQ ID NO: 4104; SEQ ID NO: 4105; SEQ ID NO: 4106; SEQ ID NO: 4107; SEQ ID NO: 4108; SEQ ID NO: 4109; SEQ ID NO: 4110; SEQ ID NO: 4111; SEQ ID NO: 4112; SEQ ID NO: 4113; SEQ ID NO: 4114; SEQ ID NO: 4115; SEQ ID NO: 4116; SEQ ID NO: 4117; SEQ ID NO: 4118; SEQ ID NO: 4119; SEQ ID NO: 4120; SEQ ID NO: 4121; SEQ ID NO: 4122; SEQ ID NO: 4123; SEQ ID NO: 4124; SEQ ID NO: 4125; SEQ ID NO: 4126; SEQ ID NO: 4127; SEQ ID NO: 4128; SEQ ID NO: 4129; SEQ ID NO: 4130; SEQ ID NO: 4131; SEQ ID NO: 4132; SEQ ID NO: 4133; SEQ ID NO: 4134; SEQ ID NO: 4135; SEQ ID NO: 4136; SEQ ID NO: 4137; SEQ ID NO: 4138; SEQ ID NO: 4139; SEQ ID NO: 4140; SEQ ID NO: 4141; SEQ ID NO: 4142; SEQ ID NO: 4143; SEQ ID NO: 4144; SEQ ID NO: 4145; SEQ ID NO: 4146; SEQ ID NO: 4147; SEQ ID NO: 4148; SEQ ID NO: 4149; SEQ ID NO: 4150; SEQ ID NO: 4151; SEQ ID NO: 4152; SEQ ID NO: 4153; SEQ ID NO: 4154; SEQ ID NO: 4155; SEQ ID NO: 4156; SEQ ID NO: 4157; SEQ ID NO: 4158; SEQ ID NO: 4159; SEQ ID NO: 4160; SEQ ID NO: 4161; SEQ ID NO: 4162; SEQ ID NO: 4163; SEQ ID NO: 4164; SEQ ID NO: 4165; SEQ ID NO: 4166; SEQ ID NO: 4167; SEQ ID NO: 4168; SEQ ID NO: 4169; SEQ ID NO: 4170; SEQ ID NO: 4171; SEQ ID NO: 4172; SEQ ID NO: 4173; SEQ ID NO: 4174; SEQ ID NO: 4175; SEQ ID NO: 4176; SEQ ID NO: 4177; SEQ ID NO: 4178; SEQ ID NO: 4179; SEQ ID NO: 4180; SEQ ID NO: 4181; SEQ ID NO: 4182; SEQ ID NO: 4183; SEQ ID NO: 4184; SEQ ID NO: 4185; SEQ ID NO: 4186; SEQ ID NO: 4187; SEQ ID NO: 4188; SEQ ID NO: 4189; SEQ ID NO: 4190; SEQ ID NO: 4191; SEQ ID NO: 4192; SEQ ID NO: 4193; SEQ ID NO: 4194; SEQ ID NO: 4195; SEQ ID NO: 4196; SEQ ID NO: 4197; SEQ ID NO: 4198; SEQ ID NO: 4199; SEQ ID NO: 4200; SEQ ID NO: 4201; SEQ ID NO: 4202; SEQ ID NO: 4203; SEQ ID NO: 4204; SEQ ID NO: 4205; SEQ ID NO: 4206; SEQ ID NO: 4207; SEQ ID NO: 4208; SEQ ID NO: 4209; SEQ ID NO: 4210; SEQ ID NO: 4211; SEQ ID NO: 4212; SEQ ID NO: 4213; SEQ ID NO: 4214; SEQ ID NO: 4215; SEQ ID NO: 4216; SEQ ID NO: 4217; SEQ ID NO: 4218; SEQ ID NO: 4219; SEQ ID NO: 4220; SEQ ID NO: 4221; SEQ ID NO: 4222; SEQ ID NO: 4223; SEQ ID NO: 4224; SEQ ID NO: 4225; SEQ ID NO: 4226; SEQ ID NO: 4227; SEQ ID NO: 4228; SEQ ID NO: 4229; SEQ ID NO: 4230; SEQ ID NO: 4231; SEQ ID NO: 4232; SEQ ID NO: 4233; SEQ ID NO: 4234; SEQ ID NO: 4235; SEQ ID NO: 4236; SEQ ID NO: 4237; SEQ ID NO: 4238; SEQ ID NO: 4239; SEQ ID NO: 4240; SEQ ID NO: 4241; SEQ ID NO: 4242; SEQ ID NO: 4243; SEQ ID NO: 4244; SEQ ID NO: 4245; SEQ ID NO: 4246; SEQ ID NO: 4247; SEQ ID NO: 4248; SEQ ID NO: 4249; SEQ ID NO: 4250; SEQ ID NO: 4251; SEQ ID NO: 4252; SEQ ID NO: 4253; SEQ ID NO: 4254; SEQ ID NO: 4255; SEQ ID NO: 4256; SEQ ID NO: 4257; SEQ ID NO: 4258; SEQ ID NO: 4259; SEQ ID NO: 4260; SEQ ID NO: 4261; SEQ ID NO: 4262; SEQ ID NO: 4263; SEQ ID NO: 4264; SEQ ID NO: 4265; SEQ ID NO: 4266; SEQ ID NO: 4267; SEQ ID NO: 4268; SEQ ID NO: 4269; SEQ ID NO: 4270; SEQ ID NO: 4271; SEQ ID NO: 4272; SEQ ID NO: 4273; SEQ ID NO: 4274; SEQ ID NO: 4275; SEQ ID NO: 4276; SEQ ID NO: 4277; SEQ ID NO: 4278; SEQ ID NO: 4279; SEQ ID NO: 4280; SEQ ID NO: 4281; SEQ ID NO: 4282; SEQ ID NO: 4283; SEQ ID NO: 4284; SEQ ID NO: 4285; SEQ ID NO: 4286; SEQ ID NO: 4287; SEQ ID NO: 4288; SEQ ID NO: 4289; SEQ ID NO: 4290; SEQ ID NO: 4291; SEQ ID NO: 4292; SEQ ID NO: 4293; SEQ ID NO: 4294; SEQ ID NO: 4295; SEQ ID NO: 4296; SEQ ID NO: 4297; SEQ ID NO: 4298; SEQ ID NO: 4299; SEQ ID NO: 4300; SEQ ID NO: 4301; SEQ ID NO: 4302; SEQ ID NO: 4303; SEQ ID NO: 4304; SEQ ID NO: 4305; SEQ ID NO: 4306; SEQ ID NO: 4307; SEQ ID NO: 4308; SEQ ID NO: 4309; SEQ ID NO: 4310; SEQ ID NO: 4311; SEQ ID NO: 4312; SEQ ID NO: 4313; SEQ ID NO: 4314; SEQ ID NO: 4315; SEQ ID NO: 4316; SEQ ID NO: 4317; SEQ ID NO: 4318; SEQ ID NO: 4319; SEQ ID NO: 4320; SEQ ID NO: 4321; SEQ ID NO: 4322; SEQ ID NO: 4323; SEQ ID NO: 4324; SEQ ID NO: 4325; SEQ ID NO: 4326; SEQ ID NO: 4327; SEQ ID NO: 4328; SEQ ID NO: 4329; SEQ ID NO: 4330; SEQ ID NO: 4331; SEQ ID NO: 4332; SEQ ID NO: 4333; SEQ ID NO: 4334; SEQ ID NO: 4335; SEQ ID NO: 4336; SEQ ID NO: 4337; SEQ ID NO: 4338; SEQ ID NO: 4339; SEQ ID NO: 4340; SEQ ID NO: 4341; SEQ ID NO: 4342; SEQ ID NO: 4343; SEQ ID NO: 4344; SEQ ID NO: 4345; SEQ ID NO: 4346; SEQ ID NO: 4347; SEQ ID NO: 4348; SEQ ID NO: 4349; SEQ ID NO: 4350; SEQ ID NO: 4351; SEQ ID NO: 4352; SEQ ID NO: 4353; SEQ ID NO: 4354; SEQ ID NO: 4355; SEQ ID NO: 4356; SEQ ID NO: 4357; SEQ ID NO: 4358; SEQ ID NO: 4359; SEQ ID NO: 4360; SEQ ID NO: 4361; SEQ ID NO: 4362; SEQ ID NO: 4363; SEQ ID NO: 4364; SEQ ID NO: 4365; SEQ ID NO: 4366; SEQ ID NO: 4367; SEQ ID NO: 4368; SEQ ID NO: 4369; SEQ ID NO: 4370; SEQ ID NO: 4371; SEQ ID NO: 4372; SEQ ID NO: 4373; SEQ ID NO: 4374; SEQ ID NO: 4375; SEQ ID NO: 4376; SEQ ID NO: 4377; SEQ ID NO: 4378; SEQ ID NO: 4379; SEQ ID NO: 4380; SEQ ID NO: 4381; SEQ ID NO: 4382; SEQ ID NO: 4383; SEQ ID NO: 4384; SEQ ID NO: 4385; SEQ ID NO: 4386; SEQ ID NO: 4387; SEQ ID NO: 4388; and SEQ ID NO: 9622; SEQ ID NO: 9623; SEQ ID NO: 9624 and SEQ ID NO: 9625, or a complement therof.

[0087] In one embodiment, the H. pylori secreted polypeptide or a fragment thereof is an H. pylori periplasmic polypeptide or a fragment thereof encoded by a nucleic acid having a nucleotide sequence selected from the group consisting of SEQ ID NO: 4016; SEQ ID NO: 4017 and SEQ ID NO: 4018, or a complement thereof.

[0088] In another embodiment, the H. pylori secreted polypeptide or a fragment thereof is an H. pylori polypeptide or a fragment thereof involved in secretion and adhesion encoded by a nucleic acid having a nucleotide sequence selected from the group consisting of SEQ ID NO: 4019; SEQ ID NO: 4020; SEQ ID NO: 4021; SEQ ID NO: 4022; SEQ ID NO: 4023; SEQ ID NO: 4024; SEQ ID NO: 4025; SEQ ID NO: 4026 and SEQ ID NO: 9622, or a complement thereof.

[0089] In another embodiment, the H. pylori secreted polypeptide or a fragment thereof is an H. pylori chaperone polypeptide or a fragment thereof encoded by a nucleic acid having a nucleotide sequence selected from the group consisting of SEQ ID NO: 4027; SEQ ID NO: 4028; SEQ ID NO: 4029 and SEQ ID NO: 4030, or a complement thereof.

[0090] Particularly preferred is an isolated nucleic acid having a nucleotide sequence encoding an H. pylori cellular polypeptide or a fragment thereof, the nucleic acid selected from the group consisting of SEQ ID NO: 4389; SEQ ID NO: 4390; SEQ ID NO: 4391; SEQ ID NO: 4392; SEQ ID NO: 4393; SEQ ID NO: 4394; SEQ ID NO: 4395; SEQ ID NO: 4396; SEQ ID NO: 4397; SEQ ID NO: 4398; SEQ ID NO: 4399; SEQ ID NO: 4400; SEQ ID NO: 4401; SEQ ID NO: 4402; SEQ ID NO: 4403; SEQ ID NO: 4404; SEQ ID NO: 4405; SEQ ID NO: 4406; SEQ ID NO: 4407; SEQ ID NO: 4408; SEQ ID NO: 4409; SEQ ID NO: 4410; SEQ ID NO: 4411; SEQ ID NO: 4412; SEQ ID NO: 4413; SEQ ID NO: 4414; SEQ ID NO: 4415; SEQ ID NO: 4416; SEQ ID NO: 4417; SEQ ID NO: 4418; SEQ ID NO: 4419; SEQ ID NO: 4420; SEQ ID NO: 4421; SEQ ID NO: 4422; SEQ ID NO: 4423; SEQ ID NO: 4424; SEQ ID NO: 4425; SEQ ID NO: 4426; SEQ ID NO: 4427; SEQ ID NO: 4428; SEQ ID NO: 4429; SEQ ID NO: 4430; SEQ ID NO: 4431; SEQ ID NO: 4432; SEQ ID NO: 4433; SEQ ID NO: 4434; SEQ ID NO: 4435; SEQ ID NO: 4436; SEQ ID NO: 4437; SEQ ID NO: 4438; SEQ ID NO: 4439; SEQ ID NO: 4440; SEQ ID NO: 4441; SEQ ID NO: 4442; SEQ ID NO: 4443; SEQ ID NO: 4444; SEQ ID NO: 4445; SEQ ID NO: 4446; SEQ ID NO: 4447; SEQ ID NO: 4448; SEQ ID NO: 4449; SEQ ID NO: 4450; SEQ ID NO: 4451; SEQ ID NO: 4452; SEQ ID NO: 4453; SEQ ID NO: 4454; SEQ ID NO: 4455; SEQ ID NO: 4456; SEQ ID NO: 4457; SEQ ID NO: 4458; SEQ ID NO: 4459; SEQ ID NO: 4460; SEQ ID NO: 4461; SEQ ID NO: 4462; SEQ ID NO: 4463; SEQ ID NO: 4464; SEQ ID NO: 4465; SEQ ID NO: 4466; SEQ ID NO: 4467; SEQ ID NO: 4468; SEQ ID NO: 4469; SEQ ID NO: 4470; SEQ ID NO: 4471; SEQ ID NO: 4472; SEQ ID NO: 4473; SEQ ID NO: 4474; SEQ ID NO: 4475; SEQ ID NO: 4476; SEQ ID NO: 4477; SEQ ID NO: 4478; SEQ ID NO: 4479; SEQ ID NO: 4480; SEQ ID NO: 4481; SEQ ID NO: 4482; SEQ ID NO: 4483; SEQ ID NO: 4484; SEQ ID NO: 4485; SEQ ID NO: 4486; SEQ ID NO: 4487; SEQ ID NO: 4488; SEQ ID NO: 4489; SEQ ID NO: 4490; SEQ ID NO: 4491; SEQ ID NO: 4492; SEQ ID NO: 4493; SEQ ID NO: 4494; SEQ ID NO: 4495; SEQ ID NO: 4496; SEQ ID NO: 4497; SEQ ID NO: 4498; SEQ ID NO: 4499; SEQ ID NO: 4500; SEQ ID NO: 4501; SEQ ID NO: 4502; SEQ ID NO: 4503; SEQ ID NO: 4504; SEQ ID NO: 4505; SEQ ID NO: 4506; SEQ ID NO: 4507; SEQ ID NO: 4508; SEQ ID NO: 4509; SEQ ID NO: 4510; SEQ ID NO: 4511; SEQ ID NO: 4512; SEQ ID NO: 4513; SEQ ID NO: 4514; SEQ ID NO: 4515; SEQ ID NO: 4516; SEQ ID NO: 4517; SEQ ID NO: 4518; SEQ ID NO: 4519; SEQ ID NO: 4520; SEQ ID NO: 4521; SEQ ID NO: 4522; SEQ ID NO: 4523; SEQ ID NO: 4524; SEQ ID NO: 4525; SEQ ID NO: 4526; SEQ ID NO: 4527; SEQ ID NO: 4528; SEQ ID NO: 4529; SEQ ID NO: 4530; SEQ ID NO: 4531; SEQ ID NO: 4532; SEQ ID NO: 4533; SEQ ID NO: 4534; SEQ ID NO: 4535; SEQ ID NO: 4536; SEQ ID NO: 4537; SEQ ID NO: 4538; SEQ ID NO: 4539; SEQ ID NO: 4540; SEQ ID NO: 4541; SEQ ID NO: 4542; SEQ ID NO: 4543; SEQ ID NO: 4544; SEQ ID NO: 4545; SEQ ID NO: 4546; SEQ ID NO: 4547; SEQ ID NO: 4548; SEQ ID NO: 4549; SEQ ID NO: 4550; SEQ ID NO: 4551; SEQ ID NO: 4552; SEQ ID NO: 4553; SEQ ID NO: 4554; SEQ ID NO: 4555; SEQ ID NO: 4556; SEQ ID NO: 4557; SEQ ID NO: 4558; SEQ ID NO: 4559; SEQ ID NO: 4560; SEQ ID NO: 4561; SEQ ID NO: 4562; SEQ ID NO: 4563; SEQ ID NO: 4564; SEQ ID NO: 4565; SEQ ID NO: 4566; SEQ ID NO: 4567; SEQ ID NO: 4568; SEQ ID NO: 4569; SEQ ID NO: 4570; SEQ ID NO: 4571; SEQ ID NO: 4572; SEQ ID NO: 4573; SEQ ID NO: 4574; SEQ ID NO: 4575; SEQ ID NO: 4576; SEQ ID NO: 4577; SEQ ID NO: 4578; SEQ ID NO: 4579; SEQ ID NO: 4580; SEQ ID NO: 4581; SEQ ID NO: 4582; SEQ ID NO: 4583; SEQ ID NO: 4584; SEQ ID NO: 4585; SEQ ID NO: 4586; SEQ ID NO: 4587; SEQ ID NO: 4588; SEQ ID NO: 4589; SEQ ID NO: 4590; SEQ ID NO: 4591; SEQ ID NO: 4592; SEQ ID NO: 4593; SEQ ID NO: 4594; SEQ ID NO: 4595; SEQ ID NO: 4596; SEQ ID NO: 4597; SEQ ID NO: 4598; SEQ ID NO: 4599; SEQ ID NO: 4600; SEQ ID NO: 4601; SEQ ID NO: 4602; SEQ ID NO: 4603; SEQ ID NO: 4604; SEQ ID NO: 4605; SEQ ID NO: 4606; SEQ ID NO: 4607; SEQ ID NO: 4608; SEQ ID NO: 4609; SEQ ID NO: 4610; SEQ ID NO: 4611; SEQ ID NO: 4612; SEQ ID NO: 4613; SEQ ID NO: 4614; SEQ ID NO: 4615; SEQ ID NO: 4616; SEQ ID NO: 4617; SEQ ID NO: 4618; SEQ ID NO: 4619; SEQ ID NO: 4620; SEQ ID NO: 4621; SEQ ID NO: 4622; SEQ ID NO: 4623; SEQ ID NO: 4624; SEQ ID NO: 4625; SEQ ID NO: 4626; SEQ ID NO: 4627; SEQ ID NO: 4628; SEQ ID NO: 4629; SEQ ID NO: 4630; SEQ ID NO: 4631; SEQ ID NO: 4632; SEQ ID NO: 4633; SEQ ID NO: 4634; SEQ ID NO: 4635; SEQ ID NO: 4636; SEQ ID NO: 4637; SEQ ID NO: 4638; SEQ ID NO: 4639; SEQ ID NO: 4640; SEQ ID NO: 4641; SEQ ID NO: 4642; SEQ ID NO: 4643; SEQ ID NO: 4644; SEQ ID NO: 4645; SEQ ID NO: 4646; SEQ ID NO: 4647; SEQ ID NO: 4648; SEQ ID NO: 4649; SEQ ID NO: 4650; SEQ ID NO: 4651; SEQ ID NO: 4652; SEQ ID NO: 4653; SEQ ID NO: 4654; SEQ ID NO: 4655; SEQ ID NO: 4656; SEQ ID NO: 4657; SEQ ID NO: 4658; SEQ ID NO: 4659; SEQ ID NO: 4660; SEQ ID NO: 4661; SEQ ID NO: 4662; SEQ ID NO: 4663; SEQ ID NO: 4664; SEQ ID NO: 4665; SEQ ID NO: 4666; SEQ ID NO: 4667; SEQ ID NO: 4668; SEQ ID NO: 4669; SEQ ID NO: 4670; SEQ ID NO: 4671; SEQ ID NO: 4672; SEQ ID NO: 4673; SEQ ID NO: 4674; SEQ ID NO: 4675; SEQ ID NO: 4676; SEQ ID NO: 4677; SEQ ID NO: 4678; SEQ ID NO: 4679; SEQ ID NO: 4680; SEQ ID NO: 4681; SEQ ID NO: 4682; SEQ ID NO: 4683; SEQ ID NO: 4684; SEQ ID NO: 4685; SEQ ID NO: 4686; SEQ ID NO: 4687; SEQ ID NO: 4688; SEQ ID NO: 4689; SEQ ID NO: 4690; SEQ ID NO: 4691; SEQ ID NO: 4692; SEQ ID NO: 4693; SEQ ID NO: 4694; SEQ ID NO: 4695; SEQ ID NO: 4696; SEQ ID NO: 4697; SEQ ID NO: 4698; SEQ ID NO: 4699; SEQ ID NO: 4700; SEQ ID NO: 4701; SEQ ID NO: 4702; SEQ ID NO: 4703; SEQ ID NO: 4704; SEQ ID NO: 4705; SEQ ID NO: 9626; SEQ ID NO: 9627; SEQ ID NO: 9628; SEQ ID NO: 9629; SEQ ID NO: 9630; SEQ ID NO: 9631; SEQ ID NO: 9632; SEQ ID NO: 9633; SEQ ID NO: 9634; SEQ ID NO: 9635 and SEQ ID NO: 9636, or a complement thereof.

[0091] Particularly preferred is an isolated nucleic acid having a nucleotide sequence encoding an H. pylori membrane associated polypeptide or a fragment thereof, the nucleic acid selected from the group consisting of SEQ ID NO: 4706; SEQ ID NO: 4707; SEQ ID NO: 4708; SEQ ID NO: 4709; SEQ ID NO: 4710; SEQ ID NO: 4711; SEQ ID NO: 4712; SEQ ID NO: 4713; SEQ ID NO: 4714; SEQ ID NO: 4715; SEQ ID NO: 4716; SEQ ID NO: 4717; SEQ ID NO: 4718; SEQ ID NO: 4719; SEQ ID NO: 4720; SEQ ID NO: 4721; SEQ ID NO: 4722; SEQ ID NO: 4723; SEQ ID NO: 4724; SEQ ID NO: 4725; SEQ ID NO: 4726; SEQ ID NO: 4727; SEQ ID NO: 4728; SEQ ID NO: 4729; SEQ ID NO: 4730; SEQ ID NO: 4731; SEQ ID NO: 4732; SEQ ID NO: 4733; SEQ ID NO: 4734; SEQ ID NO: 4735; SEQ ID NO: 4736; SEQ ID NO: 4737; SEQ ID NO: 4738; SEQ ID NO: 4739; SEQ ID NO: 4740; SEQ ID NO: 4741; SEQ ID NO: 4742; SEQ ID NO: 4743; SEQ ID NO: 4744; SEQ ID NO: 4745; SEQ ID NO: 4746; SEQ ID NO: 4747; SEQ ID NO: 4748; SEQ ID NO: 4749; SEQ ID NO: 4750; SEQ ID NO: 4751; SEQ ID NO: 4752; SEQ ID NO: 4753; SEQ ID NO: 4754; SEQ ID NO: 4755; SEQ ID NO: 4756; SEQ ID NO: 4757; SEQ ID NO: 4758; SEQ ID NO: 4759; SEQ ID NO: 4760; SEQ ID NO: 4761 and SEQ ID NO: 4762, or a complement thereof.

[0092] In another aspect, the invention features a probe having a nucleotide sequence consisting of at least 8 nucleotides of a nucleotide sequence selected from the group consisting of SEQ ID NO: 1-SEQ ID NO: 4762 and SEQ ID NO: 9525-SEQ ID NO: 9636, or a complement thereof.

[0093] In another aspect, the invention features an isolated H. pylori polypeptide having an amino acid sequence at least about 60% homologous to an H. pylori polypeptide selected from the group consisting of SEQ ID NO: 4763-SEQ ID NO: 9524 and SEQ ID NO: 9637-SEQ ID NO: 9748.

[0094] In another aspect, the invention features an isolated H. pylori polypeptide which is encoded by a nucleic acid having a nucleotide sequence at least about 60% homologous to a nucleotide sequence selected from the group consisting of SEQ ID NO: 1-SEQ ID NO:4762 and SEQ ID NO: 9525-SEQ ID NO: 9636. In one embodiment, the isolated H. pylori polypeptide is encoded by a nucleotide sequence selected from the group consisting of SEQ ID NO: 1-SEQ ID NO: 4762 and SEQ ID NO: 9525-SEQ ID NO: 9636.

[0095] In another aspect, the invention features an isolated H. pylori polypeptide which is encoded by a nucleic acid which hybridizes under stringent hybridization conditions to a nucleic acid selected from the group consisting of SEQ ID NO: 1-SEQ ID NO: 4762 and SEQ ID NO: 9525-SEQ ID NO: 9636, or a complement thereof.

[0096] In another aspect, the invention features an isolated H. pylori polypeptide having an amino acid sequence selected from the group consisting of SEQ ID NO: 4763-SEQ ID NO: 9524 and SEQ ID NO: 9637-SEQ ID NO: 9748.

[0097] Particularly preferred is an isolated H. pylori cell envelope polypeptide or a fragment thereof, wherein the polypeptide has an amino acid sequence selected from the group consisting of SEQ ID NO: 4763; SEQ ID NO: 4764; SEQ ID NO: 4765; SEQ ID NO: 4766; SEQ ID NO: 4767; SEQ ID NO: 4768; SEQ ID NO: 4769; SEQ ID NO: 4770; SEQ ID NO: 4771; SEQ ID NO: 4772; SEQ ID NO: 4773; SEQ ID NO: 4774; SEQ ID NO: 4775; SEQ ID NO: 4776; SEQ ID NO: 4777; SEQ ID NO: 4778; SEQ ID NO: 4779; SEQ ID NO: 4780; SEQ ID NO: 4781; SEQ ID NO: 4782; SEQ ID NO: 4783; SEQ ID NO: 4784; SEQ ID NO: 4785; SEQ ID NO: 4786; SEQ ID NO: 4787; SEQ ID NO: 4788; SEQ ID NO: 4789; SEQ ID NO: 4790; SEQ ID NO: 4791; SEQ ID NO: 4792; SEQ ID NO: 4793; SEQ ID NO: 4794; SEQ ID NO: 4795; SEQ ID NO: 4796; SEQ ID NO: 4797; SEQ ID NO: 4798; SEQ ID NO: 4799; SEQ ID NO: 4800; SEQ ID NO: 4801; SEQ ID NO: 4802; SEQ ID NO: 4803; SEQ ID NO: 4804; SEQ ID NO: 4805; SEQ ID NO: 4806; SEQ ID NO: 4807; SEQ ID NO: 4808; SEQ ID NO: 4809; SEQ ID NO: 4810; SEQ ID NO: 4811; SEQ ID NO: 4812; SEQ ID NO: 4813; SEQ ID NO: 4814; SEQ ID NO: 4815; SEQ ID NO: 4816; SEQ ID NO: 4817; SEQ ID NO: 4818; SEQ ID NO: 4819; SEQ ID NO: 4820; SEQ ID NO: 4821; SEQ ID NO: 4822; SEQ ID NO: 4823; SEQ ID NO: 4824; SEQ ID NO: 4825; SEQ ID NO: 4826; SEQ ID NO: 4827; SEQ ID NO: 4828; SEQ ID NO: 4829; SEQ ID NO: 4830; SEQ ID NO: 4831; SEQ ID NO: 4832; SEQ ID NO: 4833; SEQ ID NO: 4834; SEQ ID NO: 4835; SEQ ID NO: 4836; SEQ ID NO: 4837; SEQ ID NO: 4838; SEQ ID NO: 4839; SEQ ID NO: 4840; SEQ ID NO: 4841; SEQ ID NO: 4842; SEQ ID NO: 4843; SEQ ID NO: 4844; SEQ ID NO: 4845; SEQ ID NO: 4846; SEQ ID NO: 4847; SEQ ID NO: 4848; SEQ ID NO: 4849; SEQ ID NO: 4850; SEQ ID NO: 4851; SEQ ID NO: 4852; SEQ ID NO: 4853; SEQ ID NO: 4854; SEQ ID NO: 4855; SEQ ID NO: 4856; SEQ ID NO: 4857; SEQ ID NO: 4858; SEQ ID NO: 4859; SEQ ID NO: 4860; SEQ ID NO: 4861; SEQ ID NO: 4862; SEQ ID NO: 4863; SEQ ID NO: 4864; SEQ ID NO: 4865; SEQ ID NO: 4866; SEQ ID NO: 4867; SEQ ID NO: 4868; SEQ ID NO: 4869; SEQ ID NO: 4870; SEQ ID NO: 4871; SEQ ID NO: 4872; SEQ ID NO: 4873; SEQ ID NO: 4874; SEQ ID NO: 4875; SEQ ID NO: 4876; SEQ ID NO: 4877; SEQ ID NO: 4878; SEQ ID NO: 4879; SEQ ID NO: 4880; SEQ ID NO: 4881; SEQ ID NO: 4882; SEQ ID NO: 4883; SEQ ID NO: 4884; SEQ ID NO: 4885; SEQ ID NO: 4886; SEQ ID NO: 4887; SEQ ID NO: 4888; SEQ ID NO: 4889; SEQ ID NO: 4890; SEQ ID NO: 4891; SEQ ID NO: 4892; SEQ ID NO: 4893; SEQ ID NO: 4894; SEQ ID NO: 4895; SEQ ID NO: 4896; SEQ ID NO: 4897; SEQ ID NO: 4898; SEQ ID NO: 4899; SEQ ID NO: 4900; SEQ ID NO: 4901; SEQ ID NO: 4902; SEQ ID NO: 4903; SEQ ID NO: 4904; SEQ ID NO: 4905; SEQ ID NO: 4906; SEQ ID NO: 4907; SEQ ID NO: 4908; SEQ ID NO: 4909; SEQ ID NO: 4910; SEQ ID NO: 4911; SEQ ID NO: 4912; SEQ ID NO: 4913; SEQ ID NO: 4914; SEQ ID NO: 4915; SEQ ID NO: 4916; SEQ ID NO: 4917; SEQ ID NO: 4918; SEQ ID NO: 4919; SEQ ID NO: 4920; SEQ ID NO: 4921; SEQ ID NO: 4922; SEQ ID NO: 4923; SEQ ID NO: 4924; SEQ ID NO: 4925; SEQ ID NO: 4926; SEQ ID NO: 4927; SEQ ID NO: 4928; SEQ ID NO: 4929; SEQ ID NO: 4930; SEQ ID NO: 4931; SEQ ID NO: 4932; SEQ ID NO: 4933; SEQ ID NO: 4934; SEQ ID NO: 4935; SEQ ID NO: 4936; SEQ ID NO: 4937; SEQ ID NO: 4938; SEQ ID NO: 4939; SEQ ID NO: 4940; SEQ ID NO: 4941; SEQ ID NO: 4942; SEQ ID NO: 4943; SEQ ID NO: 4944; SEQ ID NO: 4945; SEQ ID NO: 4946; SEQ ID NO: 4947; SEQ ID NO: 4948; SEQ ID NO: 4949; SEQ ID NO: 4950; SEQ ID NO: 4951; SEQ ID NO: 4952; SEQ ID NO: 4953; SEQ ID NO: 4954; SEQ ID NO: 4955; SEQ ID NO: 4956; SEQ ID NO: 4957; SEQ ID NO: 4958; SEQ ID NO: 4959; SEQ ID NO: 4960; SEQ ID NO: 4961; SEQ ID NO: 4962; SEQ ID NO: 4963; SEQ ID NO: 4964; SEQ ID NO: 4965; SEQ ID NO: 4966; SEQ ID NO: 4967; SEQ ID NO: 4968; SEQ ID NO: 4969; SEQ ID NO: 4970; SEQ ID NO: 4971; SEQ ID NO: 4972; SEQ ID NO: 4973; SEQ ID NO: 4974; SEQ ID NO: 4975; SEQ ID NO: 4976; SEQ ID NO: 4977; SEQ ID NO: 4978; SEQ ID NO: 4979; SEQ ID NO: 4980; SEQ ID NO: 4981; SEQ ID NO: 4982; SEQ ID NO: 4983; SEQ ID NO: 4984; SEQ ID NO: 4985; SEQ ID NO: 4986; SEQ ID NO: 4987; SEQ ID NO: 4988; SEQ ID NO: 4989; SEQ ID NO: 4990; SEQ ID NO: 4991; SEQ ID NO: 4992; SEQ ID NO: 4993; SEQ ID NO: 4994; SEQ ID NO: 4995; SEQ ID NO: 4996; SEQ ID NO: 4997; SEQ ID NO: 4998; SEQ ID NO: 4999; SEQ ID NO: 5000; SEQ ID NO: 5001; SEQ ID NO: 5002; SEQ ID NO: 5003; SEQ ID NO: 5004; SEQ ID NO: 5005; SEQ ID NO: 5006; SEQ ID NO: 5007; SEQ ID NO: 5008; SEQ ID NO: 5009; SEQ ID NO: 5010; SEQ ID NO: 5011; SEQ ID NO: 5012; SEQ ID NO: 5013; SEQ ID NO: 5014; SEQ ID NO: 5015; SEQ ID NO: 5016; SEQ ID NO: 5017; SEQ ID NO: 5018; SEQ ID NO: 5019; SEQ ID NO: 5020; SEQ ID NO: 5021; SEQ ID NO: 5022; SEQ ID NO: 5023; SEQ ID NO: 5024; SEQ ID NO: 5025; SEQ ID NO: 5026; SEQ ID NO: 5027; SEQ ID NO: 5028; SEQ ID NO: 5029; SEQ ID NO: 5030; SEQ ID NO: 5031; SEQ ID NO: 5032; SEQ ID NO: 5033; SEQ ID NO: 5034; SEQ ID NO: 5035; SEQ ID NO: 5036; SEQ ID NO: 5037; SEQ ID NO: 5038; SEQ ID NO: 5039; SEQ ID NO: 5040; SEQ ID NO: 5041; SEQ ID NO: 5042; SEQ ID NO: 5043; SEQ ID NO: 5044; SEQ ID NO: 5045; SEQ ID NO: 5046; SEQ ID NO: 5047; SEQ ID NO: 5048; SEQ ID NO: 5049; SEQ ID NO: 5050; SEQ ID NO: 5051; SEQ ID NO: 5052; SEQ ID NO: 5053; SEQ ID NO: 5054; SEQ ID NO: 5055; SEQ ID NO: 5056; SEQ ID NO: 5057; SEQ ID NO: 5058; SEQ ID NO: 5059; SEQ ID NO: 5060; SEQ ID NO: 5061; SEQ ID NO: 5062; SEQ ID NO: 5063; SEQ ID NO: 5064; SEQ ID NO: 5065; SEQ ID NO: 5066; SEQ ID NO: 5067; SEQ ID NO: 5068; SEQ ID NO: 5069; SEQ ID NO: 5070; SEQ ID NO: 5071; SEQ ID NO: 5072; SEQ ID NO: 5073; SEQ ID NO: 5074; SEQ ID NO: 5075; SEQ ID NO: 5076; SEQ ID NO: 5077; SEQ ID NO: 5078; SEQ ID NO: 5079; SEQ ID NO: 5080; SEQ ID NO: 5081; SEQ ID NO: 5082; SEQ ID NO: 5083; SEQ ID NO: 5084; SEQ ID NO: 5085; SEQ ID NO: 5086; SEQ ID NO: 5087; SEQ ID NO: 5088; SEQ ID NO: 5089; SEQ ID NO: 5090; SEQ ID NO: 5091; SEQ ID NO: 5092; SEQ ID NO: 5093; SEQ ID NO: 5094; SEQ ID NO: 5095; SEQ ID NO: 5096; SEQ ID NO: 5097; SEQ ID NO: 5098; SEQ ID NO: 5099; SEQ ID NO: 5100; SEQ ID NO: 5101; SEQ ID NO: 5102, SEQ ID NO: 5103; SEQ ID NO: 5104; SEQ ID NO: 5105; SEQ ID NO: 5106; SEQ ID NO: 5107; SEQ ID NO: 5108; SEQ ID NO:5109; SEQ ID NO: 5110; SEQ ID NO:5111; SEQ ID NO:5112; SEQ ID NO: 5113; SEQ ID NO: 5114; SEQ ID NO: 5115; SEQ ID NO: 5116; SEQ ID NO: 5117; SEQ ID NO: 5118; SEQ ID NO: 5119; SEQ ID NO: 5120; SEQ ID NO: 5121; SEQ ID NO: 5122; SEQ ID NO: 5123; SEQ ID NO: 5124; SEQ ID NO: 5125; SEQ ID NO: 5126; SEQ ID NO: 5127; SEQ ID NO: 5128; SEQ ID NO: 5129; SEQ ID NO: 5130; SEQ ID NO: 5131; SEQ ID NO: 5132; SEQ ID NO: 5133; SEQ ID NO: 5134; SEQ ID NO: 5135; SEQ ID NO: 5136; SEQ ID NO: 5137; SEQ ID NO: 5138; SEQ ID NO: 5139; SEQ ID NO: 5140; SEQ ID NO: 5141; SEQ ID NO: 5142; SEQ ID NO: 5143; SEQ ID NO: 5144; SEQ ID NO: 5145; SEQ ID NO: 5146; SEQ ID NO: 5147; SEQ ID NO: 5148; SEQ ID NO: 5149; SEQ ID NO: 5150; SEQ ID NO: 5151; SEQ ID NO: 5152; SEQ ID NO: 5153; SEQ ID NO: 5154; SEQ ID NO: 5155; SEQ ID NO: 5156; SEQ ID NO: 5157; SEQ ID NO: 5158; SEQ ID NO: 5159; SEQ ID NO: 5160; SEQ ID NO: 5161; SEQ ID NO: 5162; SEQ ID NO: 5163; SEQ ID NO: 5164; SEQ ID NO: 5165; SEQ ID NO: 5166; SEQ ID NO: 5167; SEQ ID NO: 5168; SEQ ID NO: 5169; SEQ ID NO: 5170; SEQ ID NO: 5171; SEQ ID NO: 5172; SEQ ID NO: 5173; SEQ ID NO: 5174; SEQ ID NO: 5175; SEQ ID NO: 5176; SEQ ID NO: 5177; SEQ ID NO: 5178; SEQ ID NO: 5179; SEQ ID NO: 5180; SEQ ID NO: 5181; SEQ ID NO: 5182; SEQ ID NO: 5183; SEQ ID NO: 5184; SEQ ID NO: 5185; SEQ ID NO: 5186; SEQ ID NO: 5187; SEQ ID NO: 5188; SEQ ID NO: 5189; SEQ ID NO: 5190; SEQ ID NO: 5191; SEQ ID NO: 5192; SEQ ID NO: 5193; SEQ ID NO: 5194; SEQ ID NO: 5195; SEQ ID NO: 5196; SEQ ID NO: 5197; SEQ ID NO: 5198; SEQ ID NO: 5199; SEQ ID NO: 5200; SEQ ID NO: 5201; SEQ ID NO: 5202; SEQ ID NO: 5203; SEQ ID NO: 5204; SEQ ID NO: 5205; SEQ ID NO: 5206; SEQ ID NO: 5207; SEQ ID NO: 5208; SEQ ID NO: 5209; SEQ ID NO: 5210; SEQ ID NO: 5211; SEQ ID NO: 5212; SEQ ID NO: 5213; SEQ ID NO: 5214; SEQ ID NO: 5215; SEQ ID NO: 5216; SEQ ID NO: 5217; SEQ ID NO: 5218; SEQ ID NO: 5219; SEQ ID NO: 5220; SEQ ID NO: 5221; SEQ ID NO: 5222; SEQ ID NO: 5223; SEQ ID NO: 5224; SEQ ID NO: 5225; SEQ ID NO: 5226; SEQ ID NO: 5227; SEQ ID NO: 5228; SEQ ID NO: 5229; SEQ ID NO: 5230; SEQ ID NO: 5231; SEQ ID NO: 5232; SEQ ID NO: 5233; SEQ ID NO: 5234; SEQ ID NO: 5235; SEQ ID NO: 5236; SEQ ID NO: 5237; SEQ ID NO: 5238; SEQ ID NO: 5239; SEQ ID NO: 5240; SEQ ID NO: 5241; SEQ ID NO: 5242; SEQ ID NO: 5243; SEQ ID NO: 5244; SEQ ID NO: 5245; SEQ ID NO: 5246; SEQ ID NO: 5247; SEQ ID NO: 5248; SEQ ID NO: 5249; SEQ ID NO: 5250; SEQ ID NO: 5251; SEQ ID NO: 5252; SEQ ID NO: 5253; SEQ ID NO: 5254; SEQ ID NO: 5255; SEQ ID NO: 5256; SEQ ID NO: 52.57; SEQ ID NO: 5258; SEQ ID NO: 5259; SEQ ID NO: 5260; SEQ ID NO: 5261; SEQ ID NO: 5262; SEQ ID NO: 5263; SEQ ID NO: 5264; SEQ ID NO: 5265; SEQ ID NO: 5266; SEQ ID NO: 5267; SEQ ID NO: 5268; SEQ ID NO: 5269; SEQ ID NO: 5270; SEQ ID NO: 5271; SEQ ID NO: 5272; SEQ ID NO: 5273; SEQ ID NO: 5274; SEQ ID NO: 5275; SEQ ID NO: 5276; SEQ ID NO: 5277; SEQ ID NO: 5278; SEQ ID NO: 5279; SEQ ID NO: 5280; SEQ ID NO: 5281; SEQ ID NO: 5282; SEQ ID NO: 5283; SEQ ID NO: 5284; SEQ ID NO: 5285; SEQ ID NO: 5286; SEQ ID NO: 5287; SEQ ID NO: 5288; SEQ ID NO: 5289; SEQ ID NO: 5290; SEQ ID NO: 5291; SEQ ID NO: 5292; SEQ ID NO: 5293; SEQ ID NO: 5294; SEQ ID NO: 5295; SEQ ID NO: 5296; SEQ ID NO: 5297; SEQ ID NO: 5298; SEQ ID NO: 5299; SEQ ID NO: 5300; SEQ ID NO: 5301; SEQ ID NO: 5302; SEQ ID NO: 5303; SEQ ID NO: 5304; SEQ ID NO: 5305; SEQ ID NO: 5306; SEQ ID NO: 5307; SEQ ID NO: 5308; SEQ ID NO: 5309; SEQ ID NO: 5310; SEQ ID NO: 5311; SEQ ID NO: 5312; SEQ ID NO: 5313; SEQ ID NO: 5314; SEQ ID NO: 5315; SEQ ID NO: 5316; SEQ ID NO: 5317; SEQ ID NO: 5318; SEQ ID NO: 5319; SEQ ID NO: 5320; SEQ ID NO: 5321; SEQ ID NO: 5322; SEQ ID NO: 5323; SEQ ID NO: 5324; SEQ ID NO: 5325; SEQ ID NO: 5326; SEQ ID NO: 5327; SEQ ID NO: 5328; SEQ ID NO: 5329; SEQ ID NO: 5330; SEQ ID NO: 5331; SEQ ID NO: 5332; SEQ ID NO: 5333; SEQ ID NO: 5334; SEQ ID NO: 5335; SEQ ID NO: 5336; SEQ ID NO: 5337; SEQ ID NO: 5338; SEQ ID NO: 5339; SEQ ID NO: 5340; SEQ ID NO: 5341; SEQ ID NO: 5342; SEQ ID NO: 5343; SEQ ID NO: 5344; SEQ ID NO: 5345; SEQ ID NO: 5346; SEQ ID NO: 5347; SEQ ID NO: 5348; SEQ ID NO: 5349; SEQ ID NO: 5350; SEQ ID NO: 5351; SEQ ID NO: 5352; SEQ ID NO: 5353; SEQ ID NO: 5354; SEQ ID NO: 5355; SEQ ID NO: 5356; SEQ ID NO: 5357; SEQ ID NO: 5358; SEQ ID NO: 5359; SEQ ID NO: 5360; SEQ ID NO: 5361; SEQ ID NO: 5362; SEQ ID NO: 5363; SEQ ID NO: 5364; SEQ ID NO: 5365; SEQ ID NO: 5366; SEQ ID NO: 5367; SEQ ID NO: 5368; SEQ ID NO: 5369; SEQ ID NO: 5370; SEQ ID NO: 5371; SEQ ID NO: 5372; SEQ ID NO: 5373; SEQ ID NO: 5374; SEQ ID NO: 5375; SEQ ID NO: 5376; SEQ ID NO: 5377; SEQ ID NO: 5378; SEQ ID NO: 5379; SEQ ID NO: 5380; SEQ ID NO: 5381; SEQ ID NO: 5382; SEQ ID NO: 5383; SEQ ID NO: 5384; SEQ ID NO: 5385; SEQ ID NO: 5386; SEQ ID NO: 5387; SEQ ID NO: 5388; SEQ ID NO: 5389; SEQ ID NO: 5390; SEQ ID NO: 5391; SEQ ID NO: 5392; SEQ ID NO: 5393; SEQ ID NO: 5394; SEQ ID NO: 5395; SEQ ID NO: 5396; SEQ ID NO: 5397; SEQ ID NO: 5398; SEQ ID NO: 5399; SEQ ID NO: 5400; SEQ ID NO: 5401; SEQ ID NO: 5402; SEQ ID NO: 5403; SEQ ID NO: 5404; SEQ ID NO: 5405; SEQ ID NO: 5406; SEQ ID NO: 5407; SEQ ID NO: 5408; SEQ ID NO: 5409; SEQ ID NO: 5410; SEQ ID NO: 5411; SEQ ID NO: 5412; SEQ ID NO: 5413; SEQ ID NO: 5414; SEQ ID NO: 5415; SEQ ID NO: 5416; SEQ ID NO: 5417; SEQ ID NO: 5418; SEQ ID NO: 5419; SEQ ID NO: 5420; SEQ ID NO: 5421; SEQ ID NO: 5422; SEQ ID NO: 5423; SEQ ID NO: 5424; SEQ ID NO: 5425; SEQ ID NO: 5426; SEQ ID NO: 5427; SEQ ID NO: 5428; SEQ ID NO: 5429; SEQ ID NO: 5430; SEQ ID NO: 5431; SEQ ID NO: 5432; SEQ ID NO: 5433; SEQ ID NO: 5434; SEQ ID NO: 5435; SEQ ID NO: 5436; SEQ ID NO: 5437; SEQ ID NO: 5438; SEQ ID NO: 5439; SEQ ID NO: 5440; SEQ ID NO: 5441; SEQ ID NO: 5442; SEQ ID NO: 5443; SEQ ID NO: 5444; SEQ ID NO: 5445; SEQ ID NO: 5446; SEQ ID NO: 5447; SEQ ID NO: 5448; SEQ ID NO: 5449; SEQ ID NO: 5450; SEQ ID NO: 5451; SEQ ID NO: 5452; SEQ ID NO: 5453; SEQ ID NO: 5454; SEQ ID NO: 5455; SEQ ID NO: 5456; SEQ ID NO: 5457; SEQ ID NO: 5458; SEQ ID NO: 5459; SEQ ID NO: 5460; SEQ ID NO: 5461; SEQ ID NO: 5462; SEQ ID NO: 5463; SEQ ID NO: 5464; SEQ ID NO: 5465; SEQ ID NO: 5466; SEQ ID NO: 5467; SEQ ID NO: 5468; SEQ ID NO: 5469; SEQ ID NO: 5470; SEQ ID NO: 5471; SEQ ID NO: 5472; SEQ ID NO: 5473; SEQ ID NO: 5474; SEQ ID NO: 5475; SEQ ID NO: 5476; SEQ ID NO: 5477; SEQ ID NO: 5478; SEQ ID NO: 5479; SEQ ID NO: 5480; SEQ ID NO: 5481; SEQ ID NO: 5482; SEQ ID NO: 5483; SEQ ID NO: 5484; SEQ ID NO: 5485; SEQ ID NO: 5486; SEQ ID NO: 5487; SEQ ID NO: 5488; SEQ ID NO: 5489; SEQ ID NO: 5490; SEQ ID NO: 5491; SEQ ID NO: 5492; SEQ ID NO: 5493; SEQ ID NO: 5494; SEQ ID NO: 5495; SEQ ID NO: 5496; SEQ ID NO: 5497; SEQ ID NO: 5498; SEQ ID NO: 5499; SEQ ID NO: 5500; SEQ ID NO: 5501; SEQ ID NO: 5502; SEQ ID NO: 5503; SEQ ID NO: 5504; SEQ ID NO: 5505; SEQ ID NO: 5506; SEQ ID NO: 5507; SEQ ID NO: 5508; SEQ ID NO: 5509; SEQ ID NO: 5510; SEQ ID NO: 5511; SEQ ID NO: 5512; SEQ ID NO: 5513; SEQ ID NO: 5514; SEQ ID NO: 5515; SEQ ID NO: 5516; SEQ ID NO: 5517; SEQ ID NO: 5518; SEQ ID NO: 5519; SEQ ID NO: 5520; SEQ ID NO: 5521; SEQ ID NO: 5522; SEQ ID NO: 5523; SEQ ID NO: 5524; SEQ ID NO: 5525; SEQ ID NO: 5526; SEQ ID NO: 5527; SEQ ID NO: 5528; SEQ ID NO: 5529; SEQ ID NO: 5530; SEQ ID NO: 5531; SEQ ID NO: 5532; SEQ ID NO: 5533; SEQ ID NO: 5534; SEQ ID NO: 5535; SEQ ID NO: 5536; SEQ ID NO: 5537; SEQ ID NO: 5538; SEQ ID NO: 5539; SEQ ID NO: 5540; SEQ ID NO: 5541; SEQ ID NO: 5542; SEQ ID NO: 5543; SEQ ID NO: 5544; SEQ ID NO: 5545; SEQ ID NO: 5546; SEQ ID NO: 5547; SEQ ID NO: 5548; SEQ ID NO: 5549; SEQ ID NO: 5550; SEQ ID NO: 5551; SEQ ID NO: 5552; SEQ ID NO: 5553; SEQ ID NO: 5554; SEQ ID NO: 5555; SEQ ID NO: 5556; SEQ ID NO: 5557; SEQ ID NO: 5558; SEQ ID NO: 5559; SEQ ID NO: 5560; SEQ ID NO: 5561; SEQ ID NO: 5562; SEQ ID NO: 5563; SEQ ID NO: 5564; SEQ ID NO: 5565; SEQ ID NO: 5566; SEQ ID NO: 5567; SEQ ID NO: 5568; SEQ ID NO: 5569; SEQ ID NO: 5570; SEQ ID NO: 5571; SEQ ID NO: 5572; SEQ ID NO: 5573; SEQ ID NO: 5574; SEQ ID NO: 5575; SEQ ID NO: 5576; SEQ ID NO: 5577; SEQ ID NO: 5578; SEQ ID NO: 5579; SEQ ID NO: 5580; SEQ ID NO: 5581; SEQ ID NO: 5582; SEQ ID NO: 5583; SEQ ID NO: 5584; SEQ ID NO: 5585; SEQ ID NO: 5586; SEQ ID NO: 5587; SEQ ID NO: 5588; SEQ ID NO: 5589; SEQ ID NO: 5590; SEQ ID NO: 5591; SEQ ID NO: 5592; SEQ ID NO: 5593; SEQ ID NO: 5594; SEQ ID NO: 5595; SEQ ID NO: 5596; SEQ ID NO: 5597; S-Q ID NO: 5598; SEQ ID NO: 5599; SEQ ID NO: 5600; SEQ ID NO: 5601; SEQ ID NO: 5602; SEQ ID NO: 5603; SEQ ID NO: 5604; SEQ ID NO: 5605; SEQ ID NO: 5606; SEQ ID NO: 5607; SEQ ID NO: 5608; SEQ ID NO: 5609; SEQ ID NO: 5610; SEQ ID NO: 5611; SEQ ID NO: 5612; SEQ ID NO: 5613; SEQ ID NO: 5614; SEQ ID NO: 5615; SEQ ID NO: 5616; SEQ ID NO: 5617; SEQ ID NO: 5618; SEQ ID NO: 5619; SEQ ID NO: 5620; SEQ ID NO: 5621; SEQ ID NO: 5622; SEQ ID NO: 5623; SEQ ID NO: 5624; SEQ ID NO: 5625; SEQ ID NO: 5626; SEQ ID NO: 5627; SEQ ID NO: 5628; SEQ ID NO: 5629; SEQ ID NO: 5630; SEQ ID NO: 5631; SEQ ID NO: 5632; SEQ ID NO: 5633; SEQ ID NO: 5634; SEQ ID NO: 5635; SEQ ID NO: 5636; SEQ ID NO: 5637; SEQ ID NO: 5638; SEQ ID NO: 5639; SEQ ID NO: 5640; SEQ ID NO: 5641; SEQ ID NO: 5642; SEQ ID NO: 5643; SEQ ID NO: 5644; SEQ ID NO: 5645; SEQ ID NO: 5646; SEQ ID NO: 5647; SEQ ID NO: 5648; SEQ ID NO: 5649; SEQ ID NO: 5650; SEQ ID NO: 5651; SEQ ID NO: 5652; SEQ ID NO: 5653; SEQ ID NO: 5654; SEQ ID NO: 5655; SEQ ID NO: 5656; SEQ ID NO: 5657; SEQ ID NO: 5658; SEQ ID NO: 5659; SEQ ID NO: 5660; SEQ ID NO: 5661; SEQ ID NO: 5662; SEQ ID NO: 5663; SEQ ID NO: 5664; SEQ ID NO: 5665; SEQ ID NO: 5666; SEQ ID NO: 5667; SEQ ID NO: 5668; SEQ ID NO: 5669; SEQ ID NO: 5670; SEQ ID NO: 5671; SEQ ID NO: 5672; SEQ ID NO: 5673; SEQ ID NO: 5674; SEQ ID NO: 5675; SEQ ID NO: 5676; SEQ ID NO: 5677; SEQ ID NO: 5678; SEQ ID NO: 5679; SEQ ID NO: 5680; SEQ ID NO: 5681; SEQ ID NO: 5682; SEQ ID NO: 5683; SEQ ID NO: 5684; SEQ ID NO: 5685; SEQ ID NO: 5686; SEQ ID NO: 5687; SEQ ID NO: 5688; SEQ ID NO: 5689; SEQ ID NO: 5690; SEQ ID NO: 5691; SEQ ID NO: 5692; SEQ ID NO: 5693; SEQ ID NO: 5694; SEQ ID NO: 5695; SEQ ID NO: 5696; SEQ ID NO: 5697; SEQ ID NO: 5698; SEQ ID NO: 5699; SEQ ID NO: 5700; SEQ ID NO: 5701; SEQ ID NO: 5702; SEQ ID NO: 5703; SEQ ID NO: 5704; SEQ ID NO: 5705; SEQ ID NO: 5706; SEQ ID NO: 5707; SEQ ID NO: 5708; SEQ ID NO: 5709; SEQ ID NO: 5710; SEQ ID NO: 5711; SEQ ID NO: 5712; SEQ ID NO: 5713; SEQ ID NO: 5714; SEQ ID NO: 5715; SEQ ID NO: 5716; SEQ ID NO: 5717; SEQ ID NO: 5718; SEQ ID NO: 5719; SEQ ID NO:5720; SEQ ID NO:5721; SEQ ID NO:5722; SEQ ID NO:5723; SEQ ID NO: 5724; SEQ ID NO: 5725; SEQ ID NO: 5726; SEQ ID NO: 5727; SEQ ID NO: 5728; SEQ ID NO: 5729; SEQ ID NO: 5730; SEQ ID NO: 5731; SEQ ID NO: 5732; SEQ ID NO: 5733; SEQ ID NO: 5734; SEQ ID NO: 5735; SEQ ID NO: 5736; SEQ ID NO: 5737; SEQ ID NO: 5738; SEQ ID NO: 5739; SEQ ID NO: 5740; SEQ ID NO: 5741; SEQ ID NO: 5742; SEQ ID NO: 5743; SEQ ID NO: 5744; SEQ ID NO: 5745; SEQ ID NO: 5746; SEQ ID NO: 5747; SEQ ID NO: 5748; SEQ ID NO: 5749; SEQ ID NO: 5750; SEQ ID NO: 5751; SEQ ID NO: 5752; SEQ ID NO: 5753; SEQ ID NO: 5754; SEQ ID NO: 5755; SEQ ID NO: 5756; SEQ ID NO: 5757; SEQ ID NO: 5758; SEQ ID NO: 5759; SEQ ID NO: 5760; SEQ ID NO: 5761; SEQ ID NO: 5762; SEQ ID NO: 5763; SEQ ID NO: 5764; SEQ ID NO: 5765; SEQ ID NO: 5766; SEQ ID NO: 5767; SEQ ID NO: 5768; SEQ ID NO: 5769; SEQ ID NO: 5770; SEQ ID NO: 5771; SEQ ID NO: 5772; SEQ ID NO: 5773; SEQ ID NO: 5774; SEQ ID NO: 5775; SEQ ID NO: 5776; SEQ ID NO: 5777; SEQ ID NO: 5778; SEQ ID NO: 5779; SEQ ID NO: 5780; SEQ ID NO: 5781; SEQ ID NO: 5782; SEQ ID NO: 5783; SEQ ID NO: 5784; SEQ ID NO: 5785; SEQ ID NO: 5786; SEQ ID NO: 5787; SEQ ID NO: 5788; SEQ ID NO: 5789; SEQ ID NO: 5790; SEQ ID NO: 5791; SEQ ID NO: 5792; SEQ ID NO: 5793; SEQ ID NO: 5794; SEQ ID NO: 5795; SEQ ID NO: 5796; SEQ ID NO: 5797; SEQ ID NO: 5798; SEQ ID NO: 5799; SEQ ID NO: 5800; SEQ ID NO: 5801; SEQ ID NO: 5802; SEQ ID NO: 5803; SEQ ID NO: 5804; SEQ ID NO: 5805; SEQ ID NO: 5806; SEQ ID NO: 5807; SEQ ID NO: 5808; SEQ ID NO: 5809; SEQ ID NO: 5810; SEQ ID NO: 5811; SEQ ID NO: 5812; SEQ ID NO: 5813; SEQ ID NO: 5814; SEQ ID NO: 5815; SEQ ID NO: 5816; SEQ ID NO: 5817; SEQ ID NO: 5818; SEQ ID NO: 5819; SEQ ID NO: 5820; SEQ ID NO: 5821; SEQ ID NO: 5822; SEQ ID NO: 5823; SEQ ID NO: 5824; SEQ ID NO: 5825; SEQ ID NO: 5826; SEQ ID NO: 5827; SEQ ID NO: 5828; SEQ ID NO: 5829; SEQ ID NO: 5830; SEQ ID NO: 5831; SEQ ID NO: 5832; SEQ ID NO: 5833; SEQ ID NO: 5834; SEQ ID NO: 5835; SEQ ID NO: 5836; SEQ ID NO: 5837; SEQ ID NO: 5838; SEQ ID NO: 5839; SEQ ID NO: 5840; SEQ ID NO: 5841; SEQ ID NO: 5842; SEQ ID NO: 5843; SEQ ID NO: 5844; SEQ ID NO: 5845; SEQ ID NO: 5846; SEQ ID NO: 5847; SEQ ID NO: 5848; SEQ ID NO: 5849; SEQ ID NO: 5850; SEQ ID NO: 5851; SEQ ID NO: 5852; SEQ ID NO: 5853; SEQ ID NO: 5854; SEQ ID NO: 5855; SEQ ID NO: 5856; SEQ ID NO: 5857; SEQ ID NO: 5858; SEQ ID NO: 5859; SEQ ID NO: 5860; SEQ ID NO: 5861; SEQ ID NO: 5862; SEQ ID NO: 5863; SEQ ID NO: 5864; SEQ ID NO: 5865; SEQ ID NO: 5866; SEQ ID NO: 5867; SEQ ID NO: 5868; SEQ ID NO: 5869; SEQ ID NO: 5870; SEQ ID NO: 5871; SEQ ID NO: 5872; SEQ ID NO: 5873; SEQ ID NO: 5874; SEQ ID NO: 5875; SEQ ID NO: 5876; SEQ ID NO: 5877; SEQ ID NO: 5878; SEQ ID NO: 5879; SEQ ID NO: 5880; SEQ ID NO: 5881; SEQ ID NO: 5882; SEQ ID NO: 5883; SEQ ID NO: 5884; SEQ ID NO: 5885; SEQ ID NO: 5886; SEQ ID NO: 5887; SEQ ID NO: 5888; SEQ ID NO: 5889; SEQ ID NO: 5890; SEQ ID NO: 5891; SEQ ID NO: 5892; SEQ ID NO: 5893; SEQ ID NO: 5894; SEQ ID NO: 5895; SEQ ID NO: 5896; SEQ ID NO: 5897; SEQ ID NO: 5898; SEQ ID NO: 5899; SEQ ID NO: 5900; SEQ ID NO: 5901; SEQ ID NO: 5902; SEQ ID NO: 5903; SEQ ID NO: 5904; SEQ ID NO: 5905; SEQ ID NO: 5906; SEQ ID NO: 5907; SEQ ID NO: 5908; SEQ ID NO: 5909; SEQ ID NO: 5910; SEQ ID NO: 5911; SEQ ID NO: 5912; SEQ ID NO: 5913; SEQ ID NO: 5914; SEQ ID NO: 5915; SEQ ID NO: 5916; SEQ ID NO: 5917; SEQ ID NO: 5918; SEQ ID NO: 5919; SEQ ID NO: 5920; SEQ ID NO: 5921; SEQ ID NO: 5922; SEQ ID NO: 5923; SEQ ID NO: 5924; SEQ ID NO: 5925; SEQ ID NO: 5926; SEQ ID NO: 5927; SEQ ID NO: 5928; SEQ ID NO: 5929; SEQ ID NO: 5930; SEQ ID NO: 5931; SEQ ID NO: 5932; SEQ ID NO: 5933; SEQ ID NO: 5934; SEQ ID NO: 5935; SEQ ID NO: 5936; SEQ ID NO: 5937; SEQ ID NO: 5938; SEQ ID NO: 5939; SEQ ID NO: 5940; SEQ ID NO: 5941; SEQ ID NO: 5942; SEQ ID NO: 5943; SEQ ID NO: 5944; SEQ ID NO: 5945; SEQ ID NO: 5946; SEQ ID NO: 5947; SEQ ID NO: 5948; SEQ ID NO: 5949; SEQ ID NO: 5950; SEQ ID NO: 5951; SEQ ID NO: 5952; SEQ ID NO: 5953; SEQ ID NO: 5954; SEQ ID NO: 5955; SEQ ID NO: 5956; SEQ ID NO: 5957; SEQ ID NO: 5958; SEQ ID NO: 5959; SEQ ID NO: 5960; SEQ ID NO: 5961; SEQ ID NO: 5962; SEQ ID NO: 5963; SEQ ID NO: 5964; SEQ ID NO: 5965; SEQ ID NO: 5966; SEQ ID NO: 5967; SEQ ID NO: 5968; SEQ ID NO: 5969; SEQ ID NO: 5970; SEQ ID NO: 5971; SEQ ID NO: 5972; SEQ ID NO: 5973; SEQ ID NO: 5974; SEQ ID NO: 5975; SEQ ID NO: 5976; SEQ ID NO: 5977; SEQ ID NO: 5978; SEQ ID NO: 5979; SEQ ID NO: 5980; SEQ ID NO: 5981; SEQ ID NO: 5982; SEQ ID NO: 5983; SEQ ID NO: 5984; SEQ ID NO: 5985; SEQ ID NO: 5986; SEQ ID NO: 5987; SEQ ID NO: 5988; SEQ ID NO: 5989; SEQ ID NO: 5990; SEQ ID NO: 5991; SEQ ID NO: 5992; SEQ ID NO: 5993; SEQ ID NO: 5994; SEQ ID NO: 5995; SEQ ID NO: 5996; SEQ ID NO: 5997; SEQ ID NO: 5998; SEQ ID NO: 5999; SEQ ID NO: 6000; SEQ ID NO: 6001; SEQ ID NO: 6002; SEQ ID NO: 6003; SEQ ID NO: 6004; SEQ ID NO: 6005; SEQ ID NO: 6006; SEQ ID NO: 6007; SEQ ID NO: 6008; SEQ ID NO: 6009; SEQ ID NO: 6010; SEQ ID NO: 6011; SEQ ID NO: 6012; SEQ ID NO: 6013; SEQ ID NO: 6014; SEQ ID NO: 6015; SEQ ID NO: 6016; SEQ ID NO: 6017; SEQ ID NO: 6018; SEQ ID NO: 6019; SEQ ID NO: 6020; SEQ ID NO: 6021; SEQ ID NO: 6022; SEQ ID NO: 6023; SEQ ID NO: 6024; SEQ ID NO: 6025; SEQ ID NO: 6026; SEQ ID NO: 6027; SEQ ID NO: 6028; SEQ ID NO: 6029; SEQ ID NO: 6030; SEQ ID NO: 6031; SEQ ID NO: 6032; SEQ ID NO: 6033; SEQ ID NO: 6034; SEQ ID NO: 6035; SEQ ID NO: 6036; SEQ ID NO: 6037; SEQ ID NO: 6038; SEQ ID NO: 6039; SEQ ID NO: 6040; SEQ ID NO: 6041; SEQ ID NO: 6042; SEQ ID NO: 6043; SEQ ID NO: 6044; SEQ ID NO: 6045; SEQ ID NO: 6046; SEQ ID NO: 6047; SEQ ID NO: 6048; SEQ ID NO: 6049; SEQ ID NO: 6050; SEQ ID NO: 6051; SEQ ID NO: 6052; SEQ ID NO: 6053; SEQ ID NO: 6054; SEQ ID NO: 6055; SEQ ID NO: 6056; SEQ ID NO: 6057; SEQ ID NO: 6058; SEQ ID NO: 6059; SEQ ID NO: 6060; SEQ ID NO: 6061; SEQ ID NO: 6062; SEQ ID NO: 6063; SEQ ID NO: 6064; SEQ ID NO: 6065; SEQ ID NO: 6066; SEQ ID NO: 6067; SEQ ID NO: 6068; SEQ ID NO: 6069; SEQ ID NO: 6070; SEQ ID NO: 6071; SEQ ID NO: 6072; SEQ ID NO: 6073; SEQ ID NO: 6074; SEQ ID NO: 6075; SEQ ID NO: 6076; SEQ ID NO: 6077; SEQ ID NO: 6078; SEQ ID NO: 6079; SEQ ID NO: 6080; SEQ ID NO: 6081; SEQ ID NO: 6082; SEQ ID NO: 6083; SEQ ID NO: 6084; SEQ ID NO: 6085; SEQ ID NO: 6086; SEQ ID NO: 6087; SEQ ID NO: 6088; SEQ ID NO: 6089; SEQ ID NO: 6090; SEQ ID NO: 6091; SEQ ID NO: 6092; SEQ ID NO: 6093; SEQ ID NO: 6094; SEQ ID NO: 6095; SEQ ID NO: 6096; SEQ ID NO: 6097; SEQ ID NO: 6098; SEQ ID NO: 6099; SEQ ID NO: 6100; SEQ ID NO: 6101; SEQ ID NO: 6102; SEQ ID NO: 6103; SEQ ID NO: 6104; SEQ ID NO: 6105; SEQ ID NO: 6106; SEQ ID NO: 6107; SEQ ID NO: 6108; SEQ ID NO: 6109; SEQ ID NO: 6110; SEQ ID NO: 6111; SEQ ID NO: 6112; SEQ ID NO: 6113; SEQ ID NO: 6114; SEQ ID NO: 6115; SEQ ID NO: 6116; SEQ ID NO: 6117; SEQ ID NO: 6118; SEQ ID NO: 6119; SEQ ID NO: 6120; SEQ ID NO: 6121; SEQ ID NO: 6122; SEQ ID NO: 6123; SEQ ID NO: 6124; SEQ ID NO: 6125; SEQ ID NO: 6126; SEQ ID NO: 6127; SEQ ID NO: 6128; SEQ ID NO: 6129; SEQ ID NO: 6130; SEQ ID NO: 6131; SEQ ID NO: 6132; SEQ ID NO: 6133; SEQ ID NO: 6134; SEQ ID NO: 6135; SEQ ID NO: 6136; SEQ ID NO: 6137; SEQ ID NO: 6138; SEQ ID NO: 6139; SEQ ID NO: 6140; SEQ ID NO: 6141; SEQ ID NO: 6142; SEQ ID NO: 6143; SEQ ID NO: 6144; SEQ ID NO: 6145; SEQ ID NO: 6146; SEQ ID NO: 6147; SEQ ID NO: 6148; SEQ ID NO: 6149; SEQ ID NO: 6150; SEQ ID NO: 6151; SEQ ID NO:6152; SEQ ID NO: 6153; SEQ ID NO: 6154; SEQ ID NO: 6155; SEQ ID NO: 6156; SEQ ID NO: 6157; SEQ ID NO: 6158; SEQ ID NO: 6159; SEQ ID NO: 6160; SEQ ID NO: 6161; SEQ ID NO: 6162; SEQ ID NO: 6163; SEQ ID NO: 6164; SEQ ID NO: 6165; SEQ ID NO: 6166; SEQ ID NO: 6167; SEQ ID NO: 6168; SEQ ID NO: 6169; SEQ ID NO: 6170; SEQ ID NO: 6171; SEQ ID NO: 6172; SEQ ID NO: 6173; SEQ ID NO: 6174; SEQ ID NO: 6175; SEQ ID NO: 6176; SEQ ID NO: 6177; SEQ ID NO: 6178; SEQ ID NO: 6179; SEQ ID NO: 6180; SEQ ID NO: 6181; SEQ ID NO: 6182; SEQ ID NO: 6183; SEQ ID NO: 6184; SEQ ID NO: 6185; SEQ ID NO: 6186; SEQ ID NO: 6187; SEQ ID NO: 6188; SEQ ID NO: 6189; SEQ ID NO: 6190; SEQ ID NO: 6191; SEQ ID NO: 6192; SEQ ID NO: 6193; SEQ ID NO: 6194; SEQ ID NO: 6195; SEQ ID NO: 6196; SEQ ID NO: 6197; SEQ ID NO: 6198; SEQ ID NO: 6199; SEQ ID NO: 6200; SEQ ID NO: 6201; SEQ ID NO: 6202; SEQ ID NO: 6203; SEQ ID NO: 6204; SEQ ID NO: 6205; SEQ ID NO: 6206; SEQ ID NO: 6207; SEQ ID NO: 6208; SEQ ID NO: 6209; SEQ ID NO: 6210; SEQ ID NO: 6211; SEQ ID NO: 6212; SEQ ID NO: 6213; SEQ ID NO: 6214; SEQ ID NO: 6215; SEQ ID NO: 6216; SEQ ID NO: 6217; SEQ ID NO: 6218; SEQ ID NO: 6219; SEQ ID NO: 6220; SEQ ID NO: 6221; SEQ ID NO: 6222; SEQ ID NO: 6223; SEQ ID NO: 6224; SEQ ID NO: 6225; SEQ ID NO: 6226; SEQ ID NO: 6227; SEQ ID NO: 6228; SEQ ID NO: 6229; SEQ ID NO: 6230; SEQ ID NO: 6231; SEQ ID NO: 6232; SEQ ID NO: 6233; SEQ ID NO: 6234; SEQ ID NO: 6235; SEQ ID NO: 6236; SEQ ID NO: 6237; SEQ ID NO: 6238; SEQ ID NO: 6239; SEQ ID NO: 6240; SEQ ID NO: 6241; SEQ ID NO: 6242; SEQ ID NO: 6243; SEQ ID NO: 6244; SEQ ID NO: 6245; SEQ ID NO: 6246; SEQ ID NO: 6247; SEQ ID NO: 6248; SEQ ID NO: 6249; SEQ ID NO: 6250; SEQ ID NO: 6251; SEQ ID NO: 6252; SEQ ID NO: 6253; SEQ ID NO: 6254; SEQ ID NO: 6255; SEQ ID NO: 6256; SEQ ID NO: 6257; SEQ ID NO: 6258; SEQ ID NO: 6259; SEQ ID NO: 6260; SEQ ID NO: 6261; SEQ ID NO: 6262; SEQ ID NO: 6263; SEQ ID NO: 6264; SEQ ID NO: 6265; SEQ ID NO: 6266; SEQ ID NO: 6267; SEQ ID NO: 6268; SEQ ID NO: 6269; SEQ ID NO: 6270; SEQ ID NO: 6271; SEQ ID NO: 6272; SEQ ID NO: 6273; SEQ ID NO: 6274; SEQ ID NO: 6275; SEQ ID NO: 6276; SEQ ID NO: 6277; SEQ ID NO: 6278; SEQ ID NO: 6279; SEQ ID NO: 6280; SEQ ID NO: 6281; SEQ ID NO: 6282; SEQ ID NO: 6283; SEQ ID NO: 6284; SEQ ID NO: 6285; SEQ ID NO: 6286; SEQ ID NO: 6287; SEQ ID NO: 6288; SEQ ID NO: 6289; SEQ ID NO: 6290; SEQ ID NO: 6291; SEQ ID NO: 6292; SEQ ID NO: 6293; SEQ ID NO: 6294; SEQ ID NO: 6295; SEQ ID NO: 6296; SEQ ID NO: 6297; SEQ ID NO: 6298; SEQ ID NO: 6299; SEQ ID NO: 6300; SEQ ID NO: 6301; SEQ ID NO: 6302; SEQ ID NO: 6303; SEQ ID NO: 6304; SEQ ID NO: 6305; SEQ ID NO: 6306; SEQ ID NO: 6307; SEQ ID NO: 6308; SEQ ID NO: 6309; SEQ ID NO: 6310; SEQ ID NO: 6311; SEQ ID NO: 6312; SEQ ID NO: 6313; SEQ ID NO: 6314; SEQ ID NO: 6315; SEQ ID NO: 6316; SEQ ID NO: 6317; SEQ ID NO: 6318; SEQ ID NO: 6319; SEQ ID NO: 6320; SEQ ID NO: 6321; SEQ ID NO: 6322; SEQ ID NO: 6323; SEQ ID NO: 6324; SEQ ID NO: 6325; SEQ ID NO: 6326; SEQ ID NO: 6327; SEQ ID NO: 6328; SEQ ID NO: 6329; SEQ ID NO: 6330; SEQ ID NO: 6331; SEQ ID NO: 6332; SEQ ID NO: 6333; SEQ ID NO: 6334; SEQ ID NO: 6335; SEQ ID NO: 6336; SEQ ID NO: 6337; SEQ ID NO: 9637; SEQ ID NO: 9638; SEQ ID NO: 9639; SEQ ID NO: 9640; SEQ ID NO: 9641; SEQ ID NO: 9642; SEQ ID NO: 9643; SEQ ID NO: 9644; SEQ ID NO: 9645; SEQ ID NO: 9646; SEQ ID NO: 9647; SEQ ID NO: 9648; SEQ ID NO: 9649; SEQ ID NO: 9650; SEQ ID NO: 9651; SEQ ID NO: 9652; SEQ ID NO: 9653; SEQ ID NO: 9654; SEQ ID NO: 9655; SEQ ID NO: 9656; SEQ ID NO: 9657; SEQ ID NO: 9658; SEQ ID NO: 9659; SEQ ID NO: 9660; SEQ ID NO: 9661; SEQ ID NO: 9662; SEQ ID NO: 9663; SEQ ID NO: 9664; SEQ ID NO: 9665; SEQ ID NO: 9666; SEQ ID NO: 9667; SEQ ID NO: 9668; SEQ ID NO: 9669; SEQ ID NO: 9670; SEQ ID NO: 9671; SEQ ID NO: 9672; SEQ ID NO: 9673; SEQ ID NO: 9674; SEQ ID NO: 9675; SEQ ID NO: 9676; SEQ ID NO: 9677; SEQ ID NO: 9678; SEQ ID NO: 9679; SEQ ID NO: 9680; SEQ ID NO: 9681; SEQ ID NO: 9682; SEQ ID NO: 9683; SEQ ID NO: 9684; SEQ ID NO: 9685; SEQ ID NO: 9686; SEQ ID NO: 9687; SEQ ID NO: 9688; SEQ ID NO: 9689; SEQ ID NO: 9690; SEQ ID NO: 9691; SEQ ID NO: 9692; SEQ ID NO: 9693; SEQ ID NO: 9694; SEQ ID NO: 9695; SEQ ID NO: 9696; SEQ ID NO: 9697; SEQ ID NO: 9698; SEQ ID NO: 9699; SEQ ID NO: 9700; SEQ ID NO: 9701; SEQ ID NO: 9702; SEQ ID NO: 9703 and SEQ ID NO: 9704.

[0098] In one embodiment, the H. pylori cell envelope polypeptide or a fragment thereof is an H. pylori flagella-associated polypeptide or a fragment thereof having an amino acid sequence selected from the group consisting of SEQ ID NO: 4763; SEQ ID NO: 4764; SEQ ID NO: 4765; SEQ ID NO: 4766; SEQ ID NO: 4767; SEQ ID NO: 4768; SEQ ID NO: 4769; SEQ ID NO: 4770; SEQ ID NO: 4771; SEQ ID NO: 4772; SEQ ID NO: 4773; SEQ ID NO: 4774; SEQ ID NO: 4775; SEQ ID NO: 4776; SEQ ID NO: 4777; SEQ ID NO: 4778; SEQ ID NO: 4779; SEQ ID NO: 4780; SEQ ID NO: 4781; SEQ ID NO: 4782; SEQ ID NO: 4783; SEQ ID NO: 4784; SEQ ID NO: 4785; SEQ ID NO: 4786; SEQ ID NO: 4787; SEQ ID NO: 4788; SEQ ID NO: 4789; SEQ ID NO: 4790; SEQ ID NO: 4791; SEQ ID NO: 4792; SEQ ID NO: 4793; SEQ ID NO: 4794; SEQ ID NO: 4795; SEQ ID NO: 4796; SEQ ID NO: 4797; SEQ ID NO: 4798; SEQ ID NO: 4799; SEQ ID NO: 4800; SEQ ID NO: 4801; SEQ ID NO: 4802; SEQ ID NO: 4803; SEQ ID NO: 4804; SEQ ID NO: 4805; SEQ ID NO: 4806; SEQ ID NO: 4807; SEQ ID NO: 4808; SEQ ID NO: 4809; SEQ ID NO: 4810; SEQ ID NO: 4811; SEQ ID NO: 4812; SEQ ID NO: 4813; SEQ ID NO: 4814; SEQ ID NO: 4815; SEQ ID NO: 4816; SEQ ID NO: 4817; SEQ ID NO: 4818; SEQ ID NO: 4819; SEQ ID NO: 4820; SEQ ID NO: 4821; SEQ ID NO: 4822; SEQ ID NO: 4823; SEQ ID NO: 4824; SEQ ID NO: 4825; SEQ ID NO: 4826; SEQ ID NO: 4827; SEQ ID NO: 4828; SEQ ID NO: 4829; SEQ ID NO: 4830; SEQ ID NO: 4831; SEQ ID NO: 4832; SEQ ID NO: 4833; SEQ ID NO: 4834; SEQ ID NO: 4835; SEQ ID NO: 4836; SEQ ID NO: 4837; SEQ ID NO: 4838; SEQ ID NO: 4839; SEQ ID NO: 4840; SEQ ID NO: 4841; SEQ ID NO: 4842; SEQ ID NO: 4843; SEQ ID NO: 4844; SEQ ID NO: 4845; SEQ ID NO: 4846; SEQ ID NO: 4847; SEQ ID NO: 4848; SEQ ID NO: 4849; SEQ ID NO: 4850; SEQ ID NO: 4851; SEQ ID NO: 4852; SEQ ID NO: 4853; SEQ ID NO: 4854; SEQ ID NO: 4855; SEQ ID NO: 4856; SEQ ID NO: 4857; SEQ ID NO: 4858; SEQ ID NO: 4859; SEQ ID NO: 4860; SEQ ID NO: 4861; SEQ ID NO: 4862; SEQ ID NO: 4863; SEQ ID NO: 4864; SEQ ID NO: 4865; SEQ ID NO: 9637; SEQ ID NO: 9638 and SEQ ID NO: 9639.

[0099] In another embodiment, the H. pylori cell envelope polypeptide or a fragment thereof is an H. pylori outer membrane polypeptide or a fragment thereof having an amino acid sequence selected from the group consisting of SEQ ID NO: 4866; SEQ ID NO: 4867; SEQ ID NO: 4868; SEQ ID NO: 4869; SEQ ID NO: 4870; SEQ ID NO: 4871; SEQ ID NO: 4872; SEQ ID NO: 4873; SEQ ID NO: 4874; SEQ ID NO: 4875; SEQ ID NO: 4876; SEQ ID NO: 4877; SEQ ID NO: 4878; SEQ ID NO: 4879; SEQ ID NO: 4880; SEQ ID NO: 4881; SEQ ID NO: 4882; SEQ ID NO: 4883; SEQ ID NO: 4884; SEQ ID NO: 4885; SEQ ID NO: 4886; SEQ ID NO: 4887; SEQ ID NO: 4888; SEQ ID NO: 4889; SEQ ID NO: 4890; SEQ ID NO: 4891; SEQ ID NO: 4892; SEQ ID NO: 4893; SEQ ID NO: 4894; SEQ ID NO: 4895; SEQ ID NO: 4896; SEQ ID NO: 4897; SEQ ID NO: 4898; SEQ ID NO: 4899; SEQ ID NO: 4900; SEQ ID NO: 4901; SEQ ID NO: 4902; SEQ ID NO: 4903; SEQ ID NO: 4904; SEQ ID NO: 4905; SEQ ID NO: 4906; SEQ ID NO: 4907; SEQ ID NO: 4908; SEQ ID NO: 4909; SEQ ID NO: 4910; SEQ ID NO: 4911; SEQ ID NO: 4912; SEQ ID NO: 4913; SEQ ID NO: 4914; SEQ ID NO: 4915; SEQ ID NO: 4916; SEQ ID NO: 4917; SEQ ID NO: 4918; SEQ ID NO: 4919; SEQ ID NO: 4920; SEQ ID NO: 4921; SEQ ID NO: 4922; SEQ ID NO: 4923; SEQ ID NO: 4924; SEQ ID NO: 4925; SEQ ID NO: 4926; SEQ ID NO: 4927; SEQ ID NO: 4928; SEQ ID NO: 4929; SEQ ID NO: 4930; SEQ ID NO: 4931; SEQ ID NO: 4932; SEQ ID NO: 4933; SEQ ID NO: 4934; SEQ ID NO: 4935; SEQ ID NO: 4936; SEQ ID NO: 4937; SEQ ID NO: 4938; SEQ ID NO: 4939; SEQ ID NO: 4940; SEQ ID NO: 4941; SEQ ID NO: 4942; SEQ ID NO: 4943; SEQ ID NO: 4944; SEQ ID NO: 4945; SEQ ID NO: 4946; SEQ ID NO: 4947; SEQ ID NO: 4948; SEQ ID NO: 4949; SEQ ID NO: 4950; SEQ ID NO: 4951; SEQ ID NO: 4952; SEQ ID NO: 4953; SEQ ID NO: 4954; SEQ ID NO: 4955; SEQ ID NO: 4956; SEQ ID NO: 4957; SEQ ID NO: 4958; SEQ ID NO: 4959; SEQ ID NO: 4960; SEQ ID NO: 4961; SEQ ID NO: 4962; SEQ ID NO: 4963; SEQ ID NO: 4964; SEQ ID NO: 4965; SEQ ID NO: 4966; SEQ ID NO: 4967; SEQ ID NO: 4968; SEQ ID NO: 4969; SEQ ID NO: 4970; SEQ ID NO: 4971; SEQ ID NO: 4972; SEQ ID NO: 4973; SEQ ID NO: 4974; SEQ ID NO: 4975; SEQ ID NO: 4976; SEQ ID NO: 4977; SEQ ID NO: 4978; SEQ ID NO: 4979; SEQ ID NO: 4980; SEQ ID NO: 4981; SEQ ID NO: 4982; SEQ ID NO: 4983; SEQ ID NO: 4984; SEQ ID NO: 4985; SEQ ID NO: 4986; SEQ ID NO: 4987; SEQ ID NO: 4988; SEQ ID NO: 4989; SEQ ID NO: 4990; SEQ ID NO: 4991; SEQ ID NO: 4992; SEQ ID NO: 4993; SEQ ID NO: 4994; SEQ ID NO: 4995; SEQ ID NO: 4996; SEQ ID NO: 4997; SEQ ID NO: 4998; SEQ ID NO: 4999; SEQ ID NO: 5000; SEQ ID NO: 5001; SEQ ID NO: 5002; SEQ ID NO: 5003; SEQ ID NO: 5004; SEQ ID NO: 5005; SEQ ID NO: 5006; SEQ ID NO: 5007; SEQ ID NO: 5008; SEQ ID NO: 5009; SEQ ID NO: 5010; SEQ ID NO: 5011; SEQ ID NO: 5012; SEQ ID NO: 5013; SEQ ID NO: 5014; SEQ ID NO: 5015; SEQ ID NO: 5016; SEQ ID NO: 5017; SEQ ID NO: 5018; SEQ ID NO: 5019; SEQ ID NO: 5020; SEQ ID NO: 5021; SEQ ID NO: 5022; SEQ ID NO: 5023; SEQ ID NO: 5024; SEQ ID NO: 5025; SEQ ID NO: 5026; SEQ ID NO: 5027; SEQ ID NO: 5028; SEQ ID NO: 5029; SEQ ID NO: 5030; SEQ ID NO: 5031; SEQ ID NO: 5032; SEQ ID NO: 5033; SEQ ID NO: 5034; SEQ ID NO: 5035; SEQ ID NO: 5036; SEQ ID NO: 5037; SEQ ID NO: 5038; SEQ ID NO: 5039; SEQ ID NO: 5040; SEQ ID NO: 5041; SEQ ID NO: 5042; SEQ ID NO: 5043; SEQ ID NO: 5044; SEQ ID NO: 5045; SEQ ID NO: 5046; SEQ ID NO: 5047; SEQ ID NO: 5048; SEQ ID NO: 5049; SEQ ID NO: 5050; SEQ ID NO: 5051; SEQ ID NO: 5052; SEQ ID NO: 5053; SEQ ID NO: 5054; SEQ ID NO: 5055; SEQ ID NO: 5056; SEQ ID NO: 5057; SEQ ID NO: 5058; SEQ ID NO: 5059; SEQ ID NO: 5060; SEQ ID NO: 5061; SEQ ID NO: 5062; SEQ ID NO: 5063; SEQ ID NO: 5064; SEQ ID NO: 5065; SEQ ID NO: 5066; SEQ ID NO: 5067; SEQ ID NO: 5068; SEQ ID NO: 5069; SEQ ID NO: 5070; SEQ ID NO: 5071; SEQ ID NO: 5072; SEQ ID NO: 5073; SEQ ID NO: 5074; SEQ ID NO: 5075; SEQ ID NO: 5076; SEQ ID NO: 5077; SEQ ID NO: 5078; SEQ ID NO: 5079; SEQ ID NO: 5080; SEQ ID NO: 5081; SEQ ID NO: 5082; SEQ ID NO: 5083; SEQ ID NO: 5084; SEQ ID NO: 5085; SEQ ID NO: 5086; SEQ ID NO: 5087; SEQ ID NO: 5088; SEQ ID NO: 5089; SEQ ID NO: 5090; SEQ ID NO: 5091; SEQ ID NO: 5092; SEQ ID NO: 5093; SEQ ID NO: 5094; SEQ ID NO: 5095; SEQ ID NO: 5096; SEQ ID NO: 5097; SEQ ID NO: 5098; SEQ ID NO: 5099; SEQ ID NO: 5100; SEQ ID NO: 5101; SEQ ID NO: 5102; SEQ ID NO: 5103; SEQ ID NO: 5104; SEQ ID NO: 5105; SEQ ID NO: 5106; SEQ ID NO: 5107; SEQ ID NO: 5108; SEQ ID NO: 5109; SEQ ID NO: 5110; SEQ ID NO: 5111; SEQ ID NO: 5112; SEQ ID NO: 5113; SEQ ID NO: 5114; SEQ ID NO: 5115; SEQ ID NO: 5116; SEQ ID NO: 5117; SEQ ID NO: 5118; SEQ ID NO: 5119; SEQ ID NO: 5120; SEQ ID NO: 5121; SEQ ID NO: 5122; SEQ ID NO: 5123; SEQ ID NO: 5124; SEQ ID NO: 5125; SEQ ID NO: 5126; SEQ ID NO: 5127; SEQ ID NO: 5128; SEQ ID NO: 5129; SEQ ID NO: 5130; SEQ ID NO: 5131; SEQ ID NO: 5132; SEQ ID NO: 5133; SEQ ID NO: 5134; SEQ ID NO: 5135; SEQ ID NO: 5136; SEQ ID NO: 5137; SEQ ID NO: 5138; SEQ ID NO: 5139; SEQ ID NO: 5140; SEQ ID NO: 5141; SEQ ID NO: 5142; SEQ ID NO: 5143; SEQ ID NO: 5144; SEQ ID NO: 5145; SEQ ID NO: 5146; SEQ ID NO: 5147; SEQ ID NO: 5148; SEQ ID NO: 5149; SEQ ID NO: 5150; SEQ ID NO: 5151; SEQ ID NO: 5152; SEQ ID NO: 5153; SEQ ID NO: 5154; SEQ ID NO: 5155; SEQ ID NO: 5156; SEQ ID NO: 5157; SEQ ID NO: 5158; SEQ ID NO: 5159; SEQ ID NO: 5160; SEQ ID NO: 5161; SEQ ID NO: 5162; SEQ ID NO: 5163; SEQ ID NO: 5164; SEQ ID NO: 5165; SEQ ID NO: 5166; SEQ ID NO: 5167; SEQ ID NO: 5168; SEQ ID NO: 5169; SEQ ID NO: 5170; SEQ ID NO: 5171; SEQ ID NO: 5172; SEQ ID NO: 5173; SEQ ID NO: 5174; SEQ ID NO: 5175; SEQ ID NO: 5176; SEQ ID NO: 5177; SEQ ID NO: 5178; SEQ ID NO: 5179; SEQ ID NO: 5180; SEQ ID NO: 5181; SEQ ID NO: 5182; SEQ ID NO: 5183; SEQ ID NO: 5184; SEQ ID NO: 5185; SEQ ID NO: 5186; SEQ ID NO: 5187; SEQ ID NO: 5188; SEQ ID NO: 5189; SEQ ID NO: 5190; SEQ ID NO: 5191; SEQ ID NO: 5192; SEQ ID NO: 5193; SEQ ID NO: 5194; SEQ ID NO: 5195; SEQ ID NO: 5196; SEQ ID NO: 5197; SEQ ID NO: 5198; SEQ ID NO: 5199; SEQ ID NO: 5200; SEQ ID NO: 5201; SEQ ID NO: 5202; SEQ ID NO: 5203; SEQ ID NO: 5204; SEQ ID NO: 5205; SEQ ID NO: 5206; SEQ ID NO: 5207; SEQ ID NO: 5208; SEQ ID NO: 5209; SEQ ID NO: 5210; SEQ ID NO: 5211; SEQ ID NO: 5212; SEQ ID NO: 5213; SEQ ID NO: 5214; SEQ ID NO: 5215; SEQ ID NO: 5216; SEQ ID NO: 5217; SEQ ID NO: 5218; SEQ ID NO: 5219; SEQ ID NO: 5220; SEQ ID NO: 5221; SEQ ID NO: 5222; SEQ ID NO: 5223; SEQ ID NO: 5224; SEQ ID NO: 5225; SEQ ID NO: 5226; SEQ ID NO: 5227; SEQ ID NO: 5228; SEQ ID NO: 5229; SEQ ID NO: 5230; SEQ ID NO: 5231; SEQ ID NO: 5232; SEQ ID NO: 5233; SEQ ID NO: 5234; SEQ ID NO: 5235; SEQ ID NO: 5236; SEQ ID NO: 5237; SEQ ID NO: 5238; SEQ ID NO: 5239; SEQ ID NO: 5240; SEQ ID NO: 5241; SEQ ID NO: 5242; SEQ ID NO: 5243; SEQ ID NO: 5244; SEQ ID NO: 5245; SEQ ID NO: 5246; SEQ ID NO: 5247; SEQ ID NO: 5248; SEQ ID NO: 5249; SEQ ID NO: 5250; SEQ ID NO: 5251; SEQ ID NO: 5252; SEQ ID NO: 5253; SEQ ID NO: 5254; SEQ ID NO: 5255; SEQ ID NO: 5256; SEQ ID NO: 5257; SEQ ID NO: 5258; SEQ ID NO: 5259; SEQ ID NO: 5260; SEQ ID NO: 5261; SEQ ID NO: 5262; SEQ ID NO: 5263; SEQ ID NO: 5264; SEQ ID NO: 5265; SEQ ID NO: 5266; SEQ ID NO: 5267; SEQ ID NO: 5268; SEQ ID NO: 5269; SEQ ID NO: 5270; SEQ ID NO: 5271 and SEQ ID NO: 5272.

[0100] In another embodiment, the H. pylori outer membrane polypeptide or a fragment thereof is an H. pylori polypeptide having a terminal phenylalanine residue or a fragment thereof having an amino acid sequence selected from the group consisting of SEQ ID NO: 4866; SEQ ID NO: 4867; SEQ ID NO: 4868; SEQ ID NO: 4869; SEQ ID NO: 4870; SEQ ID NO: 4871; SEQ ID NO: 4872; SEQ ID NO: 4873; SEQ ID NO: 4874; SEQ ID NO: 4875; SEQ ID NO: 4876; SEQ ID NO: 4877; SEQ ID NO: 4878; SEQ ID NO: 4879; SEQ ID NO: 4880; SEQ ID NO: 4881; SEQ ID NO: 4882; SEQ ID NO: 4883; SEQ ID NO: 4884; SEQ ID NO: 4885; SEQ ID NO: 4886; SEQ ID NO: 4887; SEQ ID NO: 4888; SEQ ID NO: 4889; SEQ ID NO: 4890; SEQ ID NO: 4891; SEQ ID NO: 4892; SEQ ID NO: 4893; SEQ ID NO: 4894; SEQ ID NO: 4895; SEQ ID NO: 4896; SEQ ID NO: 4897; SEQ ID NO: 4898; SEQ ID NO: 4899; SEQ ID NO: 4900; SEQ ID NO: 4901; SEQ ID NO: 4902; SEQ ID NO: 4903; SEQ ID NO: 4904; SEQ ID NO: 4905; SEQ ID NO: 4906; SEQ ID NO: 4907; SEQ ID NO: 4908; SEQ ID NO: 4909; SEQ ID NO: 4910; SEQ ID NO: 4911; SEQ ID NO: 4912; SEQ ID NO: 4913; SEQ ID NO: 4914; SEQ ID NO: 4915; SEQ ID NO: 4916; SEQ ID NO: 4917; SEQ ID NO: 4918; SEQ ID NO: 4919; SEQ ID NO: 4920; SEQ ID NO: 4921; SEQ ID NO: 4922; SEQ ID NO: 4923; SEQ ID NO: 4924; SEQ ID NO: 4925; SEQ ID NO: 4926; SEQ ID NO: 4927; SEQ ID NO: 4928; SEQ ID NO: 4929; SEQ ID NO: 4930; SEQ ID NO: 4931; SEQ ID NO: 4932; SEQ ID NO: 4933; SEQ ID NO: 4934; SEQ ID NO: 4935; SEQ ID NO: 4936; SEQ ID NO: 4937; SEQ ID NO: 4938; SEQ ID NO: 4939; SEQ ID NO: 4940; SEQ ID NO: 4941; SEQ ID NO: 4942; SEQ ID NO: 4943; SEQ ID NO: 4944; SEQ ID NO: 4945; SEQ ID NO: 4946; SEQ ID NO: 4947; SEQ ID NO: 4948; SEQ ID NO: 4949; SEQ ID NO: 4950; SEQ ID NO: 4951; SEQ ID NO: 4952; SEQ ID NO: 4953; SEQ ID NO: 4954; SEQ ID NO: 4955; SEQ ID NO: 4956; SEQ ID NO: 4957; SEQ ID NO: 4958; SEQ ID NO: 4959; SEQ ID NO: 4960; SEQ ID NO: 4961; SEQ ID NO: 4962; SEQ ID NO: 4963; SEQ ID NO: 4964; SEQ ID NO: 4965; SEQ ID NO: 4966; SEQ ID NO: 4967; SEQ ID NO: 4968; SEQ ID NO: 4969; SEQ ID NO: 4970; SEQ ID NO: 4971; SEQ ID NO: 4972; SEQ ID NO: 4973; SEQ ID NO: 4974; SEQ ID NO: 4975; SEQ ID NO: 4976; SEQ ID NO: 4977; SEQ ID NO: 4978; SEQ ID NO: 4979; SEQ ID NO: 4980; SEQ ID NO: 4981; SEQ ID NO: 4982; SEQ ID NO: 4983; SEQ ID NO: 4984; SEQ ID NO: 4985; SEQ ID NO: 4986; SEQ ID NO: 4987; SEQ ID NO: 4988; SEQ ID NO: 4989; SEQ ID NO: 4990; SEQ ID NO: 4991; SEQ ID NO: 4992; SEQ ID NO: 4993; SEQ ID NO: 4994; SEQ ID NO: 4995; SEQ ID NO: 4996; SEQ ID NO: 4997; SEQ ID NO: 4998; SEQ ID NO: 4999; SEQ ID NO: 5000; SEQ ID NO: 5001; SEQ ID NO: 5002; SEQ ID NO: 5003; SEQ ID NO: 5004; SEQ ID NO: 5005; SEQ ID NO: 5006; SEQ ID NO: 5007; SEQ ID NO: 5008; SEQ ID NO: 5009; SEQ ID NO: 5010; SEQ ID NO: 5011; SEQ ID NO: 5012; SEQ ID NO: 5013; SEQ ID NO: 5014; SEQ ID NO: 5015; SEQ ID NO: 5016; SEQ ID NO: 5017; SEQ ID NO: 5018; SEQ ID NO: 5019; SEQ ID NO: 5020; SEQ ID NO: 5021; SEQ ID NO: 5022; SEQ ID NO: 5023; SEQ ID NO: 5024; SEQ ID NO: 5025; SEQ ID NO: 5026; SEQ ID NO: 5027; SEQ ID NO: 5028; SEQ ID NO: 5029; SEQ ID NO: 5030; SEQ ID NO: 5031; SEQ ID NO: 5032; SEQ ID NO: 5033; SEQ ID NO: 5034; SEQ ID NO: 5035; SEQ ID NO: 5036; SEQ ID NO: 5037; SEQ ID NO: 5038; SEQ ID NO: 5039; SEQ ID NO: 5040; SEQ ID NO: 5041; SEQ ID NO: 5042; SEQ ID NO: 5043; SEQ ID NO: 5044; SEQ ID NO: 5045; SEQ ID NO: 5046; SEQ ID NO: 5047; SEQ ID NO: 5048; SEQ ID NO: 5049; SEQ ID NO: 5050; SEQ ID NO: 5051; SEQ ID NO: 5052; SEQ ID NO: 5053; SEQ ID NO: 5054; SEQ ID NO: 5055; SEQ ID NO: 5056; SEQ ID NO: 5057; SEQ ID NO: 5058; SEQ ID NO: 5059; SEQ ID NO: 5060; SEQ ID NO: 5061; SEQ ID NO: 5062; SEQ ID NO: 5063; SEQ ID NO: 5064; SEQ ID NO: 5065; SEQ ID NO: 5066; SEQ ID NO: 5067; SEQ ID NO: 5068; SEQ ID NO: 5069; SEQ ID NO: 5070; SEQ ID NO: 5071; SEQ ID NO: 5072; SEQ ID NO: 5073; SEQ ID NO: 5074; SEQ ID NO: 5075; SEQ ID NO: 5076; SEQ ID NO: 5077; SEQ ID NO: 5078; SEQ ID NO: 5079; SEQ ID NO: 5080; SEQ ID NO: 5081; SEQ ID NO: 5082; SEQ ID NO: 5083; SEQ ID NO: 5084; SEQ ID NO: 5085; SEQ ID NO: 5086; SEQ ID NO: 5087; SEQ ID NO: 5088; SEQ ID NO: 5089; SEQ ID NO: 5090; SEQ ID NO: 5091; SEQ ID NO: 5092; SEQ ID NO: 5093; SEQ ID NO: 5094; SEQ ID NO: 5095; SEQ ID NO: 5104; SEQ ID NO: 5105; SEQ ID NO: 5106; SEQ ID NO: 5107; SEQ ID NO: 5108; SEQ ID NO: 5109; SEQ ID NO: 5110; SEQ ID NO: 5111; SEQ ID NO: 5112; SEQ ID NO: 5113; SEQ ID NO: 5114; SEQ ID NO: 5115; SEQ ID NO: 5116; SEQ ID NO: 5117; SEQ ID NO: 5118; SEQ ID NO: 5119; SEQ ID NO: 5120; SEQ ID NO: 5121; SEQ ID NO: 5122; SEQ ID NO: 5123; SEQ ID NO: 5124; SEQ ID NO: 5131; SEQ ID NO: 5132; SEQ ID NO: 5133; SEQ ID NO: 5134; SEQ ID NO: 5135; SEQ ID NO: 5136; SEQ ID NO: 5137; SEQ ID NO: 5138; SEQ ID NO: 5139 SEQ ID NO: 5140; SEQ ID NO: 5141; SEQ ID NO: 5142; SEQ ID NO: 5143; SEQ ID NO: 5144; SEQ ID NO: 5145; SEQ ID NO: 5146; SEQ ID NO: 5147; SEQ ID NO: 5148; SEQ ID NO: 5149; SEQ ID NO: 5150; SEQ ID NO: 5151; SEQ ID NO: 5152; SEQ ID NO: 5153; SEQ ID NO: 5154; SEQ ID NO: 5155; SEQ ID NO: 5156; SEQ ID NO: 5157; SEQ ID NO: 5158; SEQ ID NO: 5159; SEQ ID NO: 9640; SEQ ID NO: 9641; SEQ ID NO: 9642; SEQ ID NO: 9643; SEQ ID NO: 9644; SEQ ID NO: 9645; SEQ ID NO: 9646; SEQ ID NO: 9647 and SEQ ID NO: 9648.

[0101] In another embodiment, the H. pylori outer membrane polypeptide or a fragment thereof is an H. pylori polypeptide having a terminal phenylalanine residue and a C-terminal tyrosine cluster or a fragment thereof having an amino acid sequence selected from the group consisting of SEQ ID NO: 5088; SEQ ID NO: 5089; SEQ ID NO: 5090; SEQ ID NO: 5091; SEQ ID NO: 5092; SEQ ID NO: 5093; SEQ ID NO: 5094; SEQ ID NO: 5095; SEQ ID NO: 5104; SEQ ID NO: 5105; SEQ ID NO: 5106; SEQ ID NO: 5107; SEQ ID NO: 5108; SEQ ID NO: 5109; SEQ ID NO: 5110; SEQ ID NO: 5111; SEQ ID NO: 5112; SEQ ID NO: 5113; SEQ ID NO: 5114; SEQ ID NO: 5115; SEQ ID NO: 5116; SEQ ID NO: 5117; SEQ ID NO: 5118; SEQ ID NO: 5119; SEQ ID NO: 5120; SEQ ID NO: 5121; SEQ ID NO: 5122; SEQ ID NO: 5123; SEQ ID NO: 5124; SEQ ID NO: 5131; SEQ ID NO: 5132; SEQ ID NO: 5133; SEQ ID NO: 5134; SEQ ID NO: 5135; SEQ ID NO: 5136; SEQ ID NO: 5137; SEQ ID NO: 5138; SEQ ID NO: 5139; SEQ ID NO: 5140; SEQ ID NO: 5141; SEQ ID NO: 5142; SEQ ID NO: 5143; SEQ ID NO: 5144; SEQ ID NO: 5145; SEQ ID NO: 5146; SEQ ID NO: 5147; SEQ ID NO: 5148; SEQ ID NO: 5149; SEQ ID NO: 5150; SEQ ID NO: 5151; SEQ ID NO: 5152; SEQ ID NO: 5153; SEQ ID NO: 5154; SEQ ID NO: 5155; SEQ ID NO: 5156; SEQ ID NO: 5157; SEQ ID NO: 5158; SEQ ID NO: 5159 and SEQ ID NO: 9648.

[0102] In another embodiment, the H. pylori outer membrane polypeptide or a fragment thereof is an H. pylori polypeptide having a terminal tyrosine cluster motif or a fragment thereof having an amino acid sequence selected from the group consisting of SEQ ID NO: 5088; SEQ ID NO: 5089; SEQ ID NO: 5090; SEQ ID NO: 5091; SEQ ID NO: 5092; SEQ ID NO: 5093; SEQ ID NO: 5094; SEQ ID NO: 5095; SEQ ID NO: 5096; SEQ ID NO: 5097; SEQ ID NO: 5098; SEQ ID NO: 5099; SEQ ID NO: 5100; SEQ ID NO: 5101; SEQ ID NO: 5102; SEQ ID NO: 5103; SEQ ID NO: 5104; SEQ ID NO: 5105; SEQ ID NO: 5106; SEQ ID NO: 5107; SEQ ID NO: 5108; SEQ ID NO: 5109; SEQ ID NO: 5110; SEQ ID NO: 5111; SEQ ID NO: 5112; SEQ ID NO: 5113; SEQ ID NO: 5114; SEQ ID NO: 5115; SEQ ID NO: 5116; SEQ ID NO: 5117; SEQ ID NO: 5118; SEQ ID NO: 5119; SEQ ID NO: 5120; SEQ ID NO: 5121; SEQ ID NO: 5122; SEQ ID NO: 5123; SEQ ID NO: 5124; SEQ ID NO: 5125; SEQ ID NO: 5126; SEQ ID NO: 5127; SEQ ID NO: 5128; SEQ ID NO: 5129; SEQ ID NO: 5130; SEQ ID NO: 5131; SEQ ID NO: 5132; SEQ ID NO: 5133; SEQ ID NO: 5134; SEQ ID NO: 5135; SEQ ID NO: 5136; SEQ ID NO: 5137; SEQ ID NO: 5138; SEQ ID NO: 5139; SEQ ID NO: 5140; SEQ ID NO: 5141; SEQ ID NO: 5142; SEQ ID NO: 5143; SEQ ID NO: 5144; SEQ ID NO: 5145; SEQ ID NO: 5146; SEQ ID NO: 5147; SEQ ID NO: 5148; SEQ ID NO: 5149; SEQ ID NO: 5150; SEQ ID NO: 5151; SEQ ID NO: 5152; SEQ ID NO: 5153; SEQ ID NO: 5154; SEQ ID NO: 5155; SEQ ID NO: 5156; SEQ ID NO: 5157; SEQ ID NO: 5158; SEQ ID NO: 5159; SEQ ID NO: 5160; SEQ ID NO: 5161; SEQ ID NO: 5162; SEQ ID NO: 5163; SEQ ID NO: 5164; SEQ ID NO: 5165; SEQ ID NO: 5166; SEQ ID NO: 5167; SEQ ID NO: 5168; SEQ ID NO: 5169; SEQ ID NO: 5170; SEQ ID NO: 5171; SEQ ID NO: 5172; SEQ ID NO: 5173; SEQ ID NO: 5174; SEQ ID NO: 5175; SEQ ID NO: 5176; SEQ ID NO: 5177; SEQ ID NO: 5178; SEQ ID NO: 5186; SEQ ID NO: 5187; and SEQ ID NO: 9648.

[0103] In another embodiment, the H. pylori cell envelope polypeptide or a fragment thereof is an H. pylori inner membrane polypeptide or a fragment thereof having an amino acid sequence selected from the group consisting of SEQ ID NO: 5273; SEQ ID NO: 5274; SEQ ID NO: 5275; SEQ ID NO: 5276; SEQ ID NO: 5277; SEQ ID NO: 5278; SEQ ID NO: 5279; SEQ ID NO: 5280; SEQ ID NO: 5281; SEQ ID NO: 5282; SEQ ID NO: 5283; SEQ ID NO: 5284; SEQ ID NO: 5285; SEQ ID NO: 5286; SEQ ID NO: 5287; SEQ ID NO: 5288; SEQ ID NO: 5289; SEQ ID NO: 5290; SEQ ID NO: 5291; SEQ ID NO: 5292; SEQ ID NO: 5293; SEQ ID NO: 5294; SEQ ID NO: 5295; SEQ ID NO: 5296; SEQ ID NO: 5297; SEQ ID NO: 5298; SEQ ID NO: 5299; SEQ ID NO: 5300; SEQ ID NO: 5301; SEQ ID NO: 5302; SEQ ID NO: 5303; SEQ ID NO: 5304; SEQ ID NO: 5305; SEQ ID NO: 5306; SEQ ID NO: 5307; SEQ ID NO: 5308; SEQ ID NO: 5309; SEQ ID NO: 5310; SEQ ID NO: 5311; SEQ ID NO: 5312; SEQ ID NO: 5313; SEQ ID NO: 5314; SEQ ID NO: 5315; SEQ ID NO: 5316; SEQ ID NO: 5317; SEQ ID NO: 5318; SEQ ID NO: 5319; SEQ ID NO: 5320; SEQ ID NO: 5321; SEQ ID NO: 5322; SEQ ID NO: 5323; SEQ ID NO: 5324; SEQ ID NO: 5325; SEQ ID NO: 5326; SEQ ID NO: 5327; SEQ ID NO: 5328; SEQ ID NO: 5329; SEQ ID NO: 5330; SEQ ID NO: 5331; SEQ ID NO: 5332; SEQ ID NO: 5333; SEQ ID NO: 5334; SEQ ID NO: 5335; SEQ ID NO: 5336; SEQ ID NO: 5337; SEQ ID NO: 5338; SEQ ID NO: 5339; SEQ ID NO: 5340; SEQ ID NO: 5341; SEQ ID NO: 5342; SEQ ID NO: 5343; SEQ ID NO: 5344; SEQ ID NO: 5345; SEQ ID NO: 5346; SEQ ID NO: 5347; SEQ ID NO: 5348; SEQ ID NO: 5349; SEQ ID NO: 5350; SEQ ID NO: 5351; SEQ ID NO: 5352; SEQ ID NO: 5353; SEQ ID NO: 5354; SEQ ID NO: 5355; SEQ ID NO: 5356; SEQ ID NO: 5357; SEQ ID NO: 5358; SEQ ID NO: 5359; SEQ ID NO: 5360; SEQ ID NO: 5361; SEQ ID NO: 5362; SEQ ID NO: 5363; SEQ ID NO: 5364; SEQ ID NO: 5365; SEQ ID NO: 5366; SEQ ID NO: 5367; SEQ ID NO: 5368; SEQ ID NO: 5369; SEQ ID NO: 5370; SEQ ID NO: 5371; SEQ ID NO: 5372; SEQ ID NO: 5373; SEQ ID NO: 5374; SEQ ID NO: 5375; SEQ ID NO: 5376; SEQ ID NO: 5377; SEQ ID NO: 5378; SEQ ID NO: 5379; SEQ ID NO: 5380; SEQ ID NO: 5381; SEQ ID NO: 5382; SEQ ID NO: 5383; SEQ ID NO: 5384; SEQ ID NO: 5385; SEQ ID NO: 5386; SEQ ID NO: 5387; SEQ ID NO: 5388; SEQ ID NO: 5389; SEQ ID NO: 5390; SEQ ID NO: 5391; SEQ ID NO: 5392; SEQ ID NO: 5393; SEQ ID NO: 5394; SEQ ID NO: 5395; SEQ ID NO: 5396; SEQ ID NO: 5397; SEQ ID NO: 5398; SEQ ID NO: 5399; SEQ ID NO: 5400; SEQ ID NO: 5401; SEQ ID NO: 5402; SEQ ID NO: 5403; SEQ ID NO: 5404; SEQ ID NO: 5405; SEQ ID NO: 5406; SEQ ID NO: 5407; SEQ ID NO: 5408; SEQ ID NO: 5409; SEQ ID NO: 5410; SEQ ID NO: 5411; SEQ ID NO: 5412; SEQ ID NO: 5413; SEQ ID NO: 5414; SEQ ID NO: 5415; SEQ ID NO: 5416; SEQ ID NO: 5417; SEQ ID NO: 5418; SEQ ID NO: 5419; SEQ ID NO: 5420; SEQ ID NO: 5421; SEQ ID NO: 5422; SEQ ID NO: 5423; SEQ ID NO: 5424; SEQ ID NO: 5425; SEQ ID NO: 5426; SEQ ID NO: 5427; SEQ ID NO: 5428; SEQ ID NO: 5429; SEQ ID NO: 5430; SEQ ID NO: 5431; SEQ ID NO: 5432; SEQ ID NO: 5433; SEQ ID NO: 5434; SEQ ID NO: 5435; SEQ ID NO: 5436; SEQ ID NO: 5437; SEQ ID NO: 5438; SEQ ID NO: 5439; SEQ ID NO: 5440; SEQ ID NO: 5441; SEQ ID NO: 5442; SEQ ID NO: 5443; SEQ ID NO: 5444; SEQ ID NO: 5445; SEQ ID NO: 5446; SEQ ID NO: 5447; SEQ ID NO: 5448; SEQ ID NO: 5449; SEQ ID NO: 5450; SEQ ID NO: 5451; SEQ ID NO: 5452; SEQ ID NO: 5453; SEQ ID NO: 5454; SEQ ID NO: 5455; SEQ ID NO: 5456; SEQ ID NO: 5457; SEQ ID NO: 5458; SEQ ID NO: 5459; SEQ ID NO: 5460; SEQ ID NO: 5461; SEQ ID NO: 5462; SEQ ID NO: 5463; SEQ ID NO: 5464; SEQ ID NO: 5465; SEQ ID NO: 5466; SEQ ID NO:5467; SEQ ID NO: 5468; SEQ ID NO: 5469; SEQ ID NO: 5470; SEQ ID NO: 5471; SEQ ID NO: 5472; SEQ ID NO: 5473; SEQ ID NO: 5474; SEQ ID NO: 5475; SEQ ID NO: 5476; SEQ ID NO: 5477; SEQ ID NO: 5478; SEQ ID NO: 5479; SEQ ID NO: 5480; SEQ ID NO: 5481; SEQ ID NO: 5482; SEQ ID NO: 5483; SEQ ID NO: 5484; SEQ ID NO: 5485; SEQ ID NO: 5486; SEQ ID NO: 5487; SEQ ID NO: 5488; SEQ ID NO: 5489; SEQ ID NO: 5490; SEQ ID NO: 5491; SEQ ID NO: 5492; SEQ ID NO: 5493; SEQ ID NO: 5494; SEQ ID NO: 5495; SEQ ID NO: 5496; SEQ ID NO: 5497; SEQ ID NO: 5498; SEQ ID NO: 5499; SEQ ID NO: 5500; SEQ ID NO: 5501; SEQ ID NO: 5502; SEQ ID NO: 5503; SEQ ID NO: 5504; SEQ ID NO: 5505; SEQ ID NO: 5506; SEQ ID NO: 5507; SEQ ID NO: 5508; SEQ ID NO: 5509; SEQ ID NO: 5510; SEQ ID NO: 5511; SEQ ID NO: 5512; SEQ ID NO: 5513; SEQ ID NO: 5514; SEQ ID NO: 5515; SEQ ID NO: 5516; SEQ ID NO: 5517; SEQ ID NO: 5518; SEQ ID NO: 5519; SEQ ID NO: 5520; SEQ ID NO: 5521; SEQ ID NO: 5522; SEQ ID NO: 5523; SEQ ID NO: 5524; SEQ ID NO: 5525; SEQ ID NO: 5526; SEQ ID NO: 5527; SEQ ID NO: 5528; SEQ ID NO: 5529; SEQ ID NO: 5530; SEQ ID NO: 5531; SEQ ID NO: 5532; SEQ ID NO: 5533; SEQ ID NO: 5534; SEQ ID NO: 5535; SEQ ID NO: 5536; SEQ ID NO: 5537; SEQ ID NO: 5538; SEQ ID NO: 5539; SEQ ID NO: 5540; SEQ ID NO: 5541; SEQ ID NO: 5542; SEQ ID NO: 5543; SEQ ID NO: 5544; SEQ ID NO: 5545; SEQ ID NO: 5546; SEQ ID NO: 5547; SEQ ID NO: 5548; SEQ ID NO: 5549; SEQ ID NO: 5550; SEQ ID NO: 5551; SEQ ID NO: 5552; SEQ ID NO: 5553; SEQ ID NO: 5554; SEQ ID NO: 5555; SEQ ID NO: 5556; SEQ ID NO: 5557; SEQ ID NO: 5558; SEQ ID NO: 5559; SEQ ID NO: 5560; SEQ ID NO: 5561; SEQ ID NO: 5562; SEQ ID NO: 5563; SEQ ID NO: 5564; SEQ ID NO: 5565; SEQ ID NO: 5566; SEQ ID NO: 5567; SEQ ID NO: 5568; SEQ ID NO: 5569; SEQ ID NO: 5570; SEQ ID NO: 5571; SEQ ID NO: 5572; SEQ ID NO: 5573; SEQ ID NO: 5574; SEQ ID NO: 5575; SEQ ID NO: 5576; SEQ ID NO: 5577; SEQ ID NO: 5578; SEQ ID NO: 5579; SEQ ID NO: 5580; SEQ ID NO: 5581; SEQ ID NO: 5582; SEQ ID NO: 5583; SEQ ID NO: 5584; SEQ ID NO: 5585; SEQ ID NO: 5586; SEQ ID NO: 5587; SEQ ID NO: 5588; SEQ ID NO: 5589; SEQ ID NO: 5590; SEQ ID NO: 5591; SEQ ID NO: 5592; SEQ ID NO: 5593; SEQ ID NO: 5594; SEQ ID NO: 5595; SEQ ID NO: 5596; SEQ ID NO: 5597; SEQ ID NO: 5598; SEQ ID NO: 5599; SEQ ID NO: 5600; SEQ ID NO: 5601; SEQ ID NO: 5602; SEQ ID NO: 5603; SEQ ID NO: 5604; SEQ ID NO: 5605; SEQ ID NO: 5606; SEQ ID NO: 5607; SEQ ID NO: 5608; SEQ ID NO: 5609; SEQ ID NO: 5610; SEQ ID NO: 5611; SEQ ID NO: 5612; SEQ ID NO: 5613; SEQ ID NO: 5614; SEQ ID NO: 5615; SEQ ID NO: 5616; SEQ ID NO: 5617; SEQ ID NO: 5618; SEQ ID NO: 5619; SEQ ID NO: 5620; SEQ ID NO: 5621; SEQ ID NO: 5622; SEQ ID NO: 5623; SEQ ID NO: 5624; SEQ ID NO: 5625; SEQ ID NO: 5626; SEQ ID NO: 5627; SEQ ID NO: 5628; SEQ ID NO: 5629; SEQ ID NO: 5630; SEQ ID NO: 5631; SEQ ID NO: 5632; SEQ ID NO: 5633; SEQ ID NO: 5634; SEQ ID NO: 5635; SEQ ID NO: 5636; SEQ ID NO: 5637; SEQ ID NO: 5638; SEQ ID NO: 5639; SEQ ID NO: 5640; SEQ ID NO: 5641; SEQ ID NO: 5642; SEQ ID NO: 5643; SEQ ID NO: 5644; SEQ ID NO: 5645; SEQ ID NO: 5646; SEQ ID NO: 5647; SEQ ID NO: 5648; SEQ ID NO: 5649; SEQ ID NO: 5650; SEQ ID NO: 5651; SEQ ID NO: 5652; SEQ ID NO: 5653; SEQ ID NO: 5654; SEQ ID NO: 5655; SEQ ID NO: 5656; SEQ ID NO: 5657; SEQ ID NO: 5658; SEQ ID NO: 5659; SEQ ID NO: 5660; SEQ ID NO: 5661; SEQ ID NO: 5662; SEQ ID NO: 5663; SEQ ID NO: 5664; SEQ ID NO: 5665; SEQ ID NO: 5666; SEQ ID NO: 5667; SEQ ID NO: 5668; SEQ ID NO: 5669; SEQ ID NO: 5670; SEQ ID NO: 5671; SEQ ID NO: 5672; SEQ ID NO: 5673; SEQ ID NO: 5674; SEQ ID NO: 5675; SEQ ID NO: 5676; SEQ ID NO: 5677; SEQ ID NO: 5678; SEQ ID NO: 5679; SEQ ID NO: 5680; SEQ ID NO: 5681; SEQ ID NO: 5682; SEQ ID NO: 5683; SEQ ID NO: 5684; SEQ ID NO: 5685; SEQ ID NO: 5686; SEQ ID NO: 5687; SEQ ID NO: 5688; SEQ ID NO: 5689; SEQ ID NO: 5690; SEQ ID NO: 5691; SEQ ID NO: 5692; SEQ ID NO: 5693; SEQ ID NO: 5694; SEQ ID NO: 5695; SEQ ID NO: 5.696; SEQ ID NO: 5697; SEQ ID NO: 5698; SEQ ID NO: 5699; SEQ ID NO: 5700; SEQ ID NO: 5701; SEQ ID NO: 5702; SEQ ID NO: 5703; SEQ ID NO: 5704; SEQ ID NO: 5705; SEQ ID NO: 5706; SEQ ID NO: 5707; SEQ ID NO: 5708; SEQ ID NO: 5709; SEQ ID NO: 5710; SEQ ID NO: 5711; SEQ ID NO: 5712; SEQ ID NO: 5713; SEQ ID NO: 5714; SEQ ID NO: 5715; SEQ ID NO: 5716; SEQ ID NO: 5717; SEQ ID NO: 5718; SEQ ID NO: 5719; SEQ ID NO: 5720; SEQ ID NO: 57-21; SEQ ID NO: 5722; SEQ ID NO: 5723; SEQ ID NO: 5724; SEQ ID NO: 5725; SEQ ID NO: 5726; SEQ ID NO: 5727; SEQ ID NO: 5728; SEQ ID NO: 5729; SEQ ID NO: 5730; SEQ ID NO: 5731; SEQ ID NO: 5732; SEQ ID NO: 5733; SEQ ID NO: 5734; SEQ ID NO: 5735; SEQ ID NO: 5736; SEQ ID NO: 5737; SEQ ID NO: 5738; SEQ ID NO: 5739; SEQ ID NO: 5740; SEQ ID NO: 5741; SEQ ID NO: 5742; SEQ ID NO: 5743; SEQ ID NO: 5744; SEQ ID NO: 5745; SEQ ID NO: 5746; SEQ ID NO: 5747; SEQ ID NO: 5748; SEQ ID NO: 5749; SEQ ID NO: 5750; SEQ ID NO: 5751; SEQ ID NO: 5752; SEQ ID NO: 5753; SEQ ID NO: 5754; SEQ ID NO: 5755; SEQ ID NO: 5756; SEQ ID NO: 5757; SEQ ID NO: 5758; SEQ ID NO: 5759; SEQ ID NO: 5760; SEQ ID NO: 5761; SEQ ID NO: 5762; SEQ ID NO: 5763; SEQ ID NO: 5764; SEQ ID NO: 5765; SEQ ID NO: 5766; SEQ ID NO: 5767; SEQ ID NO: 5768; SEQ ID NO: 5769; SEQ ID NO: 5770; SEQ ID NO: 5771; SEQ ID NO: 5772; SEQ ID NO: 5773; SEQ ID NO: 5774; SEQ ID NO: 5775; SEQ ID NO: 5776; SEQ ID NO: 5777; SEQ ID NO: 5778; SEQ ID NO: 5779; SEQ ID NO: 5780; SEQ ID NO: 5781; SEQ ID NO: 5782; SEQ ID NO: 5783; SEQ ID NO: 5784; SEQ ID NO: 5785; SEQ ID NO: 5786; SEQ ID NO: 5787; SEQ ID NO: 5788; SEQ ID NO: 5789; SEQ ID NO: 5790; SEQ ID NO: 5791; SEQ ID NO: 5792; SEQ ID NO: 5793; SEQ ID NO: 5794; SEQ ID NO: 5795; SEQ ID NO: 5796; SEQ ID NO: 5797; SEQ ID NO: 5798; SEQ ID NO: 5799; SEQ ID NO: 5800; SEQ ID NO: 5801; SEQ ID NO: 5802; SEQ ID NO: 5803; SEQ ID NO: 5804; SEQ ID NO: 5805; SEQ ID NO: 5806; SEQ ID NO: 5807; SEQ ID NO: 5808; SEQ ID NO: 5809; SEQ ID NO: 5810; SEQ ID NO: 5811; SEQ ID NO: 5812; SEQ ID NO: 5813; SEQ ID NO: 5814; SEQ ID NO: 5815; SEQ ID NO: 5816; SEQ ID NO: 5817; SEQ ID NO: 5818; SEQ ID NO: 5819; SEQ ID NO: 5820; SEQ ID NO: 5821; SEQ ID NO: 5822; SEQ ID NO: 5823; SEQ ID NO: 5824; SEQ ID NO: 5825; SEQ ID NO: 5826; SEQ ID NO: 5827; SEQ ID NO: 5828; SEQ ID NO: 5829; SEQ ID NO: 5830; SEQ ID NO: 5831; SEQ ID NO: 5832; SEQ ID NO: 5833; SEQ ID NO: 5834; SEQ ID NO: 5835; SEQ ID NO: 5836; SEQ ID NO: 5837; SEQ ID NO: 5838; SEQ ID NO: 5839; SEQ ID NO: 5840; SEQ ID NO: 5841; SEQ ID NO: 5842; SEQ ID NO: 5843; SEQ ID NO: 5844; SEQ ID NO: 5845; SEQ ID NO: 5846; SEQ ID NO: 5847; SEQ ID NO: 5848; SEQ ID NO: 5849; SEQ ID NO: 5850; SEQ ID NO: 5851; SEQ ID NO: 5852; SEQ ID NO: 5853; SEQ ID NO: 5854; SEQ ID NO: 5855; SEQ ID NO: 5856; SEQ ID NO: 5857; SEQ ID NO: 5858; SEQ ID NO: 5859; SEQ ID NO: 5860; SEQ ID NO: 5861; SEQ ID NO: 5862; SEQ ID NO: 5863; SEQ ID NO: 5864; SEQ ID NO: 5865; SEQ ID NO: 5866; SEQ ID NO: 5867; SEQ ID NO: 5868; SEQ ID NO: 5869; SEQ ID NO: 5870; SEQ ID NO: 5871; SEQ ID NO: 5872; SEQ ID NO: 5873; SEQ ID NO: 5874; SEQ ID NO: 5875; SEQ ID NO: 5876; SEQ ID NO: 5877; SEQ ID NO: 5878; SEQ ID NO: 5879; SEQ ID NO: 5880; SEQ ID NO: 5881; SEQ ID NO: 5882; SEQ ID NO: 5883; SEQ ID NO: 5884; SEQ ID NO: 5885; SEQ ID NO: 5886; SEQ ID NO: 5887; SEQ ID NO: 5888; SEQ ID NO: 5889; SEQ ID NO: 5890; SEQ ID NO: 5891; SEQ ID NO: 5892; SEQ ID NO: 5893; SEQ ID NO: 5894; SEQ ID NO: 5895; SEQ ID NO: 5896; SEQ ID NO: 5897; SEQ ID NO: 5898; SEQ ID NO: 5899; SEQ ID NO: 5900; SEQ ID NO: 5901; SEQ ID NO: 5902; SEQ ID NO: 5903; SEQ ID NO: 5904; SEQ ID NO: 5905; SEQ ID NO: 5906; SEQ ID NO: 5907; SEQ ID NO: 5908; SEQ ID NO: 5909; SEQ ID NO: 5910; SEQ ID NO: 5911; SEQ ID NO: 5912; SEQ ID NO: 5913; SEQ ID NO: 5914; SEQ ID NO: 5915; SEQ ID NO: 5916; SEQ ID NO: 5917; SEQ ID NO: 5918; SEQ ID NO: 5919; SEQ ID NO: 5920; SEQ ID NO: 5921; SEQ ID NO: 5922; SEQ ID NO: 5923; SEQ ID NO: 5924; SEQ ID NO: 5925; SEQ ID NO: 5926; SEQ ID NO: 5927; SEQ ID NO: 5928; SEQ ID NO: 5929; SEQ ID NO: 5930; SEQ ID NO: 5931; SEQ ID NO: 5932; SEQ ID NO: 5933; SEQ ID NO: 5934; SEQ ID NO: 5935; SEQ ID NO: 5936; SEQ ID NO: 5937; SEQ ID NO: 5938; SEQ ID NO: 5939; SEQ ID NO: 5940; SEQ ID NO: 5941; SEQ ID NO: 5942; SEQ ID NO: 5943; SEQ ID NO: 5944; SEQ ID NO: 5945; SEQ ID NO: 5946; SEQ ID NO: 5947; SEQ ID NO: 5948; SEQ ID NO: 5949; SEQ ID NO: 5950; SEQ ID NO: 5951; SEQ ID NO: 5952; SEQ ID NO: 5953; SEQ ID NO: 5954; SEQ ID NO: 5955; SEQ ID NO: 5956; SEQ ID NO: 5957; SEQ ID NO: 5958; SEQ ID NO: 5959; SEQ ID NO: 5960; SEQ ID NO: 5961; SEQ ID NO: 5962; SEQ ID NO: 5963; SEQ ID NO: 5964; SEQ ID NO: 5965; SEQ ID NO: 5966; SEQ ID NO: 5967; SEQ ID NO: 5968; SEQ ID NO: 5969; SEQ ID NO: 5970; SEQ ID NO: 5971; SEQ ID NO: 5972; SEQ ID NO: 5973; SEQ ID NO: 5974; SEQ ID NO: 5975; SEQ ID NO: 5976; SEQ ID NO: 5977; SEQ ID NO: 5978; SEQ ID NO: 5979; SEQ ID NO: 5980; SEQ ID NO: 5981; SEQ ID NO: 5982; SEQ ID NO: 5983; SEQ ID NO: 5984; SEQ ID NO: 5985; SEQ ID NO: 5986; SEQ ID NO: 5987; SEQ ID NO: 5988; SEQ ID NO: 5989; SEQ ID NO: 5990; SEQ ID NO: 5991; SEQ ID NO: 5992; SEQ ID NO: 5993; SEQ ID NO: 5994; SEQ ID NO: 5995; SEQ ID NO: 5996; SEQ ID NO: 5997; SEQ ID NO: 5998; SEQ ID NO: 5999; SEQ ID NO: 6000; SEQ ID NO: 6001; SEQ ID NO: 6002; SEQ ID NO: 6003; SEQ ID NO: 6004; SEQ ID NO: 6005; SEQ ID NO: 6006; SEQ ID NO: 6007; SEQ ID NO: 6008; SEQ ID NO: 6009; SEQ ID NO: 6010; SEQ ID NO: 6011; SEQ ID NO: 6012; SEQ ID NO: 6013; SEQ ID NO: 6014; SEQ ID NO: 6015; SEQ ID NO: 6016; SEQ ID NO: 6017; SEQ ID NO: 6018; SEQ ID NO: 6019; SEQ ID NO: 6020; SEQ ID NO: 6021; SEQ ID NO: 6022; SEQ ID NO: 6023; SEQ ID NO: 6024; SEQ ID NO: 6025; SEQ ID NO: 6026; SEQ ID NO: 6027; SEQ ID NO: 6028; SEQ ID NO: 6029; SEQ ID NO: 6030; SEQ ID NO: 6031; SEQ ID NO: 6032; SEQ ID NO: 6033; SEQ ID NO: 6034; SEQ ID NO: 6035; SEQ ID NO: 6036; SEQ ID NO: 6037; SEQ ID NO: 6038; SEQ ID NO: 6039; SEQ ID NO: 6040; SEQ ID NO: 6041; SEQ ID NO: 6042; SEQ ID NO: 6043; SEQ ID NO: 6044; SEQ ID NO: 6045; SEQ ID NO: 6046; SEQ TD NO: 6047; SEQ ID NO: 6048; SEQ ID NO: 6049; SEQ ID NO: 6050; SEQ ID NO: 6051; SEQ ID NO: 6052; SEQ ID NO: 6053; SEQ ID NO: 6054; SEQ ID NO: 6055; SEQ ID NO: 6056; SEQ ID NO: 6057; SEQ ID NO: 6058; SEQ ID NO: 6059; SEQ ID NO: 6060; SEQ ID NO: 6061; SEQ ID NO: 6062; SEQ ID NO: 6063; SEQ ID NO: 6064; SEQ ID NO: 6065; SEQ ID NO: 6066; SEQ ID NO: 6067; SEQ ID NO: 6068; SEQ ID NO: 6069; SEQ ID NO: 6070; SEQ ID NO: 6071; SEQ ID NO: 6072; SEQ ID NO: 6073; SEQ ID NO: 6074; SEQ ID NO: 6075; SEQ ID NO: 6076; SEQ ID NO: 6077; SEQ ID NO: 6078; SEQ ID NO: 6079; SEQ ID NO: 6080; SEQ ID NO: 6081; SEQ ID NO: 6082; SEQ ID NO: 6083; SEQ ID NO: 6084; SEQ ID NO: 6085; SEQ ID NO: 6086; SEQ ID NO: 6087; SEQ ID NO: 6088; SEQ ID NO: 6089; SEQ ID NO: 6090; SEQ ID NO: 6091; SEQ ID NO: 6092; SEQ ID NO: 6093; SEQ ID NO: 6094; SEQ ID NO: 6095; SEQ ID NO: 6096; SEQ ID NO: 6097; SEQ ID NO: 6098; SEQ ID NO: 6099; SEQ ID NO: 6100; SEQ ID NO: 6101; SEQ ID NO: 6102; SEQ ID NO: 6103; SEQ ID NO: 6104; SEQ ID NO: 6105; SEQ ID NO: 6106; SEQ ID NO: 6107; SEQ ID NO: 6108; SEQ ID NO: 6109; SEQ ID NO: 6110; SEQ ID NO: 6111; SEQ ID NO: 6112; SEQ ID NO: 6113; SEQ ID NO: 6114; SEQ ID NO: 6115; SEQ ID NO: 6116; SEQ ID NO: 6117; SEQ ID NO: 6118; SEQ ID NO: 6119; SEQ ID NO: 6120; SEQ ID NO: 6121; SEQ ID NO: 6122; SEQ ID NO: 6123; SEQ ID NO: 6124; SEQ ID NO: 6125; SEQ ID NO: 6126; SEQ ID NO: 6127; SEQ ID NO: 6128; SEQ ID NO: 6129; SEQ ID NO: 6130; SEQ ID NO: 6131; SEQ ID NO: 6132; SEQ ID NO: 6133; SEQ ID NO: 6134; SEQ ID NO: 6135; SEQ ID NO: 6136; SEQ ID NO: 6137; SEQ ID NO: 6138; SEQ ID NO: 6139; SEQ ID NO: 6140; SEQ ID NO: 6141; SEQ ID NO: 6142; SEQ ID NO: 6143; SEQ ID NO: 6144; SEQ ID NO: 6145; SEQ ID NO: 6146; SEQ ID NO: 6147; SEQ ID NO: 6148; SEQ ID NO: 6149; SEQ ID NO: 6150; SEQ ID NO: 6151; SEQ ID NO: 6152; SEQ ID NO: 6153; SEQ ID NO: 6154; SEQ ID NO: 6155; SEQ ID NO: 6156; SEQ ID NO: 6157; SEQ ID NO: 6158; SEQ ID NO: 6159; SEQ ID NO: 6160; SEQ ID NO: 6161; SEQ ID NO: 6162; SEQ ID NO: 6163; SEQ ID NO: 6164; SEQ ID NO: 6165; SEQ ID NO: 6166; SEQ ID NO: 6167; SEQ ID NO: 6168; SEQ ID NO: 6169; SEQ ID NO: 6170; SEQ ID NO: 6171; SEQ ID NO: 6172; SEQ ID NO: 6173; SEQ ID NO: 6174; SEQ ID NO: 6175; SEQ ID NO: 6176; SEQ ID NO: 6177; SEQ ID NO: 6178; SEQ ID NO: 6179; SEQ ID NO: 6180; SEQ ID NO: 6181; SEQ ID NO: 6182; SEQ ID NO: 6183; SEQ ID NO: 6184; SEQ ID NO: 6185; SEQ ID NO: 6186; SEQ ID NO: 6187; SEQ ID NO: 6188; SEQ ID NO: 6189; SEQ ID NO: 6190; SEQ ID NO: 6191; SEQ ID NO: 6192; SEQ ID NO: 6193; SEQ ID NO: 6194; SEQ ID NO: 6195; SEQ ID NO: 6196; SEQ ID NO: 6197; SEQ ID NO: 6198; SEQ ID NO: 6199; SEQ ID NO: 6200; SEQ ID NO: 6201; SEQ ID NO: 6202; SEQ ID NO: 6203; SEQ ID NO: 6204; SEQ ID NO: 6205; SEQ ID NO: 6206; SEQ ID NO: 6207; SEQ ID NO: 6208; SEQ ID NO: 6209; SEQ ID NO: 6210; SEQ ID NO: 6211; SEQ ID NO: 6212; SEQ ID NO: 6213; SEQ ID NO: 6214; SEQ ID NO: 6215; SEQ ID NO: 6216; SEQ ID NO: 6217; SEQ ID NO: 6218; SEQ ID NO: 6219; SEQ ID NO: 6220; SEQ ID NO: 6221; SEQ ID NO: 6222; SEQ ID NO: 6223; SEQ ID NO: 6224; SEQ ID NO: 6225; SEQ ID NO: 6226; SEQ ID NO: 6227; SEQ ID NO: 6228; SEQ ID NO: 6229; SEQ ID NO: 6230; SEQ ID NO: 6231; SEQ ID NO: 6232; SEQ ID NO: 6233; SEQ ID NO: 6234; SEQ ID NO: 6235; SEQ ID NO: 6236; SEQ ID NO: 6237; SEQ ID NO: 6238; SEQ ID NO: 6239; SEQ ID NO: 6240; SEQ ID NO: 6241; SEQ ID NO: 6242; SEQ ID NO: 6243; SEQ ID NO: 6244; SEQ ID NO: 6245; SEQ ID NO: 6246; SEQ ID NO: 6247; SEQ ID NO: 6248; SEQ ID NO: 6249; SEQ ID NO: 6250; SEQ ID NO: 6251; SEQ ID NO: 6252; SEQ ID NO: 6253; SEQ ID NO: 6254; SEQ ID NO: 6255; SEQ ID NO: 6256; SEQ ID NO: 6257; SEQ ID NO: 6258; SEQ ID NO: 6259; SEQ ID NO: 6260; SEQ ID NO: 6261; SEQ ID NO: 6262; SEQ ID NO: 6263; SEQ ID NO: 6264; SEQ ID NO: 6265; SEQ ID NO: 6266; SEQ ID NO: 6267; SEQ ID NO: 6268; SEQ ID NO: 6269; SEQ ID NO: 6270; SEQ ID NO: 6271; SEQ ID NO: 6272; SEQ ID NO: 6273; SEQ ID NO: 6274; SEQ ID NO: 6275; SEQ ID NO: 6276; SEQ ID NO: 9649; SEQ ID NO: 9650; SEQ ID NO: 9651; SEQ ID NO: 9652; SEQ ID NO: 9653; SEQ ID NO: 9654; SEQ ID NO: 9655; SEQ ID NO: 9656; SEQ ID NO: 9657; SEQ ID NO: 9658; SEQ ID NO: 9659; SEQ ID NO: 9660; SEQ ID NO: 9661; SEQ ID NO: 9662; SEQ ID NO: 9663; SEQ ID NO: 9664; SEQ ID NO: 9665; SEQ ID NO: 9666; SEQ ID NO: 9667; SEQ ID NO: 9668; SEQ ID NO: 9669; SEQ ID NO: 9670; SEQ ID NO: 9671; SEQ ID NO: 9672; SEQ ID NO: 9673; SEQ ID NO: 9674; SEQ ID NO: 9675; SEQ ID NO: 9676; SEQ ID NO: 9677; SEQ ID NO: 9678; SEQ ID NO: 9679; SEQ ID NO: 9680; SEQ ID NO: 9681; SEQ ID NO: 9682; SEQ ID NO: 9683; SEQ ID NO: 9684; SEQ ID NO: 9685; SEQ ID NO: 9686; SEQ ID NO: 9687; SEQ ID NO: 9688; SEQ ID NO: 9689; SEQ ID NO: 9690; SEQ ID NO: 9691; SEQ ID NO: 9692; SEQ ID NO: 9693; SEQ ID NO: 9694; SEQ ID NO: 9695; SEQ ID NO: 9696; SEQ ID NO: 9697; SEQ ID NO: 9698; SEQ ID NO: 9699; SEQ ID NO: 9700; SEQ ID NO: 9701; SEQ ID NO: 9702 and SEQ ID NO: 9703.

[0104] In another embodiment, the H. pylori cell envelope polypeptide or a fragment thereof is an H. pylori inner membrane polypeptide or a fragment thereof involved in transport having an amino acid sequence selected from the group consisting of SEQ ID NO: 5273; SEQ ID NO: 5274; SEQ ID NO: 5275; SEQ ID NO: 5276; SEQ ID NO: 5277; SEQ ID NO: 5278; SEQ ID NO: 5279; SEQ ID NO: 5280; SEQ ID NO: 5281; SEQ ID NO: 5282; SEQ ID NO: 5283; SEQ ID NO: 5284; SEQ ID NO: 5285; SEQ ID NO: 5286; SEQ ID NO: 5287; SEQ ID NO: 5288; SEQ ID NO: 5289; SEQ ID NO: 5290; SEQ ID NO: 5291; SEQ ID NO: 5292; SEQ ID NO: 5293; SEQ ID NO: 5294; SEQ ID NO: 5295; SEQ ID NO: 5296; SEQ ID NO: 5297; SEQ ID NO: 5298; SEQ ID NO: 5299; SEQ ID NO: 5300; SEQ ID NO: 5301; SEQ ID NO: 5302; SEQ ID NO: 5303; SEQ ID NO: 5304; SEQ ID NO: 5305; SEQ ID NO: 5306; SEQ ID NO: 5307; SEQ ID NO: 5308; SEQ ID NO: 5309; SEQ ID NO: 5310; SEQ ID NO: 5311; SEQ ID NO: 5312; SEQ ID NO: 5313; SEQ ID NO: 5314; SEQ ID NO: 5315; SEQ ID NO: 5316; SEQ ID NO: 5317; SEQ ID NO: 5318; SEQ ID NO: 5319; SEQ ID NO: 5320; SEQ ID NO: 5321; SEQ ID NO: 5322; SEQ ID NO: 5323; SEQ ID NO: 5324; SEQ ID NO: 5325; SEQ ID NO: 5326; SEQ ID NO: 5327; SEQ ID NO: 5328; SEQ ID NO: 5329; SEQ ID NO: 5330; SEQ ID NO:5331; SEQ ID NO: 5332; SEQ ID NO: 5333; SEQ ID NO: 5334; SEQ ID NO: 5335; SEQ ID NO: 5336; SEQ ID NO: 5337; SEQ ID NO: 5338; SEQ ID NO: 5339; SEQ ID NO: 5340; SEQ ID NO: 5341; SEQ ID NO: 5342; SEQ ID NO: 5343; SEQ ID NO: 5344; SEQ ID NO: 5345; SEQ ID NO: 5346; SEQ ID NO: 5347; SEQ ID NO: 5348; SEQ ID NO: 5349; SEQ ID NO: 5350; SEQ ID NO: 5351; SEQ ID NO: 5352; SEQ ID NO: 5353; SEQ ID NO: 5354; SEQ ID NO: 5355; SEQ ID NO: 5356; SEQ ID NO: 5357; SEQ ID NO: 5358; SEQ ID NO: 5359; SEQ ID NO: 5360; SEQ ID NO: 5361; SEQ ID NO: 5362; SEQ ID NO: 5363; SEQ ID NO: 5364; SEQ ID NO: 5365; SEQ ID NO: 5366; SEQ ID NO: 5367; SEQ ID NO: 5368; SEQ ID NO: 5369; SEQ ID NO: 5370; SEQ ID NO: 5371; SEQ ID NO: 5372; SEQ ID NO: 5373; SEQ ID NO: 5374; SEQ ID NO: 5375; SEQ ID NO: 5376; SEQ ID NO: 5377; SEQ ID NO: 5378; SEQ ID NO: 5379; SEQ ID NO: 5380; SEQ ID NO: 5381; SEQ ID NO: 5382; SEQ ID NO: 5383; SEQ ID NO: 5384; SEQ ID NO: 5385; SEQ ID NO: 5386; SEQ ID NO: 5387; SEQ ID NO: 5388; SEQ ID NO: 5389; SEQ ID NO: 5390; SEQ ID NO: 5391; SEQ ID NO: 5392; SEQ ID NO: 5393; SEQ ID NO: 5394; SEQ ID NO: 5395; SEQ ID NO: 5396; SEQ ID NO: 5397; SEQ ID NO: 5398; SEQ ID NO: 5399; SEQ ID NO: 5400; SEQ ID NO: 5401; SEQ ID NO: 5402; SEQ ID NO: 5403; SEQ ID NO: 5404; SEQ ID NO: 5405; SEQ ID NO: 5406; SEQ ID NO: 5407; SEQ ID NO: 5408; SEQ ID NO: 5409; SEQ ID NO: 5410; SEQ ID NO: 5411; SEQ ID NO: 5412; SEQ ID NO: 5413; SEQ ID NO: 5414; SEQ ID NO: 5415; SEQ ID NO: 5416; SEQ ID NO: 5417; SEQ ID NO: 5418; SEQ ID NO: 5419; SEQ ID NO: 5420; SEQ ID NO: 5421; SEQ ID NO: 5422; SEQ ID NO: 5423; SEQ ID NO: 5424; SEQ ID NO: 5425; SEQ ID NO: 5426; SEQ ID NO: 5427; SEQ ID NO: 5428; SEQ ID NO:5429; SEQ ID NO: 5430; SEQ ID NO:5431; SEQ ID NO: 5432; SEQ ID NO: 5433; SEQ ID NO:5434; SEQ ID NO: 5435; SEQ ID NO: 5436; SEQ ID NO: 5437; SEQ ID NO: 5438; SEQ ID NO: 5439; SEQ ID NO: 5440; SEQ ID NO: 5441; SEQ ID NO: 5442; SEQ ID NO: 5443; SEQ ID NO: 5444; SEQ ID NO: 5564; SEQ ID NO: 9649; SEQ ID NO: 9650; SEQ ID NO: 9651; SEQ ID NO: 9652; SEQ ID NO: 9653; SEQ ID NO: 9654; SEQ ID NO: 9655; SEQ ID NO: 9656; SEQ ID NO: 9657; SEQ ID NO: 9658; SEQ ID NO: 9659; SEQ ID NO: 9660; SEQ ID NO: 9661; SEQ ID NO: 9662; SEQ ID NO: 9663; SEQ ID NO: 9664; SEQ ID NO: 9665 and SEQ ID NO: 9666.

[0105] In another embodiment, the H. pylori cell envelope polypeptide or a fragment thereof is an H. pylori inner membrane polypeptide or a fragment thereof involved in amino acid metabolism and transport having an amino acid sequence selected from the group consisting of SEQ ID NO: 5445; SEQ ID NO: 5446; SEQ ID NO: 5447; SEQ ID NO: 5448; SEQ ID NO: 5449; SEQ ID NO: 5450; SEQ ID NO: 5451; SEQ ID NO: 5452; SEQ ID NO: 5453; SEQ ID NO: 5454; SEQ ID NO: 5455; SEQ ID NO: 5456; SEQ ID NO: 5457; SEQ ID NO: 5458; SEQ ID NO: 5459; SEQ ID NO: 5460; SEQ ID NO: 5461; SEQ ID NO: 5462; SEQ ID NO: 5463; SEQ ID NO: 5464; SEQ ID NO: 5465; SEQ ID NO: 5466; SEQ ID NO: 5467; SEQ ID NO: 5468; SEQ ID NO: 5469; SEQ ID NO: 5470; SEQ ID NO: 5471; SEQ ID NO: 5472; SEQ ID NO: 5473; SEQ ID NO: 5474; SEQ ID NO: 5475; SEQ ID NO: 5476; SEQ ID NO: 5477; SEQ ID NO: 5478; SEQ ID NO: 5479; SEQ ID NO: 5480; SEQ ID NO: 5481; SEQ ID NO: 5482; SEQ ID NO: 9659 and SEQ ID NO: 9660.

[0106] In another embodiment, the H. pylori cell envelope polypeptide or a fragment thereof is an H. pylori inner membrane polypeptide or a fragment thereof involved in nucleotide, lipid, or cofactor metabolism and transport having an amino acid sequence selected from the group consisting of SEQ ID NO: 5483; SEQ ID NO: 5484; SEQ ID NO: 5485; SEQ ID NO: 5486; SEQ ID NO: 5487; SEQ ID NO: 5488; SEQ ID NO: 5489; SEQ ID NO: 5490; SEQ ID NO: 5491; SEQ ID NO: 5492; SEQ ID NO: 5493; SEQ ID NO: 5494; SEQ ID NO: 5495; SEQ ID NO: 5496; SEQ ID NO: 5497; SEQ ID NO: 5498; SEQ ID NO: 5499; SEQ ID NO: 5500; SEQ ID NO: 5501; SEQ ID NO: 5502; SEQ ID NO: 5503; SEQ ID NO: 5504; SEQ ID NO: 5505; SEQ ID NO: 5506; SEQ ID NO: 5507; SEQ ID NO: 5508; SEQ ID NO: 5509; SEQ ID NO: 5510; SEQ ID NO: 5511; SEQ ID NO: 5512; SEQ ID NO: 5513; SEQ ID NO: 5514; SEQ ID NO: 5515; SEQ ID NO: 5516; SEQ ID NO: 5517; SEQ ID NO: 5518; SEQ ID NO: 5519; SEQ ID NO: 5520; SEQ ID NO: 5521; SEQ ID NO: 5522; SEQ ID NO: 5523; SEQ ID NO: 5524; SEQ ID NO: 5525; SEQ ID NO: 5526 and SEQ ID NO: 9661.

[0107] In another embodiment, the H. pylori cell envelope polypeptide or a fragment thereof is an H. pylori inner membrane polypeptide or a fragment thereof involved in inorganic ion transport having an amino acid sequence selected from the group consisting of SEQ ID NO: 5527; SEQ ID NO: 5528; SEQ ID NO: 5529; SEQ ID NO: 5530; SEQ ID NO: 5531; SEQ ID NO: 5532; SEQ ID NO: 5533; SEQ ID NO: 5534; SEQ ID NO: 5535; SEQ ID NO: 5536; SEQ ID NO: 5537; SEQ ID NO: 5538; SEQ ID NO: 5539; SEQ ID NO: 5540; SEQ ID NO: 5541; SEQ ID NO: 5542; SEQ ID NO: 5543; SEQ ID NO: 5544; SEQ ID NO: 5545; SEQ ID NO: 5546; SEQ ID NO: 5547; SEQ ID NO: 5548; SEQ ID NO: 5549; SEQ ID NO: 5550; SEQ ID NO: 5551; SEQ ID NO: 5552; SEQ ID NO: 5553; SEQ ID NO: 5554; SEQ ID NO: 5555; SEQ ID NO: 5556; SEQ ID NO: 5557; SEQ ID NO: 5558; SEQ ID NO: 5559; SEQ ID NO: 5560; SEQ ID NO: 5561; SEQ ID NO: 9662; SEQ ID NO: 9663; SEQ ID NO: 9664; SEQ ID NO: 9665 and SEQ ID NO: 9666.

[0108] In another embodiment, the H. pylori cell envelope polypeptide or a fragment thereof is an H. pylori inner membrane polypeptide or a fragment thereof involved in carbohydrate metabolism and transport having an amino acid sequence selected from the group consisting of SEQ ID NO: 5562; SEQ ID NO: 5563 and SEQ ID NO: 5564.

[0109] In another embodiment, the H. pylori cell envelope polypeptide or a fragment thereof is an H. pylori inner membrane polypeptide or a fragment thereof involved in outer membrane and cell wall formation having an amino acid sequence selected from the group consisting of SEQ ID NO: 5565; SEQ ID NO: 5566; SEQ ID NO: 5567; SEQ ID NO: 5568; SEQ ID NO: 5569; SEQ ID NO: 5570; SEQ ID NO: 5571; SEQ ID NO: 5572; SEQ ID NO: 5573; SEQ ID NO: 5574; SEQ ID NO: 5575; SEQ ID NO: 5576; SEQ ID NO: 5577; SEQ ID NO: 5578; SEQ ID NO: 5579; SEQ ID NO: 5580; SEQ ID NO: 5581; SEQ ID NO: 5582; SEQ ID NO: 5583; SEQ ID NO: 5584; SEQ ID NO: 5585; SEQ ID NO: 5586; SEQ ID NO: 5587; SEQ ID NO: 5588; SEQ ID NO: 5589; SEQ ID NO: 5590; SEQ ID NO: 5591; SEQ ID NO: 5592; SEQ ID NO: 5593; SEQ ID NO: 5594; SEQ ID NO: 5595; SEQ ID NO: 5596; SEQ ID NO: 5597; SEQ ID NO: 5598; SEQ ID NO: 5599; SEQ ID NO: 5600; SEQ ID NO: 5601; SEQ ID NO: 5602; SEQ ID NO: 5603; SEQ ID NO: 5604; SEQ ID NO: 5605; SEQ ID NO: 5606; SEQ ID NO: 5607; SEQ ID NO: 5608; SEQ ID NO: 5609; SEQ ID NO: 5610; SEQ ID NO: 9667; SEQ ID NO: 9668; SEQ ID NO: 9669; SEQ ID NO: 9670; SEQ ID NO: 9671 and SEQ ID NO: 9672.

[0110] In another embodiment, the H. pylori cell envelope polypeptide or a fragment thereof is an H. pylori inner membrane polypeptide or a fragment thereof involved in energy conversion having an amino acid sequence selected from the group consisting of SEQ ID NO: 5611; SEQ ID NO: 5612; SEQ ID NO: 5613; SEQ ID NO: 5614; SEQ ID NO: 5615; SEQ ID NO: 5616; SEQ ID NO: 5617; SEQ ID NO: 5618; SEQ ID NO: 5619; SEQ ID NO: 5620; SEQ ID NO: 5621; SEQ ID NO: 5622; SEQ ID NO: 5623; SEQ ID NO: 5624; SEQ ID NO: 5625; SEQ ID NO: 5626; SEQ ID NO: 5627; SEQ ID NO: 5628; SEQ ID NO: 5629; SEQ ID NO: 5630; SEQ ID NO: 5631; SEQ ID NO: 5632; SEQ ID NO: 5633; SEQ ID NO: 5634; SEQ ID NO: 5635; SEQ ID NO: 5636; SEQ ID NO: 5637; SEQ ID NO: 5638; SEQ ID NO: 5639; SEQ ID NO: 5640; SEQ ID NO: 5641; SEQ ID NO: 5642; SEQ ID NO: 5643; SEQ ID NO: 5644; SEQ ID NO: 5645; SEQ ID NO: 5646; SEQ ID NO: 5647; SEQ ID NO: 5648; SEQ ID NO: 5649; SEQ ID NO: 5650; SEQ ID NO: 5651; SEQ ID NO: 5652; SEQ ID NO:5653; SEQ ID NO: 5654; SEQ ID NO: 5655; SEQ ID NO: 5656; SEQ ID NO: 5657; SEQ ID NO: 5658; SEQ ID NO: 5659; SEQ ID NO: 5660; SEQ ID NO: 5661; SEQ ID NO: 5662; SEQ ID NO: 5663; SEQ ID NO: 5664; SEQ ID NO: 5665; SEQ ID NO: 5666; SEQ ID NO: 5667; SEQ ID NO: 5668; SEQ ID NO: 5669; SEQ ID NO: 5670; SEQ ID NO: 5671; SEQ ID NO: 5672; SEQ ID NO: 5673; SEQ ID NO: 5674; StQ ID NO: 5675; SEQ ID NO: 5676; SEQ ID NO: 5677; SEQ ID NO: 5678; SEQ ID NO: 5679; SEQ ID NO: 5680; SEQ ID NO: 5681; SEQ ID NO:5682; SEQ ID NO: 5683; SEQ ID NO: 5684; SEQ ID NO: 5685; SEQ ID NO: 5686; SEQ ID NO: 5687; SEQ ID NO: 5688; SEQ ID NO: 5689; SEQ ID NO: 5690; SEQ ID NO: 5691; SEQ ID NO: 5692; SEQ ID NO: 5693; SEQ ID NO: 5694; SEQ ID NO: 5695; SEQ ID NO: 5696; SEQ ID NO: 5697; SEQ ID NO: 5698; SEQ ID NO: 5699; SEQ ID NO: 5700; SEQ ID NO: 5701; SEQ ID NO: 5702; SEQ ID NO: 5703; SEQ ID NO: 5704; SEQ ID NO: 5705; SEQ ID NO: 5706; SEQ ID NO: 5707; SEQ ID NO: 5708; SEQ ID NO: 5709; SEQ ID NO: 5710; SEQ ID NO: 5711; SEQ ID NO: 5712; SEQ ID NO: 5713; SEQ ID NO: 5714; SEQ ID NO: 5715; SEQ ID NO: 5716; SEQ ID NO: 5717; SEQ ID NO: 5718; SEQ ID NO: 5719; SEQ ID NO: 5720; SEQ ID NO: 5721; SEQ ID NO: 5722; SEQ ID NO: 5723; SEQ ID NO: 5724; SEQ ID NO: 5725; SEQ ID NO: 5726; SEQ ID NO: 5727; SEQ ID NO: 5728; SEQ ID NO: 5729; SEQ ID NO: 5730; SEQ ID NO: 5731; SEQ ID NO: 5732; SEQ ID NO: 5733; SEQ ID NO: 5734; SEQ ID NO: 5735; SEQ ID NO: 5736; SEQ ID NO: 5737; SEQ ID NO: 5738; SEQ ID NO: 5739; SEQ ID NO: 5740; SEQ ID NO: 5741; SEQ ID NO: 5742; SEQ ID NO: 5743; SEQ ID NO: 5744; SEQ ID NO: 5745; SEQ ID NO: 5746; SEQ ID NO: 5747; SEQ ID NO: 5748; SEQ ID NO: 5749; SEQ ID NO: 5750; SEQ ID NO: 5751; SEQ ID NO: 5752; SEQ ID NO: 5753; SEQ ID NO: 5754; SEQ ID NO: 5755; SEQ ID NO: 5756; SEQ ID NO: 5757; SEQ ID NO: 9673; SEQ ID NO: 9674; SEQ ID NO: 9675; SEQ ID NO: 9676; SEQ ID NO: 9677.

[0111] In another embodiment, the H. pylori cell envelope polypeptide or a fragment thereof is an H. pylori inner membrane polypeptide or a fragment thereof involved in secretion and adhesion having an amino acid sequence selected from the group consisting of SEQ ID NO: 5758; SEQ ID NO: 5759; SEQ ID NO: 5760; SEQ ID NO: 5761; SEQ ID NO: 5762; SEQ ID NO: 5763; SEQ ID NO: 5764; SEQ ID NO: 5765; SEQ ID NO: 5766; SEQ ID NO: 5767; SEQ ID NO: 5768; SEQ ID NO: 5769; SEQ ID NO: 9678.

[0112] In another embodiment, the H. pylori cell envelope polypeptide or a fragment thereof is an H. pylori inner membrane polypeptide or a fragment thereof involved in regulation having an amino acid sequence selected from the group consisting of SEQ ID NO: 5770; SEQ ID NO: 5771; SEQ ID NO: 5772; SEQ ID NO: 5773; SEQ ID NO: 5774; SEQ ID NO: 5775; SEQ ID NO: 5776; SEQ ID NO: 5777; SEQ ID NO: 5778; SEQ ID NO: 5779; SEQ ID NO: 5780; SEQ ID NO: 5781; SEQ ID NO: 5782; SEQ ID NO: 5783; SEQ ID NO: 5784; SEQ ID NO: 5785; SEQ ID NO: 5786; SEQ ID NO: 5787; SEQ ID NO: 5788; SEQ ID NO: 5789.

[0113] In another embodiment, the H. pylori cell envelope polypeptide or a fragment thereof is an H. pylori inner membrane chaperone polypeptide or a fragment thereof having an amino acid sequence selected from the group consisting of SEQ ID NO: 5790; SEQ ID NO: 5791; SEQ ID NO: 5792; SEQ ID NO: 5793 and SEQ ID NO: 9679.

[0114] In another embodiment, the H. pylori cell envelope polypeptide or a fragment thereof is an H. pylori inner membrane polypeptide or a fragment thereof involved in cell division having an amino acid sequence selected from the group consisting of SEQ ID NO: 5794; SEQ ID NO: 5795; SEQ ID NO: 5796; SEQ ID NO: 5797; SEQ ID NO: 5798; SEQ ID NO: 5799; SEQ ID NO: 5800; SEQ ID NO: 5801; SEQ ID NO: 5802; SEQ ID NO: 5803; SEQ ID NO: 5804; SEQ ID NO: 5805; SEQ ID NO: 5806; SEQ ID NO: 5807; SEQ ID NO: 5808; SEQ ID NO: 5809; SEQ ID NO: 5810; SEQ ID NO: 5811; SEQ ID NO: 5812; SEQ ID NO: 5813; SEQ ID NO: 5814; SEQ ID NO: 9680 and SEQ ID NO: 9681.

[0115] In another embodiment, the H. pylori cell envelope polypeptide or a fragment thereof is an H. pylori inner membrane polypeptide or a fragment thereof involved in motility having an amino acid sequence selected from the group consisting of SEQ ID NO: 5815 and SEQ ID NO: 5816.

[0116] Particularly preferred is an isolated H. pylori cell envelope polypeptide or a fragment thereof, wherein the polypeptide is encoded by a nucleic acid sequence selected from the group consisting of SEQ ID NO: 1; SEQ ID NO: 2; SEQ ID NO: 3; SEQ ID NO: 4; SEQ ID NO: 5; SEQ ID NO: 6; SEQ ID NO: 7; SEQ ID NO: 8; SEQ ID NO: 9; SEQ ID NO: 10; SEQ ID NO:11; SEQ ID NO: 12; SEQ ID NO: 13; SEQ ID NO: 14; SEQ ID NO: 15; SEQ ID NO: 16; SEQ ID NO: 17; SEQ ID NO: 18; SEQ ID NO: 19; SEQ ID NO: 20; SEQ ID NO: 21; SEQ ID NO: 22; SEQ ID NO: 23; SEQ ID NO: 24; SEQ ID NO: 25; SEQ ID NO: 26; SEQ ID NO: 27; SEQ ID NO: 28; SEQ ID NO: 29; SEQ ID NO: 30; SEQ ID NO: 31; SEQ ID NO: 32; SEQ ID NO: 33; SEQ ID NO: 34; SEQ ID NO: 35; SEQ ID NO: 36; SEQ ID NO: 37; SEQ ID NO: 38; SEQ ID NO: 39; SEQ ID NO: 40; SEQ ID NO: 41; SEQ ID NO: 42; SEQ ID NO: 43; SEQ ID NO: 44; SEQ ID NO: 45; SEQ ID NO: 46; SEQ ID NO: 47; SEQ ID NO: 48; SEQ ID NO: 49; SEQ ID NO: 50; SEQ ID NO: 51; SEQ ID NO: 52; SEQ ID NO: 53; SEQ ID NO: 54; SEQ ID NO: 55; SEQ ID NO: 56; SEQ ID NO: 57; SEQ ID NO: 58; SEQ ID NO: 59; SEQ ID NO: 60; SEQ ID NO: 61; SEQ ID NO: 62; SEQ ID NO: 63; SEQ ID NO: 64; SEQ ID NO: 65; SEQ ID NO: 66; SEQ ID NO: 67; SEQ ID NO: 68; SEQ ID NO: 69; SEQ ID NO: 70; SEQ ID NO: 71; SEQ ID NO: 72; SEQ ID NO: 73; SEQ ID NO: 74; SEQ ID NO: 75; SEQ ID NO: 76; SEQ ID NO: 77; SEQ ID NO: 78; SEQ ID NO: 79; SEQ ID NO: 80; SEQ ID NO: 81; SEQ ID NO: 82; SEQ ID NO: 83; SEQ ID NO: 84; SEQ ID NO: 85; SEQ ID NO: 86; SEQ ID NO: 87; SEQ ID NO: 88; SEQ ID NO: 89; SEQ ID NO: 90; SEQ ID NO: 91; SEQ ID NO: 92; SEQ ID NO: 93; SEQ ID NO: 94; SEQ ID NO: 95; SEQ ID NO: 96; SEQ ID NO: 97; SEQ ID NO: 98; SEQ ID NO: 99; SEQ ID NO: 100; SEQ ID NO: 101; SEQ ID NO: 102; SEQ ID NO: 103; SEQ ID NO: 104; SEQ ID NO: 105; SEQ ID NO: 106; SEQ ID NO: 107; SEQ ID NO: 108; SEQ ID NO: 109; SEQ ID NO: 110; SEQ ID NO: 111; SEQ ID NO: 112; SEQ ID NO: 113; SEQ ID NO: 114; SEQ ID NO: 115; SEQ ID NO: 116; SEQ ID NO: 117; SEQ ID NO: 118; SEQ ID NO: 119; SEQ ID NO: 120; SEQ ID NO: 121; SEQ ID NO: 122; SEQ ID NO: 123; SEQ ID NO: 124; SEQ ID NO: 125; SEQ ID NO: 126; SEQ ID NO: 127; SEQ ID NO: 128; SEQ ID NO: 129; SEQ ID NO: 130; SEQ ID NO: 131; SEQ ID NO: 132; SEQ ID NO: 133; SEQ ID NO: 134; SEQ ID NO: 135; SEQ ID NO: 136; SEQ ID NO: 137; SEQ ID NO: 138; SEQ ID NO: 139; SEQ ID NO: 140; SEQ ID NO: 141; SEQ ID NO: 142; SEQ ID NO: 143; SEQ ID NO: 144; SEQ ID NO: 145; SEQ ID NO: 146; SEQ ID NO: 147; SEQ ID NO: 148; SEQ ID NO: 149; SEQ ID NO: 150; SEQ ID NO: 151; SEQ ID NO: 152; SEQ ID NO: 153; SEQ ID NO: 154; SEQ ID NO: 155; SEQ ID NO: 156; SEQ ID NO: 157; SEQ ID NO: 158; SEQ ID NO: 159; SEQ ID NO: 160; SEQ ID NO: 161; SEQ ID NO: 162; SEQ ID NO: 163; SEQ ID NO: 164; SEQ ID NO: 165; SEQ ID NO: 166; SEQ ID NO: 167; SEQ ID NO: 168; SEQ ID NO: 169; SEQ ID NO: 170; SEQ ID NO: 171; SEQ ID NO: 172; SEQ ID NO: 173; SEQ ID NO: 174; SEQ ID NO: 175; SEQ ID NO: 176; SEQ ID NO: 177; SEQ ID NO: 178; SEQ ID NO: 179; SEQ ID NO: 180; SEQ ID NO: 181; SEQ ID NO: 182; SEQ ID NO: 183; SEQ ID NO: 184; SEQ ID NO: 185; SEQ ID NO: 186; SEQ ID NO: 187; SEQ ID NO: 188; SEQ ID NO: 189; SEQ ID NO: 190; SEQ ID NO: 191; SEQ ID NO: 192; SEQ ID NO: 193; SEQ ID NO: 194; SEQ ID NO: 195; SEQ ID NO: 196; SEQ ID NO: 197; SEQ ID NO: 198; SEQ ID NO: 199; SEQ ID NO: 200; SEQ ID NO: 201; SEQ ID NO: 202; SEQ ID NO: 203; SEQ ID NO: 204; SEQ ID NO: 205; SEQ ID NO: 206; SEQ ID NO: 207; SEQ ID NO: 208; SEQ ID NO: 209; SEQ ID NO: 210; SEQ ID NO: 211; SEQ ID NO: 212; SEQ ID NO: 213; SEQ ID NO: 214; SEQ ID NO: 215; SEQ ID NO: 216; SEQ ID NO: 217; SEQ ID NO: 218; SEQ ID NO: 219; SEQ ID NO: 220; SEQ ID NO: 221; SEQ ID NO: 222; SEQ ID NO: 223; SEQ ID NO: 224; SEQ ID NO: 225; SEQ ID NO: 226; SEQ ID NO: 227; SEQ ID NO: 228; SEQ ID NO: 229; SEQ ID NO: 230; SEQ ID NO: 231; SEQ ID NO: 232; SEQ ID NO: 233; SEQ ID NO: 234; SEQ ID NO: 235; SEQ ID NO: 236; SEQ ID NO: 237; SEQ ID NO: 238; SEQ ID NO: 239; SEQ ID NO: 240; SEQ ID NO: 241; SEQ ID NO: 242; SEQ ID NO: 243; SEQ ID NO: 244; SEQ ID NO: 245; SEQ ID NO: 246; SEQ ID NO: 247; SEQ ID NO: 248; SEQ ID NO: 249; SEQ ID NO: 250; SEQ ID NO: 251; SEQ ID NO: 252; SEQ ID NO: 253; SEQ ID NO: 254; SEQ ID NO: 255; SEQ ID NO: 256; SEQ ID NO: 257; SEQ ID NO: 258; SEQ ID NO: 259; SEQ ID NO: 260; SEQ ID NO: 261; SEQ ID NO: 262; SEQ ID NO: 263; SEQ ID NO: 264; SEQ ID NO: 265; SEQ ID NO: 266; SEQ ID NO: 267; SEQ ID NO: 268; SEQ ID NO: 269; SEQ ID NO: 270; SEQ ID NO: 271; SEQ ID NO: 272; SEQ ID NO: 273; SEQ ID NO: 274; SEQ ID NO: 275; SEQ ID NO: 276; SEQ ID NO: 277; SEQ ID NO: 278; SEQ ID NO: 279; SEQ ID NO: 280; SEQ ID NO: 281; SEQ ID NO: 282; SEQ ID NO: 283; SEQ ID NO: 284; SEQ ID NO: 285; SEQ ID NO: 286; SEQ ID NO: 287; SEQ ID NO: 288; SEQ ID NO: 289; SEQ ID NO: 290; SEQ ID NO: 291; SEQ ID NO: 292; SEQ ID NO: 293; SEQ ID NO: 294; SEQ ID NO: 295; SEQ ID NO: 296; SEQ ID NO: 297; SEQ ID NO: 298; SEQ ID NO: 299; SEQ ID NO: 300; SEQ ID NO: 301; SEQ ID NO: 302; SEQ ID NO: 303; SEQ ID NO: 304; SEQ ID NO: 305; SEQ ID NO: 306; SEQ ID NO: 307; SEQ ID NO: 308; SEQ ID NO: 309; SEQ ID NO: 310; SEQ ID NO: 311; SEQ ID NO: 312; SEQ ID NO: 313; SEQ ID NO: 314; SEQ ID NO: 315; SEQ ID NO: 316; SEQ ID NO: 317; SEQ ID NO: 318; SEQ ID NO: 319; SEQ ID NO: 320; SEQ ID NO: 321; SEQ ID NO: 322; SEQ ID NO: 323; SEQ ID NO: 324; SEQ ID NO: 325; SEQ ID NO: 326; SEQ ID NO: 327; SEQ ID NO: 328; SEQ ID NO: 329; SEQ ID NO: 330; SEQ ID NO: 331; SEQ ID NO: 332; SEQ ID NO: 333; SEQ ID NO: 334; SEQ ID NO: 335; SEQ ID NO: 336; SEQ ID NO: 337; SEQ ID NO: 338; SEQ ID NO: 339; SEQ ID NO: 340; SEQ ID NO: 341; SEQ ID NO: 342; SEQ ID NO: 343; SEQ ID NO: 344; SEQ ID NO: 345; SEQ ID NO: 346; SEQ ID NO: 347; SEQ ID NO: 348; SEQ ID NO: 349; SEQ ID NO: 350; SEQ ID NO: 351; SEQ ID NO: 352; SEQ ID NO: 353; SEQ ID NO: 354; SEQ ID NO: 355; SEQ ID NO: 356; SEQ ID NO: 357; SEQ ID NO: 358; SEQ ID NO: 359; SEQ ID NO: 360; SEQ ID NO: 361; SEQ ID NO: 362; SEQ ID NO: 363; SEQ ID NO: 364; SEQ ID NO: 365; SEQ ID NO: 366; SEQ ID NO: 367; SEQ ID NO: 368; SEQ ID NO: 369; SEQ ID NO: 370; SEQ ID NO: 371; SEQ ID NO: 372; SEQ ID NO: 373; SEQ ID NO: 374; SEQ ID NO: 375; SEQ ID NO: 376; SEQ ID NO: 377; SEQ ID NO: 378; SEQ ID NO: 379; SEQ ID NO: 380; SEQ ID NO: 381; SEQ ID NO: 382; SEQ ID NO: 383; SEQ ID NO: 384; SEQ ID NO: 385; SEQ ID NO: 386; SEQ ID NO: 387; SEQ ID NO: 388; SEQ ID NO: 389; SEQ ID NO: 390; SEQ ID NO: 391; SEQ ID NO: 392; SEQ ID NO: 393; SEQ ID NO: 394; SEQ ID NO: 395; SEQ ID NO: 396; SEQ ID NO: 397; SEQ ID NO: 398; SEQ ID NO: 399; SEQ ID NO: 400; SEQ ID NO: 401; SEQ ID NO: 402; SEQ ID NO: 403; SEQ ID NO: 404; SEQ ID NO: 405; SEQ ID NO: 406; SEQ ID NO: 407; SEQ ID NO: 408; SEQ ID NO: 409; SEQ ID NO: 410; SEQ ID NO: 411; SEQ ID NO: 412; SEQ ID NO: 413; SEQ ID NO: 414; SEQ ID NO: 415; SEQ ID NO: 416; SEQ ID NO: 417; SEQ ID NO: 418; SEQ ID NO: 419; SEQ ID NO: 420; SEQ ID NO: 421; SEQ ID NO: 422; SEQ ID NO: 423; SEQ ID NO: 424; SEQ ID NO: 425; SEQ ID NO: 426; SEQ ID NO: 427; SEQ ID NO: 428; SEQ ID NO: 429; SEQ ID NO: 430; SEQ ID NO: 431; SEQ ID NO: 432; SEQ ID NO: 433; SEQ ID NO: 434; SEQ ID NO: 435; SEQ ID NO: 436; SEQ ID NO: 437; SEQ ID NO: 438; SEQ ID NO: 439; SEQ ID NO: 440; SEQ ID NO: 441; SEQ ID NO: 442; SEQ ID NO: 443; SEQ ID NO: 444; SEQ ID NO: 445; SEQ ID NO: 446; SEQ ID NO: 447; SEQ ID NO: 448; SEQ ID NO: 449; SEQ ID NO: 450; SEQ ID NO: 451; SEQ ID NO: 452; SEQ ID NO: 453; SEQ ID NO: 454; SEQ ID NO: 455; SEQ ID NO: 456; SEQ ID NO: 457; SEQ ID NO: 458; SEQ ID NO: 459; SEQ ID NO: 460; SEQ ID NO: 461; SEQ ID NO: 462; SEQ ID NO: 463; SEQ ID NO: 464; SEQ ID NO: 465; SEQ ID NO: 466; SEQ ID NO: 467; SEQ ID NO: 468; SEQ ID NO: 469; SEQ ID NO: 470; SEQ ID NO: 471; SEQ ID NO: 472; SEQ ID NO: 473; SEQ ID NO: 474; SEQ ID NO: 475; SEQ ID NO: 476; SEQ ID NO: 477; SEQ ID NO: 478; SEQ ID NO: 479; SEQ ID NO: 480; SEQ ID NO: 481; SEQ ID NO: 482; SEQ ID NO: 483; SEQ ID NO: 484; SEQ ID NO: 485; SEQ ID NO: 486; SEQ ID NO: 487; SEQ ID NO: 488; SEQ ID NO: 489; SEQ ID NO: 490; SEQ ID NO: 491; SEQ ID NO: 492; SEQ ID NO: 493; SEQ ID NO: 494; SEQ ID NO: 495; SEQ ID NO: 496; SEQ ID NO: 497; SEQ ID NO: 498; SEQ ID NO: 499; SEQ ID NO: 500; SEQ ID NO: 501; SEQ ID NO: 502; SEQ ID NO: 503; SEQ ID NO: 504; SEQ ID NO: 505; SEQ ID NO: 506; SEQ ID NO: 507; SEQ ID NO: 508; SEQ ID NO: 509; SEQ ID NO: 510; SEQ ID NO: 511; SEQ ID NO: 512; SEQ ID NO: 513; SEQ ID NO: 514; SEQ ID NO: 515; SEQ ID NO: 516; SEQ ID NO: 517; SEQ ID NO: 518; SEQ ID NO: 519; SEQ ID NO: 520; SEQ ID NO: 521; SEQ ID NO: 522; SEQ ID NO: 523; SEQ ID NO: 524; SEQ ID NO: 525; SEQ ID NO: 526; SEQ ID NO: 527; SEQ ID NO: 528; SEQ ID NO: 529; SEQ ID NO: 530; SEQ ID NO: 531; SEQ ID NO: 532; SEQ ID NO: 533; SEQ ID NO: 534; SEQ ID NO: 535; SEQ ID NO: 536; SEQ ID NO: 537; SEQ ID NO: 538; SEQ ID NO: 539; SEQ ID NO: 540; SEQ ID NO: 541; SEQ ID NO: 542; SEQ ID NO: 543; SEQ ID NO: 544; SEQ ID NO: 545; SEQ ID NO: 546; SEQ ID NO: 547; SEQ ID NO: 548; SEQ ID NO: 549; SEQ ID NO: 550; SEQ ID NO: 551; SEQ ID NO: 552; SEQ ID NO: 553; SEQ ID NO: 554; SEQ ID NO: 555; SEQ ID NO: 556; SEQ ID NO: 557; SEQ ID NO: 558; SEQ ID NO: 559; SEQ ID NO: 560; SEQ ID NO: 561; SEQ ID NO: 562; SEQ ID NO: 563; SEQ ID NO: 564; SEQ ID NO: 565; SEQ ID NO: 566; SEQ ID NO: 567; SEQ ID NO: 568; SEQ ID NO: 569; SEQ ID NO: 570; SEQ ID NO: 571; SEQ ID NO: 572; SEQ ID NO: 573; SEQ ID NO: 574; SEQ ID NO: 575; SEQ ID NO: 576; SEQ ID NO: 577; SEQ ID NO: 578; SEQ ID NO: 579; SEQ ID NO: 580; SEQ ID NO: 581; SEQ ID NO: 582; SEQ ID NO: 583; SEQ ID NO: 584; SEQ ID NO: 585; SEQ ID NO: 586; SEQ ID NO: 587; SEQ ID NO: 588; SEQ ID NO: 589; SEQ ID NO: 590; SEQ ID NO: 591; SEQ ID NO: 592; SEQ ID NO: 593; SEQ ID NO: 594; SEQ ID NO: 595; SEQ ID NO: 596; SEQ ID NO: 597; SEQ ID NO: 598; SEQ ID NO: 599; SEQ ID NO: 600; SEQ ID NO: 601; SEQ ID NO: 602; SEQ ID NO: 603; SEQ ID NO: 604; SEQ ID NO: 605; SEQ ID NO: 606; SEQ ID NO: 607; SEQ ID NO: 608; SEQ ID NO: 609; SEQ ID NO: 610; SEQ ID NO: 611; SEQ ID NO: 612; SEQ ID NO: 613; SEQ ID NO: 614; SEQ ID NO: 615; SEQ ID NO: 616; SEQ ID NO: 617; SEQ ID NO: 618; SEQ ID NO: 619; SEQ ID NO: 620; SEQ ID NO: 621; SEQ ID NO: 622; SEQ ID NO: 623; SEQ ID NO-624; SEQ ID NO: 625; SEQ ID NO: 626; SEQ ID NO: 627; SEQ ID NO: 628; SEQ ID NO: 629; SEQ ID NO: 630; SEQ ID NO: 631; SEQ ID NO: 632; SEQ ID NO: 633; SEQ ID NO: 634; SEQ ID NO: 635; SEQ ID NO: 636; SEQ ID NO: 637; SEQ ID NO: 638; SEQ ID NO: 639; SEQ ID NO: 640; SEQ ID NO: 641; SEQ ID NO: 642; SEQ ID NO: 643; SEQ ID NO: 644; SEQ ID NO: 645; SEQ ID NO: 646; SEQ ID NO: 647; SEQ ID NO: 648; SEQ ID NO: 649; SEQ ID NO: 650; SEQ ID NO: 651; SEQ ID NO: 652; SEQ ID NO: 653; SEQ ID NO: 654; SEQ ID NO: 655; SEQ ID NO: 656; SEQ ID NO: 657; SEQ ID NO: 658; SEQ ID NO: 659; SEQ ID NO: 660; SEQ ID NO: 661; SEQ ID NO: 662; SEQ ID NO: 663; SEQ ID NO: 664; SEQ ID NO: 665; SEQ ID NO: 666; SEQ ID NO: 667; SEQ ID NO: 668; SEQ ID NO: 669; SEQ ID NO: 670; SEQ ID NO: 671; SEQ ID NO: 672; SEQ ID NO: 673; SEQ ID NO: 674; SEQ ID NO: 675; SEQ ID NO: 676; SEQ ID NO: 677; SEQ ID NO: 678; SEQ ID NO: 679; SEQ ID NO: 680; SEQ ID NO: 681; SEQ ID NO: 682; SEQ ID NO: 683; SEQ ID NO: 684; SEQ ID NO: 685; SEQ ID NO: 686; SEQ ID NO: 687; SEQ ID NO: 688; SEQ ID NO: 689; SEQ ID NO: 690; SEQ ID NO: 691; SEQ ID NO: 692; SEQ ID NO: 693; SEQ ID NO: 694; SEQ ID NO: 695; SEQ ID NO: 696; SEQ ID NO: 697; SEQ ID NO: 698; SEQ ID NO: 699; SEQ ID NO: 700; SEQ ID NO: 701; SEQ ID NO: 702; SEQ ID NO: 703; SEQ ID NO: 704; SEQ ID NO: 705; SEQ ID NO: 706; SEQ ID NO: 707; SEQ ID NO: 708; SEQ ID NO: 709; SEQ ID NO: 710; SEQ ID NO: 711; SEQ ID NO: 712; SEQ ID NO: 713; SEQ ID NO: 714; SEQ ID NO: 715; SEQ ID NO: 716; SEQ ID NO: 717; SEQ ID NO: 718; SEQ ID NO: 719; SEQ ID NO: 720; SEQ ID NO: 721; SEQ ID NO: 722; SEQ ID NO: 723; SEQ ID NO: 724; SEQ ID NO: 725; SEQ ID NO: 726; SEQ ID NO: 727; SEQ ID NO: 728; SEQ ID NO: 729; SEQ ID NO: 730; SEQ ID NO: 731; SEQ ID NO: 732; SEQ ID NO: 733; SEQ ID NO: 734; SEQ ID NO: 735; SEQ ID NO: 736; SEQ ID NO: 737; SEQ ID NO: 738; SEQ ID NO: 739; SEQ ID NO: 740; SEQ ID NO: 741; SEQ ID NO: 742; SEQ ID NO: 743; SEQ ID NO: 744; SEQ ID NO: 745; SEQ ID NO: 746; SEQ ID NO: 747; SEQ ID NO: 748; SEQ ID NO: 749; SEQ ID NO: 750; SEQ ID NO: 751; SEQ ID NO: 752; SEQ ID NO: 753; SEQ ID NO: 754; SEQ ID NO: 755; SEQ ID NO: 756; SEQ ID NO: 757; SEQ ID NO: 758; SEQ ID NO: 759; SEQ ID NO: 760; SEQ ID NO: 761; SEQ ID NO: 762; SEQ ID NO: 763; SEQ ID NO: 764; SEQ ID NO: 765; SEQ ID NO: 766; SEQ ID NO: 767; SEQ ID NO: 768; SEQ ID NO: 769; SEQ ID NO: 770; SEQ ID NO: 771; SEQ ID NO: 772; SEQ ID NO: 773; SEQ ID NO: 774; SEQ ID NO: 775; SEQ ID NO: 776; SEQ ID NO: 777; SEQ ID NO: 778; SEQ ID NO: 779; SEQ ID NO: 780; SEQ ID NO: 781; SEQ ID NO: 782; SEQ ID NO: 783; SEQ ID NO: 784; SEQ ID NO: 785; SEQ ID NO: 786; SEQ ID NO: 787; SEQ ID NO: 788; SEQ ID NO: 789; SEQ ID NO: 790; SEQ ID NO: 791; SEQ ID NO: 792; SEQ ID NO: 793; SEQ ID NO: 794; SEQ ID NO: 795; SEQ ID NO: 796; SEQ ID NO: 797; SEQ ID NO: 798; SEQ ID NO: 799; SEQ ID NO: 800; SEQ ID NO: 801; SEQ ID NO: 802; SEQ ID NO: 803; SEQ ID NO: 804; SEQ ID NO: 805; SEQ ID NO: 806; SEQ ID NO: 807; SEQ ID NO: 808; SEQ ID NO: 809; SEQ ID NO: 810; SEQ ID NO: 811; SEQ ID NO: 812; SEQ ID NO: 813; SEQ ID NO: 814; SEQ ID NO: 815; SEQ ID NO: 816; SEQ ID NO: 817; SEQ ID NO: 818; SEQ ID NO: 819; SEQ ID NO: 820; SEQ ID NO: 821; SEQ ID NO: 822; SEQ ID NO: 823; SEQ ID NO: 824; SEQ ID NO: 825; SEQ ID NO: 826; SEQ ID NO: 827; SEQ ID NO: 828; SEQ ID NO: 829; SEQ ID NO: 830; SEQ ID NO: 831; SEQ ID NO: 832; SEQ ID NO: 833; SEQ ID NO: 834; SEQ ID NO: 835; SEQ ID NO: 836; SEQ ID NO: 837; SEQ ID NO: 838; SEQ ID NO: 839; SEQ ID NO: 840; SEQ ID NO: 841; SEQ ID NO: 842; SEQ ID NO: 843; SEQ ID NO: 844; SEQ ID NO: 845; SEQ ID NO: 846; SEQ ID NO: 847; SEQ ID NO: 848; SEQ ID NO: 849; SEQ ID NO: 850; SEQ ID NO: 851; SEQ ID NO: 852; SEQ ID NO: 853; SEQ ID NO: 854; SEQ ID NO: 855; SEQ ID NO: 856; SEQ ID NO: 857; SEQ ID NO: 858; SEQ ID NO: 859; SEQ ID NO: 860; SEQ ID NO: 861; SEQ ID NO: 862; SEQ ID NO: 863; SEQ ID NO: 864; SEQ ID NO: 865; SEQ ID NO: 866; SEQ ID NO: 867; SEQ ID NO: 868; SEQ ID NO: 869; SEQ ID NO: 870; SEQ ID NO: 871; SEQ ID NO: 872; SEQ ID NO: 873; SEQ ID NO: 874; SEQ ID NO: 875; SEQ ID NO: 876; SEQ ID NO: 877; SEQ ID NO: 878; SEQ ID NO: 879; SEQ ID NO: 880; SEQ ID NO: 881; SEQ ID NO: 882; SEQ ID NO: 883; SEQ ID NO: 884; SEQ ID NO: 885; SEQ ID NO: 886; SEQ ID NO: 887; SEQ ID NO: 888; SEQ ID NO: 889; SEQ ID NO: 890; SEQ ID NO: 891; SEQ ID NO: 892; SEQ ID NO: 893; SEQ ID NO: 894; SEQ ID NO: 895; SEQ ID NO: 896; SEQ ID NO: 897; SEQ ID NO: 898; SEQ ID NO: 899; SEQ ID NO: 900; SEQ ID NO: 901; SEQ ID NO: 902; SEQ ID NO: 903; SEQ ID NO: 904; SEQ ID NO: 905; SEQ ID NO: 906; SEQ ID NO: 907; SEQ ID NO: 908; SEQ ID NO: 909; SEQ ID NO: 910; SEQ ID NO: 911; SEQ ID NO: 912; SEQ ID NO: 913; SEQ ID NO: 914; SEQ ID NO: 915; SEQ ID NO: 916; SEQ ID NO: 917; SEQ ID NO: 918; SEQ ID NO: 919; SEQ ID NO: 920; SEQ ID NO: 921; SEQ ID NO: 922; SEQ ID NO: 923; SEQ ID NO: 924; SEQ ID NO: 925; SEQ ID NO: 926; SEQ ID NO: 927; SEQ ID NO: 928; SEQ ID NO: 929; SEQ ID NO: 930; SEQ ID NO: 931; SEQ ID NO: 932; SEQ ID NO: 933; SEQ ID NO: 934; SEQ ID NO: 935; SEQ ID NO: 936; SEQ ID NO: 937; SEQ ID NO: 938; SEQ ID NO: 939; SEQ ID NO: 940; SEQ ID NO: 941; SEQ ID NO: 942; SEQ ID NO: 943; SEQ ID NO: 944; SEQ ID NO: 945; SEQ ID NO: 946; SEQ ID NO: 947; SEQ ID NO: 948; SEQ ID NO: 949; SEQ ID NO: 950; SEQ ID NO: 951; SEQ ID NO: 952; SEQ ID NO: 953; SEQ ID NO: 954; SEQ ID NO: 955; SEQ ID NO: 956; SEQ ID NO: 957; SEQ ID NO: 958; SEQ ID NO: 959; SEQ ID NO: 960; SEQ ID NO: 961; SEQ ID NO: 962; SEQ ID NO: 963; SEQ ID NO: 964; SEQ ID NO: 965; SEQ ID NO: 966; SEQ ID NO: 967; SEQ ID NO: 968; SEQ ID NO: 969; SEQ ID NO: 970; SEQ ID NO: 971; SEQ ID NO: 972; SEQ ID NO: 973; SEQ ID NO: 974; SEQ ID NO: 975; SEQ ID NO: 976; SEQ ID NO: 977; SEQ ID NO: 978; SEQ ID NO: 979; SEQ ID NO: 980; SEQ ID NO: 981; SEQ ID NO: 982; SEQ ID NO: 983; SEQ ID NO: 984; SEQ ID NO: 985; SEQ ID NO: 986; SEQ ID NO: 987; SEQ ID NO: 988; SEQ ID NO: 989; SEQ ID NO: 990; SEQ ID NO: 991; SEQ ID NO: 992; SEQ ID NO: 993; SEQ ID NO: 994; SEQ ID NO: 995; SEQ ID NO: 996; SEQ ID NO: 997; SEQ ID NO: 998; SEQ ID NO: 999; SEQ ID NO: 1000; SEQ ID NO: 1001; SEQ ID NO: 1002; SEQ ID NO: 1003; SEQ ID NO: 1004; SEQ ID NO: 1005; SEQ ID NO: 1006; SEQ ID NO: 1007; SEQ ID NO: 1008; SEQ ID NO:1009; SEQ ID NO: 1010; SEQ ID NO:1011; SEQ ID NO: 1012; SEQ ID NO: 1013; SEQ ID NO: 1014; SEQ ID NO: 1015; SEQ ID NO: 1016; SEQ ID NO: 1017; SEQ ID NO: 1018; SEQ ID NO: 1019; SEQ ID NO: 1020; SEQ ID NO: 1021; SEQ ID NO: 1.022; SEQ ID NO: 1023; SEQ ID NO: 1024; SEQ ID NO: 1025; SEQ ID NO: 1026; SEQ ID NO: 1027; SEQ ID NO: 1028; SEQ ID NO: 1029; SEQ ID NO: 1030; SEQ ID NO: 1031; SEQ ID NO: 1032; SEQ ID NO: 1033; SEQ ID NO: 1034; SEQ ID NO: 1035; SEQ ID NO: 1036; SEQ ID NO: 1037; SEQ ID NO: 1038; SEQ ID NO: 1039; SEQ ID NO: 1040; SEQ ID NO: 1041; SEQ ID NO: 1042; SEQ ID NO: 1043; SEQ ID NO: 1044; SEQ ID NO: 1045; SEQ ID NO: 1046; SEQ ID NO: 1047; SEQ ID NO: 1048; SEQ ID NO: 1049; SEQ ID NO: 1050; SEQ ID NO: 1051; SEQ ID NO: 1052; SEQ ID NO: 1053; SEQ ID NO: 1054; SEQ ID NO: 1055; SEQ ID NO: 1056; SEQ ID NO: 1057; SEQ ID NO: 1058; SEQ ID NO: 1059; SEQ ID NO: 1060; SEQ ID NO: 1061; SEQ ID NO: 1062; SEQ ID NO: 1063; SEQ ID NO: 1064; SEQ ID NO: 1065; SEQ ID NO: 1066; SEQ ID NO: 1067; SEQ ID NO: 1068; SEQ ID NO: 1069; SEQ ID NO: 1070; SEQ ID NO: 1071; SEQ ID NO: 1072; SEQ ID NO: 1073; SEQ ID NO: 1074; SEQ ID NO: 1075; SEQ ID NO: 1076; SEQ ID NO: 1077; SEQ ID NO: 1078; SEQ ID NO: 1079; SEQ ID NO: 1080; SEQ ID NO: 1081; SEQ ID NO: 1082; SEQ ID NO: 1083; SEQ ID NO: 1084; SEQ ID NO: 1085; SEQ ID NO: 1086; SEQ ID NO: 1087; SEQ ID NO: 1088; SEQ ID NO: 1089; SEQ ID NO: 1090; SEQ ID NO: 1091; SEQ ID NO: 1092; SEQ ID NO: 1093; SEQ ID NO: 1094; SEQ ID NO: 1095; SEQ ID NO: 1096; SEQ ID NO: 1097; SEQ ID NO: 1098; SEQ ID NO: 1099; SEQ ID NO: 1100; SEQ ID NO: 1101; SEQ ID NO: 1102; SEQ ID NO: 1103; SEQ ID NO: 1104; SEQ ID NO: 1105; SEQ ID NO: 1106; SEQ ID NO: 1107; SEQ ID NO: 1108; SEQ ID NO:1109; SEQ ID NO: 1110; SEQ ID NO: 1111; SEQ ID NO: 1112; SEQ ID NO: 1113; SEQ ID NO: 1114; SEQ ID NO: 1115; SEQ ID NO: 1116; SEQ ID NO: 1117; SEQ ID NO: 1118; SEQ ID NO:1119; SEQ ID NO: 1120; SEQ ID NO: 1121; SEQ ID NO: 1122; SEQ ID NO: 1123; SEQ ID NO: 1124; SEQ ID NO: 1125; SEQ ID NO: 1126; SEQ ID NO: 1127; SEQ ID NO: 1128; SEQ ID NO: 1129; SEQ ID NO: 1130; SEQ ID NO: 1131; SEQ ID NO: 1132; SEQ ID NO: 1133; SEQ ID NO: 1134; SEQ ID NO: 1135; SEQ ID NO: 1136; SEQ ID NO: 1137; SEQ ID NO: 1138; SEQ ID NO: 1139; SEQ ID NO: 1140; SEQ ID NO: 1141; SEQ ID NO: 1142; SEQ ID NO: 1143; SEQ ID NO: 1144; SEQ ID NO: 1145; SEQ ID NO: 1146; SEQ ID NO: 1147; SEQ ID NO: 1148; SEQ ID NO: 1149; SEQ ID NO: 1150; SEQ ID NO: 1151; SEQ ID NO: 1152; SEQ ID NO: 1153; SEQ ID NO: 1154; SEQ ID NO: 1155; SEQ ID NO: 1156; SEQ ID NO: 1157; SEQ ID NO: 1158; SEQ ID NO: 1159; SEQ ID NO: 1160; SEQ ID NO: 1161; SEQ ID NO: 1162; SEQ ID NO: 1163; SEQ ID NO: 1164; SEQ ID NO: 1165; SEQ ID NO: 1166; SEQ ID NO: 1167; SEQ ID NO: 1168; SEQ ID NO: 1169; SEQ ID NO: 1170; SEQ ID NO: 1171; SEQ ID NO: 1172; SEQ ID NO: 1173; SEQ ID NO:1174; SEQ ID NO: 1175; SEQ ID NO:1176; SEQ ID NO: 1177; SEQ ID NO: 1178; SEQ ID NO: 1179; SEQ ID NO: 1180; SEQ ID NO: 1181; SEQ ID NO: 1182; SEQ ID NO: 1183; SEQ ID NO: 1184; SEQ ID NO: 1185; SEQ ID NO: 1186; SEQ ID NO: 1187; SEQ ID NO: 1188; SEQ ID NO: 1189; SEQ ID NO: 1190; SEQ ID NO: 1191; SEQ ID NO: 1192; SEQ ID NO: 1193; SEQ ID NO: 1194; SEQ ID NO: 1195; SEQ ID NO: 1196; SEQ ID NO: 1197; SEQ ID NO: 1198; SEQ ID NO: 1199; SEQ ID NO: 1200; SEQ ID NO: 1201; SEQ ID NO: 1202; SEQ ID NO: 1203; SEQ ID NO: 1204; SEQ ID NO: 1205; SEQ ID NO: 1206; SEQ ID NO: 1207; SEQ ID NO: 1208; SEQ ID NO: 1209; SEQ ID NO: 1210; SEQ ID NO: 1211; SEQ ID NO: 1212; SEQ ID NO: 1213; SEQ ID NO: 1214; SEQ ID NO: 1215; SEQ ID NO: 1216; SEQ ID NO: 1217; SEQ ID NO: 1218; SEQ ID NO: 1219; SEQ ID NO: 1220; SEQ ID NO: 1221; SEQ ID NO: 1222; SEQ ID NO: 1223; SEQ ID NO: 1224; SEQ ID NO: 1225; SEQ ID NO: 1226; SEQ ID NO: 1227; SEQ ID NO: 1228; SEQ ID NO: 1229; SEQ ID NO: 1230; SEQ ID NO: 1231; SEQ ID NO: 1232; SEQ ID NO: 1233; SEQ ID NO: 1234; SEQ ID NO: 1235; SEQ ID NO: 1236; SEQ ID NO: 1237; SEQ ID NO: 1238; SEQ ID NO: 1239; SEQ ID NO: 1240; SEQ ID NO: 1241; SEQ ID NO: 1242; SEQ ID NO: 1243; SEQ ID NO: 1244; SEQ ID NO: 1245; SEQ ID NO: 1246; SEQ ID NO: 1247; SEQ ID NO: 1248; SEQ ID NO: 1249; SEQ ID NO: 1250; SEQ ID NO: 1251; SEQ ID NO: 1252; SEQ ID NO: 1253; SEQ ID NO: 1254; SEQ ID NO: 1255; SEQ ID NO: 1256; SEQ ID NO: 1257; SEQ ID NO: 1258; SEQ ID NO: 1259; SEQ ID NO: 1260; SEQ ID NO: 1261; SEQ ID NO: 1262; SEQ ID NO: 1263; SEQ ID NO: 1264; SEQ ID NO: 1265; SEQ ID NO: 1266; SEQ ID NO: 1267; SEQ ID NO: 1268; SEQ ID NO: 1269; SEQ ID NO: 1270; SEQ ID NO: 1271; SEQ ID NO: 1272; SEQ ID NO: 1273; SEQ ID NO: 1274; SEQ ID NO: 1275; SEQ ID NO: 1276; SEQ ID NO: 1277; SEQ ID NO: 1278; SEQ ID NO: 1279; SEQ ID NO: 1280; SEQ ID NO: 1281; SEQ ID NO: 1282; SEQ ID NO: 1283; SEQ ID NO: 1284; SEQ ID NO: 1285; SEQ ID NO: 1286; SEQ ID NO: 1287; SEQ ID NO: 1288; SEQ ID NO: 1289; SEQ ID NO: 1290; SEQ ID NO: 1291; SEQ ID NO: 1292; SEQ ID NO: 1293; SEQ ID NO: 1294; SEQ ID NO: 1295; SEQ ID NO: 1296; SEQ ID NO: 1297; SEQ ID NO: 1298; SEQ ID NO: 1299; SEQ ID NO: 1300; SEQ ID NO: 1301; SEQ ID NO: 1302; SEQ ID NO: 1303; SEQ ID NO: 1304; SEQ ID NO: 1305; SEQ ID NO: 1306; SEQ ID NO: 1307; SEQ ID NO: 1308; SEQ ID NO: 1309; SEQ ID NO: 1310; SEQ ID NO: 1311I; SEQ ID NO: 1312; SEQ ID NO: 1313; SEQ ID NO: 1314; SEQ ID NO: 1315; SEQ ID NO: 1316; SEQ ID NO: 1317; SEQ ID NO: 1318; SEQ ID NO: 1319; SEQ ID NO: 1320; SEQ ID NO: 1321; SEQ ID NO: 1322; SEQ ID NO: 1323; SEQ ID NO: 1324; SEQ ID NO: 1325; SEQ ID NO: 1326; SEQ ID NO: 1327; SEQ ID NO: 1328; SEQ ID NO: 1329; SEQ ID NO: 1330; SEQ ID NO: 1331; SEQ ID NO: 1332; SEQ ID NO: 1333; SEQ ID NO: 1334; SEQ ID NO: 1335; SEQ ID NO: 1336; SEQ ID NO: 1337; SEQ ID NO: 1338; SEQ ID NO: 1339; SEQ ID NO: 1340; SEQ ID NO: 1341; SEQ ID NO: 1342; SEQ ID NO: 1343; SEQ ID NO: 1344; SEQ ID NO: 1345; SEQ ID NO: 1346; SEQ ID NO: 1347; SEQ ID NO: 1348; SEQ ID NO: 1349; SEQ ID NO: 1350; SEQ ID NO: 1351; SEQ ID NO: 1352; SEQ ID NO: 1353; SEQ ID NO: 1354; SEQ ID NO: 1355; SEQ ID NO: 1356; SEQ ID NO: 1357; SEQ ID NO: 1358; SEQ ID NO: 1359; SEQ ID NO: 1360; SEQ ID NO: 1361; SEQ ID NO: 1362; SEQ ID NO: 1363; SEQ ID NO: 1364; SEQ ID NO: 1365; SEQ ID NO: 1366; SEQ ID NO: 1367; SEQ ID NO: 1368; SEQ ID NO: 1369; SEQ ID NO: 1370; SEQ ID NO: 1371; SEQ ID NO: 1372; SEQ ID NO: 1373; SEQ ID NO: 1374; SEQ ID NO: 1375; SEQ ID NO: 1376; SEQ ID NO: 1377; SEQ ID NO: 1378; SEQ ID NO: 1379; SEQ ID NO: 1380; SEQ ID NO: 1381; SEQ ID NO: 1382; SEQ ID NO: 1383; SEQ ID NO: 1384; SEQ ID NO: 1385; SEQ ID NO: 1386; SEQ ID NO: 1387; SEQ ID NO: 1388; SEQ ID NO: 1389; SEQ ID NO: 1390; SEQ ID NO: 1391; SEQ ID NO: 1392; SEQ ID NO: 1393; SEQ ID NO: 1394; SEQ ID NO: 1395; SEQ ID NO: 1396; SEQ ID NO: 1397; SEQ ID NO: 1398; SEQ ID NO: 1399; SEQ ID NO: 1400; SEQ ID NO: 1401; SEQ ID NO: 1402; SEQ ID NO: 1403; SEQ ID NO: 1404; SEQ ID NO: 1405; SEQ ID NO: 1406; SEQ ID NO: 1407; SEQ ID NO: 1408; SEQ ID NO: 1409; SEQ ID NO: 1410; SEQ ID NO: 1411; SEQ ID NO: 1412; SEQ ID NO: 1413; SEQ ID NO: 1414; SEQ ID NO: 1415; SEQ ID NO: 1416; SEQ ID NO: 1417; SEQ ID NO: 1418; SEQ ID NO: 1419; SEQ ID NO: 1420; SEQ ID NO: 1421; SEQ ID NO: 1422; SEQ ID NO: 1423; SEQ ID NO: 1424; SEQ ID NO: 1425; SEQ ID NO: 1426; SEQ ID NO: 1427; SEQ ID NO: 1428; SEQ ID NO: 1429; SEQ ID NO: 1430; SEQ ID NO: 1431; SEQ ID NO: 1432; SEQ ID NO: 1433; SEQ ID NO: 1434; SEQ ID NO: 1435; SEQ ID NO: 1436; SEQ ID NO: 1437; SEQ ID NO: 1438; SEQ ID NO: 1439; SEQ ID NO: 1440; SEQ ID NO: 1441; SEQ ID NO: 1442; SEQ ID NO: 1443; SEQ ID NO: 1444; SEQ ID NO: 1445; SEQ ID NO: 1446; SEQ ID NO: 1447; SEQ ID NO: 1448; SEQ ID NO: 1449; SEQ ID NO: 1450; SEQ ID NO: 1451; SEQ ID NO: 1452; SEQ ID NO: 1453; SEQ ID NO: 1454; SEQ ID NO: 1455; SEQ ID NO: 1456; SEQ ID NO: 1457; SEQ ID NO: 1458; SEQ ID NO: 1459; SEQ ID NO: 1460; SEQ ID NO: 1461; SEQ ID NO: 1462; SEQ ID NO: 1463; SEQ ID NO: 1464; SEQ ID NO: 1465; SEQ ID NO: 1466; SEQ ID NO: 1467; SEQ ID NO: 1468; SEQ ID NO: 1469; SEQ ID NO: 1470; SEQ ID NO: 1471; SEQ ID NO: 1472; SEQ ID NO: 1473; SEQ ID NO: 1474; SEQ ID NO: 1475; SEQ ID NO: 1476; SEQ ID NO: 1477; SEQ ID NO: 1478; SEQ ID NO: 1479; SEQ ID NO: 1480; SEQ ID NO: 1481; SEQ ID NO: 1482; SEQ ID NO: 1483; SEQ ID NO: 1484; SEQ ID NO: 1485; SEQ ID NO: 1486; SEQ ID NO: 1487; SEQ ID NO: 1488; SEQ ID NO: 1489; SEQ ID NO: 1490; SEQ ID NO: 1491; SEQ ID NO: 1492; SEQ ID NO: 1493; SEQ ID NO: 1494; SEQ ID NO: 1495; SEQ ID NO: 1496; SEQ ID NO: 1497; SEQ ID NO: 1498; SEQ ID NO: 1499; SEQ ID NO: 1500; SEQ ID NO: 1501; SEQ ID NO: 1502; SEQ ID NO: 1503; SEQ ID NO: 1504; SEQ ID NO: 1505; SEQ ID NO: 1506; SEQ ID NO: 1507; SEQ ID NO: 1508; SEQ ID NO: 1509; SEQ ID NO: 1510; SEQ ID NO: 1511; SEQ ID NO: 1512; SEQ ID NO: 1513; SEQ ID NO: 1514; SEQ ID NO: 1515; SEQ ID NO: 1516; SEQ ID NO: 1517; SEQ ID NO: 1518; SEQ ID NO: 1519; SEQ ID NO: 1520; SEQ ID NO: 1521; SEQ ID NO: 1522; SEQ ID NO: 1523; SEQ ID NO: 1524; SEQ ID NO: 1525; SEQ ID NO: 1526; SEQ ID NO: 1527; SEQ ID NO: 1528; SEQ ID NO: 1529; SEQ ID NO: 1530; SEQ ID NO: 1531; SEQ ID NO: 1532; SEQ ID NO: 1533; SEQ ID NO: 1534; SEQ ID NO: 1535; SEQ ID NO: 1536; SEQ ID NO: 1537; SEQ ID NO: 1538; SEQ ID NO: 1539; SEQ ID NO: 1540; SEQ ID NO: 1541; SEQ ID NO: 1542; SEQ ID NO: 1543; SEQ ID NO: 1544; SEQ ID NO: 1545; SEQ ID NO: 1546; SEQ ID NO: 1547; SEQ ID NO: 1548; SEQ ID NO: 1549; SEQ ID NO: 1550; SEQ ID NO: 1551; SEQ ID NO: 1552; SEQ ID NO: 1553; SEQ ID NO: 1554; SEQ ID NO: 1555; SEQ ID NO: 1556; SEQ ID NO: 1557; SEQ ID NO: 1558; SEQ ID NO: 1559; SEQ ID NO: 1560; SEQ ID NO: 1561; SEQ ID NO: 1562; SEQ ID NO: 1563; SEQ ID NO: 1564; SEQ ID NO: 1565; SEQ ID NO: 1566; SEQ ID NO: 1567; SEQ ID NO: 1568; SEQ ID NO: 1569; SEQ ID NO: 1570; SEQ ID NO: 1571; SEQ ID NO: 1572; SEQ ID NO: 1573; SEQ ID NO: 1574; SEQ ID NO: 1575; SEQ ID NO: 9525; SEQ ID NO: 9526; SEQ ID NO: 9527; SEQ ID NO: 9528; SEQ ID NO: 9529; SEQ ID NO: 9530; SEQ ID NO: 9531; SEQ ID NO: 9532; SEQ ID NO: 9533; SEQ ID NO: 9534; SEQ ID NO: 9535; SEQ ID NO: 9536; SEQ ID NO: 9537; SEQ ID NO: 9538; SEQ ID NO: 9539; SEQ ID NO: 9540; SEQ ID NO: 9541; SEQ ID NO: 9542; SEQ ID NO: 9543; SEQ ID NO: 9544; SEQ ID NO: 9545; SEQ ID NO: 9546; SEQ ID NO: 9547; SEQ ID NO: 9548; SEQ ID NO: 9549; SEQ ID NO: 9550; SEQ ID NO: 9551; SEQ ID NO: 9552; SEQ ID NO: 9553; SEQ ID NO: 9554; SEQ ID NO: 9555; SEQ ID NO: 9556; SEQ ID NO: 9557; SEQ ID NO: 9558; SEQ ID NO: 9559; SEQ ID NO: 9560; SEQ ID NO: 9561; SEQ ID NO: 9562; SEQ ID NO: 9563; SEQ ID NO: 9564; SEQ ID NO: 9565; SEQ ID NO: 9566; SEQ ID NO: 9567; SEQ ID NO: 9568; SEQ ID NO: 9569; SEQ ID NO: 9570; SEQ ID NO: 9571; SEQ ID NO: 9572; SEQ ID NO: 9573; SEQ ID NO: 9574; SEQ ID NO: 9575; SEQ ID NO: 9576; SEQ ID NO: 9577; SEQ ID NO: 9578; SEQ ID NO: 9579; SEQ ID NO: 9580; SEQ ID NO: 9581; SEQ ID NO: 9582; SEQ ID NO: 9583; SEQ ID NO: 9584; SEQ ID NO: 9585; SEQ ID NO: 9586; SEQ ID NO: 9587; SEQ ID NO: 9588; SEQ ID NO: 9589; SEQ ID NO: 9590; SEQ ID NO: 9591 and SEQ ID NO: 9592.

[0117] In one embodiment, the H. pylori cell envelope polypeptide or a fragment thereof is an H. pylori flagella-associated polypeptide or a fragment thereof encoded by a nucleic acid having a nucleotide sequence selected from the group consisting of SEQ ID NO: 1; SEQ ID NO: 2; SEQ ID NO: 3; SEQ ID NO: 4; SEQ ID NO: 5; SEQ ID NO: 6; SEQ ID NO: 7; SEQ ID NO: 8; SEQ ID NO: 9; SEQ ID NO: 10; SEQ ID NO: 11; SEQ ID NO: 12; SEQ ID NO: 13; SEQ ID NO: 14; SEQ ID NO: 15; SEQ ID NO: 16; SEQ ID NO: 17; SEQ ID NO: 18; SEQ ID NO: 19; SEQ ID NO: 20; SEQ ID NO: 21; SEQ ID NO: 22; SEQ ID NO: 23; SEQ ID NO: 24; SEQ ID NO: 25; SEQ ID NO: 26; SEQ ID NO: 27; SEQ ID NO: 28; SEQ ID NO: 29; SEQ ID NO: 30; SEQ ID NO: 31; SEQ ID NO: 32; SEQ ID NO: 33; SEQ ID NO: 34; SEQ ID NO: 35; SEQ ID NO: 36; SEQ ID NO: 37; SEQ ID NO: 38; SEQ ID NO: 39; SEQ ID NO: 40; SEQ ID NO: 41; SEQ ID NO: 42; SEQ ID NO: 43; SEQ ID NO: 44; SEQ ID NO: 45; SEQ ID NO: 46; SEQ ID NO: 47; SEQ ID NO: 48; SEQ ID NO: 49; SEQ ID NO: 50; SEQ ID NO: 51; SEQ ID NO: 52; SEQ ID NO: 53; SEQ ID NO: 54; SEQ ID NO: 55; SEQ ID NO: 56; SEQ ID NO: 57; SEQ ID NO: 58; SEQ ID NO: 59; SEQ ID NO: 60; SEQ ID NO: 61; SEQ ID NO: 62; SEQ ID NO: 63; SEQ ID NO: 64; SEQ ID NO: 65; SEQ ID NO: 66; SEQ ID NO: 67; SEQ ID NO: 68; SEQ ID NO: 69; SEQ ID NO: 70; SEQ ID NO: 71; SEQ ID NO: 72; SEQ ID NO: 73; SEQ ID NO: 74; SEQ ID NO: 75; SEQ ID NO: 76; SEQ ID NO: 77; SEQ ID NO: 78; SEQ ID NO: 79; SEQ ID NO: 80; SEQ ID NO: 81; SEQ ID NO: 82; SEQ ID NO: 83; SEQ ID NO: 84; SEQ ID NO: 85; SEQ ID NO: 86; SEQ ID NO: 87; SEQ ID NO: 88; SEQ ID NO: 89; SEQ ID NO: 90; SEQ ID NO: 91; SEQ ID NO: 92; SEQ ID NO: 93; SEQ ID NO: 94; SEQ ID NO: 95; SEQ ID NO: 96; SEQ ID NO:97; SEQ ID NO: 98; SEQ ID NO: 99; SEQ ID NO: 100; SEQ ID NO: 101; SEQ ID NO: 102; SEQ ID NO: 103; SEQ ID NO: 9525; SEQ ID NO: 9526 and SEQ ID NO: 9527.

[0118] In another embodiment, the H. pylori cell envelope polypeptide or a fragment thereof is an H. pylori outer membrane polypeptide or a fragment thereof encoded by a nucleic acid having a nucleotide sequence selected from the group consisting of SEQ ID NO: 104; SEQ ID NO: 105; SEQ ID NO: 106; SEQ ID NO: 107; SEQ ID NO: 108; SEQ ID NO: 109; SEQ ID NO: 110; SEQ ID NO:111; SEQ ID NO: 112; SEQ ID NO: 113; SEQ ID NO: 114; SEQ ID NO: 115; SEQ ID NO: 116; SEQ ID NO: 117; SEQ ID NO: 118; SEQ ID NO: 119; SEQ ID NO: 120; SEQ ID NO: 121; SEQ ID NO: 122; SEQ ID NO: 123; SEQ ID NO: 124; SEQ ID NO: 125; SEQ ID NO: 126; SEQ ID NO: 127; SEQ ID NO: 128; SEQ ID NO: 129; SEQ ID NO: 130; SEQ ID NO: 131; SEQ ID NO: 132; SEQ ID NO: 133; SEQ ID NO: 134; SEQ ID NO: 135; SEQ ID NO: 136; SEQ ID NO: 137; SEQ ID NO: 138; SEQ ID NO: 139; SEQ ID NO: 140; SEQ ID NO: 141; SEQ ID NO: 142; SEQ ID NO: 143; SEQ ID NO: 144; SEQ ID NO: 145: SEQ ID NO: 146; SEQ ID NO: 147; SEQ ID NO: 148; SEQ ID NO: 149; SEQ ID NO: 150; SEQ ID NO: 151; SEQ ID NO: 152; SEQ ID NO: 153; SEQ ID NO: 154; SEQ ID NO: 155; SEQ ID NO: 156; SEQ ID NO: 157; SEQ ID NO: 158; SEQ ID NO: 159; SEQ ID NO: 160; SEQ ID NO: 161; SEQ ID NO: 162; SEQ ID NO: 163; SEQ ID NO: 164; SEQ ID NO: 165; SEQ ID NO: 166; SEQ ID NO: 167; SEQ ID NO: 168; SEQ ID NO: 169; SEQ ID NO: 170; SEQ ID NO: 171; SEQ ID NO: 172; SEQ ID NO: 173; SEQ ID NO: 174; SEQ ID NO: 175; SEQ ID NO: 176; SEQ ID NO: 177; SEQ ID NO: 178; SEQ ID NO: 179; SEQ ID NO: 180; SEQ ID NO: 181; SEQ ID NO: 182; SEQ ID NO: 183; SEQ ID NO: 184; SEQ ID NO: 185; SEQ ID NO: 186; SEQ ID NO: 187; SEQ ID NO: 188; SEQ ID NO: 189; SEQ ID NO: 190; SEQ ID NO: 191; SEQ ID NO: 192; SEQ ID NO: 193; SEQ ID NO: 194; SEQ ID NO: 195; SEQ ID NO: 196; SEQ ID NO: 197; SEQ ID NO: 198; SEQ ID NO: 199; SEQ ID NO: 200; SEQ ID NO: 201; SEQ ID NO: 202; SEQ ID NO: 203; SEQ ID NO: 204; SEQ ID NO: 205; SEQ ID NO: 206; SEQ ID NO: 207; SEQ ID NO: 208; SEQ ID NO: 209; SEQ ID NO: 210; SEQ ID NO: 211; SEQ ID NO: 212; SEQ ID NO: 213; SEQ ID NO: 214; SEQ ID NO: 215; SEQ ID NO: 216; SEQ ID NO: 217; SEQ ID NO: 218; SEQ ID NO: 219; SEQ ID NO: 220; SEQ ID NO: 221; SEQ ID NO: 222; SEQ ID NO: 223; SEQ ID NO: 224; SEQ ID NO: 225; SEQ ID NO: 226; SEQ ID NO: 227; SEQ ID NO: 228; SEQ ID NO: 229; SEQ ID NO: 230; SEQ ID NO: 231; SEQ ID NO: 232; SEQ ID NO: 233; SEQ ID NO: 234; SEQ ID NO: 235; SEQ ID NO: 236; SEQ ID NO: 237; SEQ ID NO: 238; SEQ ID NO: 239; SEQ ID NO: 240; SEQ ID NO: 241; SEQ ID NO: 242; SEQ ID NO: 243; SEQ ID NO: 244; SEQ ID NO: 245; SEQ ID NO: 246; SEQ ID NO: 247; SEQ ID NO: 248; SEQ ID NO: 249; SEQ ID NO: 250; SEQ ID NO:251; SEQ ID NO: 252; SEQ ID NO: 253; SEQ ID NO: 254; SEQ ID NO: 255; SEQ ID NO: 256; SEQ ID NO: 257; SEQ ID NO: 258; SEQ ID NO: 259; SEQ ID NO: 260; SEQ ID NO: 261; SEQ ID NO: 262; SEQ ID NO: 263; SEQ ID NO: 264; SEQ ID NO: 265; SEQ ID NO: 266; SEQ ID NO: 267; SEQ ID NO: 268; SEQ ID NO: 269; SEQ ID NO: 270; SEQ ID NO: 271; SEQ ID NO: 272; SEQ ID NO: 273; SEQ ID NO: 274; SEQ ID NO: 275; SEQ ID NO: 276; SEQ ID NO: 277; SEQ ID NO: 278; SEQ ID NO: 279; SEQ ID NO: 280; SEQ ID NO: 281; SEQ ID NO: 282; SEQ ID NO: 283; SEQ ID NO: 284; SEQ ID NO: 285; SEQ ID NO: 286; SEQ ID NO: 287; SEQ ID NO: 288; SEQ ID NO: 289; SEQ ID NO: 290; SEQ ID NO: 291; SEQ ID NO: 292; SEQ ID NO: 293; SEQ ID NO: 294; SEQ ID NO: 295; SEQ ID NO: 296; SEQ ID NO: 297; SEQ ID NO: 298; SEQ ID NO: 299; SEQ ID NO: 300; SEQ ID NO: 301; SEQ ID NO: 302; SEQ ID NO: 303; SEQ ID NO: 304; SEQ ID NO: 305; SEQ ID NO: 306; SEQ ID NO: 307; SEQ ID NO: 308; SEQ ID NO: 309; SEQ ID NO: 310; SEQ ID NO: 311; SEQ ID NO:312; SEQ ID NO:313; SEQ ID NO: 314; SEQ ID NO: 315; SEQ ID NO: 316; SEQ ID NO: 317; SEQ ID NO: 318; SEQ ID NO: 319; SEQ ID NO: 320; SEQ ID NO: 321; SEQ ID NO: 322; SEQ ID NO: 323; SEQ ID NO: 324; SEQ ID NO: 325; SEQ ID NO: 326; SEQ ID NO: 327; SEQ ID NO: 328; SEQ ID NO: 329; SEQ ID NO: 330; SEQ ID NO: 331; SEQ ID NO: 332; SEQ ID NO: 333; SEQ ID NO: 334; SEQ ID NO: 335; SEQ ID NO: 336; SEQ ID NO: 337; SEQ ID NO: 338; SEQ ID NO: 339; SEQ ID NO: 340; SEQ ID NO: 341; SEQ ID NO: 342; SEQ ID NO: 343; SEQ ID NO: 344; SEQ ID NO: 345; SEQ ID NO: 346; SEQ ID NO: 347; SEQ ID NO: 348; SEQ ID NO: 349; SEQ ID NO: 350; SEQ ID NO: 351; SEQ ID NO: 352; SEQ ID NO: 353; SEQ ID NO: 354; SEQ ID NO: 355; SEQ ID NO: 356; SEQ ID NO: 357; SEQ ID NO: 358; SEQ ID NO: 359; SEQ ID NO: 360; SEQ ID NO: 361; SEQ ID NO: 362; SEQ ID NO: 363; SEQ ID NO: 364; SEQ ID NO: 365; SEQ ID NO: 366; SEQ ID NO: 367; SEQ ID NO: 368; SEQ ID NO: 369; SEQ ID NO: 370; SEQ ID NO: 371; SEQ ID NO: 372; SEQ ID NO: 373; SEQ ID NO: 374; SEQ ID NO: 375; SEQ ID NO: 376; SEQ ID NO: 377; SEQ ID NO: 378; SEQ ID NO: 379; SEQ ID NO: 380; SEQ ID NO: 381; SEQ ID NO: 382; SEQ ID NO: 383; SEQ ID NO: 384; SEQ ID NO: 385; SEQ ID NO: 386; SEQ ID NO: 387; SEQ ID NO: 388; SEQ ID NO: 389; SEQ ID NO: 390; SEQ ID NO: 391; SEQ ID NO: 392; SEQ ID NO: 393; SEQ ID NO: 394; SEQ ID NO: 395; SEQ ID NO: 396; SEQ ID NO: 397; SEQ ID NO: 398; SEQ ID NO: 399; SEQ ID NO: 400; SEQ ID NO: 401; SEQ ID NO: 402; SEQ ID NO: 403; SEQ ID NO: 404; SEQ ID NO: 405; SEQ ID NO: 406; SEQ ID NO: 407; SEQ ID NO: 408; SEQ ID NO: 409; SEQ ID NO: 410; SEQ ID NO: 411; SEQ ID NO: 412; SEQ ID NO: 413; SEQ ID NO: 414; SEQ ID NO: 415; SEQ ID NO: 416; SEQ ID NO: 417; SEQ ID NO: 418; SEQ ID NO: 419; SEQ ID NO: 420; SEQ ID NO: 421; SEQ ID NO: 422; SEQ ID NO: 423; SEQ ID NO: 424; SEQ ID NO: 425; SEQ ID NO: 426; SEQ ID NO: 427; SEQ ID NO: 428; SEQ ID NO: 429; SEQ ID NO: 430; SEQ ID NO: 431; SEQ ID NO: 432; SEQ ID NO: 433; SEQ ID NO: 434; SEQ ID NO: 435; SEQ ID NO: 436; SEQ ID NO: 437; SEQ ID NO: 438; SEQ ID NO: 439; SEQ ID NO: 440; SEQ ID NO: 441; SEQ ID NO: 442; SEQ ID NO: 443; SEQ ID NO: 444; SEQ ID NO: 445; SEQ ID NO: 446; SEQ ID NO: 447; SEQ ID NO: 448; SEQ ID NO: 449; SEQ ID NO: 450; SEQ ID NO: 451; SEQ ID NO: 452; SEQ ID NO: 453; SEQ ID NO: 454; SEQ ID NO: 455; SEQ ID NO: 456; SEQ ID NO: 457; SEQ ID NO: 458; SEQ ID NO: 459; SEQ ID NO: 460; SEQ ID NO: 461; SEQ ID NO: 462; SEQ ID NO: 463; SEQ ID NO: 464; SEQ ID NO: 465; SEQ ID NO: 466; SEQ ID NO: 467; SEQ ID NO: 468; SEQ ID NO: 469; SEQ ID NO: 470; SEQ ID NO: 471; SEQ ID NO: 472; SEQ ID NO: 473; SEQ ID NO: 474; SEQ ID NO: 475; SEQ ID NO: 476; SEQ ID NO: 477; SEQ ID NO: 478; SEQ ID NO: 479; SEQ ID NO: 480; SEQ ID NO: 481; SEQ ID NO: 482; SEQ ID NO: 483; SEQ ID NO: 484; SEQ ID NO: 485; SEQ ID NO: 486; SEQ ID NO: 487; SEQ ID NO: 488; SEQ ID NO: 489; SEQ ID NO: 490; SEQ ID NO: 491; SEQ ID NO: 492; SEQ ID NO: 493; SEQ ID NO: 494; SEQ ID NO: 495; SEQ ID NO: 496; SEQ ID NO: 497; SEQ ID NO: 498; SEQ ID NO: 499; SEQ ID NO: 500; SEQ ID NO: 501; SEQ ID NO: 502; SEQ ID NO: 503; SEQ ID NO: 504; SEQ ID NO: 505; SEQ ID NO: 506; SEQ ID NO: 507; SEQ ID NO: 508; SEQ ID NO: 509; SEQ ID NO: 510; SEQ ID NO: 9528; SEQ ID NO: 9529; SEQ ID NO: 9530; SEQ ID NO: 9531; SEQ ID NO: 9532; SEQ ID NO: 9533; SEQ ID NO: 9534; SEQ ID NO: 9535 and SEQ ID NO: 9536.

[0119] In another embodiment, the H. pylori outer membrane polypeptide or a fragment thereof is an H. pylori polypeptide having a terminal phenylalanine residue or a fragment thereof encoded by a nucleic acid having a nucleotide sequence selected from the group consisting of SEQ ID NO: 104; SEQ ID NO: 105; SEQ ID NO: 106; SEQ ID NO: 107; SEQ ID NO: 108; SEQ ID NO: 109; SEQ ID NO: 110; SEQ ID NO: 111; SEQ ID NO: 112; SEQ ID NO: 113; SEQ ID NO: 114; SEQ ID NO: 115; SEQ ID NO: 116; SEQ ID NO: 117; SEQ ID NO: 118; SEQ ID NO: 119; SEQ ID NO: 120; SEQ ID NO: 121; SEQ ID NO: 122; SEQ ID NO: 123; SEQ ID NO: 124; SEQ ID NO: 125; SEQ ID NO: 126; SEQ ID NO: 127; SEQ ID NO: 128; SEQ ID NO: 129; SEQ ID NO: 130; SEQ ID NO: 131; SEQ ID NO: 132; SEQ ID NO: 133; SEQ ID NO: 134; SEQ ID NO: 135; SEQ ID NO: 136; SEQ ID NO: 137; SEQ ID NO: 138; SEQ ID NO: 139; SEQ ID NO: 140; SEQ ID NO: 141; SEQ ID NO: 142; SEQ ID NO: 143; SEQ ID NO: 144; SEQ ID NO: 145; SEQ ID NO: 146; SEQ ID NO: 147; SEQ ID NO: 148; SEQ ID NO: 149; SEQ ID NO: 150; SEQ ID NO: 151; SEQ ID NO: 152; SEQ ID NO: 153; SEQ ID NO: 154; SEQ ID NO: 155; SEQ ID NO: 156; SEQ ID NO: 157; SEQ ID NO: 158; SEQ ID NO: 159; SEQ ID NO: 160; SEQ ID NO: 161; SEQ ID NO: 162; SEQ ID NO: 163; SEQ ID NO: 164; SEQ ID NO: 165; SEQ ID NO: 166; SEQ ID NO: 167; SEQ ID NO: 168; SEQ ID NO: 169; SEQ ID NO: 170; SEQ ID NO: 171; SEQ ID NO: 172; SEQ ID NO: 173; SEQ ID NO: 174; SEQ ID NO: 175; SEQ ID NO: 176; SEQ ID NO: 177; SEQ ID NO: 178; SEQ ID NO: 179; SEQ ID NO: 180; SEQ ID NO: 181; SEQ ID NO: 182; SEQ ID NO: 183; SEQ ID NO: 184; SEQ ID NO: 185; SEQ ID NO: 186; SEQ ID NO: 187; SEQ ID NO: 188; SEQ ID NO: 189; SEQ ID NO: 190, SEQ ID NO: 191; SEQ ID NO: 192; SEQ ID NO: 193; SEQ ID NO: 194; SEQ ID NO: 195; SEQ ID NO: 196; SEQ ID NO: 197; SEQ ID NO: 198; SEQ ID NO: 199; SEQ ID NO: 200; SEQ ID NO: 201; SEQ ID NO: 202; SEQ ID NO: 203; SEQ ID NO: 204; SEQ ID NO: 205; SEQ ID NO: 206; SEQ ID NO: 207; SEQ ID NO: 208; SEQ ID NO: 209; SEQ ID NO: 210; SEQ ID NO: 211; SEQ ID NO: 212; SEQ ID NO: 213; SEQ ID NO: 214; SEQ ID NO: 215; SEQ ID NO: 216; SEQ ID NO: 217; SEQ ID NO: 218; SEQ ID NO: 219; SEQ ID NO: 220; SEQ ID NO: 221; SEQ ID NO: 222; SEQ ID NO: 223; SEQ ID NO: 224; SEQ ID NO: 225; SEQ ID NO: 226; SEQ ID NO: 227; SEQ ID NO: 228; SEQ ID NO: 229; SEQ ID NO: 230; SEQ ID NO: 231; SEQ ID NO: 232; SEQ ID NO: 233; SEQ ID NO: 234; SEQ ID NO: 235; SEQ ID NO: 236; SEQ ID NO: 237; SEQ ID NO: 238; SEQ ID NO: 239; SEQ ID NO: 240; SEQ ID NO: 241; SEQ ID NO: 242; SEQ ID NO: 243; SEQ ID NO: 244; SEQ ID NO: 245; SEQ ID NO: 246; SEQ ID NO: 247; SEQ ID NO: 248; SEQ ID NO: 249; SEQ ID NO: 250; SEQ ID NO: 251; SEQ ID NO: 252; SEQ ID NO: 253; SEQ ID NO: 254; SEQ ID NO: 255; SEQ ID NO: 256; SEQ ID NO: 257; SEQ ID NO: 258; SEQ ID NO: 259; SEQ ID NO: 260; SEQ ID NO: 261; SEQ ID NO: 262; SEQ ID NO: 263; SEQ ID NO: 264; SEQ ID NO: 265; SEQ ID NO: 266; SEQ ID NO: 267; SEQ ID NO: 268; SEQ ID NO: 269; SEQ ID NO: 270; SEQ ID NO: 271; SEQ ID NO: 272; SEQ ID NO: 273; SEQ ID NO: 274; SEQ ID NO: 275; SEQ ID NO: 276; SEQ ID NO: 277; SEQ ID NO: 278; SEQ ID NO: 279; SEQ ID NO: 280; SEQ ID NO: 281; SEQ ID NO: 282; SEQ ID NO: 283; SEQ ID NO: 284; SEQ ID NO: 285; SEQ ID NO: 286; SEQ ID NO: 287; SEQ ID NO: 288; SEQ ID NO: 289; SEQ ID NO: 290; SEQ ID NO: 291; SEQ ID NO: 292; SEQ ID NO: 293; SEQ ID NO: 294; SEQ ID NO: 295; SEQ ID NO: 296; SEQ ID NO: 297; SEQ ID NO: 298; SEQ ID NO: 299; SEQ ID NO: 300; SEQ ID NO: 301; SEQ ID NO: 302; SEQ ID NO: 303; SEQ ID NO: 304; SEQ ID NO: 305; SEQ ID NO: 306; SEQ ID NO: 307; SEQ ID NO: 308; SEQ ID NO: 309; SEQ ID NO: 310; SEQ ID NO: 311; SEQ ID NO: 312; SEQ ID NO: 313; SEQ ID NO: 314; SEQ ID NO: 315; SEQ ID NO: 316; SEQ ID NO: 317; SEQ ID NO: 318; SEQ ID NO: 319; SEQ ID NO: 320; SEQ ID NO: 321; SEQ ID NO: 322; SEQ ID NO: 323; SEQ ID NO: 324; SEQ ID NO: 325 SEQ ID NO: 326; SEQ ID NO: 327; SEQ ID NO: 328; SEQ ID NO: 329; SEQ ID NO: 330; SEQ ID NO: 331; SEQ ID NO: 332; SEQ ID NO: 333; SEQ ID NO: 342; SEQ ID NO: 343; SEQ ID NO: 344; SEQ ID NO: 345; SEQ ID NO: 346; SEQ ID NO: 347; SEQ ID NO: 348; SEQ ID NO: 349; SEQ ID NO: 350; SEQ ID NO: 351; SEQ ID NO: 352; SEQ ID NO: 353; SEQ ID NO: 354; SEQ ID NO: 355; SEQ ID NO: 356; SEQ ID NO: 357; SEQ ID NO: 358; SEQ ID NO: 359; SEQ ID NO: 360; SEQ ID NO: 361; SEQ ID NO: 362; SEQ ID NO: 369; SEQ ID NO: 370; SEQ ID NO: 371; SEQ ID NO: 372; SEQ ID NO: 373; SEQ ID NO: 374; SEQ ID NO: 375; SEQ ID NO: 376; SEQ ID NO: 377; SEQ ID NO: 378; SEQ ID NO: 379; SEQ ID NO: 380; SEQ ID NO: 381; SEQ ID NO: 382; SEQ ID NO: 383; SEQ ID NO: 384; SEQ ID NO: 385; SEQ ID NO: 386; SEQ ID NO: 387; SEQ ID NO: 388; SEQ ID NO: 389; SEQ ID NO: 390; SEQ ID NO: 391; SEQ ID NO: 392; SEQ ID NO: 393; SEQ ID NO: 394; SEQ ID NO: 395; SEQ ID NO: 396; SEQ ID NO: 397; SEQ ID NO: 9528; SEQ ID NO: 9529; SEQ ID NO: 9530; SEQ ID NO: 9531; SEQ ID NO: 9532; SEQ ID NO: 9533; SEQ ID NO: 9534; SEQ ID NO: 9535 and SEQ ID NO: 9536.

[0120] In another embodiment, the H. pylori outer membrane polypeptide or a fragment thereof is an H. pylori polypeptide having a terminal phenylalanine residue and a C-terminal tyrosine cluster or a fragment thereof encoded by a nucleic acid having a nucleotide sequence selected from the group consisting of SEQ ID NO: 326; SEQ ID NO: 327; SEQ ID NO: 328; SEQ ID NO: 329; SEQ ID NO: 330; SEQ ID NO: 331; SEQ ID NO: 332; SEQ ID NO: 333; SEQ ID NO: 342; SEQ ID NO: 343; SEQ ID NO: 344; SEQ ID NO: 345; SEQ ID NO: 346; SEQ ID NO: 347; SEQ ID NO: 348; SEQ ID NO: 349; SEQ ID NO: 350; SEQ ID NO: 351; SEQ ID NO: 352; SEQ ID NO: 353; SEQ ID NO: 354; SEQ ID NO: 355; SEQ ID NO: 356; SEQ ID NO: 357; SEQ ID NO: 358; SEQ ID NO: 359; SEQ ID NO: 360; SEQ ID NO: 361; SEQ ID NO: 362; SEQ ID NO: 369; SEQ ID NO: 370; SEQ ID NO: 371; SEQ ID NO: 372; SEQ ID NO: 373; SEQ ID NO: 374; SEQ ID NO: 375; SEQ ID NO: 376; SEQ ID NO: 377; SEQ ID NO: 378; SEQ ID NO: 379; SEQ ID NO: 380; SEQ ID NO: 381; SEQ ID NO: 382; SEQ ID NO: 383; SEQ ID NO: 384; SEQ ID NO: 385; SEQ ID NO: 386; SEQ ID NO: 387; SEQ ID NO: 388; SEQ ID NO: 389; SEQ ID NO: 390; SEQ ID NO: 391; SEQ ID NO: 392; SEQ ID NO: 393; SEQ ID NO: 394; SEQ ID NO: 395; SEQ ID NO: 396; SEQ ID NO: 397 and SEQ ID NO: 9536.

[0121] In another embodiment, the H. pylori outer membrane polypeptide or a fragment thereof is an H. pylori polypeptide having a terminal tyrosine cluster motif or a fragment thereof encoded by a nucleic acid having a nucleotide sequence selected from the group consisting of SEQ ID NO: 326; SEQ ID NO: 327; SEQ ID NO: 328; SEQ ID NO: 329; SEQ ID NO: 330; SEQ ID NO: 331; SEQ ID NO: 332; SEQ ID NO: 333; SEQ ID NO: 334; SEQ ID NO: 335; SEQ ID NO: 336; SEQ ID NO: 337; SEQ ID NO: 338; SEQ ID NO: 339; SEQ ID NO: 340; SEQ ID NO: 341; SEQ ID NO: 342; SEQ ID NO: 343; SEQ ID NO: 344; SEQ ID NO: 345; SEQ ID NO: 346; SEQ ID NO: 347; SEQ ID NO: 348; SEQ ID NO: 349; SEQ ID NO: 350; SEQ ID NO: 351; SEQ ID NO: 352; SEQ ID NO: 353; SEQ ID NO: 354; SEQ ID NO: 355; SEQ ID NO: 356; SEQ ID NO: 357; SEQ ID NO: 358; SEQ ID NO: 359; SEQ ID NO: 360; SEQ ID NO: 361; SEQ ID NO: 362; SEQ ID NO: 363; SEQ ID NO: 364; SEQ ID NO: 365; SEQ ID NO: 366; SEQ ID NO: 367; SEQ ID NO: 368; SEQ ID NO: 369; SEQ ID NO: 370; SEQ ID NO: 371; SEQ ID NO: 372; SEQ ID NO: 373; SEQ ID NO: 374; SEQ ID NO: 375; SEQ ID NO: 376; SEQ ID NO: 377; SEQ ID NO: 378; SEQ ID NO: 379; SEQ ID NO: 380; SEQ ID NO: 381; SEQ ID NO: 382; SEQ ID NO: 383; SEQ ID NO: 384; SEQ ID NO: 385; SEQ ID NO: 386; SEQ ID NO: 387; SEQ ID NO: 388; SEQ ID NO: 389; SEQ ID NO: 390; SEQ ID NO: 391; SEQ ID NO: 392; SEQ ID NO: 393; SEQ ID NO: 394; SEQ ID NO: 395; SEQ ID NO: 396; SEQ ID NO: 397; SEQ ID NO: 398; SEQ ID NO: 399; SEQ ID NO: 400; SEQ ID NO: 401; SEQ ID NO: 402; SEQ ID NO: 403; SEQ ID NO: 404; SEQ ID NO: 405; SEQ ID NO: 406; SEQ ID NO: 407; SEQ ID NO: 408; SEQ ID NO: 409; SEQ ID NO: 410; SEQ ID NO: 411; SEQ ID NO: 412; SEQ ID NO: 413; SEQ ID NO: 414; SEQ ID NO: 415; SEQ ID NO: 416; SEQ ID NO: 424; SEQ ID NO: 425 and SEQ ID NO: 9536.

[0122] In another embodiment, the H. pylori cell envelope polypeptide or a fragment thereof is an H. pylori inner membrane polypeptide or a fragment thereof encoded by a nucleic acid having a nucleotide sequence selected from the group consisting of SEQ ID NO: 511; SEQ ID NO: 512; SEQ ID NO: 513; SEQ ID NO: 514; SEQ ID NO: 515; SEQ ID NO: 516; SEQ ID NO: 517; SEQ ID NO: 518; SEQ ID NO: 519; SEQ ID NO: 520; SEQ ID NO: 521; SEQ ID NO: 522; SEQ ID NO: 523; SEQ ID NO: 524; SEQ ID NO: 525; SEQ ID NO: 526; SEQ ID NO: 527; SEQ ID NO: 528; SEQ ID NO: 529; SEQ ID NO: 530; SEQ ID NO: 531; SEQ ID NO: 532; SEQ ID NO: 533; SEQ ID NO: 534; SEQ ID NO: 535; SEQ ID NO: 536; SEQ ID NO: 537; SEQ ID NO: 538; SEQ ID NO: 539; SEQ ID NO: 540; SEQ ID NO: 541; SEQ ID NO: 542; SEQ ID NO: 543; SEQ ID NO: 544; SEQ ID NO: 545; SEQ ID NO: 546; SEQ ID NO: 547; SEQ ID NO: 548; SEQ ID NO: 549; SEQ ID NO: 550; SEQ ID NO: 551; SEQ ID NO: 552; SEQ ID NO: 553; SEQ ID NO: 554; SEQ ID NO: 555; SEQ ID NO: 556; SEQ ID NO: 557; SEQ ID NO: 558; SEQ ID NO: 559; SEQ ID NO: 560; SEQ ID NO: 561; SEQ ID NO: 562; SEQ ID NO: 563; SEQ ID NO: 564; SEQ ID NO: 565; SEQ ID NO: 566; SEQ ID NO: 567; SEQ ID NO: 568; SEQ ID NO: 569; SEQ ID NO: 570; SEQ ID NO: 571; SEQ ID NO: 572; SEQ ID NO: 573; SEQ ID NO: 574; SEQ ID NO: 575; SEQ ID NO: 576; SEQ ID NO: 577; SEQ ID NO: 578; SEQ ID NO: 579; SEQ ID NO: 580; SEQ ID NO: 581; SEQ ID NO: 582; SEQ ID NO: 583; SEQ ID NO: 584; SEQ ID NO: 585; SEQ ID NO: 586; SEQ ID NO: 587; SEQ ID NO: 588; SEQ ID NO: 589; SEQ ID NO: 590; SEQ ID NO: 591; SEQ ID NO: 592; SEQ ID NO: 593; SEQ ID NO: 594; SEQ ID NO: 595; SEQ ID NO: 596; SEQ ID NO: 597; SEQ ID NO: 598; SEQ ID NO: 599; SEQ ID NO: 600; SEQ ID NO: 601; SEQ ID NO: 602; SEQ ID NO: 603; SEQ ID NO: 604; SEQ ID NO: 605; SEQ ID NO: 606; SEQ ID NO: 607; SEQ ID NO: 608; SEQ ID NO: 609; SEQ ID NO: 610; SEQ ID NO: 611; SEQ ID NO: 612; SEQ ID NO: 613; SEQ ID NO: 614; SEQ ID NO: 615; SEQ ID NO: 616; SEQ ID NO: 617; SEQ ID NO: 618; SEQ ID NO: 619; SEQ ID NO: 620; SEQ ID NO: 621; SEQ ID NO: 622; SEQ ID NO: 623; SEQ ID NO: 624; SEQ ID NO: 625; SEQ ID NO: 626; SEQ ID NO: 627; SEQ ID NO: 628; SEQ ID NO: 629; SEQ ID NO: 630; SEQ ID NO: 631; SEQ ID NO: 632; SEQ ID NO: 633; SEQ ID NO: 634; SEQ ID NO: 635; SEQ ID NO: 636; SEQ ID NO: 637; SEQ ID NO: 638; SEQ ID NO: 639; SEQ ID NO: 640; SEQ ID NO: 641; SEQ ID NO: 642; SEQ ID NO: 643; SEQ ID NO: 644; SEQ ID NO: 645; SEQ ID NO: 646; SEQ ID NO: 647; SEQ ID NO: 648; SEQ ID NO: 649; SEQ ID NO: 650; SEQ ID NO: 651; SEQ ID NO: 652; SEQ ID NO: 653; SEQ ID NO: 654; SEQ ID NO: 655; SEQ ID NO: 656; SEQ ID NO: 657; SEQ ID NO: 658; SEQ ID NO: 659; SEQ ID NO: 660; SEQ ID NO: 661; SEQ ID NO: 662; SEQ ID NO: 663; SEQ ID NO: 664; SEQ ID NO: 665; SEQ ID NO: 666; SEQ ID NO: 667; SEQ ID NO: 668; SEQ ID NO: 669; SEQ ID NO: 670; SEQ ID NO: 671; SEQ ID NO: 672; SEQ ID NO: 673; SEQ ID NO: 674; SEQ ID NO: 675; SEQ ID NO: 676; SEQ ID NO: 677; SEQ ID NO: 678; SEQ ID NO: 678; SEQ ID NO: 680; SEQ ID NO: 681; SEQ ID NO: 682; SEQ ID NO: 683; SEQ ID NO: 684; SEQ ID NO: 685; SEQ ID NO: 686; SEQ ID NO: 687; SEQ ID NO: 688; SEQ ID NO: 689; SEQ ID NO: 690; SEQ ID NO: 691; SEQ ID NO: 692; SEQ ID NO: 693; SEQ ID NO: 694; SEQ ID NO: 695; SEQ ID NO: 696; SEQ ID NO: 697; SEQ ID NO: 698; SEQ ID NO: 699; SEQ ID NO: 700; SEQ ID NO: 701; SEQ ID NO: 702; SEQ ID NO: 703; SEQ ID NO: 704; SEQ ID NO: 705; SEQ ID NO: 706; SEQ ID NO: 707; SEQ ID NO: 708; SEQ ID NO: 709; SEQ ID NO: 710; SEQ ID NO: 711; SEQ ID NO: 712; SEQ ID NO: 713; SEQ ID NO: 714; SEQ ID NO: 715; SEQ ID NO: 716; SEQ ID NO: 717; SEQ ID NO: 718; SEQ ID NO: 719; SEQ ID NO: 720; SEQ ID NO: 721; SEQ ID NO: 722; SEQ ID NO: 723; SEQ ID NO: 724; SEQ ID NO: 725; SEQ ID NO: 726; SEQ ID NO: 727; SEQ ID NO: 728; SEQ ID NO: 729; SEQ ID NO: 730; SEQ ID NO: 731; SEQ ID NO: 732; SEQ ID NO: 733; SEQ ID NO: 734; SEQ ID NO: 735; SEQ ID NO: 736; SEQ ID NO: 737; SEQ ID NO: 738; SEQ ID NO: 739; SEQ ID NO: 740; SEQ ID NO: 741; SEQ ID NO: 742; SEQ ID NO: 743; SEQ ID NO: 744; SEQ ID NO: 745; SEQ ID NO: 746; SEQ ID NO: 747; SEQ ID NO: 748; SEQ ID NO: 749; SEQ ID NO: 750; SEQ ID NO: 751; SEQ ID NO: 752; SEQ ID NO: 753; SEQ ID NO: 754; SEQ ID NO: 755; SEQ ID NO: 756; SEQ ID NO: 757; SEQ ID NO: 758; SEQ ID NO: 759; SEQ ID NO: 760; SEQ ID NO: 761; SEQ ID NO: 762; SEQ ID NO: 763; SEQ ID NO: 764; SEQ ID NO: 765; SEQ ID NO: 766; SEQ ID NO: 767; SEQ ID NO: 768; SEQ ID NO: 769; SEQ ID NO: 770; SEQ ID NO: 771; SEQ ID NO: 772; SEQ ID NO: 773; SEQ ID NO: 774; SEQ ID NO: 775; SEQ ID NO: 776; SEQ ID NO: 777; SEQ ID NO: 778; SEQ ID NO: 779; SEQ ID NO: 780; SEQ ID NO: 781; SEQ ID NO: 782; SEQ ID NO: 783; SEQ ID NO: 784; SEQ ID NO: 785; SEQ ID NO: 786; SEQ ID NO: 787; SEQ ID NO: 788; SEQ ID NO: 789; SEQ ID NO: 790; SEQ ID NO: 791; SEQ ID NO: 792; SEQ ID NO: 793; SEQ ID NO: 794; SEQ ID NO: 795; SEQ ID NO: 796; SEQ ID NO: 797; SEQ ID NO: 798; SEQ ID NO: 799; SEQ ID NO: 800; SEQ ID NO: 801; SEQ ID NO: 802; SEQ ID NO: 803; SEQ ID NO: 804; SEQ ID NO: 805; SEQ ID NO: 806; SEQ ID NO: 807; SEQ ID NO: 808; SEQ ID NO: 809; SEQ ID NO: 810; SEQ ID NO: 811; SEQ ID NO: 812; SEQ ID NO: 813; SEQ ID NO: 814; SEQ ID NO: 815; SEQ ID NO: 816; SEQ ID NO: 817; SEQ ID NO: 818; SEQ ID NO: 819; SEQ ID NO: 820; SEQ ID NO: 821; SEQ ID NO: 822; SEQ ID NO: 823; SEQ ID NO: 824; SEQ ID NO: 825; SEQ ID NO: 826; SEQ ID NO: 827; SEQ ID NO: 828; SEQ ID NO: 829; SEQ ID NO: 830; SEQ ID NO: 831; SEQ ID NO: 832; SEQ ID NO: 833; SEQ ID NO: 834; SEQ ID NO: 835; SEQ ID NO: 836; SEQ ID NO: 837; SEQ ID NO: 838; SEQ ID NO: 839; SEQ ID NO: 840; SEQ ID NO: 841; SEQ ID NO: 842; SEQ ID NO: 843; SEQ ID NO: 844; SEQ ID NO: 845; SEQ ID NO: 846; SEQ ID NO: 847; SEQ ID NO: 848; SEQ ID NO: 849; SEQ ID NO: 850; SEQ ID NO: 851; SEQ ID NO: 852; SEQ ID NO: 853; SEQ ID NO: 854; SEQ ID NO: 855; SEQ ID NO: 856; SEQ ID NO: 857; SEQ ID NO: 858; SEQ ID NO: 859; SEQ ID NO: 860; SEQ ID NO: 861; SEQ ID NO: 862; SEQ ID NO: 863; SEQ ID NO: 864; SEQ ID NO: 865; SEQ ID NO: 866; SEQ ID NO: 867; SEQ ID NO: 868; SEQ ID NO: 869; SEQ ID NO: 870; SEQ ID NO: 871; SEQ ID NO: 872; SEQ ID NO: 873; SEQ ID NO: 874; SEQ ID NO: 875; SEQ ID NO: 876; SEQ ID NO: 877; SEQ ID NO: 878; SEQ ID NO: 879; SEQ ID NO: 880; SEQ ID NO: 881; SEQ ID NO: 882; SEQ ID NO: 883; SEQ ID NO: 884; SEQ ID NO: 885; SEQ ID NO: 886; SEQ ID NO: 887; SEQ ID NO: 888; SEQ ID NO: 889; SEQ ID NO: 890; SEQ ID NO: 891; SEQ ID NO: 892; SEQ ID NO: 893; SEQ ID NO: 894; SEQ ID NO: 895; SEQ ID NO: 896; SEQ ID NO: 897; SEQ ID NO: 898; SEQ ID NO: 899; SEQ ID NO: 900; SEQ ID NO: 901; SEQ ID NO: 902; SEQ ID NO: 903; SEQ ID NO: 904; SEQ ID NO: 905; SEQ ID NO: 906; SEQ ID NO: 907; SEQ ID NO: 908; SEQ ID NO: 909; SEQ ID NO: 910; SEQ ID NO: 911; SEQ ID NO: 912; SEQ ID NO: 913; SEQ ID NO: 914; SEQ ID NO: 915; SEQ ID NO: 916; SEQ ID NO: 917; SEQ ID NO: 918; SEQ ID NO: 919; SEQ ID NO: 920; SEQ ID NO: 921; SEQ ID NO: 922; SEQ ID NO: 923; SEQ ID NO: 924; SEQ ID NO: 925; SEQ ID NO: 926; SEQ ID NO: 927; SEQ ID NO: 928; SEQ ID NO: 929; SEQ ID NO: 930; SEQ ID NO: 931; SEQ ID NO: 932; SEQ ID NO: 933; SEQ ID NO: 934; SEQ ID NO: 935; SEQ ID NO: 936; SEQ ID NO: 937; SEQ ID NO: 938; SEQ ID NO: 939; SEQ ID NO: 940; SEQ ID NO: 941; SEQ ID NO: 942; SEQ ID NO: 943; SEQ ID NO: 944; SEQ ID NO: 945; SEQ ID NO: 946; SEQ ID NO: 947; SEQ ID NO: 948; SEQ ID NO: 949; SEQ ID NO: 950; SEQ ID NO: 951; SEQ ID NO: 952; SEQ ID NO: 953; SEQ ID NO: 954; SEQ ID NO: 955; SEQ ID NO: 956; SEQ ID NO: 957; SEQ ID NO: 958; SEQ ID NO: 959; SEQ ID NO: 960; SEQ ID NO: 961; SEQ ID NO: 962; SEQ ID NO: 963; SEQ ID NO: 964; SEQ ID NO: 965; SEQ ID NO: 966; SEQ ID NO: 967; SEQ ID NO: 968; SEQ ID NO: 969; SEQ ID NO: 970; SEQ ID NO: 971; SEQ ID NO: 972; SEQ ID NO: 973; SEQ ID NO: 974; SEQ ID NO: 975; SEQ ID NO: 976; SEQ ID NO: 977; SEQ ID NO: 978; SEQ ID NO: 979; SEQ ID NO: 980; SEQ ID NO: 981; SEQ ID NO: 982; SEQ ID NO: 983; SEQ ID NO: 984; SEQ ID NO: 985; SEQ ID NO: 986; SEQ ID NO: 987; SEQ ID NO: 988; SEQ ID NO: 989; SEQ ID NO: 990; SEQ ID NO: 991; SEQ ID NO: 992; SEQ ID NO: 993; SEQ ID NO: 994; SEQ ID NO: 995; SEQ ID NO: 996; SEQ ID NO: 997; SEQ ID NO: 998; SEQ ID NO: 999; SEQ ID NO: 1000; SEQ ID NO: 1001; SEQ ID NO: 1002; SEQ ID NO: 1003; SEQ ID NO: 1004; SEQ ID NO: 1005; SEQ ID NO: 1006; SEQ ID NO: 1007; SEQ ID NO: 1008; SEQ ID NO: 1009; SEQ ID NO: 1010; SEQ ID NO: 1011; SEQ ID NO: 1012; SEQ ID NO: 1013; SEQ ID NO: 1014; SEQ ID NO: 1015; SEQ ID NO: 1016; SEQ ID NO: 1017; SEQ ID NO: 1018; SEQ ID NO: 1019; SEQ ID NO: 1020; SEQ ID NO: 1021; SEQ ID NO: 1022; SEQ ID NO: 1023; SEQ ID NO: 1024; SEQ ID NO: 1025; SEQ ID NO: 1026; SEQ ID NO: 1027; SEQ ID NO: 1028; SEQ ID NO: 1029; SEQ ID NO: 1030; SEQ ID NO: 1031; SEQ ID NO: 1032; SEQ ID NO: 1033; SEQ ID NO: 1034; SEQ ID NO: 1035; SEQ ID NO: 1036; SEQ ID NO: 1037; SEQ ID NO: 1038; SEQ ID NO: 1039; SEQ ID NO: 1040; SEQ ID NO: 1041; SEQ ID NO: 1042; SEQ ID NO: 1043; SEQ ID NO: 1044; SEQ ID NO: 1045; SEQ ID NO: 1046; SEQ ID NO: 1047; SEQ ID NO: 1048; SEQ ID NO: 1049; SEQ ID NO: 1050; SEQ ID NO: 1051; SEQ ID NO: 1052; SEQ ID NO: 1053; SEQ ID NO: 1054; SEQ ID NO: 1055; SEQ ID NO: 1056; SEQ ID NO: 1057; SEQ ID NO: 1058; SEQ ID NO: 1059; SEQ ID NO: 1060; SEQ ID NO: 1061; SEQ ID NO: 1062; SEQ ID NO: 1063; SEQ ID NO: 1064; SEQ ID NO: 1065; SEQ ID NO: 1066; SEQ ID NO: 1067; SEQ ID NO: 1068; SEQ ID NO: 1069; SEQ ID NO: 1070; SEQ ID NO: 1071; SEQ ID NO: 1072; SEQ ID NO: 1073; SEQ ID NO: 1074; SEQ ID NO: 1075; SEQ ID NO: 1076; SEQ ID NO: 1077; SEQ ID NO: 1078; SEQ ID NO: 1079; SEQ ID NO: 1080; SEQ ID NO: 1081; SEQ ID NO: 1082; SEQ ID NO: 1083; SEQ ID NO: 1084; SEQ ID NO: 1085; SEQ ID NO: 1086; SEQ ID NO: 1087; SEQ ID NO: 1088; SEQ ID NO: 1089; SEQ ID NO: 1090; SEQ ID NO: 1091; SEQ ID NO: 1092; SEQ ID NO: 1093; SEQ ID NO: 1094; SEQ ID NO: 1095; SEQ ID NO: 1096; SEQ ID NO: 1097; SEQ ID NO: 1098; SEQ ID NO: 1099; SEQ ID NO: 1100; SEQ ID NO: 1101; SEQ ID NO: 1102; SEQ ID NO: 1103; SEQ ID NO: 1104; SEQ ID NO: 1105; SEQ ID NO: 1106; SEQ ID NO: 1107; SEQ ID NO: 1108; SEQ ID NO: 1109; SEQ ID NO: 1110; SEQ ID NO: 1111; SEQ ID NO: 1112; SEQ ID NO: 1113; SEQ ID NO: 1114; SEQ ID NO: 1115; SEQ ID NO: 1116; SEQ ID NO: 1117; SEQ ID NO: 1118; SEQ ID NO: 1119; SEQ ID NO: 1120; SEQ ID NO: 1121; SEQ ID NO: 1122; SEQ ID NO: 1123; SEQ ID NO: 1124; SEQ ID NO: 1125; SEQ ID NO: 1126; SEQ ID NO: 1127; SEQ ID NO: 1128; SEQ ID NO: 1129; SEQ ID NO: 1130; SEQ ID NO: 1131; SEQ ID NO: 1132; SEQ ID NO: 1133; SEQ ID NO: 1134; SEQ ID NO: 1135; SEQ ID NO: 1136; SEQ ID NO: 1137; SEQ ID NO: 1138; SEQ ID NO: 1139; SEQ ID NO: 1140; SEQ ID NO: 1141; SEQ ID NO: 1142; SEQ ID NO: 1143; SEQ ID NO: 1144; SEQ ID NO: 1145; SEQ ID NO: 1146; SEQ ID NO: 1147; SEQ ID NO: 1148; SEQ ID NO: 1149; SEQ ID NO: 1150; SEQ ID NO: 1151; SEQ ID NO: 1152; SEQ ID NO: 1153; SEQ ID NO: 1154; SEQ ID NO: 1155; SEQ ID NO: 1156; SEQ ID NO: 1157; SEQ ID NO: 1158; SEQ ID NO: 1159; SEQ ID NO: 1160; SEQ ID NO: 1161; SEQ ID NO: 1162; SEQ ID NO: 1163; SEQ ID NO: 1164; SEQ ID NO: 1165; SEQ ID NO: 1166; SEQ ID NO: 1167; SEQ ID NO: 1168; SEQ ID NO: 1169; SEQ ID NO: 1170; SEQ ID NO: 1171; SEQ ID NO: 1172; SEQ ID NO: 1173; SEQ ID NO: 1174; SEQ ID NO: 1175; SEQ ID NO: 1176; SEQ ID NO: 1177; SEQ ID NO: 1178; SEQ ID NO: 1179; SEQ ID NO: 1180; SEQ ID NO: 1181; SEQ ID NO: 1182; SEQ ID NO: 1183; SEQ ID NO: 1184; SEQ ID NO: 1185; SEQ ID NO: 1186; SEQ ID NO: 1187; SEQ ID NO: 1188; SEQ ID NO: 1189; SEQ ID NO: 1190; SEQ ID NO: 1191; SEQ ID NO: 1192; SEQ. ID NO: 1193; SEQ ID NO: 1194; SEQ ID NO: 1195; SEQ ID NO: 1196; SEQ ID NO: 119; SEQ ID NO: 1198; SEQ ID NO: 1199; SEQ ID NO: 1200; SEQ ID NO: 1201; SEQ ID NO: 1202; SEQ ID NO: 1203; SEQ ID NO: 1204; SEQ ID NO: 1205; SEQ ID NO: 1206; SEQ ID NO: 1207; SEQ ID NO: 1208; SEQ ID NO: 1209; SEQ ID NO: 1210; SEQ ID NO: ¹²¹I; SEQ ID NO: 1212; SEQ ID NO: 1213; SEQ ID NO: 1214; SEQ ID NO: 1215; SEQ ID NO: 1216; SEQ ID NO: 1217; SEQ ID NO: 1218; SEQ ID NO: 1219; SEQ ID NO: 1220; SEQ ID NO: 1221; SEQ ID NO: 1222; SEQ ID NO: 1223; SEQ ID NO: 1224; SEQ ID NO: 1225; SEQ ID NO: 1226; SEQ ID NO: 1227; SEQ ID NO: 1228; SEQ ID NO: 1229; SEQ ID NO: 1230; SEQ ID NO: 1231; SEQ ID NO: 1232; SEQ ID NO: 1233; SEQ ID NO: 1234; SEQ ID NO: 1235; SEQ ID NO: 1236; SEQ ID NO: 1237; SEQ ID NO: 1238; SEQ ID NO: 1239; SEQ ID NO: 1240; SEQ ID NO: 1241; SEQ ID NO: 1242; SEQ ID NO: 1243; SEQ ID NO: 1244; SEQ ID NO: 1245; SEQ ID NO: 1246; SEQ ID NO: 1247; SEQ ID NO: 1248; SEQ ID NO: 1249; SEQ ID NO: 1250; SEQ ID NO: 1251; SEQ ID NO: 1252; SEQ ID NO: 1253; SEQ ID NO: 1254; SEQ ID NO: 1255; SEQ ID NO: 1256; SEQ ID NO: 1257; SEQ ID NO: 1258; SEQ ID NO: 1259; SEQ ID NO: 1260; SEQ ID NO: 1261; SEQ ID NO: 1262; SEQ ID NO: 1263; SEQ ID NO: 1264; SEQ ID NO: 1265; SEQ ID NO: 1266; SEQ ID NO: 1267; SEQ ID NO: 1268; SEQ ID NO: 1269; SEQ ID NO: 1270; SEQ ID NO: 1271; SEQ ID NO: 1272; SEQ ID NO: 1273; SEQ ID NO: 1274; SEQ ID NO: 1275; SEQ ID NO: 1276; SEQ ID NO: 1277; SEQ ID NO: 1278; SEQ ID NO: 1279; SEQ ID NO: 1280; SEQ ID NO: 1281; SEQ ID NO: 1282; SEQ ID NO: 1283; SEQ ID NO: 1284; SEQ ID NO: 1285; SEQ ID NO: 1286; SEQ ID NO: 1287; SEQ ID NO: 1288; SEQ ID NO: 1289; SEQ ID NO: 1290; SEQ ID NO: 1291; SEQ ID NO: 1292; SEQ ID NO: 1293; SEQ ID NO: 1294; SEQ ID NO: 1295; SEQ ID NO: 1296; SEQ ID NO: 1297; SEQ ID NO: 1298; SEQ ID NO: 1299; SEQ ID NO: 1300; SEQ ID NO: 1301; SEQ ID NO: 1302; SEQ ID NO: 1303; SEQ ID NO: 1304; SEQ ID NO: 1305; SEQ ID NO: 1306; SEQ ID NO: 1307; SEQ ID NO: 1308; SEQ ID NO: 1309; SEQ ID NO: 1310; SEQ ID NO: ¹³¹I; SEQ ID NO: 1312; SEQ ID NO:1313; SEQ ID NO: 1314; SEQ ID NO: 1315; SEQ ID NO: 1316; SEQ ID NO: 1317; SEQ ID NO: 1318; SEQ ID NO: 1319; SEQ ID NO: 1320; SEQ ID NO: 1321; SEQ ID NO: 1322; SEQ ID NO: 1323; SEQ ID NO: 1324; SEQ ID NO: 1325; SEQ ID NO: 1326; SEQ ID NO: 1327; SEQ ID NO: 1328; SEQ ID NO: 1329; SEQ ID NO: 1330; SEQ ID NO: 1331; SEQ ID NO: 1332; SEQ ID NO: 1333; SEQ ID NO: 1334; SEQ ID NO: 1335; SEQ ID NO: 1336; SEQ ID NO: 1337; SEQ ID NO: 1338; SEQ ID NO: 1339; SEQ ID NO: 1340; SEQ ID NO: 1341; SEQ ID NO: 1342; SEQ ID NO: 1343; SEQ ID NO: 1344; SEQ ID NO: 1345; SEQ ID NO: 1346; SEQ ID NO: 1347; SEQ ID NO: 1348; SEQ ID NO: 1349; SEQ ID NO: 1350; SEQ ID NO: 1351; SEQ ID NO: 1352; SEQ ID NO: 1353; SEQ ID NO: 1354; SEQ ID NO: 1355; SEQ ID NO: 1356; SEQ ID NO: 1357; SEQ ID NO: 1358; SEQ ID NO: 1359; SEQ ID NO: 1360; SEQ ID NO: 1361; SEQ ID NO: 1362; SEQ ID NO: 1363; SEQ ID NO: 1364; SEQ ID NO: 1365; SEQ ID NO: 1366; SEQ ID NO: 1367; SEQ ID NO: 1368; SEQ ID NO: 1369; SEQ ID NO: 1370; SEQ ID NO: 1371; SEQ ID NO: 1372; SEQ ID NO: 1373; SEQ ID NO: 1374; SEQ ID NO: 1375; SEQ ID NO: 1376; SEQ ID NO: 1377; SEQ ID NO: 1378; SEQ ID NO: 1379; SEQ ID NO: 1380; SEQ ID NO: 1381; SEQ ID NO: 1382; SEQ ID NO: 1383; SEQ ID NO: 1384; SEQ ID NO: 1385; SEQ ID NO: 1386; SEQ ID NO: 1387; SEQ ID NO: 1388; SEQ ID NO: 1389; SEQ ID NO: 1390; SEQ ID NO: 1391; SEQ ID NO: 1392; SEQ ID NO: 1393; SEQ ID NO: 1394; SEQ ID NO: 1395; SEQ ID NO: 1396; SEQ ID NO: 1397; SEQ ID NO: 1398; SEQ ID NO: 1399; SEQ ID NO: 1400; SEQ ID NO: 1401; SEQ ID NO: 1402; SEQ ID NO: 1403; SEQ ID NO: 1404; SEQ ID NO: 1405; SEQ ID NO: 1406; SEQ ID NO: 1407; SEQ ID NO: 1408; SEQ ID NO: 1409; SEQ ID NO: 1410; SEQ ID NO: 1411; SEQ ID NO: 1412; SEQ ID NO: 1413; SEQ ID NO: 1414; SEQ ID NO: 1415; SEQ ID NO: 1416; SEQ ID NO: 1417; SEQ ID NO: 1418; SEQ ID NO: 1419; SEQ ID NO: 1420; SEQ ID NO: 1421; SEQ ID NO: 1422; SEQ ID NO: 1423; SEQ ID NO: 1424; SEQ ID NO: 1425; SEQ ID NO: 1426; SEQ ID NO: 1427; SEQ ID NO: 1428; SEQ ID NO: 1429; SEQ ID NO: 1430; SEQ ID NO: 1431; SEQ ID NO: 1432; SEQ ID NO: 1433; SEQ ID NO: 1434; SEQ ID NO: 1435; SEQ ID NO: 1436; SEQ ID NO: 1437; SEQ ID NO: 1438; SEQ ID NO: 1439; SEQ ID NO: 1440; SEQ ID NO: 1441; SEQ ID NO: 1442; SEQ ID NO: 1443; SEQ ID NO: 1444; SEQ ID NO: 1445; SEQ ID NO: 1446; SEQ ID NO: 1447; SEQ ID NO: 1448; SEQ ID NO: 1449; SEQ ID NO: 1450; SEQ ID NO: 1451; SEQ ID NO: 1452; SEQ ID NO: 1453; SEQ ID NO: 1454; SEQ ID NO: 1455; SEQ ID NO: 1456; SEQ ID NO: 1457; SEQ ID NO: 1458; SEQ ID NO: 1459; SEQ ID NO: 1460; SEQ ID NO: 1461; SEQ ID NO: 1462; SEQ ID NO: 1463; SEQ ID NO: 1464; SEQ ID NO: 1465; SEQ ID NO: 1466; SEQ ID NO: 1467; SEQ ID NO: 1468; SEQ ID NO: 1469; SEQ ID NO: 1470; SEQ ID NO: 1471; SEQ ID NO: 1472; SEQ ID NO: 1473; SEQ ID NO: 1474; SEQ ID NO: 1475; SEQ ID NO: 1476; SEQ ID NO: 1477; SEQ ID NO: 1478;-SEQ ID NO: 1479; SEQ ID NO: 1480; SEQ ID NO: 1481; SEQ ID NO: 1482; SEQ ID NO: 1483; SEQ ID NO: 1484; SEQ ID NO: 1485; SEQ ID NO: 1486; SEQ ID NO: 1487; SEQ ID NO: 1488; SEQ ID NO: 1489; SEQ ID NO: 1490; SEQ ID NO: 1491; SEQ ID NO: 1492; SEQ ID NO: 1493; SEQ ID NO: 1494; SEQ ID NO: 1495; SEQ ID NO: 1496; SEQ ID NO: 1497; SEQ ID NO: 1498; SEQ ID NO: 1499; SEQ ID NO: 1500; SEQ ID NO: 1501; SEQ ID NO: 1502; SEQ ID NO: 1503; SEQ ID NO: 1504; SEQ ID NO: 1505; SEQ ID NO: 1506; SEQ ID NO: 1507; SEQ ID NO: 1508; SEQ ID NO: 1509; SEQ ID NO: 1510; SEQ ID NO: 1511; SEQ ID NO: 1512; SEQ ID NO: 1513; SEQ ID NO: 1514; SEQ ID NO: 9537; SEQ ID NO: 9538; SEQ ID NO: 9539; SEQ ID NO: 9540; SEQ ID NO: 9541; SEQ ID NO: 9542; SEQ ID NO: 9543; SEQ ID NO: 9544; SEQ ID NO: 9545; SEQ ID NO: 9546; SEQ ID NO: 9547; SEQ ID NO: 9548; SEQ ID NO: 9549; SEQ ID NO: 9550; SEQ ID NO: 9551; SEQ ID NO: 9552; SEQ ID NO: 9553; SEQ ID NO: 9554; SEQ ID NO: 9555; SEQ ID NO: 9556; SEQ ID NO: 9557; SEQ ID NO: 9558; SEQ ID NO: 9559; SEQ ID NO: 9560; SEQ ID NO: 9561; SEQ ID NO: 9562; SEQ ID NO: 9563; SEQ ID NO: 9564; SEQ ID NO: 9565; SEQ ID NO: 9566; SEQ ID NO: 9567; SEQ ID NO: 9568; SEQ ID NO: 9569; SEQ ID NO: 9570; SEQ ID NO: 9571; SEQ ID NO: 9572; SEQ ID NO: 9573; SEQ ID NO: 9574; SEQ ID NO: 9575; SEQ ID NO: 9576; SEQ ID NO: 9577; SEQ ID NO: 9578; SEQ ID NO: 9579; SEQ ID NO: 9580; SEQ ID NO: 9581; SEQ ID NO: 9582; SEQ ID NO: 9583; SEQ ID NO: 9584; SEQ ID NO: 9585; SEQ ID NO: 9586; SEQ ID NO: 9587; SEQ ID NO: 9588; SEQ ID NO: 9589; SEQ ID NO: 9590 and SEQ ID NO:9591.

[0123] In another embodiment, the H. pylori cell envelope polypeptide or a fragment thereof is an H. pylori inner membrane polypeptide or a fragment thereof involved in transport encoded by a nucleic acid having a nucleotide sequence selected from the group consisting of SEQ ID NO: 511; SEQ ID NO: 512; SEQ ID NO: 513; SEQ ID NO: 514; SEQ ID NO:515; SEQ ID NO:516; SEQ ID NO:517; SEQ ID NO:518; SEQ ID NO: 519; SEQ ID NO: 520; SEQ ID NO: 521; SEQ ID NO: 522; SEQ ID NO: 523; SEQ ID NO: 524; SEQ ID NO: 525; SEQ ID NO: 526; SEQ ID NO: 527; SEQ ID NO: 528; SEQ ID NO: 529; SEQ ID NO: 530; SEQ ID NO: 531; SEQ ID NO: 532; SEQ ID NO: 533; SEQ ID NO: 534; SEQ ID NO: 535; SEQ ID NO: 536; SEQ ID NO: 537; SEQ ID NO: 538; SEQ ID NO: 539; SEQ ID NO: 540; SEQ ID NO: 541; SEQ ID NO: 542; SEQ ID NO: 543; SEQ ID NO: 544; SEQ ID NO: 545; SEQ ID NO: 546; SEQ ID NO: 547; SEQ ID NO: 548; SEQ ID NO: 549; SEQ ID NO: 550; SEQ ID NO: 551; SEQ ID NO: 552; SEQ ID NO: 553; SEQ ID NO: 554; SEQ ID NO: 555; SEQ ID NO: 556; SEQ ID NO: 557; SEQ ID NO: 558; SEQ ID NO: 559; SEQ ID NO: 560; SEQ ID NO: 561; SEQ ID NO: 562; SEQ ID NO: 563; SEQ ID NO: 564; SEQ ID NO: 565; SEQ ID NO: 566; SEQ ID NO: 567; SEQ ID NO: 568; SEQ ID NO: 569; SEQ ID NO: 570; SEQ ID NO: 571; SEQ ID NO: 572; SEQ ID NO: 573; SEQ ID NO: 574; SEQ ID NO: 575; SEQ ID NO: 576; SEQ ID NO: 577; SEQ ID NO: 578; SEQ ID NO: 579; SEQ ID NO: 580; SEQ ID NO: 581; SEQ ID NO: 582; SEQ ID NO: 583; SEQ ID NO: 584; SEQ ID NO: 585; SEQ ID NO: 586; SEQ ID NO: 587; SEQ ID NO: 588; SEQ ID NO: 589; SEQ ID NO: 590; SEQ ID NO: 591; SEQ ID NO: 592; SEQ ID NO: 593; SEQ ID NO: 594; SEQ ID NO: 595; SEQ ID NO: 596; SEQ ID NO: 597; SEQ ID NO: 598; SEQ ID NO: 599; SEQ ID NO: 600; SEQ ID NO: 601; SEQ ID NO: 602; SEQ ID NO: 603; SEQ ID NO: 604; SEQ ID NO: 605; SEQ ID NO: 606; SEQ ID NO: 607; SEQ ID NO: 608; SEQ ID NO: 609; SEQ ID NO: 610; SEQ ID NO: 611; SEQ ID NO: 612; SEQ ID NO: 613; SEQ ID NO: 614; SEQ ID NO: 615; SEQ ID NO: 616; SEQ ID NO: 617; SEQ ID NO: 618; SEQ ID NO: 619; SEQ ID NO: 620; SEQ ID NO: 621; SEQ ID NO: 622; SEQ ID NO: 623; SEQ ID NO: 624; SEQ ID NO: 625; SEQ ID NO: 626; SEQ ID NO: 627; SEQ ID NO: 628; SEQ ID NO: 629; SEQ ID NO: 630; SEQ ID NO: 631; SEQ ID NO: 632; SEQ ID NO: 633; SEQ ID NO: 634; SEQ ID NO: 635; SEQ ID NO: 636; SEQ ID NO: 637; SEQ ID NO: 638; SEQ ID NO: 639; SEQ ID NO: 640; SEQ ID NO: 641; SEQ ID NO: 642; SEQ ID NO: 643; SEQ ID NO: 644; SEQ ID NO: 645; SEQ ID NO: 646; SEQ ID NO: 647; SEQ ID NO: 648; SEQ ID NO: 649; SEQ ID NO: 650; SEQ ID NO: 651; SEQ ID NO: 652; SEQ ID NO: 653; SEQ ID NO: 654; SEQ ID NO: 655; SEQ ID NO: 656; SEQ ID NO: 657; SEQ ID NO: 658; SEQ ID NO: 659; SEQ ID NO: 660; SEQ ID NO: 661; SEQ ID NO: 662; SEQ ID NO: 663; SEQ ID NO: 664; SEQ ID NO: 665; SEQ ID NO: 666; SEQ ID NO: 667; SEQ ID NO: 668; SEQ ID NO: 669; SEQ ID NO: 670; SEQ ID NO: 671; SEQ ID NO: 672; SEQ ID NO: 673; SEQ ID NO: 674; SEQ ID NO: 675; SEQ ID NO: 676; SEQ ID NO: 677; SEQ ID NO: 678; SEQ ID NO: 679; SEQ ID NO: 680; SEQ ID NO: 681; SEQ ID NO: 682; SEQ ID NO: 682; SEQ ID NO: 683; SEQ ID NO: 684; SEQ ID NO: 685; SEQ ID NO: 686; SEQ ID NO: 687; SEQ ID NO: 688; SEQ ID NO: 689; SEQ ID NO: 690; SEQ ID NO: 691; SEQ ID NO: 692; SEQ ID NO: 693; SEQ ID NO: 694; SEQ ID NO: 695; SEQ ID NO: 696; SEQ ID NO: 697; SEQ ID NO: 698; SEQ ID NO: 699; SEQ ID NO: 700; SEQ ID NO: 701; SEQ ID NO: 702; SEQ ID NO: 703; SEQ ID NO: 704; SEQ ID NO: 705; SEQ ID NO: 706; SEQ ID NO: 707; SEQ ID NO: 708; SEQ ID NO: 709; SEQ ID NO: 710; SEQ ID NO: 711; SEQ ID NO: 712; SEQ ID NO: 713; SEQ ID NO: 714; SEQ ID NO: 715; SEQ ID NO: 716; SEQ ID NO: 717; SEQ ID NO: 718; SEQ ID NO: 719; SEQ ID NO: 720; SEQ ID NO: 721; SEQ ID NO: 722; SEQ ID NO: 723; SEQ ID NO: 724; SEQ ID NO: 725; SEQ ID NO: 726; SEQ ID NO: 727; SEQ ID NO: 728; SEQ ID NO: 729; SEQ ID NO: 730; SEQ ID NO: 731; SEQ ID NO: 732; SEQ ID NO: 733; SEQ ID NO: 734; SEQ ID NO: 735; SEQ ID NO: 736; SEQ ID NO: 737; SEQ ID NO: 738; SEQ ID NO: 739; SEQ ID NO: 740; SEQ ID NO: 741; SEQ ID NO: 742; SEQ ID NO: 743; SEQ ID NO: 744; SEQ ID NO: 745; SEQ ID NO: 746; SEQ ID NO: 747; SEQ ID NO: 748; SEQ ID NO: 749; SEQ ID NO: 750; SEQ ID NO: 751; SEQ ID NO: 752; SEQ ID NO: 753; SEQ ID NO: 754; SEQ ID NO: 755; SEQ ID NO: 756; SEQ ID NO: 757; SEQ ID NO: 758; SEQ ID NO: 759; SEQ ID NO: 760; SEQ ID NO: 761; SEQ ID NO: 762; SEQ ID NO: 763; SEQ ID NO: 764; SEQ ID NO: 765; SEQ ID NO: 766; SEQ ID NO: 767; SEQ ID NO: 768; SEQ ID NO: 769; SEQ ID NO: 770; SEQ ID NO: 771; SEQ ID NO: 772; SEQ ID NO: 773; SEQ ID NO: 774; SEQ ID NO: 775; SEQ ID NO: 776; SEQ ID NO: 777; SEQ ID NO: 778; SEQ ID NO: 779; SEQ ID NO: 780; SEQ ID NO: 781; SEQ ID NO: 782; SEQ ID NO: 783; SEQ ID NO: 784; SEQ ID NO: 785; SEQ ID NO: 786; SEQ ID NO: 787; SEQ ID NO: 788; SEQ ID NO: 789; SEQ ID NO: 790; SEQ ID NO: 791; SEQ ID NO: 792; SEQ ID NO: 793; SEQ ID NO: 794; SEQ ID NO: 795; SEQ ID NO: 796; SEQ ID NO: 797; SEQ ID NO: 798; SEQ ID NO: 799; SEQ ID NO: 800; SEQ ID NO: 801; SEQ ID NO: 802; SEQ ID NO: 9537; SEQ ID NO: 9538; SEQ ID NO: 9539; SEQ ID NO: 9540; SEQ ID NO: 9541; SEQ ID NO: 9542; SEQ ID NO: 9543; SEQ ID NO: 9544; SEQ ID NO: 9545; SEQ ID NO: 9546; SEQ ID NO: 9547; SEQ ID NO: 9548; SEQ ID NO: 9549; SEQ ID NO: 9550; SEQ ID NO: 9551; SEQ ID NO: 9552; SEQ ID NO: 9553 and SEQ ID NO: 9554.

[0124] In another embodiment, the H. pylori cell envelope polypeptide or a fragment thereof is an H. pylori inner membrane polypeptide or a fragment thereof involved in amino acid metabolism and transport encoded by a nucleic acid having a nucleotide sequence selected from the group consisting of SEQ ID NO: 683; SEQ ID NO: 684; SEQ ID NO: 685; SEQ ID NO: 686; SEQ ID NO: 687; SEQ ID NO: 688; SEQ ID NO: 689; SEQ ID NO: 690; SEQ ID NO: 691; SEQ ID NO: 692; SEQ ID NO: 693; SEQ ID NO: 694; SEQ ID NO: 695; SEQ ID NO: 696; SEQ ID NO: 697; SEQ ID NO: 698; SEQ ID NO: 699; SEQ ID NO: 700; SEQ ID NO: 701; SEQ ID NO: 702; SEQ ID NO: 703; SEQ ID NO: 704; SEQ ID NO: 705; SEQ ID NO: 706; SEQ ID NO: 707; SEQ ID NO: 708; SEQ ID NO: 709; SEQ ID NO: 710; SEQ ID NO: 711; SEQ ID NO: 712; SEQ ID NO: 713; SEQ ID NO: 714; SEQ ID NO: 715; SEQ ID NO: 716; SEQ ID NO: 717; SEQ ID NO: 718; SEQ ID NO: 719; SEQ ID NO: 720; SEQ ID NO: 9547 and SEQ ID NO: 9548.

[0125] In another embodiment, the H. pylori cell envelope polypeptide or a fragment thereof is an H. pylori inner membrane polypeptide or a fragment thereof involved in nucleotide, lipid, or cofactor metabolism and transport encoded by a nucleic acid having a nucleotide sequence selected from the group consisting of SEQ ID NO: 721; SEQ ID NO: 722; SEQ ID NO: 723; SEQ ID NO: 724; SEQ ID NO: 725; SEQ ID NO: 726; SEQ ID NO: 727; SEQ ID NO: 728; SEQ ID NO: 729; SEQ ID NO: 730; SEQ ID NO: 731; SEQ ID NO: 732; SEQ ID NO: 733; SEQ ID NO: 734; SEQ ID NO: 735; SEQ ID NO: 736; SEQ ID NO: 737; SEQ ID NO: 738; SEQ ID NO: 739; SEQ ID NO: 740; SEQ ID NO: 741; SEQ ID NO: 742; SEQ ID NO: 743; SEQ ID NO: 744; SEQ ID NO: 745; SEQ ID NO: 746; SEQ ID NO: 747; SEQ ID NO: 748; SEQ ID NO: 749; SEQ ID NO: 750; SEQ ID NO: 751; SEQ ID NO: 752; SEQ ID NO: 753; SEQ ID NO: 754; SEQ ID NO: 755; SEQ ID NO: 756; SEQ ID NO: 757; SEQ ID NO: 758; SEQ ID NO: 759; SEQ ID NO: 760; SEQ ID NO: 761; SEQ ID NO: 762; SEQ ID NO: 763; SEQ ID NO: 764 and SEQ ID NO: 9549.

[0126] In another embodiment, the H. pylori cell envelope polypeptide or a fragment thereof is an H. pylori inner membrane polypeptide or a fragment thereof involved in inorganic ion transport encoded by a nucleic acid having a nucleotide sequence selected from the group consisting of SEQ ID NO: 765; SEQ ID NO: 766; SEQ ID NO: 767; SEQ ID NO: 768; SEQ ID NO: 769; SEQ ID NO: 770; SEQ ID NO: 771; SEQ ID NO: 772; SEQ ID NO: 773; SEQ ID NO: 774; SEQ ID NO: 775; SEQ ID NO: 776; SEQ ID NO: 777; SEQ ID NO: 778; SEQ ID NO: 779; SEQ ID NO: 780; SEQ ID NO: 781; SEQ ID NO: 782; SEQ ID NO: 783; SEQ ID NO: 784; SEQ ID NO: 785; SEQ ID NO: 786; SEQ ID NO: 787; SEQ ID NO: 788; SEQ ID NO: 789; SEQ ID NO: 790; SEQ ID NO: 791; SEQ ID NO: 792; SEQ ID NO: 793; SEQ ID NO: 794; SEQ ID NO: 795; SEQ ID NO: 796; SEQ ID NO: 797; SEQ ID NO: 798; SEQ ID NO: 799; SEQ ID NO: 9550; SEQ ID NO: 9551; SEQ ID NO: 9552; SEQ ID NO: 9553 and SEQ ID NO: 9554.

[0127] In another embodiment, the H. pylori cell envelope polypeptide or a fragment thereof is an H. pylori inner membrane polypeptide or a fragment thereof involved in carbohydrate metabolism and transport encoded by a nucleic acid having a nucleotide sequence selected from the group consisting of SEQ ID NO: 800; SEQ ID NO: 801; SEQ ID NO: 802.

[0128] In another embodiment, the H. pylori cell envelope polypeptide or a fragment thereof is an H. pylori inner membrane polypeptide or a fragment thereof involved in outer membrane and cell wall formation encoded by a nucleic acid having a nucleotide sequence selected from the group consisting of SEQ ID NO: 803; SEQ ID NO: 804; SEQ ID NO: 805; SEQ ID NO: 806; SEQ ID NO: 807; SEQ ID NO: 808; SEQ ID NO: 809; SEQ ID NO: 810; SEQ ID NO: 811; SEQ ID NO: 812; SEQ ID NO: 813; SEQ ID NO: 814; SEQ ID NO: 815; SEQ ID NO: 816; SEQ ID NO: 817; SEQ ID NO: 818; SEQ ID NO: 819; SEQ ID NO: 820; SEQ ID NO: 821; SEQ ID NO: 822; SEQ ID NO: 823; SEQ ID NO: 824; SEQ ID NO: 825; SEQ ID NO: 826; SEQ ID NO: 827; SEQ ID NO: 828; SEQ ID NO: 829; SEQ ID NO: 830; SEQ ID NO: 831; SEQ ID NO: 832; SEQ ID NO: 833; SEQ ID NO: 834; SEQ ID NO: 835; SEQ ID NO: 836; SEQ ID NO: 837; SEQ ID NO: 838; SEQ ID NO: 839; SEQ ID NO: 840; SEQ ID NO: 841; SEQ ID NO: 842; SEQ ID NO: 843; SEQ ID NO: 844; SEQ ID NO: 845; SEQ ID NO: 846; SEQ ID NO: 847; SEQ ID NO: 848; SEQ ID NO: 9555; SEQ ID NO: 9556; SEQ ID NO: 9557; SEQ ID NO: 9558; SEQ ID NO: 9559 and SEQ ID NO: 9560.

[0129] In another embodiment, the H. pylori cell envelope polypeptide or a fragment thereof is an H. pylori inner membrane polypeptide or a fragment thereof involved in energy conversion encoded by a nucleic acid having a nucleotide sequence selected from the group consisting of SEQ ID NO: 849; SEQ ID NO: 850; SEQ ID NO: 851; SEQ ID NO: 852; SEQ ID NO: 853; SEQ ID NO: 854; SEQ ID NO: 855; SEQ ID NO: 856; SEQ ID NO: 857; SEQ ID NO: 858; SEQ ID NO: 859; SEQ ID NO: 860; SEQ ID NO: 861; SEQ ID NO: 862; SEQ ID NO: 863; SEQ ID NO: 864; SEQ ID NO: 865; SEQ ID NO: 866; SEQ ID NO: 867; SEQ ID NO: 868; SEQ ID NO: 869; SEQ ID NO: 870; SEQ ID NO: 871; SEQ ID NO: 872; SEQ ID NO: 873; SEQ ID NO: 874; SEQ ID NO: 875; SEQ ID NO: 876; SEQ ID NO: 877; SEQ ID NO: 878; SEQ ID NO: 879; SEQ ID NO: 880; SEQ ID NO: 881; SEQ ID NO: 882; SEQ ID NO: 883; SEQ ID NO: 884; SEQ ID NO: 885; SEQ ID NO: 886; SEQ ID NO: 887; SEQ ID NO: 888; SEQ ID NO: 889; SEQ ID NO: 890; SEQ ID NO: 891; SEQ ID NO: 892; SEQ ID NO: 893; SEQ ID NO: 894; SEQ ID NO: 895; SEQ ID NO: 896; SEQ ID NO: 897; SEQ ID NO: 898; SEQ ID NO: 899; SEQ ID NO: 900; SEQ ID NO: 901; SEQ ID NO: 902; SEQ ID NO: 903; SEQ ID NO: 904; SEQ ID NO: 905; SEQ ID NO: 906; SEQ ID NO: 907; SEQ ID NO: 908; SEQ ID NO: 909; SEQ ID NO: 910; SEQ ID NO: 911; SEQ ID NO: 912; SEQ ID NO: 913; SEQ ID NO: 914; SEQ ID NO: 915; SEQ ID NO: 916; SEQ ID NO: 917; SEQ ID NO: 918; SEQ ID NO: 919; SEQ ID NO: 920; SEQ ID NO: 921; SEQ ID NO: 922; SEQ ID NO: 923; SEQ ID NO: 924; SEQ ID NO: 925; SEQ ID NO: 926; SEQ ID NO: 927; SEQ ID NO: 928; SEQ ID NO: 929; SEQ ID NO: 930; SEQ ID NO: 931; SEQ ID NO: 932; SEQ ID NO: 933; SEQ ID NO: 934; SEQ ID NO: 935; SEQ ID NO: 936; SEQ ID NO: 937; SEQ ID NO: 938; SEQ ID NO: 939; SEQ ID NO: 940; SEQ ID NO: 941; SEQ ID NO: 942; SEQ ID NO: 943; SEQ ID NO: 944; SEQ ID NO: 945; SEQ ID NO: 946; SEQ ID NO: 947; SEQ ID NO: 948; SEQ ID NO: 949; SEQ ID NO: 950; SEQ ID NO: 951; SEQ ID NO: 952; SEQ ID NO: 953; SEQ ID NO: 954; SEQ ID NO: 955; SEQ ID NO: 956; SEQ ID NO: 957; SEQ ID NO: 958; SEQ ID NO: 959; SEQ ID NO: 960; SEQ ID NO: 961; SEQ ID NO: 962; SEQ ID NO: 963; SEQ ID NO: 964; SEQ ID NO: 965; SEQ ID NO: 966; SEQ ID NO: 967; SEQ ID NO: 968; SEQ ID NO: 969; SEQ ID NO: 970; SEQ ID NO: 971; SEQ ID NO: 972; SEQ ID NO: 973; SEQ ID NO: 974; SEQ ID NO: 975; SEQ ID NO: 976; SEQ ID NO: 977; SEQ ID NO: 978; SEQ ID NO: 979; SEQ ID NO: 980; SEQ ID NO: 981; SEQ ID NO: 982; SEQ ID NO: 983; SEQ ID NO: 984; SEQ ID NO: 985; SEQ ID NO: 986; SEQ ID NO: 987; SEQ ID NO: 988; SEQ ID NO: 989; SEQ ID NO: 990; SEQ ID NO: 991; SEQ ID NO: 992; SEQ ID NO: 993; SEQ ID NO: 994; SEQ ID NO: 995; SEQ ID NO: 9561; SEQ ID NO: 9562; SEQ ID NO: 9563; SEQ ID NO: 9564 and SEQ ID NO: 9565.

[0130] In another embodiment, the H. pylori cell envelope polypeptide or a fragment thereof is an H. pylori inner membrane polypeptide or a fragment thereof involved in secretion and adhesion encoded by a nucleic acid having a nucleotide sequence selected from the group consisting of SEQ ID NO: 996; SEQ ID NO: 997; SEQ ID NO: 998; SEQ ID NO: 999; SEQ ID NO: 1000; SEQ ID NO: 1001; SEQ ID NO: 1002; SEQ ID NO: 1003; SEQ ID NO: 1004; SEQ ID NO: 1005; SEQ ID NO: 1006; SEQ ID NO: 1007 and SEQ ID NO: 9566.

[0131] In another embodiment, the H. pylori cell envelope polypeptide or a fragment thereof is an H. pylori inner membrane polypeptide or a fragment thereof involved in regulation encoded by a nucleic acid having a nucleotide sequence selected from the group consisting of SEQ ID NO: 1008; SEQ ID NO: 1009; SEQ ID NO: 1010; SEQ ID NO: 1011; SEQ ID NO: 1012; SEQ ID NO 1013; SEQ ID NO: 1014; SEQ ID NO: 1015; SEQ ID NO: 1016; SEQ ID NO: 1017; SEQ ID NO: 1018; SEQ ID NO: 1019; SEQ ID NO: 1020; SEQ ID NO: 1021; SEQ ID NO: 1022; SEQ ID NO: 1023; SEQ ID NO: 1024; SEQ ID NO: 1025; SEQ ID NO: 1026 and SEQ ID NO: 1027.

[0132] In another embodiment, the H. pylori cell envelope polypeptide or a fragment thereof is an H. pylori inner membrane chaperone polypeptide or a fragment thereof encoded by a nucleic acid having a nucleotide sequence selected from the group consisting of SEQ ID NO: 1028; SEQ ID NO: 1029; SEQ ID NO: 1030; SEQ ID NO: 1031 and SEQ ID NO: 9567.

[0133] In another embodiment, the H. pylori cell envelope polypeptide or a fragment thereof is an H. pylori inner membrane polypeptide or a fragment thereof involved in cell division encoded by a nucleic acid having a nucleotide sequence selected from the group consisting of SEQ ID NO: 1032; SEQ ID NO: 1033; SEQ ID NO: 1034; SEQ ID NO: 1035; SEQ ID NO: 1036; SEQ ID NO: 1037; SEQ ID NO: 1038; SEQ ID NO: 1039; SEQ ID NO: 1040; SEQ ID NO: 1041; SEQ ID NO: 1042; SEQ ID NO: 1043; SEQ ID NO: 1044; SEQ ID NO: 1045; SEQ ID NO: 1046; SEQ ID NO: 1047; SEQ ID NO: 1048; SEQ ID NO: 1049; SEQ ID NO: 1050; SEQ ID NO: 1051; SEQ ID NO: 1052; SEQ ID NO: 9568 and SEQ ID NO: 9569.

[0134] In another embodiment, the H. pylori cell envelope polypeptide or a fragment thereof is an H. pylori inner membrane polypeptide or a fragment thereof involved in motility encoded by a nucleic acid having a nucleotide sequence selected from the group consisting of SEQ ID NO: 1053 and SEQ ID NO: 1054.

[0135] Particularly preferred is an isolated H. pylori cytoplasmic polypeptide or a fragment thereof, wherein the polypeptide has an amino acid sequence selected from the group consisting of SEQ ID NO: 6338; SEQ ID NO: 6339; SEQ ID NO: 6340; SEQ ID NO: 6341; SEQ ID NO: 6342; SEQ ID NO: 6343; SEQ ID NO: 6344; SEQ ID NO: 6345; SEQ ID NO: 6346; SEQ ID NO: 6347; SEQ ID NO: 6348; SEQ ID NO: 6349; SEQ ID NO: 6350; SEQ ID NO: 6351; SEQ ID NO: 6352; SEQ ID NO: 6353; SEQ ID NO: 6354; SEQ ID NO: 6355; SEQ ID NO: 6356; SEQ ID NO: 6357; SEQ ID NO: 6358; SEQ ID NO: 6359; SEQ ID NO: 6360; SEQ ID NO: 6361; SEQ ID NO: 6362; SEQ ID NO: 6363; SEQ ID NO: 6364; SEQ ID NO: 6365; SEQ ID NO: 6366; SEQ ID NO: 6367; SEQ ID NO: 6368; SEQ ID NO: 6369; SEQ ID NO: 6370; SEQ ID NO: 6371; SEQ ID NO: 6372; SEQ ID NO: 6373; SEQ ID NO: 6374; SEQ ID NO: 6375; SEQ ID NO: 6376; SEQ ID NO: 6377; SEQ ID NO: 6378; SEQ ID NO: 6379; SEQ ID NO: 6380; SEQ ID NO: 6381; SEQ ID NO: 6382; SEQ ID NO: 6383; SEQ ID NO: 6384; SEQ ID NO: 6385; SEQ ID NO: 6386; SEQ ID NO: 6387; SEQ ID NO: 6388; SEQ ID NO: 6389; SEQ ID NO: 6390; SEQ ID NO: 6391; SEQ ID NO: 6392; SEQ ID NO: 6393; SEQ ID NO: 6394; SEQ ID NO: 6395; SEQ ID NO: 6396; SEQ ID NO: 6397; SEQ ID NO: 6398; SEQ ID NO: 6399; SEQ ID NO: 6400; SEQ ID NO: 6401; SEQ ID NC. 6402; SEQ ID NO: 6403; SEQ ID NO: 6404; SEQ ID NO: 6405; SEQ ID NO: 6406; SEQ ID NO: 6407; SEQ ID NO: 6408; SEQ ID NO: 6409; SEQ ID NO: 6410; SEQ ID NO: 6411; SEQ ID NO: 6412; SEQ ID NO: 6413; SEQ ID NO: 6414; SEQ ID NO: 6415; SEQ ID NO: 6416; SEQ ID NO: 6417; SEQ ID NO: 6418; SEQ ID NO: 6419; SEQ ID NO: 6420; SEQ ID NO: 6421; SEQ ID NO: 6422; SEQ ID NO: 6423; SEQ ID NO: 6424; SEQ ID NO: 6425; SEQ ID NO: 6426; SEQ ID NO: 6427; SEQ ID NO: 6428; SEQ ID NO: 6429; SEQ ID NO: 6430; SEQ ID NO: 6431; SEQ ID NO: 6432; SEQ ID NO: 6433; SEQ ID NO: 6434; SEQ ID NO: 6435; SEQ ID NO: 6436; SEQ ID NO: 6437; SEQ ID NO: 6438; SEQ ID NO: 6439; SEQ ID NO: 6440; SEQ ID NO: 6441; SEQ ID NO: 6442; SEQ ID NO: 6443; SEQ ID NO: 6444; SEQ ID NO: 6445; SEQ ID NO: 6446; SEQ ID NO: 6447; SEQ ID NO: 6448; SEQ ID NO: 6449; SEQ ID NO: 6450; SEQ ID NO: 6451; SEQ ID NO: 6452; SEQ ID NO: 6453; SEQ ID NO: 6454; SEQ ID NO: 6455; SEQ ID NO: 6456; SEQ ID NO: 6457; SEQ ID NO: 6458; SEQ ID NO: 6459; SEQ ID NO: 6460; SEQ ID NO: 6461; SEQ ID NO: 6462; SEQ ID NO: 6463; SEQ ID NO: 6464; SEQ ID NO: 6465; SEQ ID NO: 6466; SEQ ID NO: 6467; SEQ ID NO: 6468; SEQ ID NO: 6469; SEQ ID NO: 6470; SEQ ID NO: 6471; SEQ ID NO: 6472; SEQ ID NO: 6473; SEQ ID NO: 6474; SEQ ID NO: 6475; SEQ ID NO: 6476; SEQ ID NO: 6477; SEQ ID NO: 6478; SEQ ID NO: 6479; SEQ ID NO: 6480; SEQ ID NO: 6481; SEQ ID NO: 6482; SEQ ID NO: 6483; SEQ ID NO: 6484; SEQ ID NO: 6485; SEQ ID NO: 6486; SEQ ID NO: 6487; SEQ ID NO: 6488; SEQ ID NO: 6489; SEQ ID NO: 6490; SEQ ID NO: 6491; SEQ ID NO: 6492; SEQ ID NO: 6493; SEQ ID NO: 6494; SEQ ID NO: 6495; SEQ ID NO: 6496; SEQ ID NO: 6497; SEQ ID NO: 6498; SEQ ID NO: 6499; SEQ ID NO: 6500; SEQ ID NO: 6501; SEQ ID NO: 6502; SEQ ID NO: 6503; SEQ ID NO: 6504; SEQ ID NO: 6505; SEQ ID NO: 6506; SEQ ID NO: 6507; SEQ ID NO: 6508; SEQ ID NO: 6509; SEQ ID NO: 6510; SEQ ID NO: 6511; SEQ ID NO: 6512; SEQ ID NO: 6513; SEQ ID NO: 6514; SEQ ID NO: 6515; SEQ ID NO: 6516; SEQ ID NO: 6517; SEQ ID NO: 6518; SEQ ID NO: 6519; SEQ ID NO: 6520; SEQ ID NO: 6521; SEQ ID NO: 6522; SEQ ID NO: 6523; SEQ ID NO: 6524; SEQ ID NO: 6525; SEQ ID NO: 6526; SEQ ID NO: 6527; SEQ ID NO: 6528; SEQ ID NO: 6529; SEQ ID NO: 6530; SEQ ID NO: 6531; SEQ ID NO: 6532; SEQ ID NO: 6533; SEQ ID NO: 6534; SEQ ID NO: 6535; SEQ ID NO: 6536; SEQ ID NO: 6537; SEQ ID NO: 6538; SEQ ID NO: 6539; SEQ ID NO: 6540; SEQ ID NO: 6541; SEQ ID NO: 6542; SEQ ID NO: 6543; SEQ ID NO: 6544; SEQ ID NO: 6545; SEQ ID NO: 6546; SEQ ID NO: 6547; SEQ ID NO: 6548; SEQ ID NO: 6549; SEQ ID NO: 6550; SEQ ID NO: 6551; SEQ ID NO: 6552; SEQ ID NO: 6553; SEQ ID NO: 6554; SEQ ID NO: 6555; SEQ ID NO: 6556; SEQ ID NO: 6557; SEQ ID NO: 6558; SEQ ID NO: 6559; SEQ ID NO: 6560; SEQ ID NO: 6561; SEQ ID NO: 6562; SEQ ID NO: 6563; SEQ ID NO: 6564; SEQ ID NO: 6565; SEQ ID NO: 6566; SEQ ID NO: 6567; SEQ ID NO: 6568; SEQ ID NO: 6569; SEQ ID NO: 6570; SEQ ID NO: 6571; SEQ ID NO: 6572; SEQ ID NO: 6573; SEQ ID NO: 6574; SEQ ID NO: 6575; SEQ ID NO: 6576; SEQ ID NO: 6577; SEQ ID NO: 6578; SEQ ID NO: 6579; SEQ ID NO: 6580; SEQ ID NO: 6581; SEQ ID NO: 6582; SEQ ID NO: 6583; SEQ ID NO: 6584; SEQ ID NO: 6585; SEQ ID NO: 6586; SEQ ID NO: 6587; SEQ ID NO: 6588; SEQ ID NO: 6589; SEQ ID NO: 6590; SEQ ID NO: 6591; SEQ ID NO: 6592; SEQ ID NO: 6593; SEQ ID NO: 6594; SEQ ID NO: 6595; SEQ ID NO: 6596; SEQ ID NO: 6597; SEQ ID NO: 6598; SEQ ID NO: 6599; SEQ ID NO: 6600; SEQ ID NO: 6601; SEQ ID NO: 6602; SEQ ID NO: 6603; SEQ ID NO: 6604; SEQ ID NO: 6605; SEQ ID NO: 6606; SEQ ID NO: 6607; SEQ ID NO: 6608; SEQ ID NO: 6609; SEQ ID NO: 6610; SEQ ID NO: 6611; SEQ ID NO: 6612; SEQ ID NO: 6613; SEQ ID NO: 6614; SEQ ID NO: 6615; SEQ ID NO: 6616; SEQ ID NO: 6617; SEQ ID NO: 6618; SEQ ID NO: 6619; SEQ ID NO: 6620; SEQ ID NO: 6621; SEQ ID NO: 6622; SEQ ID NO: 6623; SEQ ID NO: 6624; SEQ ID NO: 6625; SEQ ID NO: 6626; SEQ ID NO: 6627; SEQ ID NO: 6628; SEQ ID NO: 6629; SEQ ID NO: 6630; SEQ ID NO: 6631; SEQ ID NO: 6632; SEQ ID NO: 6633; SEQ ID NO: 6634; SEQ ID NO: 6635; SEQ ID NO: 6636; SEQ ID NO: 6637; SEQ ID NO: 6638; SEQ ID NO: 6639; SEQ ID NO: 6640; SEQ ID NO: 6641; SEQ ID NO: 6642; SEQ ID NO: 6643; SEQ ID NO: 6644; SEQ ID NO: 6645; SEQ ID NO: 6646; SEQ ID NO: 6647; SEQ ID NO: 6648; SEQ ID NO: 6649; SEQ ID NO: 6650; SEQ ID NO: 6651; SEQ ID NO: 6652; SEQ ID NO: 6653; SEQ ID NO: 6654; SEQ ID NO: 6655; SEQ ID NO: 6656; SEQ ID NO: 6657; SEQ ID NO: 6658; SEQ ID NO: 6659; SEQ ID NO: 6660; SEQ ID NO: 6661; SEQ ID NO: 6662; SEQ ID NO: 6663; SEQ ID NO: 6664; SEQ ID NO: 6665; SEQ ID NO: 6666; SEQ ID NO: 6667; SEQ ID NO: 6668; SEQ ID NO: 6669; SEQ ID NO: 6670; SEQ ID NO: 6671; SEQ ID NO: 6672; SEQ ID NO: 6673; SEQ ID NO: 6674; SEQ ID NO: 6675; SEQ ID NO: 6676; SEQ ID NO: 6677; SEQ ID NO: 6678; SEQ ID NO: 6679; SEQ ID NO: 6680; SEQ ID NO: 6681; SEQ ID NO: 6682; SEQ ID NO: 6683; SEQ ID NO: 6684; SEQ ID NO: 6685; SEQ ID NO: 6686; SEQ ID NO: 6687; SEQ ID NO: 6688; SEQ ID NO: 6689; SEQ ID NO: 6690; SEQ ID NO: 6691; SEQ ID NO: 6692; SEQ ID NO: 6693; SEQ ID NO: 6694; SEQ ID NO: 6695; SEQ ID NO: 6696; SEQ ID NO: 6697; SEQ ID NO: 6698; SEQ ID NO: 6699; SEQ ID NO: 6700; SEQ ID NO: 6701; SEQ ID NO: 6702; SEQ ID NO: 6703; SEQ ID NO: 6704; SEQ ID NO: 6705; SEQ ID NO: 6706; SEQ ID NO: 6707; SEQ ID NO: 6708; SEQ ID NO: 6709; SEQ ID NO: 6710; SEQ ID NO: 6711; SEQ ID NO: 6712; SEQ ID NO: 6713; SEQ ID NO: 6714; SEQ ID NO: 6715; SEQ ID NO: 6716; SEQ ID NO: 6717; SEQ ID NO: 6718; SEQ ID NO: 6719; SEQ ID NO: 6720; SEQ ID NO: 6721; SEQ ID NO: 6722; SEQ ID NO: 6723; SEQ ID NO: 6724; SEQ ID NO: 6725; SEQ ID NO: 6726; SEQ ID NO: 6727; SEQ ID NO: 6728; SEQ ID NO: 6729; SEQ ID NO: 6730; SEQ ID NO: 6731; SEQ ID NO: 6732; SEQ ID NO: 6733; SEQ ID NO: 6734; SEQ ID NO: 6735; SEQ ID NO: 6736; SEQ ID NO: 6737; SEQ ID NO: 6738; SEQ ID NO: 6739; SEQ ID NO: 6740; SEQ ID NO: 6741; SEQ ID NO: 6742; SEQ ID NO: 6743; SEQ ID NO: 6744; SEQ ID NO: 6745; SEQ ID NO: 6746; SEQ ID NO: 6747; SEQ ID NO: 6748; SEQ ID NO: 6749; SEQ ID NO: 6750; SEQ ID NO: 6751; SEQ ID NO: 6752; SEQ ID NO: 6753; SEQ ID NO: 6754; SEQ ID NO: 6755; SEQ ID NO: 6756; SEQ ID NO: 6757; SEQ ID NO: 6758; SEQ ID NO: 6759; SEQ ID NO: 6760; SEQ ID NO: 6761; SEQ ID NO: 6762; SEQ ID NO: 6763; SEQ ID NO: 6764; SEQ ID NO: 6765; SEQ ID NO: 6766; SEQ ID NO: 6767; SEQ ID NO: 6768; SEQ ID NO: 6769; SEQ ID NO: 6770; SEQ ID NO: 6771; SEQ ID NO: 6772; SEQ ID NO: 6773; SEQ ID NO: 6774; SEQ ID NO: 6775; SEQ ID NO: 6776; SEQ ID NO: 6777; SEQ ID NO: 6778; SEQ ID NO: 6779; SEQ ID NO: 6780; SEQ ID NO: 6781; SEQ ID NO: 6782; SEQ ID NO: 6783; SEQ ID NO: 6784; SEQ ID NO: 6785; SEQ ID NO: 6786; SEQ ID NO: 6787; SEQ ID NO: 6788; SEQ ID NO: 6789; SEQ ID NO: 6790; SEQ ID NO: 6791; SEQ ID NO: 6792; SEQ ID NO: 6793; SEQ ID NO: 6794; SEQ ID NO: 6795; SEQ ID NO: 6796; SEQ ID NO: 6797; SEQ ID NO: 6798; SEQ ID NO: 6799; SEQ ID NO: 6800; SEQ ID NO: 6801; SEQ ID NO: 6802; SEQ ID NO: 6803; SEQ ID NO: 6804; SEQ ID NO: 6805; SEQ ID NO: 6806; SEQ ID NO: 6807; SEQ ID NO: 6808; SEQ ID NO: 6809; SEQ ID NO: 6810; SEQ ID NO: 6811; SEQ ID NO: 6812; SEQ ID NO: 6813; SEQ ID NO: 6814; SEQ ID NO: 6815; SEQ ID NO: 6816; SEQ ID NO: 6817; SEQ ID NO: 6818; SEQ ID NO: 6819; SEQ ID NO: 6820; SEQ ID NO: 6821; SEQ ID NO: 6822; SEQ ID NO: 6823; SEQ ID NO: 6824; SEQ ID NO: 6825; SEQ ID NO: 6826; SEQ ID NO: 6827; SEQ ID NO: 6828; SEQ ID NO: 6829; SEQ ID NO: 6830; SEQ ID NO: 6831; SEQ ID NO: 6832; SEQ ID NO: 6833; SEQ ID NO: 6834; SEQ ID NO: 6835; SEQ ID NO: 6836; SEQ ID NO: 6837; SEQ ID NO: 6838; SEQ ID NO: 6839; SEQ ID NO: 6840; SEQ ID NO: 6841; SEQ ID NO: 6842; SEQ ID NO: 6843; SEQ ID NO: 6844; SEQ ID NO: 6845; SEQ ID NO: 6846; SEQ ID NO: 6847; SEQ ID NO: 6848; SEQ ID NO: 6849; SEQ ID NO: 6850; SEQ ID NO: 6851; SEQ ID NO: 6852; SEQ ID NO: 6853; SEQ ID NO: 6854; SEQ ID NO: 6855; SEQ ID NO: 6856; SEQ ID NO: 6857; SEQ ID NO: 6858; SEQ ID NO: 6859; SEQ ID NO: 6860; SEQ ID NO: 6861; SEQ ID NO: 6862; SEQ ID NO: 6863; SEQ ID NO: 6864; SEQ ID NO: 6865; SEQ ID NO: 6866; SEQ ID NO: 6867; SEQ ID NO: 6868; SEQ ID NO: 6869; SEQ ID NO: 6870; SEQ ID NO: 6871; SEQ ID NO: 6872; SEQ ID NO: 6873; SEQ ID NO: 6874; SEQ ID NO: 6875; SEQ ID NO: 6876; SEQ ID NO: 6877; SEQ ID NO: 6878; SEQ ID NO: 6879; SEQ ID NO: 6880; SEQ ID NO: 6881; SEQ ID NO: 6882; SEQ ID NO: 6883; SEQ ID NO: 6884; SEQ ID NO: 6885; SEQ ID NO: 6886; SEQ ID NO: 6887; SEQ ID NO: 6888; SEQ ID NO: 6889; SEQ ID NO: 6890; SEQ ID NO: 6891; SEQ ID NO: 6892; SEQ ID NO: 6893; SEQ ID NO: 6894; SEQ ID NO: 6895; SEQ ID NO: 6896; SEQ ID NO: 6897; SEQ ID NO: 6898; SEQ ID NO: 6899; SEQ ID NO: 6900; SEQ ID NO: 6901; SEQ ID NO: 6902; SEQ ID NO: 6903; SEQ ID NO: 6904; SEQ ID NO: 6905; SEQ ID NO: 6906; SEQ ID NO: 6907; SEQ ID NO: 6908; SEQ ID NO: 6909; SEQ ID NO: 6910; SEQ ID NO: 6911; SEQ ID NO: 6912; SEQ ID NO: 6913; SEQ ID NO: 6914; SEQ ID NO: 6915; SEQ ID NO: 6916; SEQ ID NO: 6917; SEQ ID NO: 6918; SEQ ID NO: 6919; SEQ ID NO: 6920; SEQ ID NO: 6921; SEQ ID NO: 6922; SEQ ID NO: 6923; SEQ ID NO: 6924; SEQ ID NO: 6925; SEQ ID NO: 6926; SEQ ID NO: 6927; SEQ ID NO: 6928; SEQ ID NO: 6929; SEQ ID NO: 6930; SEQ ID NO: 6931; SEQ ID NO: 6932; SEQ ID NO: 6933; SEQ ID NO: 6934; SEQ ID NO: 6935; SEQ ID NO: 6936; SEQ ID NO: 6937; SEQ ID NO: 6938; SEQ ID NO: 6939; SEQ ID NO: 6940; SEQ ID NO: 6941; SEQ ID NO: 6942; SEQ ID NO: 6943; SEQ ID NO: 6944; SEQ ID NO: 6945; SEQ ID NO: 6946; SEQ ID NO: 6947; SEQ ID NO: 6948; SEQ ID NO: 6949; SEQ ID NO: 6950; SEQ ID NO: 6951; SEQ ID NO: 6952; SEQ ID NO: 6953; SEQ ID NO: 6954; SEQ ID NO: 6955; SEQ ID NO: 6956; SEQ ID NO: 6957; SEQ ID NO: 6958; SEQ ID NO: 6959; SEQ ID NO: 6960; SEQ ID NO: 6961; SEQ ID NO: 6962; SEQ ID NO: 6963; SEQ ID NO: 6964; SEQ ID NO: 6965; SEQ ID NO: 6966; SEQ ID NO: 6967; SEQ ID NO: 6968; SEQ ID NO: 6969; SEQ ID NO: 6970; SEQ ID NO: 6971; SEQ ID NO: 6972; SEQ ID NO: 6973; SEQ ID NO: 6974; SEQ ID NO: 6975; SEQ ID NO: 6976; SEQ ID NO: 6977; SEQ ID NO: 6978; SEQ ID NO: 6979; SEQ ID NO: 6980; SEQ ID NO: 6981; SEQ ID NO: 6982; SEQ ID NO: 6983; SEQ ID NO: 6984; SEQ ID NO: 6985; SEQ ID NO: 6986; SEQ ID NO: 6987; SEQ ID NO: 6988; SEQ ID NO: 6989; SEQ ID NO: 6990; SEQ ID NO: 6991; SEQ ID NO: 6992; SEQ ID NO: 6993; SEQ ID NO: 6994; SEQ ID NO: 6995; SEQ ID NO: 6996; SEQ ID NO: 6997; SEQ ID NO: 6998; SEQ ID NO: 6999; SEQ ID NO: 7000; SEQ ID NO: 7001; SEQ ID NO: 7002; SEQ ID NO: 7003; SEQ ID NO: 7004; SEQ ID NO: 7005; SEQ ID NO: 7006; SEQ ID NO: 7007; SEQ ID NO: 7008; SEQ ID NO: 7009; SEQ ID NO: 7010; SEQ ID NO: 7011; SEQ ID NO: 7012; SEQ ID NO: 7013; SEQ ID NO: 7014; SEQ ID NO: 7015; SEQ ID NO: 7016; SEQ ID NO: 7017; SEQ ID NO: 7018; SEQ ID NO: 7019; SEQ ID NO: 7020; SEQ ID NO: 7021; SEQ ID NO: 7022; SEQ ID NO: 7023; SEQ ID NO: 7024; SEQ ID NO: 7025; SEQ ID NO: 7026; SEQ ID NO: 7027; SEQ ID NO: 7028; SEQ ID NO: 7029; SEQ ID NO: 7030; SEQ ID NO: 7031; SEQ ID NO: 7032; SEQ ID NO: 7033; SEQ ID NO: 7034; SEQ ID NO: 7035; SEQ ID NO: 7036; SEQ ID NO: 7037; SEQ ID NO: 7038; SEQ ID NO: 7039; SEQ ID NO: 7040; SEQ ID NO: 7041; SEQ ID NO: 7042; SEQ ID NO: 7043; SEQ ID NO: 7044; SEQ ID NO: 7045; SEQ ID NO: 7046; SEQ ID NO: 7047; SEQ ID NO: 7048; SEQ ID NO: 7049; SEQ ID NO: 7050; SEQ ID NO: 7051; SEQ ID NO: 7052; SEQ ID NO: 7053; SEQ ID NO: 7054; SEQ ID NO: 7055; SEQ ID NO-7056; SEQ ID NO: 7057; SEQ ID NO: 7058; SEQ ID NO: 7059; SEQ ID NO: 7060; SEQ ID NO: 7061; SEQ ID NO: 7062; SEQ ID NO: 7063; SEQ ID NO: 7064; SEQ ID NO: 7065; SEQ ID NO: 7066; SEQ ID NO: 7067; SEQ ID NO: 7068; SEQ ID NO: 7069; SEQ ID NO: 7070; SEQ ID NO: 7071; SEQ ID NO: 7072; SEQ ID NO: 7073; SEQ ID NO: 7074; SEQ ID NO: 7075; SEQ ID NO: 7076; SEQ ID NO: 7077; SEQ ID NO: 7078; SEQ ID NO: 7079; SEQ ID NO: 7080; SEQ ID NO: 7081; SEQ ID NO: 7082; SEQ ID NO: 7083; SEQ ID NO: 7084; SEQ ID NO: 7085; SEQ ID NO: 7086; SEQ ID NO: 7087; SEQ ID NO: 7088; SEQ ID NO: 7089; SEQ ID NO: 7090; SEQ ID NO: 7091; SEQ ID NO: 7092; SEQ ID NO: 7093; SEQ ID NO: 7094; SEQ ID NO: 7095; SEQ ID NO: 7096; SEQ ID NO: 7097; SEQ ID NO: 7098; SEQ ID NO: 7099; SEQ ID NO: 7100; SEQ ID NO: 7101; SEQ ID NO: 7102; SEQ ID NO: 7103; SEQ ID NO: 7104; SEQ ID NO: 7105; SEQ ID NO: 7106; SEQ ID NO: 7107; SEQ ID NO: 7108; SEQ ID NO: 7109; SEQ ID NO: 7110; SEQ ID NO: 7111; SEQ ID NO: 7112; SEQ ID NO: 7113; SEQ ID NO: 7114; SEQ ID NO: 7115; SEQ ID NO: 7116; SEQ ID NO: 7117; SEQ ID NO: 7118; SEQ ID NO: 7119; SEQ ID NO: 7120; SEQ ID NO: 7121; SEQ ID NO: 7122; SEQ ID NO: 7123; SEQ ID NO: 7124; SEQ ID NO: 7125; SEQ ID NO: 7126; SEQ ID NO: 7127; SEQ ID NO: 7128; SEQ ID NO: 7129; SEQ ID NO: 7130; SEQ ID NO: 7131; SEQ ID NO: 7132; SEQ ID NO: 7133; SEQ ID NO: 7134; SEQ ID NO: 7135; SEQ ID NO: 7136; SEQ ID NO: 7137; SEQ ID NO: 7138; SEQ ID NO: 7139; SEQ ID NO: 7140; SEQ ID NO: 7141; SEQ ID NO: 7142; SEQ ID NO: 7143; SEQ ID NO: 7144; SEQ ID NO: 7145; SEQ ID NO: 7146; SEQ ID NO: 7147; SEQ ID NO: 7148; SEQ ID NO: 7149; SEQ ID NO: 7150; SEQ ID NO: 7151; SEQ ID NO: 7152; SEQ ID NO: 7153; SEQ ID NO: 7154; SEQ ID NO: 7155; SEQ ID NO: 7156; SEQ ID NO: 7157; SEQ ID NO: 7158; SEQ ID NO: 7159; SEQ ID NO: 7160; SEQ ID NO: 7161; SEQ ID NO: 7162; SEQ ID NO: 7163; SEQ ID NO: 7164; SEQ ID NO: 7165; SEQ ID NO: 7166; SEQ ID NO: 7167; SEQ ID NO: 7168; SEQ ID NO: 7169; SEQ ID NO: 7170; SEQ ID NO: 7171; SEQ ID NO: 7172; SEQ ID NO: 7173; SEQ ID NO: 7174; SEQ ID NO: 7175; SEQ ID NO: 7176; SEQ ID NO: 7177; SEQ ID NO: 7178; SEQ ID NO: 7179; SEQ ID NO: 7180; SEQ ID NO: 7181; SEQ ID NO: 7182; SEQ ID NO: 7183; SEQ ID NO: 7184; SEQ ID NO: 7185; SEQ ID NO: 7186; SEQ ID NO: 7187; SEQ ID NO: 7188; SEQ ID NO: 7189; SEQ ID NO: 7190; SEQ ID NO: 7191; SEQ ID NO: 7192; SEQ ID NO: 7193; SEQ ID NO: 7194; SEQ ID NO: 7195; SEQ ID NO: 7196; SEQ ID NO: 7197; SEQ ID NO: 7198; SEQ ID NO: 7199; SEQ ID NO: 7200; SEQ ID NO: 7201; SEQ ID NO: 7202; SEQ ID NO: 7203; SEQ ID NO: 7204; SEQ ID NO: 7205; SEQ ID NO: 7206; SEQ ID NO: 7207; SEQ ID NO: 7208; SEQ ID NO: 7209; SEQ ID NO: 7210; SEQ ID NO: 7211; SEQ ID NO: 7212; SEQ ID NO: 7213; SEQ ID NO: 7214; SEQ ID NO: 7215; SEQ ID NO: 7216; SEQ ID NO: 7217; SEQ ID NO: 7218; SEQ ID NO: 7219; SEQ ID NO: 7220; SEQ ID NO: 7221; SEQ ID NO: 7222; SEQ ID NO: 7223; SEQ ID NO: 7224; SEQ ID NO: 7225; SEQ ID NO: 7226; SEQ ID NO: 7227; SEQ ID NO: 7228; SEQ ID NO: 7229; SEQ ID NO: 7230; SEQ ID NO: 7231; SEQ ID NO: 7232; SEQ ID NO: 7233; SEQ ID NO: 7234; SEQ ID NO: 7235; SEQ ID NO: 7236; SEQ ID NO: 7237; SEQ ID NO: 7238; SEQ ID NO: 7239; SEQ ID NO: 7240; SEQ ID NO: 7241; SEQ ID NO: 7242; SEQ ID NO: 7243; SEQ ID NO: 7244; SEQ ID NO: 7245; SEQ ID NO: 7246; SEQ ID NO: 7247; SEQ ID NO: 7248; SEQ ID NO: 7249; SEQ ID NO: 7250; SEQ ID NO: 7251; SEQ ID NO: 7252; SEQ ID NO: 7253; SEQ ID NO: 7254; SEQ ID NO: 7255; SEQ ID NO: 7256; SEQ ID NO: 7257; SEQ ID NO: 7258; SEQ ID NO: 7259; SEQ ID NO: 7260; SEQ ID NO: 7261; SEQ ID NO: 7262; SEQ ID NO: 7263; SEQ ID NO: 7264; SEQ ID NO: 7265; SEQ ID NO: 7266; SEQ ID NO: 7267; SEQ ID NO: 7268; SEQ ID NO: 7269; SEQ ID NO: 7270; SEQ ID NO: 7271; SEQ ID NO: 7272; SEQ ID NO: 7273; SEQ ID NO: 7274; SEQ ID NO: 7275; SEQ ID NO: 7276; SEQ ID NO: 7277; SEQ ID NO: 7278; SEQ ID NO: 7279; SEQ ID NO: 7280; SEQ ID NO: 7281; SEQ ID NO: 7282; SEQ ID NO: 7283; SEQ ID NO: 7284; SEQ ID NO: 7285; SEQ ID NO: 7286; SEQ ID NO: 7287; SEQ ID NO: 7288; SEQ ID NO: 7289; SEQ ID NO: 7290; SEQ ID NO: 7291; SEQ ID NO: 7292; SEQ ID NO:7293; SEQ ID NO: 7294; SEQ ID NO: 7295; SEQ ID NO: 7296; SEQ ID NO: 7297; SEQ ID NO: 7298; SEQ ID NO: 7299; SEQ ID NO: 7300; SEQ ID NO: 7301; SEQ ID NO: 7302; SEQ ID NO: 7303; SEQ ID NO: 7304; SEQ ID NO: 7305; SEQ ID NO: 7306; SEQ ID NO: 7307; SEQ ID NO: 7308; SEQ ID NO: 7309; SEQ ID NO: 7310; SEQ ID NO: 7311; SEQ ID NO: 7312; SEQ ID NO: 7313; SEQ ID NO: 7314; SEQ ID NO: 7315; SEQ ID NO: 7316; SEQ ID NO: 7317; SEQ ID NO: 7318; SEQ ID NO: 7319; SEQ ID NO: 7320; SEQ ID NO: 7321; SEQ ID NO: 7322; SEQ ID NO: 7323; SEQ ID NO: 7324; SEQ ID NO: 7325; SEQ ID NO: 7326; SEQ ID NO: 7327; SEQ ID NO: 7328; SEQ ID NO: 7329; SEQ ID NO: 7330; SEQ ID NO: 7331; SEQ ID NO: 7332; SEQ ID NO: 7333; SEQ ID NO: 7334; SEQ ID NO: 7335; SEQ ID NO: 7336; SEQ ID NO: 7337; SEQ ID NO: 7338; SEQ ID NO: 7339; SEQ ID NO: 7340; SEQ ID NO: 7341; SEQ ID NO: 7342; SEQ ID NO: 7343; SEQ ID NO: 7344; SEQ ID NO: 7345; SEQ ID NO: 7346; SEQ ID NO: 7347; SEQ ID NO: 7348; SEQ ID NO: 7349; SEQ ID NO: 7350; SEQ ID NO: 7351; SEQ ID NO: 7352; SEQ ID NO: 7353; SEQ ID NO: 7354; SEQ ID NO: 7355; SEQ ID NO: 7356; SEQ ID NO: 7357; SEQ ID NO: 7358; SEQ ID NO: 7359; SEQ ID NO: 7360; SEQ ID NO: 7361; SEQ ID NO: 7362; SEQ ID NO: 7363; SEQ ID NO: 7364; SEQ ID NO: 7365; SEQ ID NO: 7366; SEQ ID NO: 7367; SEQ ID NO: 7368; SEQ ID NO: 7369; SEQ ID NO: 7370; SEQ ID NO: 7371; SEQ ID NO: 7372; SEQ ID NO: 7373; SEQ ID NO: 7374; SEQ ID NO: 7375; SEQ ID NO: 7376; SEQ ID NO: 7377; SEQ ID NO: 7378; SEQ ID NO: 7379; SEQ ID NO: 7380; SEQ ID NO: 7381; SEQ ID NO: 7382; SEQ ID NO: 7383; SEQ ID NO: 7384; SEQ ID NO: 7385; SEQ ID NO: 7386; SEQ ID NO: 7387; SEQ ID NO: 7388; SEQ ID NO: 7389; SEQ ID NO: 7390; SEQ ID NO: 7391; SEQ ID NO: 7392; SEQ ID NO: 7393; SEQ ID NO: 7394; SEQ ID NO: 7395; SEQ ID NO: 7396; SEQ ID NO: 7397; SEQ ID NO: 7398; SEQ ID NO: 7399; SEQ ID NO: 7400; SEQ ID NO: 7401; SEQ ID NO: 7402; SEQ ID NO: 7403; SEQ ID NO: 7404; SEQ ID NO: 7405; SEQ ID NO: 7406; SEQ ID NO: 7407; SEQ ID NO: 7408; SEQ ID NO: 7409; SEQ ID NO: 7410; SEQ ID NO: 7411; SEQ ID NO: 7412; SEQ ID NO: 7413; SEQ ID NO: 7414; SEQ ID NO: 7415; SEQ ID NO: 7416; SEQ ID NO: 7417; SEQ ID NO: 7418; SEQ ID NO: 7419; SEQ ID NO: 7420; SEQ ID NO: 7421; SEQ ID NO: 7422; SEQ ID NO: 7423; SEQ ID NO: 7424; SEQ ID NO: 7425; SEQ ID NO: 7426; SEQ ID NO: 7427; SEQ ID NO: 7428; SEQ ID NO: 7429; SEQ ID NO: 7430; SEQ ID NO: 7431; SEQ ID NO: 7432; SEQ ID NO: 7433; SEQ ID NO: 7434; SEQ ID NO: 7435; SEQ ID NO: 7436; SEQ ID NO: 7437; SEQ ID NO: 7438; SEQ ID NO: 7439; SEQ ID NO: 7440; SEQ ID NO: 7441; SEQ ID NO: 7442; SEQ ID NO: 7443; SEQ ID NO: 7444; SEQ ID NO: 7445; SEQ ID NO: 7446; SEQ ID NO: 7447; SEQ ID NO: 7448; SEQ ID NO: 7449; SEQ ID NO: 7450; SEQ ID NO: 7451; SEQ ID NO: 7452; SEQ ID NO: 7453; SEQ ID NO: 7454; SEQ ID NO: 7455; SEQ ID NO: 7456; SEQ ID NO: 7457; SEQ ID NO: 7458; SEQ ID NO: 7459; SEQ ID NO: 7460; SEQ ID NO: 7461; SEQ ID NO: 7462; SEQ ID NO: 7463; SEQ ID NO: 7464; SEQ ID NO: 7465; SEQ ID NO: 7466; SEQ ID NO: 7467; SEQ ID NO: 7468; SEQ ID NO: 7469; SEQ ID NO: 7470; SEQ ID NO: 7471; SEQ ID NO: 7472; SEQ ID NO: 7473; SEQ ID NO: 7474; SEQ ID NO: 7475; SEQ ID NO: 7476; SEQ ID NO: 7477; SEQ ID NO: 7478; SEQ ID NO: 7479; SEQ ID NO: 7480; SEQ ID NO: 7481; SEQ ID NO: 7482; SEQ ID NO: 7483; SEQ ID NO: 7484; SEQ ID NO: 7485; SEQ ID NO: 7486; SEQ ID NO: 7487; SEQ ID NO: 7488; SEQ ID NO: 7489; SEQ ID NO: 7490; SEQ ID NO: 7491; SEQ ID NO: 7492; SEQ ID NO: 7493; SEQ ID NO: 7494; SEQ ID NO: 7495; SEQ ID NO: 7496; SEQ ID NO: 7497; SEQ ID NO: 7498; SEQ ID NO: 7499; SEQ ID NO: 7500; SEQ ID NO: 7501; SEQ ID NO: 7502; SEQ ID NO: 7503; SEQ ID NO: 7504; SEQ ID NO: 7505; SEQ ID NO: 7506; SEQ ID NO: 7507; SEQ ID NO: 7508; SEQ ID NO: 7509; SEQ ID NO: 7510; SEQ ID NO: 7511; SEQ ID NO: 7512; SEQ ID NO: 7513; SEQ ID NO: 7514; SEQ ID NO: 7515; SEQ ID NO: 7516; SEQ ID NO: 7517; SEQ ID NO: 7518; SEQ ID NO: 7519; SEQ ID NO: 7520; SEQ ID NO: 7521; SEQ ID NO: 7522; SEQ ID NO: 7523; SEQ ID NO: 7524; SEQ ID NO: 7525; SEQ ID NO: 7526; SEQ ID NO: 7527; SEQ ID NO: 7528; SEQ ID NO: 7529; SEQ ID NO: 7530; SEQ ID NO: 7531; SEQ ID NO: 7532; SEQ ID NO: 7533; SEQ ID NO: 7534; SEQ ID NO: 7535; SEQ ID NO: 7536; SEQ ID NO: 7537; SEQ ID NO: 7538; SEQ ID NO: 7539; SEQ ID NO: 7540; SEQ ID NO: 7541; SEQ ID NO: 7542; SEQ ID NO: 7543; SEQ ID NO: 7544; SEQ ID NO: 7545; SEQ ID NO: 7546; SEQ ID NO: 7547; SEQ ID NO: 7548; SEQ ID NO: 7549; SEQ ID NO: 7550; SEQ ID NO: 7551; SEQ ID NO: 7552; SEQ ID NO: 7553; SEQ ID NO: 7554; SEQ ID NO: 7555; SEQ ID NO: 7556; SEQ ID NO: 7557; SEQ ID NO: 7558; SEQ ID NO: 7559; SEQ ID NO: 7560; SEQ ID NO: 7561; SEQ ID NO: 7562; SEQ ID NO: 7563; SEQ ID NO: 7564; SEQ ID NO: 7565; SEQ ID NO: 7566; SEQ ID NO: 7567; SEQ ID NO: 7568; SEQ ID NO: 7569; SEQ ID NO: 7570; SEQ ID NO: 7571; SEQ ID NO: 7572; SEQ ID NO: 7573; SEQ ID NO: 7574; SEQ ID NO: 7575; SEQ ID NO: 7576; SEQ ID NO: 7577; SEQ ID NO: 7578; SEQ ID NO: 7579; SEQ ID NO: 7580; SEQ ID NO: 7581; SEQ ID NO: 7582; SEQ ID NO: 7583; SEQ ID NO: 7584; SEQ ID NO: 7585; SEQ ID NO: 7586; SEQ ID NO: 7587; SEQ ID NO: 7588; SEQ ID NO: 7589; SEQ ID NO: 7590; SEQ ID NO: 7591; SEQ ID NO: 7592; SEQ ID NO: 7593; SEQ ID NO: 7594; SEQ ID NO: 7595; SEQ ID NO: 7596; SEQ ID NO: 7597; SEQ ID NO: 7598; SEQ ID NO: 7599; SEQ ID NO: 7600; SEQ ID NO: 7601; SEQ ID NO: 7602; SEQ ID NO: 7603; SEQ ID NO: 7604; SEQ ID NO: 7605; SEQ ID NO: 7606; SEQ ID NO: 7607; SEQ ID NO: 7608; SEQ ID NO: 7609; SEQ ID NO: 7610; SEQ ID NO: 7611; SEQ ID NO: 7612; SEQ ID NO: 7613; SEQ ID NO: 7614; SEQ ID NO: 7615; SEQ ID NO: 7616; SEQ ID NO: 7617; SEQ ID NO: 7618; SEQ ID NO: 7619; SEQ ID NO: 7620; SEQ ID NO: 7621; SEQ ID NO: 7622; SEQ ID NO: 7623; SEQ ID NO: 7624; SEQ ID NO: 7625; SEQ ID NO: 7626; SEQ ID NO: 7627; SEQ ID NO: 7628; SEQ ID NO: 7629; SEQ ID NO: 7630; SEQ ID NO: 7631; SEQ ID NO: 7632; SEQ ID NO: 7633; SEQ ID NO: 7634; SEQ ID NO: 7635; SEQ ID NO: 7636; SEQ ID NO: 7637; SEQ ID NO: 7638; SEQ ID NO: 7639; SEQ ID NO: 7640; SEQ ID NO: 7641; SEQ ID NO: 7642; SEQ ID NO: 7643; SEQ ID NO: 7644; SEQ ID NO: 7645; SEQ ID NO: 7646; SEQ ID NO: 7647; SEQ ID NO: 7648; SEQ ID NO: 7649; SEQ ID NO: 7650; SEQ ID NO: 7651; SEQ ID NO: 7652; SEQ ID NO: 7653; SEQ ID NO: 7654; SEQ ID NO: 7655; SEQ ID NO: 7656; SEQ ID NO: 7657; SEQ ID NO: 7658; SEQ ID NO: 7659; SEQ ID NO: 7660; SEQ ID NO: 7661; SEQ ID NO: 7662; SEQ ID NO: 7663; SEQ ID NO: 7664; SEQ ID NO: 7665; SEQ ID NO: 7666; SEQ ID NO: 7667; SEQ ID NO: 7668; SEQ ID NO: 7669; SEQ ID NO: 7670; SEQ ID NO: 7671; SEQ ID NO: 7672; SEQ ID NO: 7673; SEQ ID NO: 7674; SEQ ID NO: 7675; SEQ ID NO: 7676; SEQ ID NO: 7677; SEQ ID NO: 7678; SEQ ID NO: 7679; SEQ ID NO: 7680; SEQ ID NO: 7681; SEQ ID NO: 7682; SEQ ID NO: 7683; SEQ ID NO: 7684; SEQ ID NO: 7685; SEQ ID NO: 7686; SEQ ID NO: 7687; SEQ ID NO: 7688; SEQ ID NO: 7689; SEQ ID NO: 7690; SEQ ID NO: 7691; SEQ ID NO: 7692; SEQ ID NO: 7693; SEQ ID NO: 7694; SEQ ID NO: 7695; SEQ ID NO: 7696; SEQ ID NO: 7697; SEQ ID NO: 7698; SEQ ID NO: 7699; SEQ ID NO: 7700; SEQ ID NO: 7701; SEQ ID NO: 7702; SEQ ID NO: 7703; SEQ ID NO: 7704; SEQ ID NO: 7705; SEQ ID NO: 7706; SEQ ID NO: 7707; SEQ ID NO: 7708; SEQ ID NO: 7709; SEQ ID NO: 7710; SEQ ID NO: 7711; SEQ ID NO: 7712; SEQ ID NO: 7713; SEQ ID NO: 7714; SEQ ID NO: 7715; SEQ ID NO: 7716; SEQ ID NO: 7717; SEQ ID NO: 7718; SEQ ID NO: 7719; SEQ ID NO: 7720; SEQ ID NO: 7721; SEQ ID NO: 7722; SEQ ID NO: 7723; SEQ ID NO: 7724; SEQ ID NO: 7725; SEQ ID NO: 7726; SEQ ID NO: 7727; SEQ ID NO: 7728; SEQ ID NO: 7729; SEQ ID NO: 7730; SEQ ID NO: 7731; SEQ ID NO: 7732; SEQ ID NO: 7733; SEQ ID NO: 7734; SEQ ID NO: 7735; SEQ ID NO: 7736; SEQ ID NO: 7737; SEQ ID NO: 7738; SEQ ID NO: 7739; SEQ ID NO: 7740; SEQ ID NO: 7741; SEQ ID NO: 7742; SEQ ID NO: 7743; SEQ ID NO: 7744; SEQ ID NO: 7745; SEQ ID NO: 7746; SEQ ID NO: 7747; SEQ ID NO: 7748; SEQ ID NO: 7749; SEQ ID NO: 7750; SEQ ID NO: 7751; SEQ ID NO: 7752; SEQ ID NO: 7753; SEQ ID NO: 7754; SEQ ID NO: 7755; SEQ ID NO: 7756; SEQ ID NO: 7757; SEQ ID NO: 7758; SEQ ID NO: 7759; SEQ ID NO: 7760; SEQ ID NO: 7761; SEQ ID NO: 7762; SEQ ID NO: 7763; SEQ ID NO: 7764; SEQ ID NO: 7765; SEQ ID NO: 7766; SEQ ID NO: 7767; SEQ ID NO: 7768; SEQ ID NO: 7769; SEQ ID NO: 7770; SEQ ID NO: 7771; SEQ ID NO: 7772; SEQ ID NO: 7773; SEQ ID NO: 7774; SEQ ID NO: 7775; SEQ ID NO: 7776; SEQ ID NO: 7777; SEQ ID NO: 7778; SEQ ID NO: 7779; SEQ ID NO: 7780; SEQ ID NO: 7781; SEQ ID NO: 7782; SEQ ID NO: 7783; SEQ ID NO: 7784; SEQ ID NO: 7785; SEQ ID NO: 7786; SEQ ID NO: 7787; SEQ ID NO: 7788; SEQ ID NO: 7789; SEQ ID NO: 7790; SEQ ID NO: 7791; SEQ ID NO: 7792; SEQ ID NO: 7793; SEQ ID NO: 7794; SEQ ID NO: 7795; SEQ ID NO: 7796; SEQ ID NO: 7797; SEQ ID NO: 7798; SEQ ID NO: 7799; SEQ ID NO: 7800; SEQ ID NO: 7801; SEQ ID NO: 7802; SEQ ID NO: 7803; SEQ ID NO: 7804; SEQ ID NO: 7805; SEQ ID NO: 7806; SEQ ID NO: 7807; SEQ ID NO: 7808; SEQ ID NO: 7809; SEQ ID NO: 7810; SEQ ID NO: 7811; SEQ ID NO: 7812; SEQ ID NO: 7813; SEQ ID NO: 7814; SEQ ID NO: 7815; SEQ ID NO: 7816; SEQ ID NO: 7817; SEQ ID NO: 7818; SEQ ID NO: 7819; SEQ ID NO: 7820; SEQ ID NO: 7821; SEQ ID NO: 7822; SEQ ID NO: 7823; SEQ ID NO: 7824; SEQ ID NO: 7825; SEQ ID NO: 7826; SEQ ID NO: 7827; SEQ ID NO: 7828; SEQ ID NO: 7829; SEQ ID NO: 7830; SEQ ID NO: 7831; SEQ ID NO: 7832; SEQ ID NO: 7833; SEQ ID NO: 7834; SEQ ID NO: 7835; SEQ ID NO: 7836; SEQ ID NO: 7837; SEQ ID NO: 7838; SEQ ID NO: 7839; SEQ ID NO: 7840; SEQ ID NO: 7841; SEQ ID NO: 7842; SEQ ID NO: 7843; SEQ ID NO: 7844; SEQ ID NO: 7845; SEQ ID NO: 7846; SEQ ID NO: 7847; SEQ ID NO: 7848; SEQ ID NO: 7849; SEQ ID NO: 7850; SEQ ID NO: 7851; SEQ ID NO: 7852; SEQ ID NO: 7853; SEQ ID NO: 7854; SEQ ID NO: 7855; SEQ ID NO: 7856; SEQ ID NO: 7857; SEQ ID NO: 7858; SEQ ID NO: 7859; SEQ ID NO: 7860; SEQ ID NO: 7861; SEQ ID NO: 7862; SEQ ID NO: 7863; SEQ ID NO: 7864; SEQ ID NO: 7865; SEQ ID NO: 7866; SEQ ID NO: 7867; SEQ ID NO: 7868; SEQ ID NO: 7869; SEQ ID NO: 7870; SEQ ID NO: 7871; SEQ ID NO: 7872; SEQ ID NO: 7873; SEQ ID NO: 7874; SEQ ID NO: 7875; SEQ ID NO: 7876; SEQ ID NO: 7877; SEQ ID NO: 7878; SEQ ID NO: 7879; SEQ ID NO: 7880; SEQ ID NO: 7881; SEQ ID NO: 7882; SEQ ID NO. 7883; SEQ ID NO: 7884; SEQ ID NO: 7885; SEQ ID NO: 7886; SEQ ID NO: 788; SEQ ID NO: 7888; SEQ ID NO: 7889; SEQ ID NO: 7890; SEQ ID NO: 7891; SEQ ID NO: 7892; SEQ ID NO: 7893; SEQ ID NO: 7894; SEQ ID NO: 7895; SEQ ID NO: 7896; SEQ ID NO: 7897; SEQ ID NO: 7898; SEQ ID NO: 7899; SEQ ID NO: 7900; SEQ ID NO: 7901; SEQ ID NO: 7902; SEQ ID NO: 7903; SEQ ID NO: 7904; SEQ ID NO: 7905; SEQ ID NO: 7906; SEQ ID NO: 7907; SEQ ID NO: 7908; SEQ ID NO: 7909; SEQ ID NO: 7910; SEQ ID NO: 7911; SEQ ID NO: 7912; SEQ ID NO: 7913; SEQ ID NO: 7914; SEQ ID NO: 7915; SEQ ID NO: 7916; SEQ ID NO: 7917; SEQ ID NO: 7918; SEQ ID NO: 7919; SEQ ID NO: 7920; SEQ ID NO: 7921; SEQ ID NO: 7922; SEQ ID NO: 7923; SEQ ID NO: 7924; SEQ ID NO: 7925; SEQ ID NO: 7926; SEQ ID NO: 7927; SEQ ID NO: 7928; SEQ ID NO: 7929; SEQ ID NO: 7930; SEQ ID NO: 7931; SEQ ID NO: 7932; SEQ ID NO: 7933; SEQ ID NO: 7934; SEQ ID NO: 7935; SEQ ID NO: 7936; SEQ ID NO: 7937; SEQ ID NO: 7938; SEQ ID NO: 7939; SEQ ID NO: 7940; SEQ ID NO: 7941; SEQ ID NO: 7942; SEQ ID NO: 7943; SEQ ID NO: 7944; SEQ ID NO: 7945; SEQ ID NO: 7946; SEQ ID NO: 7947; SEQ ID NO: 7948; SEQ ID NO: 7949; SEQ ID NO: 7950; SEQ ID NO: 7951; SEQ ID NO: 7952; SEQ ID NO: 7953; SEQ ID NO: 7954; SEQ ID NO: 7955; SEQ ID NO: 7956; SEQ ID NO: 7957; SEQ ID NO: 7958; SEQ ID NO: 7959; SEQ ID NO: 7960; SEQ ID NO: 7961; SEQ ID NO: 7962; SEQ ID NO: 7963; SEQ ID NO: 7964; SEQ ID NO: 7965; SEQ ID NO: 7966; SEQ ID NO: 7967; SEQ ID NO: 7968; SEQ ID NO: 7969; SEQ ID NO: 7970; SEQ ID NO: 7971; SEQ ID NO: 7972; SEQ ID NO: 7973; SEQ ID NO: 7974; SEQ ID NO: 7975; SEQ ID NO: 7976; SEQ ID NO: 7977; SEQ ID NO: 7978; SEQ ID NO: 7979; SEQ ID NO: 7980; SEQ ID NO: 7981; SEQ ID NO: 7982; SEQ ID NO: 7983; SEQ ID NO: 7984; SEQ ID NO: 7985; SEQ ID NO: 7986; SEQ ID NO: 7987; SEQ ID NO: 7988; SEQ ID NO: 7989; SEQ ID NO: 7990; SEQ ID NO: 7991; SEQ ID NO: 7992; SEQ ID NO: 7993; SEQ ID NO: 7994; SEQ ID NO: 7995; SEQ ID NO: 7996; SEQ ID NO: 7997; SEQ ID NO: 7998; SEQ ID NO: 7999; SEQ ID NO: 8000; SEQ ID NO: 8001; SEQ ID NO: 8002; SEQ ID NO: 8003; SEQ ID NO: 8004; SEQ ID NO: 8005; SEQ ID NO: 8006; SEQ ID NO: 8007; SEQ ID NO: 8008; SEQ ID NO: 8009; SEQ ID NO: 8010; SEQ ID NO: 8011; SEQ ID NO: 8012; SEQ ID NO: 8013; SEQ ID NO: 8014; SEQ ID NO: 8015; SEQ ID NO: 8016; SEQ ID NO: 8017; SEQ ID NO: 8018; SEQ ID NO: 8019; SEQ ID NO: 8020; SEQ ID NO: 8021; SEQ ID NO: 8022; SEQ ID NO: 8023; SEQ ID NO: 8024; SEQ ID NO: 8025; SEQ ID NO: 8026; SEQ ID NO: 8027; SEQ ID NO: 8028; SEQ ID NO: 8029; SEQ ID NO: 8030; SEQ ID NO: 8031; SEQ ID NO: 8032; SEQ ID NO: 8033; SEQ ID NO: 8034; SEQ ID NO: 8035; SEQ ID NO: 8036; SEQ ID NO: 8037; SEQ ID NO: 8038; SEQ ID NO: 8039; SEQ ID NO: 8040; SEQ ID NO: 8041; SEQ ID NO: 8042; SEQ ID NO: 8043; SEQ ID NO: 8044; SEQ ID NO: 8045; SEQ ID NO: 8046; SEQ ID NO: 8047; SEQ ID NO: 8048; SEQ ID NO: 8049; SEQ ID NO: 8050; SEQ ID NO: 8051; SEQ ID NO: 8052; SEQ ID NO: 8053; SEQ ID NO: 8054; SEQ ID NO: 8055; SEQ ID NO: 8056; SEQ ID NO: 8057; SEQ ID NO: 8058; SEQ ID NO: 8059; SEQ ID NO: 8060; SEQ ID NO: 8061; SEQ ID NO: 8062; SEQ ID NO: 8063; SEQ ID NO: 8064; SEQ ID NO: 8065; SEQ ID NO: 8066; SEQ ID NO: 8067; SEQ ID NO: 8068; SEQ ID NO: 8069; SEQ ID NO: 8070; SEQ ID NO: 8071; SEQ ID NO: 8072; SEQ ID NO: 8073; SEQ ID NO: 8074; SEQ ID NO: 8075; SEQ ID NO: 8076; SEQ ID NO: 8077; SEQ ID NO: 8078; SEQ ID NO: 8079; SEQ ID NO: 8080; SEQ ID NO: 8081; SEQ ID NO: 8082; SEQ ID NO: 8083; SEQ ID NO: 8084; SEQ ID NO: 8085; SEQ ID NO: 8086; SEQ ID NO: 8087; SEQ ID NO: 8088; SEQ ID NO: 8089; SEQ ID NO: 8090; SEQ ID NO: 8091; SEQ ID NO: 8092; SEQ ID NO: 8093; SEQ ID NO: 8094; SEQ ID NO: 8095; SEQ ID NO: 8096; SEQ ID NO: 8097; SEQ ID NO: 8098; SEQ ID NO: 8099; SEQ ID NO: 8100; SEQ ID NO: 8101; SEQ ID NO: 8102; SEQ ID NO: 8103; SEQ ID NO: 8104; SEQ ID NO: 8105; SEQ ID NO: 8106; SEQ ID NO: 8107; SEQ ID NO: 8108; SEQ ID NO: 8109; SEQ ID NO: 8110; SEQ ID NO: 8111; SEQ ID NO: 8112; SEQ ID NO: 8113; SEQ ID NO: 8114; SEQ ID NO: 8115; SEQ ID NO: 8116; SEQ ID NO:8117; SEQ ID NO: 8118; SEQ ID NO: 8119; SEQ ID NO: 8120; SEQ ID NO: 8121; SEQ ID NO: 8122; SEQ ID NO: 8123; SEQ ID NO: 8124; SEQ ID NO: 8125; SEQ ID NO: 8126; SEQ ID NO: 8127; SEQ ID NO: 8128; SEQ ID NO: 8129; SEQ ID NO: 8130; SEQ ID NO: 8131; SEQ ID NO: 8132; SEQ ID NO: 8133; SEQ ID NO: 8134; SEQ ID NO: 8135; SEQ ID NO: 8136; SEQ ID NO: 8137; SEQ ID NO: 8138; SEQ ID NO: 8139; SEQ ID NO: 8140; SEQ ID NO: 8141; SEQ ID NO: 8142; SEQ ID NO: 8143; SEQ ID NO: 8144; SEQ ID NO: 8145; SEQ ID NO: 8146; SEQ ID NO: 8147; SEQ ID NO: 8148; SEQ ID NO: 8149; SEQ ID NO: 8150; SEQ ID NO: 8151; SEQ ID NO: 8152; SEQ ID NO: 8153; SEQ ID NO: 8154; SEQ ID NO: 8155; SEQ ID NO: 8156; SEQ ID NO: 8157; SEQ ID NO: 8158; SEQ ID NO: 8159; SEQ ID NO: 8160; SEQ ID NO: 8161; SEQ ID NO: 8162; SEQ ID NO: 8163; SEQ ID NO: 8164; SEQ ID NO: 8165; SEQ ID NO: 8166; SEQ ID NO: 8167; SEQ ID NO: 8168; SEQ ID NO: 8169; SEQ ID NO: 8170; SEQ ID NO: 8171; SEQ ID NO: 8172; SEQ ID NO: 8173; SEQ ID NO: 8174; SEQ ID NO: 8175; SEQ ID NO: 8176; SEQ ID NO: 8177; SEQ ID NO: 8178; SEQ ID NO: 8179; SEQ ID NO: 8180; SEQ ID NO: 8181; SEQ ID NO: 8182; SEQ ID NO: 8183; SEQ ID NO: 8184; SEQ ID NO: 8185; SEQ ID NO: 8186; SEQ ID NO: 8187; SEQ ID NO: 8188; SEQ ID NO: 8189; SEQ ID NO: 8190; SEQ ID NO: 8191; SEQ ID NO: 8192; SEQ ID NO: 8193; SEQ ID NO: 8194; SEQ ID NO: 8195; SEQ ID NO: 8196; SEQ ID NO: 8197; SEQ ID NO: 8198; SEQ ID NO: 8199; SEQ ID NO: 8200; SEQ ID NO: 8201; SEQ ID NO: 8202; SEQ ID NO: 8203; SEQ ID NO: 8204; SEQ ID NO: 8205; SEQ ID NO: 8206; SEQ ID NO: 8207; SEQ ID NO: 8208; SEQ ID NO: 8209; SEQ ID NO: 8210; SEQ ID NO: 8211; SEQ ID NO: 8212; SEQ ID NO: 8213; SEQ ID NO: 8214; SEQ ID NO: 8215; SEQ ID NO: 8216; SEQ ID NO: 8217; SEQ ID NO: 8218; SEQ ID NO: 8219; SEQ ID NO: 8220; SEQ ID NO: 8221; SEQ ID NO: 8222; SEQ ID NO: 8223; SEQ ID NO: 8224; SEQ ID NO: 8225; SEQ ID NO: 8226; SEQ ID NO: 8227; SEQ ID NO: 8228; SEQ ID NO: 8229; SEQ ID NO: 8230; SEQ ID NO: 8231; SEQ ID NO: 8232; SEQ ID NO: 8233; SEQ ID NO: 8234; SEQ ID NO: 8235; SEQ ID NO: 8236; SEQ ID NO: 8237; SEQ ID NO: 8238; SEQ ID NO: 8239; SEQ ID NO: 8240; SEQ ID NO: 8241; SEQ ID NO: 8242; SEQ ID NO: 8243; SEQ ID NO: 8244; SEQ ID NO: 8245; SEQ ID NO: 8246; SEQ ID NO: 8247; SEQ ID NO: 8248; SEQ ID NO: 8249; SEQ ID NO: 8250; SEQ ID NO: 8251; SEQ ID NO: 8252; SEQ ID NO: 8253; SEQ ID NO: 8254; SEQ ID NO: 8255; SEQ ID NO: 8256; SEQ ID NO: 8257; SEQ ID NO: 8258; SEQ ID NO: 8259; SEQ ID NO: 8260; SEQ ID NO: 8261; SEQ ID NO: 8262; SEQ ID NO: 8263; SEQ ID NO: 8264; SEQ ID NO: 8265; SEQ ID NO: 8266; SEQ ID NO: 8267; SEQ ID NO: 8268; SEQ ID NO: 8269; SEQ ID NO: 8270; SEQ ID NO: 8271; SEQ ID NO: 8272; SEQ ID NO: 8273; SEQ ID NO: 8274; SEQ ID NO: 8275; SEQ ID NO: 8276; SEQ ID NO: 8277; SEQ ID NO: 8278; SEQ ID NO: 8279; SEQ ID NO: 8280; SEQ ID NO: 8281; SEQ ID NO: 8282; SEQ ID NO: 8283; SEQ ID NO: 8284; SEQ ID NO: 8285; SEQ ID NO: 8286; SEQ ID NO: 8287; SEQ ID NO: 8288; SEQ ID NO: 8289; SEQ ID NO: 8290; SEQ ID NO: 8291; SEQ ID NO: 8292; SEQ ID NO: 8293; SEQ ID NO: 8294; SEQ ID NO: 8295; SEQ ID NO: 8296; SEQ ID NO: 8297; SEQ ID NO: 8298; SEQ ID NO: 8299; SEQ ID NO: 8300; SEQ ID NO: 8301; SEQ ID NO: 8302; SEQ ID NO: 8303; SEQ ID NO: 8304; SEQ ID NO: 8305; SEQ ID NO: 8306; SEQ ID NO: 8307; SEQ ID NO: 8308; SEQ ID NO: 8309; SEQ ID NO: 8310; SEQ ID NO: 8311; SEQ ID NO: 8312; SEQ ID NO: 8313; SEQ ID NO: 8314; SEQ ID NO: 8315; SEQ ID NO: 8316; SEQ ID NO: 8317; SEQ ID NO: 8318; SEQ ID NO: 8319; SEQ ID NO: 8320; SEQ ID NO: 8321; SEQ ID NO: 8322; SEQ ID NO: 8323; SEQ ID NO: 8324; SEQ ID NO: 8325; SEQ ID NO: 8326; SEQ ID NO: 8327; SEQ ID NO: 8328; SEQ ID NO: 8329; SEQ ID NO: 8330; SEQ ID NO: 8331; SEQ ID NO: 8332; SEQ ID NO: 8333; SEQ ID NO: 8334; SEQ ID NO: 8335; SEQ ID NO: 8336; SEQ ID NO: 8337; SEQ ID NO: 8338; SEQ ID NO: 8339; SEQ ID NO: 8340; SEQ ID NO: 8341; SEQ ID NO: 8342; SEQ ID NO: 8343; SEQ ID NO: 8344; SEQ ID NO: 8345; SEQ ID NO: 8346; SEQ ID NO: 8347; SEQ ID NO: 8348; SEQ ID NO: 8349; SEQ ID NO: 8350; SEQ ID NO: 8351; SEQ ID NO: 8352; SEQ ID NO: 8353; SEQ ID NO: 8354; SEQ ID NO: 8355; SEQ ID NO: 8356; SEQ ID NO: 8357; SEQ ID NO: 8358; SEQ ID NO: 8359; SEQ ID NO: 8360; SEQ ID NO: 8361; SEQ ID NO: 8362; SEQ ID NO: 8363; SEQ ID NO: 8364; SEQ ID NO: 8365; SEQ ID NO: 8366; SEQ ID NO: 8367; SEQ ID NO: 8368; SEQ ID NO: 8369; SEQ ID NO: 8370; SEQ ID NO: 8371; SEQ ID NO: 8372; SEQ ID NO: 8373; SEQ ID NO: 8374; SEQ ID NO: 8375; SEQ ID NO: 8376; SEQ ID NO: 8377; SEQ ID NO: 8378; SEQ ID NO: 8379; SEQ ID NO: 8380; SEQ ID NO: 8381; SEQ ID NO: 8382; SEQ ID NO: 8383; SEQ ID NO: 8384; SEQ ID NO: 8385; SEQ ID NO: 8386; SEQ ID NO: 8387; SEQ ID NO: 8388; SEQ ID NO: 8389; SEQ ID NO: 8390; SEQ ID NO: 8391; SEQ ID NO: 8392; SEQ ID NO: 8393; SEQ ID NO: 8394; SEQ ID NO: 8395; SEQ ID NO: 8396; SEQ ID NO: 8397; SEQ ID NO: 8398; SEQ ID NO: 8399; SEQ ID NO: 8400; SEQ ID NO: 8401; SEQ ID NO: 8402; SEQ ID NO: 8403; SEQ ID NO: 8404; SEQ ID NO: 8405; SEQ ID NO: 8406; SEQ ID NO: 8407; SEQ ID NO: 8408; SEQ ID NO: 8409; SEQ ID NO: 8410; SEQ ID NO: 8411; SEQ ID NO: 8412; SEQ ID NO: 8413; SEQ ID NO: 8414; SEQ ID NO: 8415; SEQ ID NO: 8416; SEQ ID NO: 8417; SEQ ID NO: 8418; SEQ ID NO: 8419; SEQ ID NO: 8420; SEQ ID NO: 8421; SEQ ID NO: 8422; SEQ ID NO: 8423; SEQ ID NO: 8424; SEQ ID NO: 8425; SEQ ID NO: 8426; SEQ ID NO: 8427; SEQ ID NO: 8428; SEQ ID NO: 8429; SEQ ID NO: 8430; SEQ ID NO: 8431; SEQ ID NO: 8432; SEQ ID NO: 8433; SEQ ID NO: 8434; SEQ ID NO: 8435; SEQ ID NO: 8436; SEQ ID NO: 8437; SEQ ID NO: 8438; SEQ ID NO: 8439; SEQ ID NO: 8440; SEQ ID NO: 8441; SEQ ID NO: 8442; SEQ ID NO: 8443; SEQ ID NO: 8444; SEQ ID NO: 8445; SEQ ID NO: 8446; SEQ ID NO: 8447; SEQ ID NO: 8448; SEQ ID NO: 8449; SEQ ID NO: 8450; SEQ ID NO: 8451; SEQ ID NO: 8452; SEQ ID NO: 8453; SEQ ID NO: 8454; SEQ ID NO: 8455; SEQ ID NO: 8456; SEQ ID NO: 8457; SEQ ID NO: 8458; SEQ ID NO: 8459; SEQ ID NO: 8460; SEQ ID NO: 8461; SEQ ID NO: 8462; SEQ ID NO: 8463; SEQ ID NO: 8464; SEQ ID NO: 8465; SEQ ID NO: 8466; SEQ ID NO: 8467; SEQ ID NO: 8468; SEQ ID NO: 8469; SEQ ID NO: 8470; SEQ ID NO: 8471; SEQ ID NO: 8472; SEQ ID NO: 8473; SEQ ID NO: 8474; SEQ ID NO: 8475; SEQ ID NO: 8476; SEQ ID NO: 8477; SEQ ID NO: 8478; SEQ ID NO: 8479; SEQ ID NO: 8480; SEQ ID NO: 8481; SEQ ID NO: 8482; SEQ ID NO: 8483; SEQ ID NO: 8484; SEQ ID NO: 8485; SEQ ID NO: 8486; SEQ ID NO: 8487; SEQ ID NO: 8488; SEQ ID NO: 8489; SEQ ID NO: 8490; SEQ ID NO: 8491; SEQ ID NO: 8492; SEQ ID NO: 8493; SEQ ID NO: 8494; SEQ ID NO: 8495; SEQ ID NO: 8496; SEQ ID NO: 8497; SEQ ID NO: 8498; SEQ ID NO: 8499; SEQ ID NO: 8500; SEQ ID NO: 8501; SEQ ID NO: 8502; SEQ ID NO: 8503; SEQ ID NO: 8504; SEQ ID NO: 8505; SEQ ID NO: 8506; SEQ ID NO: 8507; SEQ ID NO: 8508; SEQ ID NO: 8509; SEQ ID NO: 8510; SEQ ID NO: 8511; SEQ ID NO: 8512; SEQ ID NO: 8513; SEQ ID NO: 8514; SEQ ID NO: 8515; SEQ ID NO: 8516; SEQ ID NO: 8517; SEQ ID NO: 8518; SEQ ID NO: 8519; SEQ ID NO: 8520; SEQ ID NO: 8521; SEQ ID NO: 8522; SEQ ID NO: 8523; SEQ ID NO: 8524; SEQ ID NO: 8525; SEQ ID NO: 8526; SEQ ID NO: 8527; SEQ ID NO: 8528; SEQ ID NO: 8529; SEQ ID NO: 8530; SEQ ID NO: 8531; SEQ ID NO: 8532; SEQ ID NO: 8533; SEQ ID NO: 8534; SEQ ID NO: 8535; SEQ ID NO: 8536; SEQ ID NO: 8537; SEQ ID NO: 8538; SEQ ID NO: 8539; SEQ ID NO: 8540; SEQ ID NO: 8541; SEQ ID NO: 8542; SEQ ID NO: 8543; SEQ ID NO: 8544; SEQ ID NO: 8545; SEQ ID NO: 8546; SEQ ID NO: 8547; SEQ ID NO: 8548; SEQ ID NO: 8549; SEQ ID NO: 8550; SEQ ID NO: 8551; SEQ ID NO: 8552; SEQ ID NO: 8553; SEQ ID NO: 8554; SEQ ID NO: 8555; SEQ ID NO: 8556; SEQ ID NO: 8557; SEQ ID NO: 8558; SEQ ID NO: 8559; SEQ ID NO: 8560; SEQ ID NO: 8561; SEQ ID NO: 8562; SEQ ID NO: 8563; SEQ ID NO: 8564; SEQ ID NO: 8565; SEQ ID NO: 8566; SEQ ID NO: 8567; SEQ ID NO: 8568; SEQ ID NO: 8569; SEQ ID NO: 8570; SEQ ID NO: 8571; SEQ ID NO: 8572; SEQ ID NO: 8573; SEQ ID NO: 8574; SEQ ID NO: 8575; SEQ ID NO: 8576; SEQ ID NO: 8577; SEQ ID NO: 8578; SEQ ID NO: 8579; SEQ ID NO: 8580; SEQ ID NO: 8581; SEQ ID NO: 8582; SEQ ID NO: 8583; SEQ ID NO: 8584; SEQ ID NO: 8585; SEQ ID NO: 8586; SEQ ID NO: 8587; SEQ ID NO: 8588; SEQ ID NO: 8589; SEQ ID NO: 8590; SEQ ID NO: 8591; SEQ ID NO: 8592; SEQ ID NO: 8593; SEQ ID NO: 8594; SEQ ID NO: 8595; SEQ ID NO: 8596; SEQ ID NO: 8597; SEQ ID NO: 8598; SEQ ID NO: 8599; SEQ ID NO: 8600; SEQ ID NO: 8601; SEQ ID NO: 8602; SEQ ID NO: 8603; SEQ ID NO: 8604; SEQ ID NO: 8605; SEQ ID NO: 8606; SEQ ID NO: 8607; SEQ ID NO: 8608; SEQ ID NO: 8609; SEQ ID NO: 8610; SEQ ID NO: 8611; SEQ ID NO: 8612; SEQ ID NO: 8613; SEQ ID NO: 8614; SEQ ID NO: 8615; SEQ ID NO: 8616; SEQ ID NO: 8617; SEQ ID NO: 8618; SEQ ID NO: 8619; SEQ ID NO: 8620; SEQ ID NO: 8621; SEQ ID NO: 8622; SEQ ID NO: 8623; SEQ ID NO: 8624; SEQ ID NO: 8625; SEQ ID NO: 8626; SEQ ID NO: 8627; SEQ ID NO: 8628; SEQ ID NO: 8629; SEQ ID NO: 8630; SEQ ID NO: 8631; SEQ ID NO: 8632; SEQ ID NO: 8633; SEQ ID NO: 8634; SEQ ID NO: 8635; SEQ ID NO: 8636; SEQ ID NO: 8637; SEQ ID NO: 8638; SEQ ID NO: 8639; SEQ ID NO: 8640; SEQ ID NO: 8641; SEQ ID NO: 8642; SEQ ID NO: 8643; SEQ ID NO: 8644; SEQ ID NO: 8645; SEQ ID NO: 8646; SEQ ID NO: 8647; SEQ ID NO: 8648; SEQ ID NO: 8649; SEQ ID NO: 8650; SEQ ID NO: 8651; SEQ ID NO: 8652; SEQ ID NO: 8653; SEQ ID NO: 8654; SEQ ID NO: 8655; SEQ ID NO: 8656; SEQ ID NO: 8657; SEQ ID NO: 8658; SEQ ID NO: 8659; SEQ ID NO: 8660; SEQ ID NO: 8661; SEQ ID NO: 8662; SEQ ID NO: 8663; SEQ ID NO: 8664; SEQ ID NO: 8665; SEQ ID NO: 8666; SEQ ID NO: 8667; SEQ ID NO: 8668; SEQ ID NO: 8669; SEQ ID NO: 8670; SEQ ID NO: 8671; SEQ ID NO: 8672; SEQ ID NO: 8673; SEQ ID NO: 8674; SEQ ID NO: 8675; SEQ ID NO: 8676; SEQ ID NO: 8677; SEQ ID NO: 8678; SEQ ID NO: 8679; SEQ ID NO: 8680; SEQ ID NO: 8681; SEQ ID NO: 8682; SEQ ID NO: 8683; SEQ ID NO: 8684; SEQ ID NO: 8685; SEQ ID NO: 8686; SEQ ID NO: 8687; SEQ ID NO: 8688; SEQ ID NO: 8689; SEQ ID NO: 8690; SEQ ID NO: 8691; SEQ ID NO: 8692; SEQ ID NO: 8693; SEQ ID NO: 8694; SEQ ID NO: 8695; SEQ ID NO: 8696; SEQ ID NO: 8697; SEQ ID NO: 8698; SEQ ID NO: 8699; SEQ ID NO: 8700; SEQ ID NO: 8701; SEQ ID NO: 8702; SEQ ID NO: 8703; SEQ ID NO: 8704; SEQ ID NO: 8705; SEQ ID NO: 8706; SEQ ID NO: 8707; SEQ ID NO: 8708; SEQ ID NO: 8709; SEQ ID NO: 8710; SEQ ID NO: 8711; SEQ ID NO: 8712; SEQ ID NO: 8713; SEQ ID NO: 8714; SEQ ID NO: 8715; SEQ ID NO: 8716; SEQ ID NO: 8717; SEQ ID NO: 8718; SEQ ID NO: 8719; SEQ ID NO: 8720; SEQ ID NO: 8721; SEQ ID NO: 8722; SEQ ID NO: 8723; SEQ ID NO: 8724; SEQ ID NO: 8725; SEQ ID NO: 8726; SEQ ID NO: 8727; SEQ ID NO: 8728; SEQ ID NO: 8729; SEQ ID NO: 8730; SEQ ID NO: 8731; SEQ ID NO: 8732; SEQ ID NO: 8733; SEQ ID NO: 8734; SEQ ID NO: 8735; SEQ ID NO: 8736; SEQ ID NO: 8737; SEQ ID NO: 8738; SEQ ID NO: 8739; SEQ ID NO: 8740; SEQ ID NO: 8741; SEQ ID NO: 8742; SEQ ID NO: 8743; SEQ ID NO: 8744; SEQ ID NO: 8745; SEQ ID NO: 8746; SEQ ID NO: 8747; SEQ ID NO: 8748; SEQ ID NO: 8749; SEQ ID NO: 8750; SEQ ID NO: 8751; SEQ ID NO: 8752; SEQ ID NO: 8753; SEQ ID NO: 8754; SEQ ID NO: 8755; SEQ ID NO: 8756; SEQ ID NO: 8757; SEQ ID NO: 8758; SEQ ID NO: 8759; SEQ ID NO: 8760; SEQ ID NO: 8761; SEQ ID NO: 8762; SEQ ID NO: 8763; SEQ ID NO: 8764; SEQ ID NO: 8765; SEQ ID NO: 8766; SEQ ID NO: 8767; SEQ ID NO: 8768; SEQ ID NO: 8769; SEQ ID NO: 8770; SEQ ID NO: 8771; SEQ ID NO: 8772; SEQ ID NO: 8773; SEQ ID NO: 8774; SEQ ID NO: 8775; SEQ ID NO: 8776; SEQ ID NO: 8777; SEQ ID NO: 8778; SEQ ID NO: 8779; SEQ ID NO: 8780; SEQ ID NO: 8781; SEQ ID NO: 8782; SEQ ID NO: 8783; SEQ ID NO: 8784; SEQ ID NO: 8785; SEQ ID NO: 8786; SEQ ID NO: 8787; SEQ ID NO: 8788; SEQ ID NO: 8789; SEQ ID NO: 8790; SEQ ID NO: 8791; SEQ ID NO: 8792; SEQ ID NO: 8793; SEQ ID NO: 8794; SEQ ID NO: 8795; SEQ ID NO: 8796; SEQ ID NO: 8797; SEQ ID NO: 8798; SEQ ID NO: 8799; SEQ ID NO: 8800; SEQ ID NO: 8801; SEQ ID NO: 8802; SEQ ID NO: 8803; SEQ ID NO: 8804; SEQ ID NO: 8805; SEQ ID NO: 8806; SEQ ID NO: 8807; SEQ ID NO: 8808; SEQ ID NO: 8809; SEQ ID NO: 8810; SEQ ID NO: 8811; SEQ ID NO: 8812; SEQ ID NO: 8813; SEQ ID NO: 8814; SEQ ID NO: 8815; SEQ ID NO: 8816; SEQ ID NO: 8817; SEQ ID NO: 8818; SEQ ID NO: 8819; SEQ ID NO: 8820; SEQ ID NO: 8821; SEQ ID NO: 8822; SEQ ID NO: 8823; SEQ ID NO: 8824; SEQ ID NO: 8825; SEQ ID NO: 8826; SEQ ID NO: 8827; SEQ ID NO: 8828; SEQ ID NO: 8829; SEQ ID NO: 8830; SEQ ID NO: 8831; SEQ ID NO: 8832; SEQ ID NO: 8833; SEQ ID NO: 8834; SEQ ID NO: 8835; SEQ ID NO: 8836; SEQ ID NO: 8837; SEQ ID NO: 8838; SEQ ID NO: 8839; SEQ ID NO: 8840; SEQ ID NO: 8841; SEQ ID NO: 8842; SEQ ID NO: 8843; SEQ ID NO: 8844; SEQ ID NO: 8845; SEQ ID NO: 8846; SEQ ID NO: 8847; SEQ ID NO: 8848; SEQ ID NO: 8849; SEQ ID NO: 8850; SEQ ID NO: 8851; SEQ ID NO: 8852; SEQ ID NO: 8853; SEQ ID NO: 8854; SEQ ID NO: 8855; SEQ ID NO: 8856; SEQ ID NO: 8857; SEQ ID NO: 8858; SEQ ID NO: 8859; SEQ ID NO: 8860; SEQ ID NO: 8861; SEQ ID NO: 8862; SEQ ID NO: 8863; SEQ ID NO: 8864; SEQ ID NO: 8865; SEQ ID NO: 8866; SEQ ID NO: 8867; SEQ ID NO: 8868; SEQ ID NO: 8869; SEQ ID NO: 8870; SEQ ID NO: 8871; SEQ ID NO: 8872; SEQ ID NO: 8873; SEQ ID NO: 8874; SEQ ID NO: 8875; SEQ ID NO: 8876; SEQ ID NO: 8877; SEQ ID NO: 9705; SEQ ID NO: 9706; SEQ ID NO: 9707; SEQ ID NO: 9708; SEQ ID NO: 9709; SEQ ID NO: 9710; SEQ ID NO: 9711; SEQ ID NO: 9712; SEQ ID NO: 9713; SEQ ID NO: 9714; SEQ ID NO: 9715; SEQ ID NO: 9716; SEQ ID NO: 9717; SEQ ID NO: 9718; SEQ ID NO: 9719; SEQ ID NO: 9720; SEQ ID NO: 9721; SEQ ID NO: 9722; SEQ ID NO: 9723; SEQ ID NO: 9724; SEQ ID NO: 9725; SEQ ID NO: 9726; SEQ ID NO: 9727; SEQ ID NO: 9728; SEQ ID NO: 9729; SEQ ID NO: 9730; SEQ ID NO: 9731; SEQ ID NO: 9732 and SEQ ID NO: 9733.

[0136] In one embodiment, the H. pylori cytoplasmic polypeptide or a fragment thereof is an H. pylori polypeptide involved in energy metabolism or a fragment thereof having an amino acid sequence selected from the group consisting of SEQ ID NO: 6338; SEQ ID NO: 6339; SEQ ID NO: 6340; SEQ ID NO: 6341; SEQ ID NO: 6342; SEQ ID NO: 6343; SEQ ID NO: 6344; SEQ ID NO: 6345; SEQ ID NO: 6346; SEQ ID NO: 6347; SEQ ID NO: 6348; SEQ ID NO: 6349; SEQ ID NO: 6350; SEQ ID NO: 6351; SEQ ID NO: 6352; SEQ ID NO: 6353; SEQ ID NO: 6354; SEQ ID NO: 6355; SEQ ID NO: 6356; SEQ ID NO: 6357; SEQ ID NO: 6358; SEQ ID NO: 6359; SEQ ID NO: 6360; SEQ ID NO: 6361; SEQ ID NO: 6362; SEQ ID NO: 6363; SEQ ID NO: 6364; SEQ ID NO: 6365; SEQ ID NO: 6366; SEQ ID NO: 6367; SEQ ID NO: 6368; SEQ ID NO: 6369; SEQ ID NO: 6370; SEQ ID NO: 6371; SEQ ID NO: 6372; SEQ ID NO: 6373; SEQ ID NO: 6374; SEQ ID NO: 6375; SEQ ID NO: 6376; SEQ ID NO: 6377; SEQ ID NO: 6378; SEQ ID NO: 6379; SEQ ID NO: 6380; SEQ ID NO: 6381; SEQ ID NO: 6382; SEQ ID NO: 6383; SEQ ID NO: 6384; SEQ ID NO: 6385; SEQ ID NO: 6386; SEQ ID NO: 6387; SEQ ID NO: 6389; SEQ ID NO: 6390; SEQ ID NO: 6391; SEQ ID NO: 6392; SEQ ID NO: 6393; SEQ ID NO: 6394; SEQ ID NO: 6395; SEQ ID NO: 6396; SEQ ID NO: 6397; SEQ ID NO: 6398; SEQ ID NO: 6399; SEQ ID NO: 6400; SEQ ID NO: 6401; SEQ ID NO: 6402; SEQ ID NO: 6403; SEQ ID NO: 6404; SEQ ID NO: 6405; SEQ ID NO: 6406; SEQ ID NO: 6407; SEQ ID NO: 6408; SEQ ID NO: 6409; SEQ ID NO: 6410; SEQ ID NO: 6411; SEQ ID NO: 6412; SEQ ID NO: 6413; SEQ ID NO: 6414; SEQ ID NO: 6415; SEQ ID NO: 6416; SEQ ID NO: 6417; SEQ ID NO: 6418; SEQ ID NO: 6419; SEQ ID NO: 6420; SEQ ID NO: 6421; SEQ ID NO: 6422; SEQ ID NO: 6423; SEQ ID NO: 6424; SEQ ID NO: 6425; SEQ ID NO: 6426; SEQ ID NO: 6427; SEQ ID NO: 6428; SEQ ID NO: 6429; SEQ ID NO: 6430; SEQ ID NO: 6431; SEQ ID NO: 6432; SEQ ID NO: 6433; SEQ ID NO: 6434; SEQ ID NO: 6435; SEQ ID NO: 6436; SEQ ID NO: 6437; SEQ ID NO: 6438; SEQ ID NO: 6439; SEQ ID NO: 6440; SEQ ID NO: 6441; SEQ ID NO: 6442; SEQ ID NO: 6443; SEQ ID NO: 6444; SEQ ID NO: 6445; SEQ ID NO: 6446; SEQ ID NO: 6447; SEQ ID NO: 6448; SEQ ID NO: 6449; SEQ ID NO: 6450; SEQ ID NO: 6451; SEQ ID NO: 6452; SEQ ID NO: 6453; SEQ ID NO: 6454; SEQ ID NO: 6455; SEQ ID NO: 6456; SEQ ID NO: 6457; SEQ ID NO: 6458; SEQ ID NO: 6459; SEQ ID NO: 6460; SEQ ID NO: 6461; SEQ ID NO: 6462; SEQ ID NO: 6463; SEQ ID NO: 6464; SEQ ID NO: 6465; SEQ ID NO: 6466; SEQ ID NO: 6467; SEQ ID NO: 6468; SEQ ID NO: 6469; SEQ ID NO: 6470; SEQ ID NO: 6471; SEQ ID NO: 6472; SEQ ID NO: 6473; SEQ ID NO: 6474; SEQ ID NO: 6475; SEQ ID NO: 6476; SEQ ID NO: 6477; SEQ ID NO: 6478; SEQ ID NO: 6479; SEQ ID NO: 6480; SEQ ID NO: 6481; SEQ ID NO: 6482; SEQ ID NO: 6483; SEQ ID NO: 6484; SEQ ID NO: 6485; SEQ ID NO: 6486; SEQ ID NO: 6487; SEQ ID NO: 9705 and SEQ ID NO: 9706.

[0137] In another embodiment, the H. pylori cytoplasmic polypeptide or a fragment thereof is an H. pylori polypeptide involved in amino acid metabolism or a fragment thereof having an amino acid sequence selected from the group consisting of SEQ ID NO: 6488; SEQ ID NO: 6489; SEQ ID NO: 6490; SEQ ID NO: 6491; SEQ ID NO: 6492; SEQ ID NO: 6493; SEQ ID NO: 6494; SEQ ID NO: 6495; SEQ ID NO: 6496; SEQ ID NO: 6497; SEQ ID NO: 6498; SEQ ID NO: 6499; SEQ ID NO: 6500; SEQ ID NO: 6501; SEQ ID NO: 6502; SEQ ID NO: 6503; SEQ ID NO: 6504; SEQ ID NO: 6505; SEQ ID NO: 6506; SEQ ID NO: 6507; SEQ ID NO: 6508; SEQ ID NO: 6509; SEQ ID NO: 6510; SEQ ID NO: 6511; SEQ ID NO: 6512; SEQ ID NO: 6513; SEQ ID NO: 6514; SEQ ID NO: 6515; SEQ ID NO: 6516; SEQ ID NO: 6517; SEQ ID NO: 6518; SEQ ID NO: 6519; SEQ ID NO: 6520; SEQ ID NO: 6521; SEQ ID NO: 6522; SEQ ID NO: 6523; SEQ ID NO: 6524; SEQ ID NO: 6525; SEQ ID NO: 6526, SEQ ID NO: 6527; SEQ ID NO: 6528; SEQ ID NO: 6529; SEQ ID NO: 6530; SEQ ID NO: 6531; SEQ ID NO: 6532; SEQ ID NO: 6533; SEQ ID NO: 6534; SEQ ID NO: 6535; SEQ ID NO: 6536; SEQ ID NO: 6537; SEQ ID NO: 6538; SEQ ID NO: 6539; SEQ ID NO: 6540; SEQ ID NO: 6541; SEQ ID NO: 6542; SEQ ID NO: 6543; SEQ ID NO: 6544; SEQ ID NO: 6545; SEQ ID NO: 6546; SEQ ID NO: 6547; SEQ ID NO: 6548; SEQ ID NO: 6549; SEQ ID NO: 6550; SEQ ID NO: 6551; SEQ ID NO: 6552; SEQ ID NO: 6553; SEQ ID NO: 6554; SEQ ID NO: 6555; SEQ ID NO: 6556; SEQ ID NO: 6557; SEQ ID NO: 6558; SEQ ID NO: 6559; SEQ ID NO: 6560; SEQ ID NO: 6561; SEQ ID NO: 6562; SEQ ID NO: 6563; SEQ ID NO: 6564; SEQ ID NO: 6565; SEQ ID NO: 6566; SEQ ID NO: 6567; SEQ ID NO: 6568; SEQ ID NO: 6569; SEQ ID NO: 6570; SEQ ID NO: 6571; SEQ ID NO: 6572; SEQ ID NO: 6573; SEQ ID NO: 6574; SEQ ID NO: 6575; SEQ ID NO: 6576; SEQ ID NO: 6577; SEQ ID NO: 6578; SEQ ID NO: 6579; SEQ ID NO: 6580; SEQ ID NO: 6581; SEQ ID NO: 6582; SEQ ID NO: 6583; SEQ ID NO: 6584; SEQ ID NO: 6585; SEQ ID NO: 6586; SEQ ID NO: 6587; SEQ ID NO: 6588; SEQ ID NO: 6589; SEQ ID NO: 6590; SEQ ID NO: 6591; SEQ ID NO: 6592; SEQ ID NO: 6593; SEQ ID NO: 6594; SEQ ID NO: 6595; SEQ ID NO: 6596; SEQ ID NO: 6597; SEQ ID NO: 6598; SEQ ID NO: 6599; SEQ ID NO: 6600; SEQ ID NO: 6601; SEQ ID NO: 6602; SEQ ID NO: 6603; SEQ ID NO: 6604; SEQ ID NO: 6605; SEQ ID NO: 6606; SEQ ID NO: 6607; SEQ ID NO: 6608; SEQ ID NO: 6609; SEQ ID NO: 6610; SEQ ID NO: 6611; SEQ ID NO: 6612; SEQ ID NO: 6613; SEQ ID NO: 6614; SEQ ID NO: 6615; SEQ ID NO: 6616; SEQ ID NO: 6617; SEQ ID NO: 6618; SEQ ID NO: 6619; SEQ ID NO: 6620; SEQ ID NO: 6621; SEQ ID NO: 6622; SEQ ID NO: 6623; SEQ ID NO: 6624; SEQ ID NO: 6625; SEQ ID NO: 6626; SEQ ID NO: 6627; SEQ ID NO: 6628; SEQ ID NO: 6629; SEQ ID NO: 6630; SEQ ID NO: 9707 and SEQ ID NO: 9708.

[0138] In another embodiment, the H. pylori cytoplasmic polypeptide or a fragment thereof is an H. pylori polypeptide involved in cofactor metabolism or a fragment thereof having an amino acid sequence selected from the group consisting of SEQ ID NO: 6631; SEQ ID NO: 6632; SEQ ID NO: 6633; SEQ ID NO: 6634; SEQ ID NO: 6635; SEQ ID NO: 6636; SEQ ID NO: 6637; SEQ ID NO: 6638; SEQ ID NO: 6639; SEQ ID NO: 6640; SEQ ID NO: 6641; SEQ ID NO: 6642; SEQ ID NO: 6643; SEQ ID NO: 6644; SEQ ID NO: 6645; SEQ ID NO: 6646; SEQ ID NO: 6647; SEQ ID NO: 6648; SEQ ID NO: 6649; SEQ ID NO: 6650; SEQ ID NO: 6651; SEQ ID NO: 6652; SEQ ID NO: 6653; SEQ ID NO: 6654; SEQ ID NO: 6655; SEQ ID NO: 6656; SEQ ID NO: 6657; SEQ ID NO: 6658; SEQ ID NO: 6659; SEQ ID NO: 6660; SEQ ID NO: 6661; SEQ ID NO: 6662; SEQ ID NO: 6663; SEQ ID NO: 6664; SEQ ID NO: 6665; SEQ ID NO: 6666; SEQ ID NO: 6667; SEQ ID NO: 6668; SEQ ID NO: 6669; SEQ ID NO: 6670; SEQ ID NO: 6671; SEQ ID NO: 6672; SEQ ID NO: 6673; SEQ ID NO: 6674; SEQ ID NO: 6675; SEQ ID NO: 6676; SEQ ID NO: 6677; SEQ ID NO: 6678; SEQ ID NO: 6679; SEQ ID NO: 6680; SEQ ID NO: 6681; SEQ ID NO: 6682; SEQ ID NO: 6683; SEQ ID NO: 6684; SEQ ID NO: 6685; SEQ ID NO: 6686; SEQ ID NO: 6687; SEQ ID NO: 6688; SEQ ID NO: 6689; SEQ ID NO: 6690; SEQ ID NO: 6691; SEQ ID NO: 6692; SEQ ID NO: 6693; SEQ ID NO: 6694; SEQ ID NO: 6695; SEQ ID NO: 6696; SEQ ID NO: 6697; SEQ ID NO: 6698; SEQ ID NO: 6699; SEQ ID NO: 6700; SEQ ID NO: 6701; SEQ ID NO: 6702; SEQ ID NO: 6703; SEQ ID NO: 6704; SEQ ID NO: 6705; SEQ ID NO: 6706; SEQ ID NO: 6707; SEQ ID NO: 6708; SEQ ID NO: 6709; SEQ ID NO: 6710; SEQ ID NO: 6711; SEQ ID NO: 6712; SEQ ID NO: 6713; SEQ ID NO: 6714; SEQ ID NO: 6715; SEQ ID NO: 6716; SEQ ID NO: 6717; SEQ ID NO: 6718; SEQ ID NO: 6719; SEQ ID NO: 6720; SEQ ID NO: 6721; SEQ ID NO: 6722; SEQ ID NO: 6723; SEQ ID NO: 6724; SEQ ID NO: 6725; SEQ ID NO: 6726; SEQ ID NO: 6727; SEQ ID NO: 6728; SEQ ID NO: 6729; SEQ ID NO: 6730; SEQ ID NO: 6731; SEQ ID NO: 6732; SEQ ID NO: 6733; SEQ ID NO: 6734; SEQ ID NO: 6735; SEQ ID NO: 6736; SEQ ID NO: 6737; SEQ ID NO: 6738; SEQ ID NO: 6739; SEQ ID NO: 6740; SEQ ID NO: 6741; SEQ ID NO: 6742; SEQ ID NO: 6743; SEQ ID NO: 6744; SEQ ID NO: 6745; SEQ ID NO: 6746; SEQ ID NO: 6747; SEQ ID NO: 6748; SEQ ID NO: 6749, SEQ ID NO: 6750; SEQ ID NO: 6751; SEQ ID NO: 6752; SEQ ID NO: 6753; SEQ ID NO: 6754; SEQ ID NO: 6755; SEQ ID NO: 6756; SEQ ID NO: 6757; SEQ ID NO: 6758; SEQ ID NO: 6759; SEQ ID NO: 6760; SEQ ID NO: 6761; SEQ ID NO: 6762; SEQ ID NO: 6763; SEQ ID NO: 6764; SEQ ID NO: 6765; SEQ ID NO: 6766; SEQ ID NO: 6767 and SEQ ID NO: 9709.

[0139] In another embodiment, the H. pylori cytoplasmic polypeptide or a fragment thereof is an H. pylori polypeptide involved in carbohydrate metabolism or a fragment thereof having an amino acid sequence selected from the group consisting of SEQ ID NO: 6768; SEQ ID NO: 6769; SEQ ID NO: 6770; SEQ ID NO: 6771; SEQ ID NO: 6772; SEQ ID NO: 6773; SEQ ID NO: 6774; SEQ ID NO: 6775; SEQ ID NO: 6776; SEQ ID NO: 6777; SEQ ID NO: 6778; SEQ ID NO: 6779; SEQ ID NO: 6780; SEQ ID NO: 6781; SEQ ID NO: 6782; SEQ ID NO: 6783; SEQ ID NO: 6784; SEQ ID NO: 6785; SEQ ID NO: 6786; SEQ ID NO: 6787; SEQ ID NO: 6788; SEQ ID NO: 6789; SEQ ID NO: 6790; SEQ ID NO: 6791; SEQ ID NO: 6792; SEQ ID NO: 6793; SEQ ID NO: 6794; SEQ ID NO: 6795; SEQ ID NO: 6796; SEQ ID NO: 6797; SEQ ID NO: 6798; SEQ ID NO: 6799; SEQ ID NO: 6800; SEQ ID NO: 6801; SEQ ID NO: 6802; SEQ ID NO: 6803; SEQ ID NO: 6804; SEQ ID NO: 6805; SEQ ID NO: 6806; SEQ ID NO: 6807; SEQ ID NO: 6808; SEQ ID NO: 6809; SEQ ID NO: 6810; SEQ ID NO: 6811; SEQ ID NO: 6812; SEQ ID NO: 6813; SEQ ID NO: 6814; SEQ ID NO: 6815; SEQ ID NO: 6816; SEQ ID NO: 6817; SEQ ID NO: 6818; SEQ ID NO: 6819; SEQ ID NO: 6820; SEQ ID NO: 6821; SEQ ID NO: 6822; SEQ ID NO: 6823; SEQ ID NO: 6824; SEQ ID NO: 6825; SEQ ID NO: 6826; SEQ ID NO: 6827; SEQ ID NO: 6828; SEQ ID NO: 6829; SEQ ID NO: 6830; SEQ ID NO: 6831; SEQ ID NO: 6832; SEQ ID NO: 6833; SEQ ID NO: 6834; SEQ ID NO: 6835; SEQ ID NO: 6836; SEQ ID NO: 6837; SEQ ID NO: 6838; SEQ ID NO: 9710 and SEQ ID NO: 9711.

[0140] In another embodiment, the H. pylori cytoplasmic polypeptide or a fragment thereof is an H. pylori polypeptide involved in nucleic acid metabolism or a fragment thereof having an amino acid sequence selected from the group consisting of SEQ ID NO: 6839; SEQ ID NO: 6840; SEQ ID NO: 6841; SEQ ID NO: 6842; SEQ ID NO: 6843; SEQ ID NO: 6844; SEQ ID NO: 6845; SEQ ID NO: 6846; SEQ ID NO: 6847; SEQ ID NO: 6848; SEQ ID NO: 6849; SEQ ID NO: 6850; SEQ ID NO: 6851; SEQ ID NO: 6852; SEQ ID NO: 6853; SEQ ID NO: 6854; SEQ ID NO: 6855; SEQ ID NO: 6856; SEQ ID NO: 6857; SEQ ID NO: 6858; SEQ ID NO: 6859; SEQ ID NO: 6860; SEQ ID NO: 6861; SEQ ID NO: 6862; SEQ ID NO: 6863; SEQ ID NO: 6864; SEQ ID NO: 6865; SEQ ID NO: 6866; SEQ ID NO: 6867; SEQ ID NO: 6868; SEQ ID NO: 6869; SEQ ID NO: 6870; SEQ ID NO: 6871; SEQ ID NO: 6872; SEQ ID NO: 6873; SEQ ID NO: 6874; SEQ ID NO: 6875; SEQ ID NO: 6876; SEQ ID NO: 6877; SEQ ID NO: 6878; SEQ ID NO: 6879; SEQ ID NO: 6880; SEQ ID NO: 6881; SEQ ID NO: 6882; SEQ ID NO: 6883; SEQ ID NO: 6884; SEQ ID NO: 6885; SEQ ID NO: 6886; SEQ ID NO: 6887; SEQ ID NO: 6888; SEQ ID NO: 6889; SEQ ID NO: 6890; SEQ ID NO: 6891; SEQ ID NO: 6892; SEQ ID NO: 6893; SEQ ID NO: 6894; SEQ ID NO: 6895; SEQ ID NO: 6896; SEQ ID NO: 6897; SEQ ID NO: 6898; SEQ ID NO: 6899; SEQ ID NO: 6900; SEQ ID NO: 6901; SEQ ID NO: 6902; SEQ ID NO: 6903; SEQ ID NO: 6904; SEQ ID NO: 6905; SEQ ID NO: 6906; SEQ ID NO: 6907; SEQ ID NO: 6908; SEQ ID NO: 6909; SEQ ID NO: 6910; SEQ ID NO: 6911; SEQ ID NO: 6912; SEQ ID NO: 6913; SEQ ID NO: 6914; SEQ ID NO: 6915; SEQ ID NO: 6916; SEQ ID NO: 6917; SEQ ID NO: 6918; SEQ ID NO: 6919; SEQ ID NO: 6920; SEQ ID NO: 6921; SEQ ID NO: 6922; SEQ ID NO: 6923; SEQ ID NO: 6924; SEQ ID NO: 6925; SEQ ID NO: 6926; SEQ ID NO: 6927; SEQ ID NO: 6928; SEQ ID NO: 6929; SEQ ID NO: 6930; SEQ ID NO: 6931; SEQ ID NO: 6932; SEQ ID NO: 6933; SEQ ID NO: 6934; SEQ ID NO: 6935; SEQ ID NO: 6936; SEQ ID NO: 6937; SEQ ID NO: 6938; SEQ ID NO: 6939; SEQ ID NO: 6940; SEQ ID NO: 6941; SEQ ID NO: 6942; SEQ ID NO: 6943; SEQ ID NO: 6944 and SEQ ID NO: 9712.

[0141] In another embodiment, the H. pylori cytoplasmic polypeptide or a fragment thereof is an H. pylori polypeptide involved in lipid metabolism or a fragment thereof having an amino acid sequence selected from the group consisting of SEQ ID NO: 6945; SEQ ID NO: 6946; SEQ ID NO: 6947; SEQ ID NO: 6948; SEQ ID NO: 6949; SEQ ID NO: 6950; SEQ ID NO: 6951; SEQ ID NO: 6952; SEQ ID NO: 6953; SEQ ID NO: 6954; SEQ ID NO: 6955; SEQ ID NO: 6956; SEQ ID NO: 6957; SEQ ID NO: 6958; SEQ ID NO: 6959; SEQ ID NO: 6960; SEQ ID NO: 6961; SEQ ID NO: 6962; SEQ ID NO: 6963; SEQ ID NO: 6964; SEQ ID NO: 6965; SEQ ID NO: 6966; SEQ ID NO: 6967; SEQ ID NO: 6968; SEQ ID NO: 6969; SEQ ID NO: 6970; SEQ ID NO: 6971; SEQ ID NO: 6972; SEQ ID NO: 6973; SEQ ID NO: 6974; SEQ ID NO: 6975; SEQ ID NO: 6976; SEQ ID NO: 6977; SEQ ID NO: 6978; SEQ ID NO: 6979; SEQ ID NO: 6980; SEQ ID NO: 9713 and SEQ ID NO: 9714.

[0142] In another embodiment, the H. pylori cytoplasmic polypeptide or a fragment thereof is an H. pylori polypeptide involved in mRNA translation and ribosome biogenesis or a fragment thereof having an amino acid sequence selected from the group consisting of SEQ ID NO: 6981; SEQ ID NO: 6982; SEQ ID NO: 6983; SEQ ID NO: 6984; SEQ ID NO: 6985; SEQ ID NO: 6986; SEQ ID NO: 6987; SEQ ID NO: 6988; SEQ ID NO: 6989; SEQ ID NO: 6990; SEQ ID NO: 6991; SEQ ID NO: 6992; SEQ ID NO: 6993; SEQ ID NO: 6994; SEQ ID NO: 6995; SEQ ID NO: 6996; SEQ ID NO: 6997; SEQ ID NO: 6998; SEQ ID NO: 6999; SEQ ID NO: 7000; SEQ ID NO: 7001; SEQ ID NO: 7002; SEQ ID NO: 7003; SEQ ID NO: 7004; SEQ ID NO: 7005; SEQ ID NO: 7006; SEQ ID NO: 7007; SEQ ID NO: 7008; SEQ ID NO: 7009; SEQ ID NO: 7010; SEQ ID NO: 7011; SEQ ID NO: 7012; SEQ ID NO: 7013; SEQ ID NO: 7014; SEQ ID NO: 7015; SEQ ID NO: 7016; SEQ ID NO: 7017; SEQ ID NO: 7018; SEQ ID NO: 7019; SEQ ID NO: 7020; SEQ ID NO: 7021; SEQ ID NO: 7022; SEQ ID NO: 7023; SEQ ID NO: 7024; SEQ ID NO: 7025; SEQ ID NO: 7026; SEQ ID NO: 7027; SEQ ID NO: 7028; SEQ ID NO: 7029; SEQ ID NO: 7030; SEQ ID NO: 7031; SEQ ID NO: 7032; SEQ ID NO: 7033; SEQ ID NO: 7034; SEQ ID NO: 7035; SEQ ID NO: 7036; SEQ ID NO: 7037; SEQ ID NO: 7038; SEQ ID NO: 7039; SEQ ID NO: 7040; SEQ ID NO: 7041; SEQ ID NO: 7042; SEQ ID NO: 7043; SEQ ID NO: 7044; SEQ ID NO: 7045; SEQ ID NO: 7046; SEQ ID NO: 7047; SEQ ID NO: 7048; SEQ ID NO: 7049; SEQ ID NO: 7050; SEQ ID NO: 7051; SEQ ID NO: 7052; SEQ ID NO: 7053; SEQ ID NO: 7054; SEQ ID NO: 7055; SEQ ID NO: 7056; SEQ ID NO: 7057; SEQ ID NO: 7058; SEQ ID NO: 7059; SEQ ID NO: 7060; SEQ ID NO: 7061; SEQ ID NO: 7062; SEQ ID NO: 7063; SEQ ID NO: 7064; SEQ ID NO: 7065; SEQ ID NO: 7066; SEQ ID NO: 7067; SEQ ID NO: 7068; SEQ ID NO: 7069; SEQ ID NO: 7070; SEQ ID NO: 7071; SEQ ID NO: 7072; SEQ ID NO: 7073; SEQ ID NO: 7074; SEQ ID NO: 7075; SEQ ID NO: 7076; SEQ ID NO: 7077; SEQ ID NO: 7078; SEQ ID NO: 7079; SEQ ID NO: 7080; SEQ ID NO: 7081; SEQ ID NO: 7082; SEQ ID NO: 7083; SEQ ID NO: 7084; SEQ ID NO: 7085; SEQ ID NO: 7086; SEQ ID NO: 7087; SEQ ID NO: 7088; SEQ ID NO: 7089; SEQ ID NO: 7090; SEQ ID NO: 7091; SEQ ID NO: 7092; SEQ ID NO: 7093; SEQ ID NO: 7094; SEQ ID NO: 7095; SEQ ID NO: 7096; SEQ ID NO: 7097; SEQ ID NO: 7098; SEQ ID NO: 7099; SEQ ID NO: 7100; SEQ ID NO: 7101; SEQ ID NO: 7102; SEQ ID NO: 7103; SEQ ID NO: 7104; SEQ ID NO: 7105; SEQ ID NO: 7106; SEQ ID NO: 7107; SEQ ID NO: 7108; SEQ ID NO: 7109; SEQ ID NO: 7110; SEQ ID NO: 7111; SEQ ID NO: 7112; SEQ ID NO: 7113; SEQ ID NO: 7114; SEQ ID NO: 7115; SEQ ID NO: 7116; SEQ ID NO: 7117; SEQ ID NO: 7118; SEQ ID NO: 7119; SEQ ID NO: 7120; SEQ ID NO: 7121; SEQ ID NO: 7122; SEQ ID NO: 7123; SEQ ID NO: 7124; SEQ ID NO: 7125; SEQ ID NO: 7126; SEQ ID NO: 7127; SEQ ID NO: 7128; SEQ ID NO: 7129; SEQ ID NO: 7130; SEQ ID NO: 7131; SEQ ID NO: 7132; SEQ ID NO: 7133; SEQ ID NO: 7134; SEQ ID NO: 7135; SEQ ID NO: 7136; SEQ ID NO: 7137; SEQ ID NO: 7138; SEQ ID NO: 7139; SEQ ID NO: 7140; SEQ ID NO: 7141; SEQ ID NO: 7142; SEQ ID NO: 7143; SEQ ID NO: 7144; SEQ ID NO: 7145; SEQ ID NO: 7146; SEQ ID NO: 7147; SEQ ID NO: 7148; SEQ ID NO: 7149; SEQ ID NO: 7150; SEQ ID NO: 7151; SEQ ID NO: 7152; SEQ ID NO: 7153; SEQ ID NO: 7154; SEQ ID NO: 7155; SEQ ID NO: 7156; SEQ ID NO: 7157; SEQ ID NO: 7158; SEQ ID NO: 7159; SEQ ID NO: 7160; SEQ ID NO: 7161; SEQ ID NO: 7162; SEQ ID NO: 7163; SEQ ID NO: 7164; SEQ ID NO: 7165; SEQ ID NO: 7166; SEQ ID NO: 7167; SEQ ID NO: 7168; SEQ ID NO: 7169; SEQ ID NO: 7170; SEQ ID NO: 7171; SEQ ID NO: 7172; SEQ ID NO: 7173; SEQ ID NO: 7174; SEQ ID NO: 7175; SEQ ID NO: 7176; SEQ ID NO: 7177; SEQ ID NO: 7178; SEQ ID NO: 7179; SEQ ID NO: 7180; SEQ ID NO: 7181; SEQ ID NO: 7182; SEQ ID NO: 7183; SEQ ID NO: 7184; SEQ ID NO: 7185; SEQ ID NO: 7186; SEQ ID NO: 7187; SEQ ID NO: 7188; SEQ ID NO: 7189; SEQ ID NO: 7190; SEQ ID NO: 7191; SEQ ID NO: 7192; SEQ ID NO: 7193; SEQ ID NO: 7194; SEQ ID NO: 7195; SEQ ID NO: 7196; SEQ ID NO: 7197; SEQ ID NO: 7198; SEQ ID NO: 7199; SEQ ID NO: 7200; SEQ ID NO: 9715 and SEQ ID NO: 9716.

[0143] In another embodiment, the H. pylori cytoplasmic polypeptide or a fragment thereof is an H. pylori polypeptide involved in genome replication, transcription, recombination and repair or a fragment thereof having an amino acid sequence selected from the group consisting of SEQ ID NO: 7201; SEQ ID NO: 7202; SEQ ID NO: 7203; SEQ ID NO: 7204; SEQ ID NO: 7205; SEQ ID NO: 7206; SEQ ID NO: 7207; SEQ ID NO: 7208; SEQ ID NO: 7209; SEQ ID NO: 7210; SEQ ID NO: 7211; SEQ ID NO: 7212; SEQ ID NO: 7213; SEQ ID NO: 7214; SEQ ID NO: 7215; SEQ ID NO: 7216; SEQ ID NO: 7217; SEQ ID NO: 7218; SEQ ID NO: 7219; SEQ ID NO: 7220; SEQ ID NO: 7221; SEQ ID NO: 7222; SEQ ID NO: 7223; SEQ ID NO: 7224; SEQ ID NO: 7225; SEQ ID NO: 7226; SEQ ID NO: 7227; SEQ ID NO: 7228; SEQ ID NO: 7229; SEQ ID NO: 7230; SEQ ID NO: 7231; SEQ ID NO: 7232; SEQ ID NO: 7233; SEQ ID NO: 7234; SEQ ID NO: 7235; SEQ ID NO: 7236; SEQ ID NO: 7237; SEQ ID NO: 7238; SEQ ID NO: 7239; SEQ ID NO: 7240; SEQ ID NO: 7241; SEQ ID NO: 7242; SEQ ID NO: 7243; SEQ ID NO: 7244; SEQ ID NO: 7245; SEQ ID NO: 7246; SEQ ID NO: 7247; SEQ ID NO: 7248; SEQ ID NO: 7249; SEQ ID NO: 7250; SEQ ID NO: 7251; SEQ ID NO: 7252; SEQ ID NO: 7253; SEQ ID NO: 7254; SEQ ID NO: 7255; SEQ ID NO: 7256; SEQ ID NO: 7257; SEQ ID NO: 7258; SEQ ID NO: 7259; SEQ ID NO: 7260; SEQ ID NO: 7261; SEQ ID NO: 7262; SEQ ID NO: 7263; SEQ ID NO: 7264; SEQ ID NO: 7265; SEQ ID NO: 7266; SEQ ID NO: 7267; SEQ ID NO: 7268; SEQ ID NO: 7269; SEQ ID NO: 7270; SEQ ID NO: 7271; SEQ ID NO: 7272; SEQ ID NO: 7273; SEQ ID NO: 7274; SEQ ID NO: 7275; SEQ ID NO: 7276; SEQ ID NO: 7277; SEQ ID NO: 7278; SEQ ID NO: 7279; SEQ ID NO: 7280; SEQ ID NO: 7281; SEQ ID NO: 7282; SEQ ID NO: 7283; SEQ ID NO: 7284; SEQ ID NO: 7285; SEQ ID NO: 7286; SEQ ID NO: 7287; SEQ ID NO: 7288; SEQ ID NO: 7289; SEQ ID NO: 7290; SEQ ID NO: 7291; SEQ ID NO: 7292; SEQ ID NO: 7293; SEQ ID NO: 7294; SEQ ID NO: 7295; SEQ ID NO: 7296; SEQ ID NO: 7297; SEQ ID NO: 7298; SEQ ID NO: 7299; SEQ ID NO: 7300; SEQ ID NO: 7301; SEQ ID NO: 7302; SEQ ID NO: 7303; SEQ ID NO: 7304; SEQ ID NO: 7305; SEQ ID NO: 7306; SEQ ID NO: 7307; SEQ ID NO: 7308; SEQ ID NO: 7309; SEQ ID NO: 7310; SEQ ID NO: 7311; SEQ ID NO: 7312; SEQ ID NO: 7313; SEQ ID NO: 7314; SEQ ID NO: 7315; SEQ ID NO: 7316; SEQ ID NO: 7317; SEQ ID NO: 7318; SEQ ID NO: 7319; SEQ ID NO: 7320; SEQ ID NO: 7321; SEQ ID NO: 7322; SEQ ID NO: 7323; SEQ ID NO: 7324; SEQ ID NO: 7325; SEQ ID NO: 7326; SEQ ID NO: 7327; SEQ ID NO: 7328; SEQ ID NO: 7329; SEQ ID NO: 7330; SEQ ID NO: 7331; SEQ ID NO: 7332; SEQ ID NO: 7333; SEQ ID NO: 7334; SEQ ID NO: 7335; SEQ ID NO: 7336; SEQ ID NO: 7337; SEQ ID NO: 7338; SEQ ID NO: 7339; SEQ ID NO: 7340; SEQ ID NO: 7341; SEQ ID NO: 7342; SEQ ID NO: 7343; SEQ ID NO: 7344; SEQ ID NO: 7345; SEQ ID NO: 7346; SEQ ID NO: 7347; SEQ ID NO: 7348; SEQ ID NO: 7349; SEQ ID NO: 7350; SEQ ID NO: 7351; SEQ ID NO: 7352; SEQ ID NO: 7353; SEQ ID NO: 7354; SEQ ID NO: 7355; SEQ ID NO: 7356; SEQ ID NO: 7357; SEQ ID NO: 7358; SEQ ID NO: 7359; SEQ ID NO: 7360; SEQ ID NO: 7361; SEQ ID NO: 7362; SEQ ID NO: 7363; SEQ ID NO: 7364; SEQ ID NO: 7365; SEQ ID NO: 7366; SEQ ID NO: 7367; SEQ ID NO: 7368; SEQ ID NO: 7369; SEQ ID NO: 7370; SEQ ID NO: 7371; SEQ ID NO: 7372; SEQ ID NO: 7373; SEQ ID NO: 7374; SEQ ID NO: 7375; SEQ ID NO: 7376; SEQ ID NO: 7377; SEQ ID NO: 7378; SEQ ID NO: 7379; SEQ ID NO: 7380; SEQ ID NO: 7381; SEQ ID NO: 7382; SEQ ID NO: 7383; SEQ ID NO: 7384; SEQ ID NO: 7385; SEQ ID NO: 7386; SEQ ID NO: 7387; SEQ ID NO: 7388; SEQ ID NO: 7389; SEQ ID NO: 7390; SEQ ID NO: 7391; SEQ ID NO: 7392; SEQ ID NO: 7393; SEQ ID NO: 7394; SEQ ID NO: 7395; SEQ ID NO: 7396; SEQ ID NO: 7397; SEQ ID NO: 7398; SEQ ID NO: 7399; SEQ ID NO: 7400; SEQ ID NO: 7401; SEQ ID NO: 7402; SEQ ID NO: 7403; SEQ ID NO: 7404; SEQ ID NO: 7405; SEQ ID NO: 7406; SEQ ID NO: 7407; SEQ ID NO: 7408; SEQ ID NO: 7409; SEQ ID NO: 7410; SEQ ID NO: 7411; SEQ ID NO: 7412; SEQ ID NO: 7413; SEQ ID NO: 7414; SEQ ID NO: 7415; SEQ ID NO: 7416; SEQ ID NO: 7417; SEQ ID NO: 7418; SEQ ID NO: 7419; SEQ ID NO: 7420; SEQ ID NO: 7421; SEQ ID NO: 7422; SEQ ID NO: 7423; SEQ ID NO: 7424; SEQ ID NO: 7425; SEQ ID NO: 7426; SEQ ID NO: 7427; SEQ ID NO: 7428; SEQ ID NO: 7429; SEQ ID NO: 7430; SEQ ID NO: 7431; SEQ ID NO: 7432; SEQ ID NO: 7433; SEQ ID NO: 7434; SEQ ID NO: 7435; SEQ ID NO: 7436; SEQ ID NO: 7437; SEQ ID NO: 7438; SEQ ID NO: 7439; SEQ ID NO: 7440; SEQ ID NO: 7441; SEQ ID NO: 7442; SEQ ID NO: 7443; SEQ ID NO: 7444; SEQ ID NO: 7445; SEQ ID NO: 7446; SEQ ID NO: 7447; SEQ ID NO: 7448; SEQ ID NO: 7449; SEQ ID NO: 7450; SEQ ID NO: 7451; SEQ ID NO: 7452; SEQ ID NO: 7453; SEQ ID NO: 7454; SEQ ID NO: 7455; SEQ ID NO: 7456; SEQ ID NO: 7457; SEQ ID NO: 7458; SEQ ID NO: 7459; SEQ ID NO: 7460; SEQ ID NO: 7461; SEQ ID NO: 7462; SEQ ID NO: 7463; SEQ ID NO: 7464; SEQ ID NO: 7465; SEQ ID NO: 7466; SEQ ID NO: 7467; SEQ ID NO: 7468; SEQ ID NO: 7469; SEQ ID NO: 7470; SEQ ID NO: 7471; SEQ ID NO: 7472; SEQ ID NO: 7473; SEQ ID NO: 7474; SEQ ID NO: 7475; SEQ ID NO: 7476; SEQ ID NO: 7477; SEQ ID NO: 7478; SEQ ID NO: 7479; SEQ ID NO: 7480; SEQ ID NO: 7481; SEQ ID NO: 7482; SEQ ID NO: 7483; SEQ ID NO: 7484; SEQ ID NO: 7485; SEQ ID NO: 7486; SEQ ID NO: 7487; SEQ ID NO: 7488; SEQ ID NO: 7489; SEQ ID NO: 7490; SEQ ID NO: 7491; SEQ ID NO: 7492; SEQ ID NO: 7493; SEQ ID NO: 7494; SEQ ID NO: 7495; SEQ ID NO: 7496; SEQ ID NO: 7497; SEQ ID NO: 7498; SEQ ID NO: 7499; SEQ ID NO: 7500; SEQ ID NO: 7501; SEQ ID NO: 7502; SEQ ID NO: 7503; SEQ ID NO: 7504; SEQ ID NO: 7505; SEQ ID NO: 7506; SEQ ID NO: 7507; SEQ ID NO: 7508; SEQ ID NO: 7509; SEQ ID NO:7510; SEQ ID NO: 7511; SEQ ID NO: 7512; SEQ ID NO: 7513; SEQ ID NO: 7514; SEQ ID NO: 7515; SEQ ID NO: 7516; SEQ ID NO: 7517; SEQ ID NO: 7518; SEQ ID NO: 7519; SEQ ID NO: 7520; SEQ ID NO: 7521; SEQ ID NO: 7522; SEQ ID NO: 7523; SEQ ID NO: 7524; SEQ ID NO: 7525; SEQ ID NO: 7526; SEQ ID NO: 7527; SEQ ID NO: 7528; SEQ ID NO: 7529; SEQ ID NO: 7530; SEQ ID NO: 7531; SEQ ID NO: 7532; SEQ ID NO: 7533; SEQ ID NO: 7534; SEQ ID NO: 7535; SEQ ID NO: 7536; SEQ ID NO: 7537; SEQ ID NO: 7538; SEQ ID NO: 7539; SEQ ID NO: 7540; SEQ ID NO: 7541; SEQ ID NO: 7542; SEQ ID NO: 7543; SEQ ID NO: 7544; SEQ ID NO: 7545; SEQ ID NO: 7546; SEQ ID NO: 7547; SEQ ID NO: 7548; SEQ ID NO: 7549; SEQ ID NO: 7550; SEQ ID NO: 7551; SEQ ID NO: 7552; SEQ ID NO: 7553; SEQ ID NO: 7554; SEQ ID NO: 7555; SEQ ID NO: 7556; SEQ ID NO: 7557; SEQ ID NO: 7558; SEQ ID NO: 7559; SEQ ID NO: 7560; SEQ ID NO: 7561; SEQ ID NO: 7562; SEQ ID NO: 7563; SEQ ID NO: 7564; SEQ ID NO: 7565; SEQ ID NO: 7566; SEQ ID NO: 7567; SEQ ID NO: 7568; SEQ ID NO: 7569; SEQ ID NO: 9717; SEQ ID NO: 9718; SEQ ID NO: 9719 and SEQ ID NO: 9720.

[0144] In another embodiment, the H. pylori cytoplasmic polypeptide or a fragment thereof is an H. pylori polypeptide involved in secretion and adhesion or a fragment thereof having an amino acid sequence selected from the group consisting of SEQ ID NO: 7570; SEQ ID NO: 7571; SEQ ID NO: 7572; SEQ ID NO: 7573; SEQ ID NO: 7574; SEQ ID NO: 7575; SEQ ID NO: 7576; SEQ ID NO: 7577; SEQ ID NO: 7578; SEQ ID NO: 7579; SEQ ID NO: 7580; SEQ ID NO: 7581; SEQ ID NO: 7582; SEQ ID NO: 7583; SEQ ID NO: 7584; SEQ ID NO: 7585; SEQ ID NO: 7586.

[0145] In another embodiment, the H. pylori cytoplasmic polypeptide or a fragment thereof is an H. pylori polypeptide involved in outer membrane and cell wall biogenesis or a fragment thereof having an amino acid sequence selected from the group consisting of SEQ ID NO: 7587; SEQ ID NO: 7588; SEQ ID NO: 7589; SEQ ID NO: 7590; SEQ ID NO: 7591; SEQ ID NO: 7592; SEQ ID NO: 7593; SEQ ID NO: 7594; SEQ ID NO: 7595; SEQ ID NO: 7596; SEQ ID NO: 7597; SEQ ID NO: 7598; SEQ ID NO: 7599; SEQ ID NO: 7600; SEQ ID NO: 7601; SEQ ID NO: 7602; SEQ ID NO: 7603; SEQ ID NO: 7604; SEQ ID NO: 7605; SEQ ID NO: 7606; SEQ ID NO: 7607; SEQ ID NO: 7608; SEQ ID NO: 7609; SEQ ID NO: 7610; SEQ ID NO: 7611; SEQ ID NO: 7612; SEQ ID NO: 7613; SEQ ID NO: 7614; SEQ ID NO: 7615; SEQ ID NO: 7616; SEQ ID NO: 7617; SEQ ID NO: 7618; SEQ ID NO: 7619; SEQ ID NO: 7620; SEQ ID NO: 7621; SEQ ID NO: 7622; SEQ ID NO: 7623; SEQ ID NO: 7624; SEQ ID NO: 7625; SEQ ID NO: 7626; SEQ ID NO: 7627; SEQ ID NO: 7628; SEQ ID NO: 7629; SEQ ID NO: 7630; SEQ ID NO: 7631; SEQ ID NO: 7632; SEQ ID NO: 7633; SEQ ID NO: 7634; SEQ ID NO: 7635; SEQ ID NO: 7636; SEQ ID NO: 7637; SEQ ID NO: 7638; SEQ ID NO: 7639; SEQ ID NO: 9721 and SEQ ID NO: 9722.

[0146] In another embodiment, the H. pylori cytoplasmic polypeptide or a fragment thereof is an H. pylori polypeptide involved in protein folding and stabilization or a fragment thereof having an amino acid sequence selected from the group consisting of SEQ ID NO: 7640; SEQ ID NO: 7641; SEQ ID NO: 7642; SEQ ID NO: 7643; SEQ ID NO: 7644; SEQ ID NO: 7645; SEQ ID NO: 7646; SEQ ID NO: 7647; SEQ ID NO: 7648; SEQ ID NO: 7649; SEQ ID NO: 7650; SEQ ID NO: 7651; SEQ ID NO: 7652; SEQ ID NO: 7653; SEQ ID NO: 7654; SEQ ID NO: 7655; SEQ ID NO: 7656; SEQ ID NO: 7657; SEQ ID NO: 7658; SEQ ID NO: 7659; SEQ ID NO: 7660; SEQ ID NO: 7661; SEQ ID NO: 7662; SEQ ID NO: 7663; SEQ ID NO: 7664; SEQ ID NO: 7665; SEQ ID NO: 7666; SEQ ID NO: 7667; SEQ ID NO: 7668; SEQ ID NO: 7669; SEQ ID NO: 7670; SEQ ID NO: 7671; SEQ ID NO: 7672; SEQ ID NO: 7673; SEQ ID NO: 7674; SEQ ID NO: 7675; SEQ ID NO: 7676; SEQ ID NO: 7677; SEQ ID NO: 7678; SEQ ID NO: 7679; SEQ ID NO: 7680; SEQ ID NO: 9723 and SEQ ID NO: 9724.

[0147] Particularly preferred is an isolated H. pylori cytoplasmic polypeptide or a fragment thereof, wherein the polypeptide is encoded by a nucleic acid sequence selected from the group consisting of SEQ ID NO: 1576; SEQ ID NO: 1577; SEQ ID NO: 1578; SEQ ID NO: 1579; SEQ ID NO: 1580; SEQ ID NO: 1581; SEQ ID NO: 1582; SEQ ID NO: 1583; SEQ ID NO: 1584; SEQ ID NO: 1585; SEQ ID NO: 1586; SEQ ID NO: 1587; SEQ ID NO: 1588; SEQ ID NO: 1589; SEQ ID NO: 1590; SEQ ID NO: 1591; SEQ ID NO: 1592; SEQ ID NO: 1593; SEQ ID NO: 1594; SEQ ID NO: 1595; SEQ ID NO: 1596; SEQ ID NO: 1597; SEQ ID NO: 1598; SEQ ID NO: 1599; SEQ ID NO: 1600; SEQ ID NO: 1601; SEQ ID NO: 1602; SEQ ID NO: 1603; SEQ ID NO: 1604; SEQ ID NO: 1605; SEQ ID NO: 1606; SEQ ID NO: 1607; SEQ ID NO: 1608; SEQ ID NO: 1609; SEQ ID NO: 1610; SEQ ID NO: 1611; SEQ ID NO: 1612; SEQ ID NO: 1613; SEQ ID NO: 1614; SEQ ID NO: 1615; SEQ ID NO: 1616; SEQ ID NO: 1617; SEQ ID NO: 1618; SEQ ID NO: 1619; SEQ ID NO: 1620; SEQ ID NO: 1621; SEQ ID NO: 1622; SEQ ID NO: 1623; SEQ ID NO: 1624; SEQ ID NO: 1625; SEQ ID NO: 1626; SEQ ID NO: 1627; SEQ ID NO: 1628; SEQ ID NO: 1629; SEQ ID NO: 1630; SEQ ID NO: 1631; SEQ ID NO: 1632; SEQ ID NO: 1633; SEQ ID NO: 1634; SEQ ID NO: 1635; SEQ ID NO: 1636; SEQ ID NO: 1637; SEQ ID NO: 1638; SEQ ID NO: 1639; SEQ ID NO: 1640; SEQ ID NO: 1641; SEQ ID NO: 1642; SEQ ID NO: 1643; SEQ ID NO: 1644; SEQ ID NO: 1645; SEQ ID NO: 1646; SEQ ID NO: 1647; SEQ ID NO: 1648; SEQ ID NO: 1649; SEQ ID NO: 1650; SEQ ID NO: 1651; SEQ ID NO: 1652; SEQ ID NO: 1653; SEQ ID NO: 1654; SEQ ID NO: 1655; SEQ ID NO: 1656; SEQ ID NO: 1657; SEQ ID NO: 1658; SEQ ID NO: 1659; SEQ ID NO: 1660; SEQ ID NO: 1661; SEQ ID NO: 1662; SEQ ID NO: 1663; SEQ ID NO: 1664; SEQ ID NO: 1665; SEQ ID NO: 1666; SEQ ID NO: 1667; SEQ ID NO: 1668; SEQ ID NO: 1669; SEQ ID NO: 1670; SEQ ID NO: 1671; SEQ ID NO: 1672; SEQ ID NO: 1673; SEQ ID NO: 1674; SEQ ID NO: 1675; SEQ ID NO: 1676; SEQ ID NO: 1677; SEQ ID NO: 1678; SEQ ID NO: 1679; SEQ ID NO: 1680; SEQ ID NO: 1681; SEQ ID NO: 1682; SEQ ID NO: 1683; SEQ ID NO: 1684; SEQ ID NO: 1685; SEQ ID NO: 1686; SEQ ID NO: 1687; SEQ ID NO: 1688; SEQ ID NO: 1689; SEQ ID NO: 1690; SEQ ID NO: 1691; SEQ ID NO: 1692; SEQ ID NO: 1693; SEQ ID NO: 1694; SEQ ID NO: 1695; SEQ ID NO: 1696; SEQ ID NO: 1697; SEQ ID NO: 1698; SEQ ID NO: 1699; SEQ ID NO: 1700; SEQ ID NO: 1701; SEQ ID NO: 1702; SEQ ID NO: 1703; SEQ ID NO: 1704; SEQ ID NO: 1705; SEQ ID NO: 1706; SEQ ID NO: 1707; SEQ ID NO: 1708; SEQ ID NO: 1709; SEQ ID NO: 1710; SEQ ID NO: 1711; SEQ ID NO: 1712; SEQ ID NO: 1713; SEQ ID NO: 1714; SEQ ID NO: 1715; SEQ ID NO: 1716; SEQ ID NO: 1717; SEQ ID NO: 1718; SEQ ID NO: 1719; SEQ ID NO: 1720; SEQ ID NO: 1721; SEQ ID NO: 1722; SEQ ID NO: 1723; SEQ ID NO: 1724; SEQ ID NO: 1725; SEQ ID NO: 1726; SEQ ID NO: 1727; SEQ ID NO: 1728; SEQ ID NO: 1729; SEQ ID NO: 1730; SEQ ID NO: 1731; SEQ ID NO: 1732; SEQ ID NO: 1733; SEQ ID NO: 1734; SEQ ID NO: 1735; SEQ ID NO: 1736; SEQ ID NO: 1737; SEQ ID NO: 1738; SEQ ID NO: 1739; SEQ ID NO: 1740; SEQ ID NO: 1741; SEQ ID NO: 1742; SEQ ID NO: 1743; SEQ ID NO: 1744; SEQ ID NO: 1745; SEQ ID NO: 1746; SEQ ID NO: 1747; SEQ ID NO: 1748; SEQ ID NO: 1749; SEQ ID NO: 1750; SEQ ID NO: 1751; SEQ ID NO: 1752; SEQ ID NO: 1753; SEQ ID NO: 1754; SEQ ID NO: 1755; SEQ ID NO: 1756; SEQ ID NO: 1757; SEQ ID NO: 1758; SEQ ID NO: 1759; SEQ ID NO: 1760; SEQ ID NO: 1761; SEQ ID NO: 1762; SEQ ID NO: 1763; SEQ ID NO: 1764; SEQ ID NO: 1765; SEQ ID NO: 1766; SEQ ID NO: 1767; SEQ ID NO: 1768; SEQ ID NO: 1769; SEQ ID NO: 1770; SEQ ID NO: 1771; SEQ ID NO: 1772; SEQ ID NO: 1773; SEQ ID NO: 1774; SEQ ID NO: 1775; SEQ ID NO: 1776; SEQ ID NO: 1777; SEQ ID NO: 1778; SEQ ID NO: 1779; SEQ ID NO: 1780; SEQ ID NO: 1781; SEQ ID NO: 1782; SEQ ID NO: 1783; SEQ ID NO: 1784; SEQ ID NO: 1785; SEQ ID NO: 1786; SEQ ID NO: 1787; SEQ ID NO: 1788; SEQ ID NO: 1789; SEQ ID NO: 1790; SEQ ID NO: 1791; SEQ ID NO: 1792; SEQ ID NO: 1793; SEQ ID NO: 1794; SEQ ID NO: 1795; SEQ ID NO: 1796; SEQ ID NO: 1797; SEQ ID NO: 1798; SEQ ID NO: 1799; SEQ ID NO: 1800; SEQ ID NO: 1801; SEQ ID NO: 1802; SEQ ID NO: 1803; SEQ ID NO: 1804; SEQ ID NO: 1805; SEQ ID NO: 1806; SEQ ID NO: 1807; SEQ ID NO: 1808; SEQ ID NO: 1809; SEQ ID NO: 1810; SEQ ID NO: 1811; SEQ ID NO: 1812; SEQ ID NO: 1813; SEQ ID NO: 1814; SEQ ID NO: 1815; SEQ ID NO: 1816; SEQ ID NO: 1817; SEQ ID NO: 1818; SEQ ID NO: 1819; SEQ ID NO: 1820; SEQ ID NO: 1821; SEQ ID NO: 1822; SEQ ID NO: 1823; SEQ ID NO: 1824; SEQ ID NO: 1825; SEQ ID NO: 1826; SEQ ID NO: 1827; SEQ ID NO: 1828; SEQ ID NO: 1829; SEQ ID NO: 1830; SEQ ID NO: 1831; SEQ ID NO: 1832; SEQ ID NO: 1833; SEQ ID NO: 1834; SEQ ID NO: 1835; SEQ ID NO: 1836; SEQ ID NO: 1837; SEQ ID NO: 1838; SEQ ID NO: 1839; SEQ ID NO: 1840; SEQ ID NO: 1841; SEQ ID NO: 1842; SEQ ID NO: 1843; SEQ ID NO: 1844; SEQ ID NO: 1845; SEQ ID NO: 1846; SEQ ID NO: 1847; SEQ ID NO: 1848; SEQ ID NO: 1849; SEQ ID NO: 1850; SEQ ID NO: 1851; SEQ ID NO: 1852; SEQ ID NO: 1853; SEQ ID NO: 1854; SEQ ID NO: 1855; SEQ ID NO: 1856; SEQ ID NO: 1857; SEQ ID NO: 1858; SEQ ID NO: 1859; SEQ ID NO: 1860; SEQ ID NO: 1861; SEQ ID NO: 1862; SEQ ID NO: 1863; SEQ ID NO: 1864; SEQ ID NO: 1865; SEQ ID NO: 1866; SEQ ID NO: 1867; SEQ ID NO: 1868; SEQ ID NO: 1869; SEQ ID NO: 1870; SEQ ID NO: 1871; SEQ ID NO: 1872; SEQ ID NO: 1873; SEQ ID NO: 1874; SEQ ID NO: 1875; SEQ ID NO: 1876; SEQ ID NO: 1877; SEQ ID NO: 1878; SEQ ID NO: 1879; SEQ ID NO: 1880; SEQ ID NO: 1881; SEQ ID NO: 1882; SEQ ID NO: 1883; SEQ ID NO: 1884; SEQ ID NO: 1885; SEQ ID NO: 1886; SEQ ID NO: 1887; SEQ ID NO: 1888; SEQ ID NO: 1889; SEQ ID NO: 1890; SEQ ID NO: 1891; SEQ ID NO: 1892; SEQ ID NO: 1893; SEQ ID NO: 1894; SEQ ID NO: 1895; SEQ ID NO: 1896; SEQ ID NO: 1897; SEQ ID NO: 1898; SEQ ID NO: 1899; SEQ ID NO: 1900; SEQ ID NO: 1901; SEQ ID NO: 1902; SEQ ID NO: 1903; SEQ ID NO: 1904; SEQ ID NO: 1905; SEQ ID NO: 1906; SEQ ID NO: 1907; SEQ ID NO: 1908; SEQ ID NO: 1909; SEQ ID NO: 1910; SEQ ID NO: 1911; SEQ ID NO: 1912; SEQ ID NO: 1913; SEQ ID NO: 1914; SEQ ID NO: 1915; SEQ ID NO: 1916; SEQ ID NO: 1917; SEQ ID NO: 1918; SEQ ID NO: 1919; SEQ ID NO: 1920; SEQ ID NO: 1921; SEQ ID NO: 1922; SEQ ID NO: 1923; SEQ ID NO: 1924; SEQ ID NO: 1925; SEQ ID NO: 1926; SEQ ID NO: 1927; SEQ ID NO: 1928; SEQ ID NO: 1929; SEQ ID NO: 1930; SEQ ID NO: 1931; SEQ ID NO: 1932; SEQ ID NO: 1933; SEQ ID NO: 1934; SEQ ID NO: 1935; SEQ ID NO: 1936; SEQ ID NO: 1937; SEQ ID NO: 1938; SEQ ID NO: 1939; SEQ ID NO: 1940; SEQ ID NO: 1941; SEQ ID NO: 1942; SEQ ID NO: 1943; SEQ ID NO: 1944; SEQ ID NO: 1945; SEQ ID NO: 1946; SEQ ID NO: 1947; SEQ ID NO: 1948; SEQ ID NO: 1949; SEQ ID NO: 1950; SEQ ID NO: 1951; SEQ ID NO: 1952; SEQ ID NO: 1953; SEQ ID NO: 1954; SEQ ID NO: 1955; SEQ ID NO: 1956; SEQ ID NO: 1957; SEQ ID NO: 1958; SEQ ID NO: 1959; SEQ ID NO: 1960; SEQ ID NO: 1961; SEQ ID NO: 1962; SEQ ID NO: 1963; SEQ ID NO: 1964; SEQ ID NO: 1965; SEQ ID NO: 1966; SEQ ID NO: 1967; SEQ ID NO: 1968; SEQ ID NO: 1969; SEQ ID NO: 1970; SEQ ID NO: 1971; SEQ ID NO: 1972; SEQ ID NO: 1973; SEQ ID NO: 1974; SEQ ID NO: 1975; SEQ ID NO: 1976; SEQ ID NO: 1977; SEQ ID NO: 1978; SEQ ID NO: 1979; SEQ ID NO: 1980; SEQ ID NO: 1981; SEQ ID NO: 1982; SEQ ID NO: 1983; SEQ ID NO: 1984; SEQ ID NO: 1985; SEQ ID NO: 1986; SEQ ID NO: 1987; SEQ ID NO: 1988; SEQ ID NO: 1989; SEQ ID NO: 1990; SEQ ID NO: 1991; SEQ ID NO: 1992; SEQ ID NO: 1993; SEQ ID NO: 1994; SEQ ID NO: 1995; SEQ ID NO: 1996; SEQ ID NO: 1997; SEQ ID NO: 1998; SEQ ID NO: 1999; SEQ ID NO: 2000; SEQ ID NO: 2001; SEQ ID NO: 2002; SEQ ID NO: 2003; SEQ ID NO: 2004; SEQ ID NO: 2005; SEQ ID NO: 2006; SEQ ID NO: 2007; SEQ ID NO: 2008; SEQ ID NO: 2009; SEQ ID NO: 2010; SEQ ID NO: 2011; SEQ ID NO: 2012; SEQ ID NO: 2013; SEQ ID NO: 2014; SEQ ID NO: 2015; SEQ ID NO: 2016; SEQ ID NO: 2017; SEQ ID NO: 2018; SEQ ID NO: 2019; SEQ ID NO: 2020; SEQ ID NO: 2021; SEQ ID NO: 2022; SEQ ID NO: 2023; SEQ ID NO: 2024; SEQ ID NO: 2025; SEQ ID NO: 2026; SEQ ID NO: 2027; SEQ ID NO: 2028; SEQ ID NO: 2029; SEQ ID NO: 2030; SEQ ID NO: 2031; SEQ ID NO: 2032; SEQ ID NO: 2033; SEQ ID NO: 2034; SEQ ID NO: 2035; SEQ ID NO: 2036; SEQ ID NO: 2037; SEQ ID NO: 2038; SEQ ID NO: 2039; SEQ ID NO: 2040; SEQ ID NO: 2041; SEQ ID NO: 2042; SEQ ID NO: 2043; SEQ ID NO: 2044; SEQ ID NO: 2045; SEQ ID NO: 2046; SEQ ID NO: 2047; SEQ ID NO: 2048; SEQ ID NO: 2049; SEQ ID NO: 2050; SEQ ID NO: 2051; SEQ ID NO: 2052; SEQ ID NO: 2053; SEQ ID NO: 2054; SEQ ID NO: 2055; SEQ ID NO: 2056; SEQ ID NO: 2057; SEQ ID NO: 2058; SEQ ID NO: 2059; SEQ ID NO: 2060; SEQ ID NO: 2061; SEQ ID NO: 2062; SEQ ID NO: 2063; SEQ ID NO: 2064; SEQ ID NO: 2065; SEQ ID NO: 2066; SEQ ID NO: 2067; SEQ ID NO: 2068; SEQ ID NO: 2069; SEQ ID NO: 2070; SEQ ID NO: 2071; SEQ ID NO: 2072; SEQ ID NO: 2073; SEQ ID NO: 2074; SEQ ID NO: 2075; SEQ ID NO: 2076; SEQ ID NO: 2077; SEQ ID NO: 2078; SEQ ID NO: 2079; SEQ ID NO: 2080; SEQ ID NO: 2081; SEQ ID NO: 2082; SEQ ID NO: 2083; SEQ ID NO: 2084; SEQ ID NO: 2085; SEQ ID NO: 2086; SEQ ID NO: 2087; SEQ ID NO: 2088; SEQ ID NO: 2089; SEQ ID NO: 2090; SEQ ID NO: 2091; SEQ ID NO: 2092; SEQ ID NO: 2093; SEQ ID NO: 2094; SEQ ID NO: 2095; SEQ ID NO: 2096; SEQ ID NO: 2097; SEQ ID NO: 2098; SEQ ID NO: 2099; SEQ ID NO: 2100; SEQ ID NO: 2101; SEQ ID NO: 2102; SEQ ID NO: 2103; SEQ ID NO: 2104; SEQ ID NO: 2105; SEQ ID NO: 2106; SEQ ID NO: 2107; SEQ ID NO: 2108; SEQ ID NO: 2109; SEQ ID NO: 2110; SEQ ID NO: 2111; SEQ ID NO: 2112; SEQ ID NO: 2113; SEQ ID NO: 2114; SEQ ID NO: 2115; SEQ ID NO: 2116; SEQ ID NO: 2117; SEQ ID NO: 2118; SEQ ID NO: 2119; SEQ ID NO: 2120; SEQ ID NO: 2121; SEQ ID NO: 2122; SEQ ID NO: 2123; SEQ ID NO: 2124; SEQ ID NO: 2125; SEQ ID NO: 2126; SEQ ID NO: 2127; SEQ ID NO: 2128; SEQ ID NO: 2129; SEQ ID NO: 2130; SEQ ID NO: 2131; SEQ ID NO: 2132; SEQ ID NO: 2133; SEQ ID NO: 2134; SEQ ID NO: 2135; SEQ ID NO: 2136; SEQ ID NO: 2137; SEQ ID NO: 2138; SEQ ID NO: 2139; SEQ ID NO: 2140; SEQ ID NO: 2141; SEQ ID NO: 2142; SEQ ID NO: 2143; SEQ ID NO: 2144; SEQ ID NO: 2145; SEQ ID NO: 2146; SEQ ID NO: 2147; SEQ ID NO: 2148; SEQ ID NO: 2149; SEQ ID NO: 2150; SEQ ID NO: 2151; SEQ ID NO: 2152; SEQ ID NO: 2153; SEQ ID NO: 2154; SEQ ID NO: 2155; SEQ ID NO: 2156; SEQ ID NO: 2157; SEQ ID NO: 2158; SEQ ID NO: 2159; SEQ ID NO: 2160; SEQ ID NO: 2161; SEQ ID NO: 2162; SEQ ID NO: 2163; SEQ ID NO: 2164; SEQ ID NO: 2165; SEQ ID NO: 2166; SEQ ID NO: 2167; SEQ ID NO: 2168; SEQ ID NO: 2169; SEQ ID NO: 2170; SEQ ID NO: 2171; SEQ ID NO: 2172; SEQ ID NO: 2173; SEQ ID NO: 2174; SEQ ID NO: 2175; SEQ ID NO: 2176; SEQ ID NO: 2177; SEQ ID NO: 2178; SEQ ID NO: 2179; SEQ ID NO: 2180; SEQ ID NO: 2181; SEQ ID NO: 2182; SEQ ID NO: 2183; SEQ ID NO: 2184; SEQ ID NO: 2185; SEQ ID NO: 2186; SEQ ID NO: 2187; SEQ ID NO: 2188; SEQ ID NO: 2189; SEQ ID NO: 2190; SEQ ID NO: 2191; SEQ ID NO: 2192; SEQ ID NO: 2193; SEQ ID NO: 2194; SEQ ID NO: 2195; SEQ ID NO: 2196; SEQ ID NO: 2197; SEQ ID NO: 2198; SEQ ID NO: 2199; SEQ ID NO: 2200; SEQ ID NO: 2201; SEQ ID NO: 2202; SEQ ID NO: 2203; SEQ ID NO: 2204; SEQ ID NO: 2205; SEQ ID NO: 2206; SEQ ID NO: 2207; SEQ ID NO: 2208; SEQ ID NO: 2209; SEQ ID NO: 2210; SEQ ID NO: 2211; SEQ ID NO: 2212; SEQ ID NO: 2213; SEQ ID NO: 2214; SEQ ID NO: 2215; SEQ ID NO: 2216; SEQ ID NO: 2217; SEQ ID NO: 2218; SEQ ID NO: 2219; SEQ ID NO: 2220; SEQ ID NO: 2221; SEQ ID NO: 2222; SEQ ID NO: 2223; SEQ ID NO: 2224; SEQ ID NO: 2225; SEQ ID NO: 2226; SEQ ID NO: 2227; SEQ ID NO: 2228; SEQ ID NO: 2229; SEQ ID NO: 2230; SEQ ID NO: 2231; SEQ ID NO: 2232; SEQ ID NO: 2233; SEQ ID NO: 2234; SEQ ID NO: 2235; SEQ ID NO: 2236; SEQ ID NO: 2237; SEQ ID NO: 2238; SEQ ID NO: 2239; SEQ ID NO: 2240; SEQ ID NO: 2241; SEQ ID NO: 2242; SEQ ID NO: 2243; SEQ ID NO: 2244; SEQ ID NO: 2245; SEQ ID NO: 2246; SEQ ID NO: 2247; SEQ ID NO: 2248; SEQ ID NO: 2249; SEQ ID NO: 2250; SEQ ID NO: 2251; SEQ ID NO: 2252; SEQ ID NO: 2253; SEQ ID NO: 2254; SEQ ID NO: 2255; SEQ ID NO: 2256; SEQ ID NO: 2257; SEQ ID NO: 2258; SEQ ID NO: 2259; SEQ ID NO: 2260; SEQ ID NO: 2261; SEQ ID NO: 2262; SEQ ID NO: 2263; SEQ ID NO: 2264; SEQ ID NO: 2265; SEQ ID NO: 2266; SEQ ID NO: 2267; SEQ ID NO: 2268; SEQ ID NO: 2269; SEQ ID NO: 2270; SEQ ID NO: 2271; SEQ ID NO: 2272; SEQ ID NO: 2273; SEQ ID NO: 2274; SEQ ID NO: 2275; SEQ ID NO: 2276; SEQ ID NO: 2277; SEQ ID NO: 2278; SEQ ID NO: 2279; SEQ ID NO: 2280; SEQ ID NO: 2281; SEQ ID NO: 2282; SEQ ID NO: 2283; SEQ ID NO: 2284; SEQ ID NO: 2285; SEQ ID NO: 2286; SEQ ID NO: 2287; SEQ ID NO: 2288; SEQ ID NO: 2289; SEQ ID NO: 2290; SEQ ID NO: 2291; SEQ ID NO: 2292; SEQ ID NO: 2293; SEQ ID NO: 2294; SEQ ID NO: 2295; SEQ ID NO: 2296; SEQ ID NO: 2297; SEQ ID NO: 2298; SEQ ID NO: 2299; SEQ ID NO: 2300; SEQ ID NO: 2301; SEQ ID NO: 2302; SEQ ID NO: 2303; SEQ ID NO: 2304; SEQ ID NO: 2305; SEQ ID NO: 2306; SEQ ID NO: 2307; SEQ ID NO: 2308; SEQ ID NO: 2309; SEQ ID NO: 2310; SEQ ID NO: 2311; SEQ ID NO: 2312; SEQ ID NO: 2313; SEQ ID NO: 2314; SEQ ID NO: 2315; SEQ ID NO: 2316; SEQ ID NO: 2317; SEQ ID NO: 2318; SEQ ID NO: 2319; SEQ ID NO: 2320; SEQ ID NO: 2321; SEQ ID NO: 2322; SEQ ID NO: 2323; SEQ ID NO: 2324; SEQ ID NO: 2325; SEQ ID NO: 2326; SEQ ID NO:2327; SEQ ID NO: 2328; SEQ ID NO: 2329; SEQ ID NO: 2330; SEQ ID NO: 2331; SEQ ID NO: 2332; SEQ ID NO: 2333; SEQ ID NO: 2334; SEQ ID NO: 2335; SEQ ID NO: 2336; SEQ ID NO: 2337; SEQ ID NO: 2338; SEQ ID NO: 2339; SEQ ID NO: 2340; SEQ ID NO: 2341; SEQ ID NO: 2342; SEQ ID NO: 2343; SEQ ID NO: 2344; SEQ ID NO: 2345; SEQ ID NO: 2346; SEQ ID NO: 2347; SEQ ID NO: 2348; SEQ ID NO: 2349; SEQ ID NO: 2350; SEQ ID NO: 2351; SEQ ID NO: 2352; SEQ ID NO: 2353; SEQ ID NO: 2354; SEQ ID NO: 2355; SEQ ID NO: 2356; SEQ ID NO: 2357; SEQ ID NO: 2358; SEQ ID NO: 2359; SEQ ID NO: 2360; SEQ ID NO: 2361; SEQ ID NO: 2362; SEQ ID NO: 2363; SEQ ID NO: 2364; SEQ ID NO: 2365; SEQ ID NO: 2366; SEQ ID NO: 2367; SEQ ID NO: 2368; SEQ ID NO: 2369; SEQ ID NO: 2370; SEQ ID NO: 2371; SEQ ID NO: 2372; SEQ ID NO: 2373; SEQ ID NO: 2374; SEQ ID NO: 2375; SEQ ID NO: 2376; SEQ ID NO: 2377; SEQ ID NO: 2378; SEQ ID NO: 2379; SEQ ID NO: 2380; SEQ ID NO: 2381; SEQ ID NO: 2382; SEQ ID NO: 2383; SEQ ID NO: 2384; SEQ ID NO: 2385; SEQ ID NO: 2386; SEQ ID NO: 2387; SEQ ID NO: 2388; SEQ ID NO: 2389; SEQ ID NO: 2390; SEQ ID NO: 2391; SEQ ID NO: 2392; SEQ ID NO: 2393; SEQ ID NO: 2394; SEQ ID NO: 2395; SEQ ID NO: 2396; SEQ ID NO: 2397; SEQ ID NO: 2398; SEQ ID NO: 2399; SEQ ID NO: 2400; SEQ ID NO: 2401; SEQ ID NO: 2402; SEQ ID NO: 2403; SEQ ID NO: 2404; SEQ ID NO: 2405; SEQ ID NO: 2406; SEQ ID NO: 2407; SEQ ID NO: 2408; SEQ ID NO: 2409; SEQ ID NO:2410; SEQ ID NO:2411; SEQ ID NO:2412; SEQ ID NO:2413; SEQ ID NO: 2414; SEQ ID NO: 2415; SEQ ID NO: 2416; SEQ ID NO: 2417; SEQ ID NO: 2418; SEQ ID NO: 2419; SEQ ID NO: 2420; SEQ ID NO: 2421; SEQ ID NO: 2422; SEQ ID NO: 2423; SEQ ID NO: 2424; SEQ ID NO: 2425; SEQ ID NO: 2426; SEQ ID NO: 2427; SEQ ID NO: 2428; SEQ ID NO: 2429; SEQ ID NO: 2430; SEQ ID NO: 2431; SEQ ID NO: 2432; SEQ ID NO: 2433; SEQ ID NO: 2434; SEQ ID NO: 2435; SEQ ID NO: 2436; SEQ ID NO: 2437; SEQ ID NO: 2438; SEQ ID NO: 2439; SEQ ID NO: 2440; SEQ ID NO: 2441; SEQ ID NO: 2442; SEQ ID NO: 2443; SEQ ID NO: 2444; SEQ ID NO: 2445; SEQ ID NO: 2446; SEQ ID NO: 2447; SEQ ID NO: 2448; SEQ ID NO: 2449; SEQ ID NO: 2450; SEQ ID NO: 2451; SEQ ID NO: 2452; SEQ ID NO: 2453; SEQ ID NO: 2454; SEQ ID NO: 2455; SEQ ID NO: 2456; SEQ ID NO: 2457; SEQ ID NO: 2458; SEQ ID NO: 2459; SEQ ID NO: 2460; SEQ ID NO: 2461; SEQ ID NO: 2462; SEQ ID NO: 2463; SEQ ID NO: 2464; SEQ ID NO: 2465; SEQ ID NO: 2466; SEQ ID NO: 2467; SEQ ID NO: 2468; SEQ ID NO: 2469; SEQ ID NO: 2470; SEQ ID NO: 2471; SEQ ID NO: 2472; SEQ ID NO: 2473; SEQ ID NO: 2474; SEQ ID NO: 2475; SEQ ID NO: 2476; SEQ ID NO: 2477; SEQ ID NO: 2478; SEQ ID NO: 2479; SEQ ID NO: 2480; SEQ ID NO: 2481; SEQ ID NO: 2482; SEQ ID NO: 2483; SEQ ID NO: 2484; SEQ ID NO: 2485; SEQ ID NO: 2486; SEQ ID NO: 2487; SEQ ID NO: 2488; SEQ ID NO: 2489; SEQ ID NO: 2490; SEQ ID NO: 2491; SEQ ID NO: 2492; SEQ ID NO: 2493; SEQ ID NO: 2494; SEQ ID NO: 2495; SEQ ID NO: 2496; SEQ ID NO: 2497; SEQ ID NO: 2498; SEQ ID NO: 2499; SEQ ID NO: 2500; SEQ ID NO: 2501; SEQ ID NO: 2502; SEQ ID NO: 2503; SEQ ID NO: 2504; SEQ ID NO: 2505; SEQ ID NO: 2506; SEQ ID NO: 2507; SEQ ID NO: 2508; SEQ ID NO: 2509; SEQ ID NO: 2510; SEQ ID NO: 2511; SEQ ID NO: 2512; SEQ ID NO: 2513; SEQ ID NO: 2514; SEQ ID NO: 2515; SEQ ID NO: 2516; SEQ ID NO: 2517; SEQ ID NO: 2518; SEQ ID NO: 2519; SEQ ID NO: 2520; SEQ ID NO: 2521; SEQ ID NO: 2522; SEQ ID NO: 2523; SEQ ID NO: 2524; SEQ ID NO: 2525; SEQ ID NO: 2526; SEQ ID NO: 2527; SEQ ID NO: 2528; SEQ ID NO: 2529; SEQ ID NO: 2530; SEQ ID NO: 2531; SEQ ID NO: 2532; SEQ ID NO: 2533; SEQ ID NO: 2534; SEQ ID NO: 2535; SEQ ID NO: 2536; SEQ ID NO: 2537; SEQ ID NO: 2538; SEQ ID NO: 2539; SEQ ID NO: 2540; SEQ ID NO: 2541; SEQ ID NO: 2542; SEQ ID NO: 2543; SEQ ID NO: 2544; SEQ ID NO: 2545; SEQ ID NO: 2546; SEQ ID NO: 2547; SEQ ID NO: 2548; SEQ ID NO: 2549; SEQ ID NO: 2550; SEQ ID NO: 2551; SEQ ID NO: 2552; SEQ ID NO: 2553; SEQ ID NO: 2554; SEQ ID NO: 2555; SEQ ID NO: 2556; SEQ ID NO: 2557; SEQ ID NO: 2558; SEQ ID NO: 2559; SEQ ID NO: 2560; SEQ ID NO: 2561; SEQ ID NO: 2562; SEQ ID NO: 2563; SEQ ID NO: 2564; SEQ ID NO: 2565; SEQ ID NO: 2566; SEQ ID NO: 2567; SEQ ID NO: 2568; SEQ ID NO: 2569; SEQ ID NO: 2570; SEQ ID NO: 2571; SEQ ID NO: 2572; SEQ ID NO: 2573; SEQ ID NO: 2574; SEQ ID NO: 2575; SEQ ID NO: 2576; SEQ ID NO: 2577; SEQ ID NO: 2578; SEQ ID NO: 2579; SEQ ID NO: 2580; SEQ ID NO: 2581; SEQ ID NO: 2582; SEQ ID NO: 2583; SEQ ID NO: 2584; SEQ ID NO: 2585; SEQ ID NO: 2586; SEQ ID NO: 2587; SEQ ID NO: 2588; SEQ ID NO: 2589; SEQ ID NO: 2590; SEQ ID NO: 2591; SEQ ID NO: 2592; SEQ ID NO: 2593; SEQ ID NO: 2594; SEQ ID NO: 2595; SEQ ID NO: 2596; SEQ ID NO: 2597; SEQ ID NO: 2598; SEQ ID NO: 2599; SEQ ID NO: 2600; SEQ ID NO: 2601; SEQ ID NO: 2602; SEQ ID NO: 2603; SEQ ID NO: 2604; SEQ ID NO: 2605; SEQ ID NO: 2606; SEQ ID NO: 2607; SEQ ID NO: 2608; SEQ ID NO: 2609; SEQ ID NO: 2610; SEQ ID NO: 2611; SEQ ID NO: 2612; SEQ ID NO: 2613; SEQ ID NO: 2614; SEQ ID NO: 2615; SEQ ID NO: 2616; SEQ ID NO: 2617; SEQ ID NO: 2618; SEQ ID NO: 2619; SEQ ID NO: 2620; SEQ ID NO: 2621; SEQ ID NO: 2622; SEQ ID NO: 2623; SEQ ID NO: 2624; SEQ ID NO: 2625; SEQ ID NO: 2626; SEQ ID NO: 2627; SEQ ID NO: 2628; SEQ ID NO: 2629; SEQ ID NO: 2630; SEQ ID NO: 2631; SEQ ID NO: 2632; SEQ ID NO: 2633; SEQ ID NO: 2634; SEQ ID NO: 2635; SEQ ID NO: 2636; SEQ ID NO: 2637; SEQ ID NO: 2638; SEQ ID NO: 2639; SEQ ID NO: 2640; SEQ ID NO: 2641; SEQ ID NO: 2642; SEQ ID NO: 2643; SEQ ID NO: 2644; SEQ ID NO: 2645; SEQ ID NO: 2646; SEQ ID NO: 2647; SEQ ID NO: 2648; SEQ ID NO: 2649; SEQ ID NO: 2650; SEQ ID NO: 2651; SEQ ID NO: 2652; SEQ ID NO: 2653; SEQ ID NO: 2654; SEQ ID NO: 2655; SEQ ID NO: 2656; SEQ ID NO: 2657; SEQ ID NO: 2658; SEQ ID NO: 2659; SEQ ID NO: 2660; SEQ ID NO: 2661; SEQ ID NO: 2662; SEQ ID NO: 2663; SEQ ID NO: 2664; SEQ ID NO: 2665; SEQ ID NO: 2666; SEQ ID NO: 2667; SEQ ID NO: 2668; SEQ ID NO: 2669; SEQ ID NO: 2670; SEQ ID NO: 2671; SEQ ID NO: 2672; SEQ ID NO: 2673; SEQ ID NO: 2674; SEQ ID NO: 2675; SEQ ID NO: 2676; SEQ ID NO: 2677; SEQ ID NO: 2678; SEQ ID NO: 2679; SEQ ID NO: 2680; SEQ ID NO: 2681; SEQ ID NO: 2682; SEQ ID NO: 2683; SEQ ID NO: 2684; SEQ ID NO: 2685; SEQ ID NO: 2686; SEQ ID NO: 2687; SEQ ID NO: 2688; SEQ ID NO: 2689; SEQ ID NO: 2690; SEQ ID NO: 2691; SEQ ID NO: 2692; SEQ ID NO: 2693; SEQ ID NO: 2694; SEQ ID NO: 2695; SEQ ID NO: 2696; SEQ ID NO: 2697; SEQ ID NO: 2698; SEQ ID NO: 2699; SEQ ID NO: 2700; SEQ ID NO: 2701; SEQ ID NO: 2702; SEQ ID NO: 2703; SEQ ID NO: 2704; SEQ ID NO: 2705; SEQ ID NO: 2706; SEQ ID NO: 2707; SEQ ID NO: 2708; SEQ ID NO: 2709; SEQ ID NO: 2710; SEQ ID NO: 2711; SEQ ID NO: 2712; SEQ ID NO: 2713; SEQ ID NO: 2714; SEQ ID NO: 2715; SEQ ID NO: 2716; SEQ ID NO: 2717; SEQ ID NO: 2718; SEQ ID NO: 2719; SEQ ID NO: 2720; SEQ ID NO: 2721; SEQ ID NO: 2722; SEQ ID NO: 2723; SEQ ID NO: 2724; SEQ ID NO: 2725; SEQ ID NO: 2726; SEQ ID NO: 2727; SEQ ID NO: 2728; SEQ ID NO: 2729; SEQ ID NO: 2730; SEQ ID NO: 2731; SEQ ID NO: 2732; SEQ ID NO: 2733; SEQ ID NO: 2734; SEQ ID NO: 2735; SEQ ID NO: 2736; SEQ ID NO: 2737; SEQ ID NO: 2738; SEQ ID NO: 2739; SEQ ID NO: 2740; SEQ ID NO: 2741; SEQ ID NO: 2742; SEQ ID NO: 2743; SEQ ID NO: 2744; SEQ ID NO: 2745; SEQ ID NO: 2746; SEQ ID NO: 2747; SEQ ID NO: 2748; SEQ ID NO: 2749; SEQ ID NO: 2750; SEQ ID NO: 2751; SEQ ID NO: 2752; SEQ ID NO: 2753; SEQ ID NO: 2754; SEQ ID NO: 2755; SEQ ID NO: 2756; SEQ ID NO: 2757; SEQ ID NO: 2758; SEQ ID NO: 2759; SEQ ID NO: 2760; SEQ ID NO: 2761; SEQ ID NO: 2762; SEQ ID NO: 2763; SEQ ID NO: 2764; SEQ ID NO: 2765; SEQ ID NO: 2766; SEQ ID NO: 2767; SEQ ID NO: 2768; SEQ ID NO: 2769; SEQ ID NO: 2770; SEQ ID NO: 2771; SEQ ID NO: 2772; SEQ ID NO: 2773; SEQ ID NO: 2774; SEQ ID NO: 2775; SEQ ID NO: 2776; SEQ ID NO: 2777; SEQ ID NO: 2778; SEQ ID NO: 2779; SEQ ID NO: 2780; SEQ ID NO: 2781; SEQ ID NO: 2782; SEQ ID NO: 2783; SEQ ID NO: 2784; SEQ ID NO: 2785; SEQ ID NO: 2786; SEQ ID NO: 2787; SEQ ID NO: 2788; SEQ ID NO: 2789; SEQ ID NO: 2790; SEQ ID NO: 2791; SEQ ID NO: 2792; SEQ ID NO: 2793; SEQ ID NO: 2794; SEQ ID NO: 2795; SEQ ID NO: 2796; SEQ ID NO: 2797; SEQ ID NO: 2798; SEQ ID NO: 2799; SEQ ID NO: 2800; SEQ ID NO: 2801; SEQ ID NO: 2802; SEQ ID NO: 2803; SEQ ID NO: 2804; SEQ ID NO: 2805; SEQ ID NO: 2806; SEQ ID NO: 2807; SEQ ID NO: 2808; SEQ ID NO: 2809; SEQ ID NO: 2810; SEQ ID NO: 2811; SEQ ID NO: 2812; SEQ ID NO: 2813; SEQ ID NO: 2814; SEQ ID NO: 2815; SEQ ID NO: 2816; SEQ ID NO: 2817; SEQ ID NO: 2818; SEQ ID NO: 2819; SEQ ID NO: 2820; SEQ ID NO: 2821; SEQ ID NO: 2822; SEQ ID NO: 2823; SEQ ID NO: 2824; SEQ ID NO: 2825; SEQ ID NO: 2826; SEQ ID NO: 2827; SEQ ID NO: 2828; SEQ ID NO: 2829; SEQ ID NO: 2830; SEQ ID NO: 2831; SEQ ID NO: 2832; SEQ ID NO: 2833; SEQ ID NO: 2834; SEQ ID NO: 2835; SEQ ID NO: 2836; SEQ ID NO: 2837; SEQ ID NO: 2838; SEQ ID NO: 2839; SEQ ID NO: 2840; SEQ ID NO: 2841; SEQ ID NO: 2842; SEQ ID NO: 2843; SEQ ID NO: 2844; SEQ ID NO: 2845; SEQ ID NO: 2846; SEQ ID NO: 2847; SEQ ID NO: 2848; SEQ ID NO: 2849; SEQ ID NO: 2850; SEQ ID NO: 2851; SEQ ID NO: 2852; SEQ ID NO: 2853; SEQ ID NO: 2854; SEQ ID NO: 2855; SEQ ID NO: 2856; SEQ ID NO: 2857; SEQ ID NO: 2858; SEQ ID NO: 2859; SEQ ID NO: 2860; SEQ ID NO: 2861; SEQ ID NO: 2862; SEQ ID NO: 2863; SEQ ID NO: 2864; SEQ ID NO: 2865; SEQ ID NO: 2866; SEQ ID NO: 2867; SEQ ID NO: 2868; SEQ ID NO: 2869; SEQ ID NO: 2870; SEQ ID NO: 2871; SEQ ID NO: 2872; SEQ ID NO: 2873; SEQ ID NO: 2874; SEQ ID NO: 2875; SEQ ID NO: 2876; SEQ ID NO: 2877; SEQ ID NO: 2878; SEQ ID NO: 2879; SEQ ID NO: 2880; SEQ ID NO: 2881; SEQ ID NO: 2882; SEQ ID NO: 2883; SEQ ID NO: 2884; SEQ ID NO: 2885; SEQ ID NO: 2886; SEQ ID NO: 2887; SEQ ID NO: 2888; SEQ ID NO: 2889; SEQ ID NO: 2890; SEQ ID NO: 2891; SEQ ID NO: 2892; SEQ ID NO: 2893; SEQ ID NO: 2894; SEQ ID NO: 2895; SEQ ID NO: 2896; SEQ ID NO: 2897; SEQ ID NO: 2898; SEQ ID NO: 2899; SEQ ID NO: 2900; SEQ ID NO: 2901; SEQ ID NO: 2902; SEQ ID NO: 2903; SEQ ID NO: 2904; SEQ ID NO: 2905; SEQ ID NO: 2906; SEQ ID NO: 2907; SEQ ID NO: 2908; SEQ ID NO: 2909; SEQ ID NO: 2910; SEQ ID NO: 2911; SEQ ID NO: 2912; SEQ ID NO: 2913; SEQ ID NO: 2914; SEQ ID NO: 2915; SEQ ID NO: 2916; SEQ ID NO: 2917; SEQ ID NO: 2918; SEQ ID NO: 2919; SEQ ID NO: 2920; SEQ ID NO: 2921; SEQ ID NO: 2922; SEQ ID NO: 2923; SEQ ID NO: 2924; SEQ ID NO: 2925; SEQ ID NO: 2926; SEQ ID NO: 2927; SEQ ID NO: 2928; SEQ ID NO: 2929; SEQ ID NO: 2930; SEQ ID NO: 2931; SEQ ID NO: 2932; SEQ ID NO: 2933; SEQ ID NO: 2934; SEQ ID NO: 2935; SEQ ID NO: 2936; SEQ ID NO: 2937; SEQ ID NO: 2938; SEQ ID NO: 2939; SEQ ID NO: 2940; SEQ ID NO: 2941; SEQ ID NO: 2942; SEQ ID NO: 2943; SEQ ID NO: 2944; SEQ ID NO: 2945; SEQ ID NO: 2946; SEQ ID NO: 2947; SEQ ID NO: 2948; SEQ ID NO: 2949; SEQ ID NO: 2950; SEQ ID NO: 2951; SEQ ID NO: 2952; SEQ ID NO: 2953; SEQ ID NO: 2954; SEQ ID NO: 2955; SEQ ID NO: 2956; SEQ ID NO: 2957; SEQ ID NO: 2958; SEQ ID NO: 2959; SEQ ID NO: 2960; SEQ ID NO: 2961; SEQ ID NO: 2962; SEQ ID NO: 2963; SEQ ID NO: 2964; SEQ ID NO: 2965; SEQ ID NO: 2966; SEQ ID NO: 2967; SEQ ID NO: 2968; SEQ ID NO: 2969; SEQ ID NO: 2970; SEQ ID NO: 2971; SEQ ID NO: 2972; SEQ ID NO: 2973; SEQ ID NO: 2974; SEQ ID NO: 2975; SEQ ID NO: 2976; SEQ ID NO: 2977; SEQ ID NO: 2978; SEQ ID NO: 2979; SEQ ID NO: 2980; SEQ ID NO: 2981; SEQ ID NO: 2982; SEQ ID NO: 2983; SEQ ID NO: 2984; SEQ ID NO: 2985; SEQ ID NO: 2986; SEQ ID NO: 2987; SEQ ID NO: 2988; SEQ ID NO: 2989; SEQ ID NO: 2990; SEQ ID NO: 2991; SEQ ID NO: 2992; SEQ ID NO: 2993; SEQ ID NO: 2994; SEQ ID NO: 2995; SEQ ID NO: 2996; SEQ ID NO: 2997; SEQ ID NO: 2998; SEQ ID NO: 2999; SEQ ID NO: 3000; SEQ ID NO: 3001; SEQ ID NO: 3002; SEQ ID NO: 3003; SEQ ID NO: 3004; SEQ ID NO: 3005; SEQ ID NO: 3006; SEQ ID NO: 3007; SEQ ID NO: 3008; SEQ ID NO: 3009; SEQ ID NO: 3010; SEQ ID NO: 3011; SEQ ID NO: 3012; SEQ ID NO: 3013; SEQ ID NO: 3014; SEQ ID NO: 3015; SEQ ID NO: 3016; SEQ ID NO: 3017; SEQ ID NO: 3018; SEQ ID NO: 3019; SEQ ID NO: 3020; SEQ ID NO: 3021; SEQ ID NO: 3022; SEQ ID NO: 3023; SEQ ID NO: 3024; SEQ ID NO: 3025; SEQ ID NO: 3026; SEQ ID NO: 3027; SEQ ID NO: 3028; SEQ ID NO: 3029; SEQ ID NO: 3030; SEQ ID NO: 3031; SEQ ID NO: 3032; SEQ ID NO: 3033; SEQ ID NO: 3034; SEQ ID NO: 3035; SEQ ID NO: 3036; SEQ ID NO: 3037; SEQ ID NO: 3038; SEQ ID NO: 3039; SEQ ID NO: 3040; SEQ ID NO: 3041; SEQ ID NO: 3042; SEQ ID NO: 3043; SEQ ID NO: 3044; SEQ ID NO: 3045; SEQ ID NO: 3046; SEQ ID NO: 3047; SEQ ID NO: 3048; SEQ ID NO: 3049; SEQ ID NO: 3050; SEQ ID NO: 3051; SEQ ID NO: 3052; SEQ ID NO: 3053; SEQ ID NO: 3054; SEQ ID NO: 3055; SEQ ID NO: 3056; SEQ ID NO: 3057; SEQ ID NO: 3058; SEQ ID NO: 3059; SEQ ID NO: 3060; SEQ ID NO: 3061; SEQ ID NO: 3062; SEQ ID NO: 3063; SEQ ID NO: 3064; SEQ ID NO: 3065; SEQ ID NO: 3066; SEQ ID NO: 3067; SEQ ID NO: 3068; SEQ ID NO: 3069; SEQ ID NO: 3070; SEQ ID NO: 3071; SEQ ID NO: 3072; SEQ ID NO: 3073; SEQ ID NO: 3074; SEQ ID NO: 3075; SEQ ID NO: 3076; SEQ ID NO: 3077; SEQ ID NO: 3078; SEQ ID NO: 3079; SEQ ID NO: 3080; SEQ ID NO: 3081; SEQ ID NO: 3082; SEQ ID NO: 3083; SEQ ID NO: 3084; SEQ ID NO: 3085; SEQ ID NO: 3086; SEQ ID NO: 3087; SEQ ID NO: 3088; SEQ ID NO: 3089; SEQ ID NO: 3090; SEQ ID NO: 3091; SEQ ID NO: 3092; SEQ ID NO: 3093; SEQ ID NO: 3094; SEQ ID NO: 3095; SEQ ID NO: 3096; SEQ ID NO: 3097; SEQ ID NO: 3098; SEQ ID NO: 3099; SEQ ID NO: 3100; SEQ ID NO: 3101; SEQ ID NO: 3102; SEQ ID NO: 3103; SEQ ID NO: 3104; SEQ ID NO: 3105; SEQ ID NO: 3106; SEQ ID NO: 3107; SEQ ID NO: 3108; SEQ ID NO: 3109; SEQ ID NO: 3110; SEQ ID NO: 3111; SEQ ID NO: 3112; SEQ ID NO: 3113; SEQ ID NO: 3114; SEQ ID NO: 3115; SEQ ID NO: 3116; SEQ ID NO: 3117; SEQ ID NO: 3118; SEQ ID NO: 3119; SEQ ID NO: 3120; SEQ ID NO: 3121; SEQ ID NO: 3122; SEQ ID NO: 3123; SEQ ID NO: 3124; SEQ ID NO: 3125; SEQ ID NO: 3126; SEQ ID NO: 3127; SEQ ID NO: 3128; SEQ ID NO: 3129; SEQ ID NO: 3130; SEQ ID NO: 3131; SEQ ID NO: 3132; SEQ ID NO: 3133; SEQ ID NO: 3134; SEQ ID NO: 3135; SEQ ID NO: 3136; SEQ ID NO: 3137; SEQ ID NO: 3138; SEQ ID NO: 3139; SEQ ID NO: 3140; SEQ ID NO: 3141; SEQ ID NO: 3142; SEQ ID NO: 3143; SEQ ID NO: 3144; SEQ ID NO: 3145; SEQ ID NO: 3146; SEQ ID NO: 3147; SEQ ID NO: 3148; SEQ ID NO: 3149; SEQ ID NO: 3150; SEQ ID NO: 3151; SEQ ID NO: 3152; SEQ ID NO: 3153; SEQ ID NO: 3154; SEQ ID NO: 3155; SEQ ID NO: 3156; SEQ ID NO: 3157; SEQ ID NO: 3158; SEQ ID NO: 3159; SEQ ID NO: 3160; SEQ ID NO: 3161; SEQ ID NO: 3162; SEQ ID NO: 3163; SEQ ID NO: 3164; SEQ ID NO: 3165; SEQ ID NO: 3166; SEQ ID NO: 3167; SEQ ID NO: 3168; SEQ ID NO: 3169; SEQ ID NO: 3170; SEQ ID NO: 3171; SEQ ID NO: 3172; SEQ ID NO: 3173; SEQ ID NO: 3174; SEQ ID NO: 3175; SEQ ID NO: 3176; SEQ ID NO: 3177; SEQ ID NO: 3178; SEQ ID NO: 3179; SEQ ID NO: 3180; SEQ ID NO: 3181; SEQ ID NO: 3182; SEQ ID NO: 3183; SEQ ID NO: 3184; SEQ ID NO: 3185; SEQ ID NO: 3186; SEQ ID NO: 3187; SEQ ID NO: 3188; SEQ ID NO: 3189; SEQ ID NO: 3190; SEQ ID NO: 3191; SEQ ID NO: 3192; SEQ ID NO: 3193; SEQ ID NO: 3194; SEQ ID NO: 3195; SEQ ID NO: 3196; SEQ ID NO: 3197; SEQ ID NO: 3198; SEQ ID NO: 3199; SEQ ID NO: 3200; SEQ ID NO: 3201; SEQ ID NO: 3202; SEQ ID NO: 3203; SEQ ID NO: 3204; SEQ ID NO: 3205; SEQ ID NO: 3206; SEQ ID NO: 3207; SEQ ID NO: 3208; SEQ ID NO: 3209; SEQ ID NO: 3210; SEQ ID NO: 3211; SEQ ID NO: 3212; SEQ ID NO: 3213; SEQ ID NO: 3214; SEQ ID NO: 3215; SEQ ID NO: 3216; SEQ ID NO: 3217; SEQ ID NO: 3218; SEQ ID NO: 3219; SEQ ID NO: 3220; SEQ ID NO: 3221; SEQ ID NO: 3222; SEQ ID NO: 3223; SEQ ID NO: 3224; SEQ ID NO: 3225; SEQ ID NO: 3226; SEQ ID NO: 3227; SEQ ID NO: 3228; SEQ ID NO: 3229; SEQ ID NO: 3230; SEQ ID NO: 3231; SEQ ID NO: 3232; SEQ ID NO: 3233; SEQ ID NO: 3234; SEQ ID NO: 3235; SEQ ID NO: 3236; SEQ ID NO: 3237; SEQ ID NO: 3238; SEQ ID NO: 3239; SEQ ID NO: 3240; SEQ ID NO: 3241; SEQ ID NO: 3242; SEQ ID NO: 3243; SEQ ID NO: 3244; SEQ ID NO: 3245; SEQ ID NO: 3246; SEQ ID NO: 3247; SEQ ID NO: 3248; SEQ ID NO: 3249; SEQ ID NO: 3250; SEQ ID NO: 3251; SEQ ID NO: 3252; SEQ ID NO: 3253; SEQ ID NO: 3254; SEQ ID NO: 3255; SEQ ID NO: 3256; SEQ ID NO: 3257; SEQ ID NO: 3258; SEQ ID NO: 3259; SEQ ID NO: 3260; SEQ ID NO: 3261; SEQ ID NO: 3262; SEQ ID NO: 3263; SEQ ID NO: 3264; SEQ ID NO: 3265; SEQ ID NO: 3266; SEQ ID NO: 3267; SEQ ID NO: 3268; SEQ ID NO: 3269; SEQ ID NO: 3270; SEQ ID NO: 3271; SEQ ID NO: 3272; SEQ ID NO: 3273; SEQ ID NO: 3274; SEQ ID NO: 3275; SEQ ID NO: 3276; SEQ ID NO: 3277; SEQ ID NO: 3278; SEQ ID NO: 3279; SEQ ID NO: 3280; SEQ ID NO: 3281; SEQ ID NO: 3282; SEQ ID NO: 3283; SEQ ID NO: 3284; SEQ ID NO: 3285; SEQ ID NO: 3266, SEQ ID NO: 3287; SEQ ID NO: 3288; SEQ ID NO: 3289; SEQ ID NO: 3290; SEQ ID NO: 3291; SEQ ID NO: 3292; SEQ ID NO: 3293; SEQ ID NO: 3294; SEQ ID NO: 3295; SEQ ID NO: 3296; SEQ ID NO: 3297; SEQ ID NO: 3298; SEQ ID NO: 3299; SEQ ID NO: 3300; SEQ ID NO: 3301; SEQ ID NO: 3302; SEQ ID NO: 3303; SEQ ID NO: 3304; SEQ ID NO: 3305; SEQ ID NO: 3306; SEQ ID NO: 3307; SEQ ID NO: 3308; SEQ ID NO: 3309; SEQ ID NO: 3310; SEQ ID NO: 3311; SEQ ID NO: 3312; SEQ ID NO: 3313; SEQ ID NO: 3314; SEQ ID NO: 3315; SEQ ID NO: 3316; SEQ ID NO: 3317; SEQ ID NO:3318; SEQ ID NO: 3319; SEQ ID NO: 3320; SEQ ID NO: 3321; SEQ ID NO: 3322; SEQ ID NO: 3323; SEQ ID NO: 3324; SEQ ID NO: 3325; SEQ ID NO: 3326; SEQ ID NO: 3327; SEQ ID NO: 3328; SEQ ID NO: 3329; SEQ ID NO: 3330; SEQ ID NO: 3331; SEQ ID NO: 3332; SEQ ID NO: 3333; SEQ ID NO: 3334; SEQ ID NO: 3335; SEQ ID NO: 3336; SEQ ID NO: 3337; SEQ ID NO: 3338; SEQ ID NO: 3339; SEQ ID NO: 3340; SEQ ID NO: 3341; SEQ ID NO: 3342; SEQ ID NO: 3343; SEQ ID NO: 3344; SEQ ID NO: 3345; SEQ ID NO: 3346; SEQ ID NO: 3347; SEQ ID NO: 3348; SEQ ID NO: 3349; SEQ ID NO: 3350; SEQ ID NO: 3351; SEQ ID NO: 3352; SEQ ID NO: 3353; SEQ ID NO: 3354; SEQ ID NO: 3355; SEQ ID NO: 3356; SEQ ID NO: 3357; SEQ ID NO: 3358; SEQ ID NO: 3359; SEQ ID NO: 3360; SEQ ID NO: 3361; SEQ ID NO: 3362; SEQ ID NO: 3363; SEQ ID NO: 3364; SEQ ID NO: 3365; SEQ ID NO: 3366; SEQ ID NO: 3367; SEQ ID NO: 3368; SEQ ID NO: 3369; SEQ ID NO: 3370; SEQ ID NO: 3371; SEQ ID NO: 3372; SEQ ID NO: 3373; SEQ ID NO: 3374; SEQ ID NO: 3375; SEQ ID NO: 3376; SEQ ID NO: 3377; SEQ ID NO: 3378; SEQ ID NO: 3379; SEQ ID NO: 3380; SEQ ID NO: 3381; SEQ ID NO: 3382; SEQ ID NO: 3383; SEQ ID NO: 3384; SEQ ID NO: 3385; SEQ ID NO: 3386; SEQ ID NO: 3387; SEQ ID NO: 3388; SEQ ID NO: 3389; SEQ ID NO: 3390; SEQ ID NO: 3391; SEQ ID NO: 3392; SEQ ID NO: 3393; SEQ ID NO: 3394; SEQ ID NO: 3395; SEQ ID NO: 3396; SEQ ID NO: 3397; SEQ ID NO: 3398; SEQ ID NO: 3399; SEQ ID NO: 3400; SEQ ID NO: 3401; SEQ ID NO: 3402; SEQ ID NO: 3403; SEQ ID NO: 3404; SEQ ID NO: 3405; SEQ ID NO: 3406; SEQ ID NO: 3407; SEQ ID NO: 3408; SEQ ID NO: 3409; SEQ ID NO: 3410; SEQ ID NO: 3411; SEQ ID NO: 3412; SEQ ID NO: 3413; SEQ ID NO: 3414; SEQ ID NO: 3415; SEQ ID NO: 3416; SEQ ID NO: 3417; SEQ ID NO: 3418; SEQ ID NO: 3419; SEQ ID NO: 3420; SEQ ID NO: 3421; SEQ ID NO: 3422; SEQ ID NO: 3423; SEQ ID NO: 3424; SEQ ID NO: 3425; SEQ ID NO: 3426; SEQ ID NO: 3427; SEQ ID NO: 3428; SEQ ID NO: 3429; SEQ ID NO: 3430; SEQ ID NO: 3431; SEQ ID NO: 3432; SEQ ID NO: 3433; SEQ ID NO: 3434; SEQ ID NO: 3435; SEQ ID NO: 3436; SEQ ID NO: 3437; SEQ ID NO: 3438; SEQ ID NO: 3439; SEQ ID NO: 3440; SEQ ID NO: 3441; SEQ ID NO: 3442; SEQ ID NO: 3443; SEQ ID NO: 3444; SEQ ID NO: 3445; SEQ ID NO: 3446; SEQ ID NO: 3447; SEQ ID NO: 3448; SEQ ID NO: 3449; SEQ ID NO: 3450; SEQ ID NO: 3451; SEQ ID NO: 3452; SEQ ID NO: 3453; SEQ ID NO: 3454; SEQ ID NO: 3455; SEQ ID NO: 3456; SEQ ID NO: 3457; SEQ ID NO: 3458; SEQ ID NO: 3459; SEQ ID NO: 3460; SEQ ID NO: 3461; SEQ ID NO: 3462; SEQ ID NO: 3463; SEQ ID NO: 3464; SEQ ID NO: 3465; SEQ ID NO: 3466; SEQ ID NO: 3467; SEQ ID NO: 3468; SEQ ID NO: 3469; SEQ ID NO: 3470; SEQ ID NO: 3471; SEQ ID NO: 3472; SEQ ID NO: 3473; SEQ ID NO: 3474; SEQ ID NO: 3475; SEQ ID NO: 3476; SEQ ID NO: 3477; SEQ ID NO: 3478; SEQ ID NO: 3479; SEQ ID NO: 3480; SEQ ID NO: 3481; SEQ ID NO: 3482; SEQ ID NO: 3483; SEQ ID NO: 3484; SEQ ID NO: 3485; SEQ ID NO: 3486; SEQ ID NO: 3487; SEQ ID NO: 3488; SEQ ID NO: 3489; SEQ ID NO: 3490; SEQ ID NO: 3491; SEQ ID NO: 3492; SEQ ID NO: 3493; SEQ ID NO: 3494; SEQ ID NO: 3495; SEQ ID NO: 3496; SEQ ID NO: 3497; SEQ ID NO: 3498; SEQ ID NO: 3499; SEQ ID NO: 3500; SEQ ID NO: 3501; SEQ ID NO: 3502; SEQ ID NO: 3503; SEQ ID NO: 3504; SEQ ID NO: 3505; SEQ ID NO: 3506; SEQ ID NO: 3507; SEQ ID NO: 3508; SEQ ID NO: 3509; SEQ ID NO: 3510; SEQ ID NO: 3511; SEQ ID NO: 3512; SEQ ID NO: 3513; SEQ ID NO: 3514; SEQ ID NO: 3515; SEQ ID NO: 3516; SEQ ID NO: 3517; SEQ ID NO: 3518; SEQ ID NO: 3519; SEQ ID NO: 3520; SEQ ID NO: 3521; SEQ ID NO: 3522; SEQ ID NO: 3523; SEQ ID NO: 3524; SEQ ID NO: 3525; SEQ ID NO: 3526; SEQ ID NO: 3527; SEQ ID NO: 3528; SEQ ID NO: 3529; SEQ ID NO: 3530; SEQ ID NO: 3531; SEQ ID NO: 3532; SEQ ID NO: 3533; SEQ ID NO: 3534; SEQ ID NO: 3535; SEQ ID NO: 3536; SEQ ID NO: 3537; SEQ ID NO: 3538; SEQ ID NO: 3539; SEQ ID NO: 3540; SEQ ID NO: 3541; SEQ ID NO: 3542; SEQ ID NO: 3543; SEQ ID NO: 3544; SEQ ID NO: 3545; SEQ ID NO: 3546; SEQ ID NO: 3547; SEQ ID NO: 3548; SEQ ID NO: 3549; SEQ ID NO: 3550; SEQ ID NO: 3551; SEQ ID NO: 3552; SEQ ID NO: 3553; SEQ ID NO: 3554; SEQ ID NO: 3555; SEQ ID NO: 3556; SEQ ID NO: 3557; SEQ ID NO: 3558; SEQ ID NO: 3559; SEQ ID NO: 3560; SEQ ID NO: 3561; SEQ ID NO: 3562; SEQ ID NO: 3563; SEQ ID NO: 3564; SEQ ID NO: 3565; SEQ ID NO: 3566; SEQ ID NO: 3567; SEQ ID NO: 3568; SEQ ID NO: 3569; SEQ ID NO: 3570; SEQ ID NO: 3571; SEQ ID NO: 3572; SEQ ID NO: 3573; SEQ ID NO: 3574; SEQ ID NO: 3575; SEQ ID NO: 3576; SEQ ID NO: 3577; SEQ ID NO: 3578; SEQ ID NO: 3579; SEQ ID NO: 3580; SEQ ID NO: 3581; SEQ ID NO: 3582; SEQ ID NO: 3583; SEQ ID NO: 3584; SEQ ID NO: 3585; SEQ ID NO: 3586; SEQ ID NO: 3587; SEQ ID NO: 3588; SEQ ID NO: 3589; SEQ ID NO: 3590; SEQ ID NO: 3591; SEQ ID NO: 3592; SEQ ID NO: 3593; SEQ ID NO: 3594; SEQ ID NO: 3595; SEQ ID NO: 3596; SEQ ID NO: 3597; SEQ ID NO: 3598; SEQ ID NO: 3599; SEQ ID NO: 3600; SEQ ID NO: 3601; SEQ ID NO: 3602; SEQ ID NO: 3603; SEQ ID NO: 3604; SEQ ID NO: 3605; SEQ ID NO: 3606; SEQ ID NO: 3607; SEQ ID NO: 3608; SEQ ID NO: 3609; SEQ ID NO: 3610; SEQ ID NO: 3611; SEQ ID NO: 3612; SEQ ID NO: 3613; SEQ ID NO 3614; SEQ ID NO: 3615; SEQ ID NO: 3616; SEQ ID NO: 3617; SEQ ID NO: 3618; SEQ ID NO: 3619; SEQ ID NO: 3620; SEQ ID NO: 3621; SEQ ID NO: 3622; SEQ ID NO: 3623; SEQ ID NO: 3624; SEQ ID NO: 3625; SEQ ID NO: 3626; SEQ ID NO: 3627; SEQ ID NO: 3628; SEQ ID NO: 3629; SEQ ID NO: 3630; SEQ ID NO: 3631; SEQ ID NO: 3632; SEQ ID NO: 3633; SEQ ID NO: 3634; SEQ ID NO: 3635; SEQ ID NO: 3636; SEQ ID NO: 3637; SEQ ID NO: 3638; SEQ ID NO: 3639; SEQ ID NO: 3640; SEQ ID NO: 3641; SEQ ID NO: 3642; SEQ ID NO: 3643; SEQ ID NO: 3644; SEQ ID NO: 3645; SEQ ID NO: 3646; SEQ ID NO: 3647; SEQ ID NO: 3648; SEQ ID NO: 3649; SEQ ID NO: 3650; SEQ ID NO: 3651; SEQ ID NO: 3652; SEQ ID NO: 3653; SEQ ID NO: 3654; SEQ ID NO: 3655; SEQ ID NO: 3656; SEQ ID NO: 3657; SEQ ID NO: 3658; SEQ ID NO: 3659; SEQ ID NO: 3660; SEQ ID NO: 3661; SEQ ID NO: 3662; SEQ ID NO: 3663; SEQ ID NO: 3664; SEQ ID NO: 3665; SEQ ID NO: 3666; SEQ ID NO: 3667; SEQ ID NO: 3668; SEQ ID NO: 3669; SEQ ID NO: 3670; SEQ ID NO: 3671; SEQ ID NO: 3672; SEQ ID NO: 3673; SEQ ID NO: 3674; SEQ ID NO: 3675; SEQ ID NO: 3676; SEQ ID NO: 3677; SEQ ID NO: 3678; SEQ ID NO: 3679; SEQ ID NO: 3680; SEQ ID NO: 3681; SEQ ID NO: 3682; SEQ ID NO: 3683; SEQ ID NO: 3684; SEQ ID NO: 3685; SEQ ID NO: 3686; SEQ ID NO: 3687; SEQ ID NO: 3688; SEQ ID NO: 3689; SEQ ID NO: 3690; SEQ ID NO: 3691; SEQ ID NO: 3692; SEQ ID NO: 3693; SEQ ID NO: 3694; SEQ ID NO: 3695; SEQ ID NO: 3696; SEQ ID NO: 3697; SEQ ID NO: 3698; SEQ ID NO: 3699; SEQ ID NO: 3700; SEQ ID NO: 3701; SEQ ID NO: 3702; SEQ ID NO: 3703; SEQ ID NO: 3704; SEQ ID NO: 3705; SEQ ID NO: 3706; SEQ ID NO: 3707; SEQ ID NO: 3708; SEQ ID NO: 3709; SEQ ID NO: 3710; SEQ ID NO: 3711; SEQ ID NO: 3712; SEQ ID NO: 3713; SEQ ID NO: 3714; SEQ ID NO: 3715; SEQ ID NO: 3716; SEQ ID NO: 3717; SEQ ID NO: 3718; SEQ ID NO: 3719; SEQ ID NO: 3720; SEQ ID NO: 3721; SEQ ID NO: 3722; SEQ ID NO: 3723; SEQ ID NO: 3724; SEQ ID NO: 3725; SEQ ID NO: 3726; SEQ ID NO: 3727; SEQ ID NO: 3728; SEQ ID NO: 3729; SEQ ID NO: 3730; SEQ ID NO: 3731; SEQ ID NO: 3732; SEQ ID NO: 3733; SEQ ID NO: 3734; SEQ ID NO: 3735; SEQ ID NO: 3736; SEQ ID NO: 3737; SEQ ID NO: 3738; SEQ ID NO: 3739; SEQ ID NO: 3740; SEQ ID NO: 3741; SEQ ID NO: 3742; SEQ ID NO: 3743; SEQ ID NO: 3744; SEQ ID NO: 3745; SEQ ID NO: 3746; SEQ ID NO: 3747; SEQ ID NO: 3748; SEQ ID NO: 3749; SEQ ID NO: 3750; SEQ ID NO: 3751; SEQ ID NO: 3752; SEQ ID NO: 3753; SEQ ID NO: 3754; SEQ ID NO: 3755; SEQ ID NO: 3756; SEQ ID NO: 3757; SEQ ID NO: 3758; SEQ ID NO: 3759; SEQ ID NO: 3760; SEQ ID NO: 3761; SEQ ID NO: 3762; SEQ ID NO: 3763; SEQ ID NO: 3764; SEQ ID NO: 3765; SEQ ID NO: 3766; SEQ ID NO: 3767; SEQ ID NO: 3768; SEQ ID NO: 3769; SEQ ID NO: 3770; SEQ ID NO: 3771; SEQ ID NO: 3772; SEQ ID NO: 3773; SEQ ID NO: 3774; SEQ ID NO: 3775; SEQ ID NO: 3776; SEQ ID NO: 3777; SEQ ID NO: 3778; SEQ ID NO: 3779; SEQ ID NO: 3780; SEQ ID NO: 3781; SEQ ID NO: 3782; SEQ ID NO: 3783; SEQ ID NO: 3784; SEQ ID NO: 3785; SEQ ID NO: 3786; SEQ ID NO: 3787; SEQ ID NO: 3788; SEQ ID NO: 3789; SEQ ID NO: 3790; SEQ ID NO: 3791; SEQ ID NO: 3792; SEQ ID NO: 3793; SEQ ID NO: 3794; SEQ ID NO: 3795; SEQ ID NO: 3796; SEQ ID NO: 3797; SEQ ID NO: 3798; SEQ ID NO: 3799; SEQ ID NO: 3800; SEQ ID NO: 3801; SEQ ID NO: 3802; SEQ ID NO: 3803; SEQ ID NO: 3804; SEQ ID NO: 3805; SEQ ID NO: 3806; SEQ ID NO: 3807; SEQ ID NO: 3808; SEQ ID NO: 3809; SEQ ID NO: 3810; SEQ ID NO: 3811; SEQ ID NO: 3812; SEQ ID NO: 3813; SEQ ID NO: 3814; SEQ ID NO: 3815; SEQ ID NO: 3816; SEQ ID NO: 3817; SEQ ID NO: 3818; SEQ ID NO: 3819; SEQ ID NO: 3820; SEQ ID NO: 3821; SEQ ID NO: 3822; SEQ ID NO: 3823; SEQ ID NO: 3824; SEQ ID NO: 3825; SEQ ID NO: 3826; SEQ ID NO: 3827; SEQ ID NO: 3828; SEQ ID NO: 3829; SEQ ID NO: 3830; SEQ ID NO: 3831; SEQ ID NO: 3832; SEQ ID NO: 3833; SEQ ID NO: 3834; SEQ ID NO: 3835; SEQ ID NO: 3836; SEQ ID NO: 3837; SEQ ID NO: 3838; SEQ ID NO: 3839; SEQ ID NO: 3840; SEQ ID NO: 3841; SEQ ID NO: 3842; SEQ ID NO: 3843; SEQ ID NO: 3844; SEQ ID NO: 3845; SEQ ID NO: 3846; SEQ ID NO: 3847; SEQ ID NO: 3848; SEQ ID NO: 3849; SEQ ID NO: 3850; SEQ ID NO: 3851; SEQ ID NO: 3852; SEQ ID NO: 3853; SEQ ID NO: 3854; SEQ ID NO: 3855; SEQ ID NO: 3856; SEQ ID NO: 3857; SEQ ID NO: 3858; SEQ ID NO: 3859; SEQ ID NO: 3860; SEQ ID NO: 3861; SEQ ID NO: 3862; SEQ ID NO: 3863; SEQ ID NO: 3864; SEQ ID NO: 3865; SEQ ID NO: 3866; SEQ ID NO: 3867; SEQ ID NO: 3868; SEQ ID NO: 3869; SEQ ID NO: 3870; SEQ ID NO: 3871; SEQ ID NO: 3872; SEQ ID NO: 3873; SEQ ID NO: 3874; SEQ ID NO: 3875; SEQ ID NO: 3876; SEQ ID NO: 3877; SEQ ID NO: 3878; SEQ ID NO: 3879; SEQ ID NO: 3880; SEQ ID NO: 3881; SEQ ID NO: 3882; SEQ ID NO: 3883; SEQ ID NO: 3884; SEQ ID NO: 3885; SEQ ID NO: 3886; SEQ ID NO: 3887; SEQ ID NO: 3888; SEQ ID NO: 3889; SEQ ID NO: 3890; SEQ ID NO: 3891; SEQ ID NO: 3892; SEQ ID NO: 3893; SEQ ID NO: 3894; SEQ ID NO: 3895; SEQ ID NO: 3896; SEQ ID NO: 3897; SEQ ID NO: 3898; SEQ ID NO: 3899; SEQ ID NO: 3900; SEQ ID NO: 3901; SEQ ID NO: 3902; SEQ ID NO: 3903; SEQ ID NO: 3904; SEQ ID NO: 3905; SEQ ID NO: 3906; SEQ ID NO: 3907; SEQ ID NO: 3908; SEQ ID NO: 3909; SEQ ID NO: 3910; SEQ ID NO: 3911; SEQ ID NO: 3912; SEQ ID NO: 3913; SEQ ID NO: 3914; SEQ ID NO: 3915; SEQ ID NO: 3916; SEQ ID NO: 3917; SEQ ID NO: 3918; SEQ ID NO: 3919; SEQ ID NO: 3920; SEQ ID NO: 3921; SEQ ID NO: 3922; SEQ ID NO: 3923; SEQ ID NO: 3924; SEQ ID NO: 3925; SEQ ID NO: 3926; SEQ ID NO: 3927; SEQ ID NO: 3928; SEQ ID NO: 3929; SEQ ID NO: 3930; SEQ ID NO: 3931; SEQ ID NO: 3932; SEQ ID NO: 3933; SEQ ID NO: 3934; SEQ ID NO: 3935; SEQ ID NO: 3936; SEQ ID NO: 3937; SEQ ID NO: 3938; SEQ ID NO: 3939; SEQ ID NO: 3940; SEQ ID NO: 3941; SEQ ID NO: 3942; SEQ ID NO: 3943; SEQ ID NO: 3944; SEQ ID NO: 3945; SEQ ID NO: 3946; SEQ ID NO: 3947; SEQ ID NO: 3948; SEQ ID NO: 3949; SEQ ID NO: 3950; SEQ ID NO: 3951; SEQ ID NO: 3952; SEQ ID NO: 3953; SEQ ID NO: 3954; SEQ ID NO: 3955; SEQ ID NO: 3956; SEQ ID NO: 3957; SEQ ID NO: 3958; SEQ ID NO: 3959; SEQ ID NO: 3960; SEQ ID NO: 3961; SEQ ID NO: 3962; SEQ ID NO: 3963; SEQ ID NO: 3964; SEQ ID NO: 3965; SEQ ID NO: 3966; SEQ ID NO: 3967; SEQ ID NO: 3968; SEQ ID NO: 3969; SEQ ID NO: 3970; SEQ ID NO: 3971; SEQ ID NO: 3972; SEQ ID NO: 3973; SEQ ID NO: 3974; SEQ ID NO: 3975; SEQ ID NO: 3976; SEQ ID NO: 3977; SEQ ID NO: 3978; SEQ ID NO: 3979; SEQ ID NO: 3980; SEQ ID NO: 3981; SEQ ID NO: 3982; SEQ ID NO: 3983; SEQ ID NO: 3984; SEQ ID NO: 3985; SEQ ID NO: 3986; SEQ ID NO: 3987; SEQ ID NO: 3988; SEQ ID NO: 3989; SEQ ID NO: 3990; SEQ ID NO: 3991; SEQ ID NO: 3992; SEQ ID NO: 3993; SEQ ID NO: 3994; SEQ ID NO: 3995; SEQ ID NO: 3996; SEQ ID NO: 3997; SEQ ID NO: 3998; SEQ ID NO: 3999; SEQ ID NO: 4000; SEQ ID NO: 4001; SEQ ID NO: 4002; SEQ ID NO: 4003; SEQ ID NO: 4004; SEQ ID NO: 4005; SEQ ID NO: 4006; SEQ ID NO: 4007; SEQ ID NO: 4008; SEQ ID NO: 4009; SEQ ID NO: 4010; SEQ ID NO: 4011; SEQ ID NO: 4012; SEQ ID NO: 4013; SEQ ID NO: 4014; SEQ ID NO: 4015; SEQ ID NO: 9593; SEQ ID NO: 9594; SEQ ID NO: 9595; SEQ ID NO: 9596; SEQ ID NO: 9597; SEQ ID NO: 9598; SEQ ID NO: 9599; SEQ ID NO: 9600; SEQ ID NO: 9601; SEQ ID NO: 9602; SEQ ID NO: 9603; SEQ ID NO: 9604; SEQ ID NO: 9605; SEQ ID NO: 9606; SEQ ID NO: 9607; SEQ ID NO: 9608; SEQ ID NO: 9609; SEQ ID NO: 9610; SEQ ID NO: 9611; SEQ ID NO: 9612; SEQ ID NO: 9613; SEQ ID NO: 9614; SEQ ID NO: 9615; SEQ ID NO: 9616; SEQ ID NO: 9617; SEQ ID NO: 9618; SEQ ID NO: 9619; SEQ ID NO: 9620 and SEQ ID NO: 9621.

[0148] In one embodiment, the H. pylori cytoplasmic polypeptide or a fragment thereof is an H. pylori polypeptide involved in energy metabolism or a fragment thereof encoded by a nucleic acid having a nucleotide sequence selected from the group consisting of SEQ ID NO: 1576; SEQ ID NO: 1576; SEQ ID NO: 1577; SEQ ID NO: 1578; SEQ ID NO: 1579; SEQ ID NO: 1580; SEQ ID NO: 1581; SEQ ID NO: 1582; SEQ ID NO: 1583; SEQ ID NO: 1584; SEQ ID NO: 1585; SEQ ID NO: 1586; SEQ ID NO: 1587; SEQ ID NO: 1588; SEQ ID NO: 1589; SEQ ID NO: 1590; SEQ ID NO: 1591; SEQ ID NO: 1592; SEQ ID NO: 1593; SEQ ID NO: 1594; SEQ ID NO: 1595; SEQ ID NO: 1596; SEQ ID NO: 1597; SEQ ID NO: 1598; SEQ ID NO: 1599; SEQ ID NO: 1600; SEQ ID NO: 1601; SEQ ID NO: 1602; SEQ ID NO: 1603; SEQ ID NO: 1604; SEQ ID NO: 1605; SEQ ID NO: 1606; SEQ ID NO: 1607; SEQ ID NO: 1608; SEQ ID NO: 1609; SEQ ID NO: 1610; SEQ ID NO: 1611; SEQ ID NO: 1612; SEQ ID NO: 1613; SEQ ID NO: 1614; SEQ ID NO: 1615; SEQ ID NO: 1616; SEQ ID NO: 1617; SEQ ID NO: 1618; SEQ ID NO: 1619; SEQ ID NO: 1620; SEQ ID NO: 1621; SEQ ID NO: 1622; SEQ ID NO: 1623; SEQ ID NO: 1624; SEQ ID NO: 1625; SEQ ID NO: 1626; SEQ ID NO: 1627; SEQ ID NO: 1628; SEQ ID NO: 1629; SEQ ID NO: 1630; SEQ ID NO: 1631; SEQ ID NO: 1632; SEQ ID NO: 1633; SEQ ID NO: 1634; SEQ ID NO: 1635; SEQ ID NO: 1636; SEQ ID NO: 1637; SEQ ID NO: 1638; SEQ ID NO: 1639; SEQ ID NO: 1640; SEQ ID NO: 1641; SEQ ID NO: 1642; SEQ ID NO: 1643; SEQ ID NO: 1644; SEQ ID NO: 1645; SEQ ID NO: 1646; SEQ ID NO: 1647; SEQ ID NO: 1648; SEQ ID NO: 1649; SEQ ID NO: 1650; SEQ ID NO: 1651; SEQ ID NO: 1652; SEQ ID NO: 1653; SEQ ID NO: 1654; SEQ ID NO: 1655; SEQ ID NO: 1656; SEQ ID NO: 1657; SEQ ID NO: 1658; SEQ ID NO: 1659; SEQ ID NO: 1660; SEQ ID NO: 1661; SEQ ID NO: 1662; SEQ ID NO: 1663; SEQ ID NO: 1664; SEQ ID NO: 1665; SEQ ID NO: 1666; SEQ ID NO: 1667; SEQ ID NO: 1668; SEQ ID NO: 1669; SEQ ID NO: 1670; SEQ ID NO: 1671; SEQ ID NO: 1672; SEQ ID NO: 1673; SEQ ID NO: 1674; SEQ ID NO: 1675; SEQ ID NO: 1676; SEQ ID NO: 1677; SEQ ID NO: 1678; SEQ ID NO: 1679; SEQ ID NO: 1680; SEQ ID NO: 1681; SEQ ID NO: 1682; SEQ ID NO: 1683; SEQ ID NO: 1684; SEQ ID NO: 1685; SEQ ID NO: 1686; SEQ ID NO: 1687; SEQ ID NO: 1688; SEQ ID NO: 1689; SEQ ID NO: 1690; SEQ ID NO: 1691; SEQ ID NO: 1692; SEQ ID NO: 1693; SEQ ID NO: 1694; SEQ ID NO: 1695; SEQ ID NO: 1696; SEQ ID NO: 1697; SEQ ID NO: 1698; SEQ ID NO: 1699; SEQ ID NO: 1700; SEQ ID NO: 1701; SEQ ID NO: 1702; SEQ ID NO: 1703; SEQ ID NO: 1704; SEQ ID NO: 1705; SEQ ID NO: 1706; SEQ ID NO: 1707; SEQ ID NO: 1708; SEQ ID NO: 1709; SEQ ID NO: 1710; SEQ ID NO: 1711; SEQ ID NO: 1712; SEQ ID NO: 1713; SEQ ID NO: 1714; SEQ ID NO: 1715; SEQ ID NO: 1716; SEQ ID NO: 1717; SEQ ID NO: 1718; SEQ ID NO: 1719; SEQ ID NO: 1720; SEQ ID NO: 1721; SEQ ID NO: 1722; SEQ ID NO: 1723; SEQ ID NO: 1724; SEQ ID NO: 1725; SEQ ID NO: 9593 and SEQ ID NO: 9594.

[0149] In another embodiment, the H. pylori cytoplasmic polypeptide or a fragment thereof is an H. pylori polypeptide involved in amino acid metabolism or a fragment thereof encoded by a nucleic acid having a sequence selected from the group consisting of SEQ ID NO: 1726; SEQ ID NO: 1727; SEQ ID NO: 1728; SEQ ID NO: 1729; SEQ ID NO: 1730; SEQ ID NO: 1731; SEQ ID NO: 1732; SEQ ID NO: 1733; SEQ ID NO: 1734; SEQ ID NO: 1735; SEQ ID NO: 1736; SEQ ID NO: 1737; SEQ ID NO: 1738; SEQ ID NO: 1739; SEQ ID NO: 1740; SEQ ID NO: 1741; SEQ ID NO: 1742; SEQ ID NO: 1743; SEQ ID NO: 1744; SEQ ID NO: 1745; SEQ ID NO: 1746; SEQ ID NO: 1747; SEQ ID NO: 1748; SEQ ID NO: 1749; SEQ ID NO: 1750; SEQ ID NO: 1751; SEQ ID NO: 1752; SEQ ID NO: 1753; SEQ ID NO: 1754; SEQ ID NO: 1755; SEQ ID NO: 1756; SEQ ID NO: 1757; SEQ ID NO: 1758; SEQ ID NO: 1759; SEQ ID NO: 1760; SEQ ID NO: 1761; SEQ ID NO: 1762; SEQ ID NO: 1763; SEQ ID NO: 1764; SEQ ID NO: 1765; SEQ ID NO: 1766; SEQ ID NO: 1767; SEQ ID NO: 1768; SEQ ID NO: 1769; SEQ ID NO: 1770; SEQ ID NO: 1771; SEQ ID NO: 1772; SEQ ID NO: 1773; SEQ ID NO: 1774; SEQ ID NO: 1775; SEQ ID NO: 1776; SEQ ID NO: 1777; SEQ ID NO: 1778; SEQ ID NO: 1779; SEQ ID NO: 1780; SEQ ID NO: 1781; SEQ ID NO: 1782; SEQ ID NO: 1783; SEQ ID NO: 1784; SEQ ID NO: 1785; SEQ ID NO: 1786; SEQ ID NO: 1787; SEQ ID NO: 1788; SEQ ID NO: 1789; SEQ ID NO: 1790; SEQ ID NO: 1791; SEQ ID NO: 1792; SEQ ID NO: 1793; SEQ ID NO: 1794; SEQ ID NO: 1795; SEQ ID NO: 1796; SEQ ID NO: 1797; SEQ ID NO: 1798; SEQ ID NO: 1799; SEQ ID NO: 1800; SEQ ID NO: 1801; SEQ ID NO: 1802; SEQ ID NO: 1803; SEQ ID NO: 1804; SEQ ID NO: 1805; SEQ ID NO: 1806; SEQ ID NO: 1807; SEQ ID NO: 1808; SEQ ID NO: 1809; SEQ ID NO: 1810; SEQ ID NO: 1811; SEQ ID NO: 1812; SEQ ID NO: 1813; SEQ ID NO: 1814; SEQ ID NO: 1815; SEQ ID NO: 1816; SEQ ID NO: 1817; SEQ ID NO: 1818; SEQ ID NO: 1819; SEQ ID NO: 1820; SEQ ID NO: 1821; SEQ ID NO: 1822; SEQ ID NO: 1823; SEQ ID NO: 1824; SEQ ID NO: 1825; SEQ ID NO: 1826; SEQ ID NO: 1827; SEQ ID NO: 1828; SEQ ID NO: 1829; SEQ ID NO: 1830; SEQ ID NO: 1831; SEQ ID NO: 1832; SEQ ID NO: 1833; SEQ ID NO: 1834; SEQ ID NO: 1835; SEQ ID NO: 1836; SEQ ID NO: 1837; SEQ ID NO: 1838; SEQ ID NO: 1839; SEQ ID NO: 1840; SEQ ID NO: 1841; SEQ ID NO: 1842; SEQ ID NO: 1843; SEQ ID NO: 1844; SEQ ID NO: 1845; SEQ ID NO: 1846; SEQ ID NO: 1847; SEQ ID NO: 1848; SEQ ID NO: 1849; SEQ ID NO: 1850; SEQ ID NO: 1851; SEQ ID NO: 1852; SEQ ID NO: 1853; SEQ ID NO: 1854; SEQ ID NO: 1855; SEQ ID NO: 1856; SEQ ID NO: 1857; SEQ ID NO: 1858; SEQ ID NO: 1859; SEQ ID NO: 1860; SEQ ID NO: 1861; SEQ ID NO: 1862; SEQ ID NO: 1863; SEQ ID NO: 1864; SEQ ID NO: 1865; SEQ ID NO: 1866; SEQ ID NO: 1867; SEQ ID NO: 1868; SEQ ID NO: 9595 and SEQ ID NO: 9596.

[0150] In another embodiment, the H. pylori cytoplasmic polypeptide or a fragment thereof is an H. pylori polypeptide involved in cofactor metabolism or a fragment thereof encoded by a nucleic acid having a sequence selected from the group consisting of SEQ ID NO: 1869; SEQ ID NO: 1870; SEQ ID NO: 1871; SEQ ID NO: 1872; SEQ ID NO: 1873; SEQ ID NO: 1874; SEQ ID NO: 1875; SEQ ID NO: 1876; SEQ ID NO: 1877; SEQ ID NO: 1878; SEQ ID NO: 1879; SEQ ID NO: 1880; SEQ ID NO: 1881; SEQ ID NO: 1882; SEQ ID NO: 1883; SEQ ID NO: 1884; SEQ ID NO: 1885; SEQ ID NO: 1886; SEQ ID NO: 1887; SEQ ID NO: 1888; SEQ ID NO: 1889; SEQ ID NO: 1890; SEQ ID NO: 1891; SEQ ID NO: 1892; SEQ ID NO: 1893; SEQ ID NO: 1894; SEQ ID NO: 1895; SEQ ID NO: 1896; SEQ ID NO: 1897; SEQ ID NO: 1898; SEQ ID NO: 1899; SEQ ID NO: 1900; SEQ ID NO: 1901; SEQ ID NO: 1902; SEQ ID NO: 1903; SEQ ID NO: 1904; SEQ ID NO: 1905; SEQ ID NO: 1906; SEQ ID NO: 1907; SEQ ID NO: 1908; SEQ ID NO: 1909; SEQ ID NO: 1910; SEQ ID NO: 1911; SEQ ID NO: 1912; SEQ ID NO: 1913; SEQ ID NO: 1914; SEQ ID NO: 1915; SEQ ID NO: 1916; SEQ ID NO: 1917; SEQ ID NO: 1918; SEQ ID NO: 1919; SEQ ID NO: 1920; SEQ ID NO: 1921; SEQ ID NO: 1922; SEQ ID NO: 1923; SEQ ID NO: 1924; SEQ ID NO: 1925; SEQ ID NO: 1926; SEQ ID NO: 1927; SEQ ID NO: 1928; SEQ ID NO: 1929; SEQ ID NO: 1930; SEQ ID NO: 1931; SEQ ID NO: 1932; SEQ ID NO: 1933; SEQ ID NO: 1934; SEQ ID NO: 1935; SEQ ID NO: 1936; SEQ ID NO: 1937; SEQ ID NO: 1938; SEQ ID NO: 1939; SEQ ID NO: 1940; SEQ ID NO: 1941; SEQ ID NO: 1942; SEQ ID NO: 1943; SEQ ID NO: 1944; SEQ ID NO: 1945; SEQ ID NO: 1946; SEQ ID NO: 1947; SEQ ID NO: 1948; SEQ ID NO: 1949; SEQ ID NO: 1950; SEQ ID NO: 1951; SEQ ID NO: 1952; SEQ ID NO: 1953; SEQ ID NO: 1954; SEQ ID NO: 1955; SEQ ID NO: 1956; SEQ ID NO: 1957; SEQ ID NO: 1958; SEQ ID NO: 1959; SEQ ID NO: 1960; SEQ ID NO: 1961; SEQ ID NO: 1962; SEQ ID NO: 1963; SEQ ID NO: 1964; SEQ ID NO: 1965; SEQ ID NO: 1966; SEQ ID NO: 1967; SEQ ID NO: 1968; SEQ ID NO: 1969; SEQ ID NO: 1970; SEQ ID NO: 1971; SEQ ID NO: 1972; SEQ ID NO: 1973; SEQ ID NO: 1974; SEQ ID NO: 1975; SEQ ID NO: 1976; SEQ ID NO: 1977; SEQ ID NO: 1978; SEQ ID NO: 1979; SEQ ID NO: 1980; SEQ ID NO: 1981; SEQ ID NO: 1982; SEQ ID NO: 1983; SEQ ID NO: 1984; SEQ ID NO: 1985; SEQ ID NO: 1986; SEQ ID NO: 1987; SEQ ID NO: 1988; SEQ ID NO: 1989; SEQ ID NO: 1990; SEQ ID NO: 1991; SEQ ID NO: 1992; SEQ ID NO: 1993; SEQ ID NO: 1994; SEQ ID NO: 1995; SEQ ID NO: 1996; SEQ ID NO: 1997; SEQ ID NO: 1998; SEQ ID NO: 1999; SEQ ID NO: 2000; SEQ ID NO: 2001; SEQ ID NO: 2002; SEQ ID NO: 2003; SEQ ID NO: 2004; SEQ ID NO: 2005; SEQ ID NO: 9597.

[0151] In another embodiment, the H. pylori cytoplasmic polypeptide or a fragment thereof is an H. pylori polypeptide involved in carbohydrate metabolism or a fragment thereof encoded by a nucleic acid having a sequence selected from the group consisting of SEQ ID NO: 2006; SEQ ID NO: 2007; SEQ ID NO: 2008; SEQ ID NO: 2009; SEQ ID NO: 2010; SEQ ID NO: 2011; SEQ ID NO: 2012; SEQ ID NO: 2013; SEQ ID NO: 2014; SEQ ID NO: 2015; SEQ ID NO: 2016; SEQ ID NO: 2017; SEQ ID NO: 2018; SEQ ID NO: 2019; SEQ ID NO: 2020; SEQ ID NO: 2021; SEQ ID NO: 2022; SEQ ID NO: 2023; SEQ ID NO: 2024; SEQ ID NO: 2025; SEQ ID NO: 2026; SEQ ID NO: 2027; SEQ ID NO: 2028; SEQ ID NO: 2029; SEQ ID NO: 2030; SEQ ID NO: 2031; SEQ ID NO: 2032; SEQ ID NO: 2033; SEQ ID NO: 2034; SEQ ID NO: 2035; SEQ ID NO: 2036; SEQ ID NO: 2037; SEQ ID NO: 2038; SEQ ID NO: 2039; SEQ ID NO: 2040; SEQ ID NO: 2041; SEQ ID NO: 2042; SEQ ID NO: 2043; SEQ ID NO: 2044; SEQ ID NO: 2045; SEQ ID NO: 2046; SEQ ID NO: 2047; SEQ ID NO: 2048; SEQ ID NO: 2049; SEQ ID NO: 2050; SEQ ID NO: 2051; SEQ ID NO: 2052; SEQ ID NO: 2053; SEQ ID NO: 2054; SEQ ID NO: 2055; SEQ ID NO: 2056; SEQ ID NO: 2057; SEQ ID NO: 2058; SEQ ID NO: 2059; SEQ ID NO: 2060; SEQ ID NO: 2061; SEQ ID NO: 2062; SEQ ID NO: 2063; SEQ ID NO: 2064; SEQ ID NO: 2065; SEQ ID NO: 2066; SEQ ID NO: 2067; SEQ ID NO: 2068; SEQ ID NO: 2069; SEQ ID NO: 2070; SEQ ID NO: 2071; SEQ ID NO: 2072; SEQ ID NO: 2073; SEQ ID NO: 2074; SEQ ID NO: 2075; SEQ ID NO: 2076; SEQ ID NO: 9598; SEQ ID NO: 9599.

[0152] In another embodiment, the H. pylori cytoplasmic polypeptide or a fragment thereof is an H. pylori polypeptide involved in nucleic acid metabolism or a fragment thereof encoded by a nucleic acid having a nucleotide sequence selected from the group consisting of SEQ ID NO: 2077; SEQ ID NO: 2078; SEQ ID NO: 2079; SEQ ID NO: 2080; SEQ ID NO: 2081; SEQ ID NO: 2082; SEQ ID NO: 2083; SEQ ID NO: 2084; SEQ ID NO: 2085; SEQ ID NO: 2086; SEQ ID NO: 2087; SEQ ID NO: 2088; SEQ ID NO: 2089; SEQ ID NO: 2090; SEQ ID NO: 2091; SEQ ID NO: 2092; SEQ ID NO: 2093; SEQ ID NO: 2094; SEQ ID NO: 2095; SEQ ID NO: 2096; SEQ ID NO: 2097; SEQ ID NO: 2098; SEQ ID NO: 2099; SEQ ID NO: 2100; SEQ ID NO: 2101; SEQ ID NO: 2102; SEQ ID NO: 2103; SEQ ID NO: 2104; SEQ ID NO: 2105; SEQ ID NO: 2106; SEQ ID NO: 2107; SEQ ID NO: 2108; SEQ ID NO: 2109; SEQ ID NO: 2110; SEQ ID NO: 2111; SEQ ID NO: 2112; SEQ ID NO: 2113; SEQ ID NO: 2114; SEQ ID NO: 2115; SEQ ID NO: 2116; SEQ ID NO: 2117; SEQ ID NO: 2118; SEQ ID NO: 2119; SEQ ID NO: 2120; SEQ ID NO: 2121; SEQ ID NO: 2122; SEQ ID NO: 2123; SEQ ID NO: 2124; SEQ ID NO: 2125; SEQ ID NO: 2126; SEQ ID NO: 2127; SEQ ID NO: 2128; SEQ ID NO: 2129; SEQ ID NO: 2130; SEQ ID NO: 2131; SEQ ID NO: 2132; SEQ ID NO: 2133; SEQ ID NO: 2134; SEQ ID NO: 2135; SEQ ID NO: 2136; SEQ ID NO: 2137; SEQ ID NO: 2138; SEQ ID NO: 2139; SEQ ID NO: 2140; SEQ ID NO: 2141; SEQ ID NO: 2142; SEQ ID NO: 2143; SEQ ID NO: 2144; SEQ ID NO: 2145; SEQ ID NO: 2146; SEQ ID NO: 2147; SEQ ID NO: 2148; SEQ ID NO: 2149; SEQ ID NO: 2150; SEQ ID NO: 2151; SEQ ID NO: 2152; SEQ ID NO: 2153; SEQ ID NO: 2154; SEQ ID NO: 2155; SEQ ID NO: 2156; SEQ ID NO: 2157; SEQ ID NO: 2158; SEQ ID NO: 2159; SEQ ID NO: 2160; SEQ ID NO: 2161; SEQ ID NO: 2162; SEQ ID NO: 2163; SEQ ID NO: 2164; SEQ ID NO: 2165; SEQ ID NO: 2166; SEQ ID NO: 2167; SEQ ID NO: 2168; SEQ ID NO: 2169; SEQ ID NO: 2170; SEQ ID NO: 2171; SEQ ID NO: 2172; SEQ ID NO: 2173; SEQ ID NO: 2174; SEQ ID NO: 2175; SEQ ID NO: 2176; SEQ ID NO: 2177; SEQ ID NO: 2178; SEQ ID NO: 2179; SEQ ID NO: 2180; SEQ ID NO: 2181; SEQ ID NO: 2182; SEQ ID NO: 9600.

[0153] In another embodiment, the H. pylori cytoplasmic polypeptide or a fragment thereof is an H. pylori polypeptide involved in lipid metabolism or a fragment thereof encoded by a nucleic acid having a nucleotide sequence selected from the group consisting of SEQ ID NO: 2183; SEQ ID NO: 2184; SEQ ID NO: 2185; SEQ ID NO: 2186; SEQ ID NO: 2187; SEQ ID NO: 2188; SEQ ID NO: 2189; SEQ ID NO: 2190; SEQ ID NO: 2191; SEQ ID NO: 2192; SEQ ID NO: 2193; SEQ ID NO: 2194; SEQ ID NO: 2195; SEQ ID NO: 2196; SEQ ID NO: 2197; SEQ ID NO: 2198; SEQ ID NO: 2199; SEQ ID NO: 2200; SEQ ID NO: 2201; SEQ ID NO: 2202; SEQ ID NO: 2203; SEQ ID NO: 2204; SEQ ID NO: 2205; SEQ ID NO: 2206; SEQ ID NO: 2207; SEQ ID NO: 2208; SEQ ID NO: 2209; SEQ ID NO: 2210; SEQ ID NO: 2211; SEQ ID NO: 2212; SEQ ID NO: 2213; SEQ ID NO: 2214; SEQ ID NO: 2215; SEQ ID NO: 2216; SEQ ID NO: 2217; SEQ ID NO: 2218; SEQ ID NO: 9601 and SEQ ID NO: 9602.

[0154] In another embodiment, the H. pylori cytoplasmic polypeptide or a fragment thereof is an H. pylori polypeptide involved in mRNA translation and ribosome biogenesis or a fragment thereof encoded by a nucleic acid having a sequence selected from the group consisting of SEQ ID NO: 2219; SEQ ID NO: 2220; SEQ ID NO: 2221; SEQ ID NO: 2222; SEQ ID NO: 2223; SEQ ID NO: 2224; SEQ ID NO: 2225; SEQ ID NO: 2226; SEQ ID NO: 2227; SEQ ID NO: 2228; SEQ ID NO: 2229; SEQ ID NO: 2230; SEQ ID NO: 2231; SEQ ID NO: 2232; SEQ ID NO: 2233; SEQ ID NO: 2234; SEQ ID NO: 2235; SEQ ID NO: 2236; SEQ ID NO: 2237; SEQ ID NO: 2238; SEQ ID NO: 2239; SEQ ID NO: 2240; SEQ ID NO: 2241; SEQ ID NO: 2242; SEQ ID NO: 2243; SEQ ID NO: 2244; SEQ ID NO: 2245; SEQ ID NO: 2246; SEQ ID NO: 2247; SEQ ID NO: 2248; SEQ ID NO: 2249; SEQ ID NO: 2250; SEQ ID NO: 2251; SEQ ID NO: 2252; SEQ ID NO: 2253; SEQ ID NO: 2254; SEQ ID NO: 2255; SEQ ID NO: 2256; SEQ ID NO: 2257; SEQ ID NO: 2258; SEQ ID NO: 2259; SEQ ID NO: 2260; SEQ ID NO: 2261; SEQ ID NO: 2262; SEQ ID NO: 2263; SEQ ID NO: 2264; SEQ ID NO: 2265; SEQ ID NO: 2266; SEQ ID NO: 2267; SEQ ID NO: 2268; SEQ ID NO: 2269; SEQ ID NO: 2270; SEQ ID NO: 2271; SEQ ID NO: 2272; SEQ ID NO: 2273; SEQ ID NO: 2274; SEQ ID NO: 2275; SEQ ID NO: 2276; SEQ ID NO: 2277; SEQ ID NO: 2278; SEQ ID NO: 2279; SEQ ID NO: 2280; SEQ ID NO: 2281; SEQ ID NO: 2282; SEQ ID NO: 2283; SEQ ID NO: 2284; SEQ ID NO: 2285; SEQ ID NO: 2286; SEQ ID NO: 2287; SEQ ID NO: 2288; SEQ ID NO: 2289; SEQ ID NO: 2290; SEQ ID NO: 2291; SEQ ID NO: 2292; SEQ ID NO: 2293; SEQ ID NO: 2294; SEQ ID NO: 2295; SEQ ID NO: 2296; SEQ ID NO: 2297; SEQ ID NO: 2298; SEQ ID NO: 2299; SEQ ID NO: 2300; SEQ ID NO: 2301; SEQ ID NO: 2302; SEQ ID NO: 2303; SEQ ID NO: 2304; SEQ ID NO: 2305; SEQ ID NO: 2306; SEQ ID NO: 2307; SEQ ID NO: 2308; SEQ ID NO: 2309; SEQ ID NO: 2310; SEQ ID NO: 2311; SEQ ID NO: 2312; SEQ ID NO: 2313; SEQ ID NO: 2314; SEQ ID NO: 2315; SEQ ID NO: 2316; SEQ ID NO: 2317; SEQ ID NO: 2318; SEQ ID NO: 2319; SEQ ID NO: 2320; SEQ ID NO: 2321; SEQ ID NO: 2322; SEQ ID NO: 2323; SEQ ID NO: 2324; SEQ ID NO: 2325; SEQ ID NO: 2326; SEQ ID NO: 2327; SEQ ID NO: 2328; SEQ ID NO: 2329; SEQ ID NO: 2330; SEQ ID NO: 2331; SEQ ID NO: 2332; SEQ ID NO: 2333; SEQ ID NO: 2334; SEQ ID NO: 2335; SEQ ID NO: 2336; SEQ ID NO: 2337; SEQ ID NO: 2338; SEQ ID NO: 2339; SEQ ID NO: 2340; SEQ ID NO: 2341; SEQ ID NO: 2342; SEQ ID NO: 2343; SEQ ID NO: 2344; SEQ ID NO: 2345; SEQ ID NO: 2346; SEQ ID NO: 2347; SEQ ID NO: 2348; SEQ ID NO: 2349; SEQ ID NO: 2350; SEQ ID NO: 2351; SEQ ID NO: 2352; SEQ ID NO: 2353; SEQ ID NO: 2354; SEQ ID NO: 2355; SEQ ID NO: 2356; SEQ ID NO: 2357; SEQ ID NO: 2358; SEQ ID NO: 2359; SEQ ID NO: 2360; SEQ ID NO: 2361; SEQ ID NO: 2362; SEQ ID NO: 2363; SEQ ID NO: 2364; SEQ ID NO: 2365; SEQ ID NO: 2366; SEQ ID NO: 2367; SEQ ID NO: 2368; SEQ ID NO: 2369; SEQ ID NO: 2370; SEQ ID NO: 2371; SEQ ID NO: 2372; SEQ ID NO: 2373; SEQ ID NO: 2374; SEQ ID NO: 2375; SEQ ID NO: 2376; SEQ ID NO: 2377; SEQ ID NO: 2378; SEQ ID NO: 2379; SEQ ID NO: 2380; SEQ ID NO: 2381; SEQ ID NO: 2382; SEQ ID NO: 2383; SEQ ID NO: 2384; SEQ ID NO: 2385; SEQ ID NO: 2386; SEQ ID NO: 2387; SEQ ID NO: 2388; SEQ ID NO: 2389; SEQ ID NO: 2390; SEQ ID NO: 2391; SEQ ID NO: 2392; SEQ ID NO: 2393; SEQ ID NO: 2394; SEQ ID NO: 2395; SEQ ID NO: 2396; SEQ ID NO: 2397; SEQ ID NO: 2398; SEQ ID NO: 2399; SEQ ID NO: 2400; SEQ ID NO: 2401; SEQ ID NO: 2402; SEQ ID NO: 2403; SEQ ID NO: 2404; SEQ ID NO: 2405; SEQ ID NO: 2406; SEQ ID NO: 2407; SEQ ID NO: 2408; SEQ ID NO: 2409; SEQ ID NO: 2410; SEQ ID NO: 2411; SEQ ID NO: 2412; SEQ ID NO: 2413; SEQ ID NO: 2414; SEQ ID NO: 2415; SEQ ID NO: 2416; SEQ ID NO: 2417; SEQ ID NO: 2418; SEQ ID NO: 2419; SEQ ID NO: 2420; SEQ ID NO: 2421; SEQ ID NO: 2422; SEQ ID NO: 2423; SEQ ID NO: 2424; SEQ ID NO: 2425; SEQ ID NO: 2426; SEQ ID NO: 2427; SEQ ID NO: 2428; SEQ ID NO: 2429; SEQ ID NO: 2430; SEQ ID NO: 2431; SEQ ID NO: 2432; SEQ ID NO: 2433; SEQ ID NO: 2434; SEQ ID NO: 2435; SEQ ID NO: 2436; SEQ ID NO: 2437; SEQ ID NO: 2438; SEQ ID NO: 9603 and SEQ ID NO: 9604.

[0155] In another embodiment, the H. pylori cytoplasmic polypeptide or a fragment thereof is an H. pylori polypeptide involved in genome replication, transcription, recombination and repair or a fragment thereof encoded by a nucleic acid having a nucleotide sequence selected from the group consisting of SEQ ID NO: 2439; SEQ ID NO: 2440; SEQ ID NO: 2441; SEQ ID NO: 2442; SEQ ID NO: 2443; SEQ ID NO: 2444; SEQ ID NO: 2445; SEQ ID NO: 2446; SEQ ID NO: 2447; SEQ ID NO: 2448; SEQ ID NO: 2449; SEQ ID NO: 2450; SEQ ID NO: 2451; SEQ ID NO: 2452; SEQ ID NO: 2453; SEQ ID NO: 2454; SEQ ID NO: 2455; SEQ ID NO: 2456; SEQ ID NO: 2457; SEQ ID NO: 2458; SEQ ID NO: 2459; SEQ ID NO: 2460; SEQ ID NO: 2461; SEQ ID NO: 2462; SEQ ID NO: 2463; SEQ ID NO: 2464; SEQ ID NO: 2465; SEQ ID NO: 2466; SEQ ID NO: 2467; SEQ ID NO: 2468; SEQ ID NO: 2469; SEQ ID NO: 2470; SEQ ID NO: 2471; SEQ ID NO: 2472; SEQ ID NO: 2473; SEQ ID NO: 2474; SEQ ID NO: 2475; SEQ ID NO: 2476; SEQ ID NO: 2477; SEQ ID NO: 2478; SEQ ID NO: 2479; SEQ ID NO: 2480; SEQ ID NO: 2481; SEQ ID NO: 2482; SEQ ID NO: 2483; SEQ ID NO: 2484; SEQ ID NO: 2485; SEQ ID NO: 2486; SEQ ID NO: 2487; SEQ ID NO: 2488; SEQ ID NO: 2489; SEQ ID NO: 2490; SEQ ID NO: 2491; SEQ ID NO: 2492; SEQ ID NO: 2493; SEQ ID NO: 2494; SEQ ID NO: 2495; SEQ ID NO: 2496; SEQ ID NO: 2497; SEQ ID NO: 2498; SEQ ID NO: 2499; SEQ ID NO: 2500; SEQ ID NO: 2501; SEQ ID NO: 2502; SEQ ID NO: 2503; SEQ ID NO: 2504; SEQ ID NO: 2505; SEQ ID NO: 2506; SEQ ID NO: 2507; SEQ ID NO: 2508; SEQ ID NO: 2509; SEQ ID NO: 2510; SEQ ID NO: 2511; SEQ ID NO: 2512; SEQ ID NO: 2513; SEQ ID NO: 2514; SEQ ID NO: 2515; SEQ ID NO: 2516; SEQ ID NO: 2517; SEQ ID NO: 2518; SEQ ID NO: 2519; SEQ ID NO: 2520; SEQ ID NO: 2521; SEQ ID NO: 2522; SEQ ID NO: 2523; SEQ ID NO: 2524; SEQ ID NO: 2525; SEQ ID NO: 2526; SEQ ID NO: 2527; SEQ ID NO: 2528; SEQ ID NO: 2529; SEQ ID NO: 2530; SEQ ID NO: 2531; SEQ ID NO: 2532; SEQ ID NO: 2533; SEQ ID NO: 2534; SEQ ID NO: 2535; SEQ ID NO: 2536; SEQ ID NO: 2537; SEQ ID NO: 2538; SEQ ID NO: 2539; SEQ ID NO: 2540; SEQ ID NO: 2541; SEQ ID NO: 2542; SEQ ID NO: 2543; SEQ ID NO: 2544; SEQ ID NO: 2545; SEQ ID NO: 2546; SEQ ID NO: 2547; SEQ ID NO: 2548; SEQ ID NO: 2549; SEQ ID NO: 2550; SEQ ID NO: 2551; SEQ ID NO: 2552; SEQ ID NO: 2553; SEQ ID NO: 2554; SEQ ID NO: 2555; SEQ ID NO: 2556; SEQ ID NO: 2557; SEQ ID NO: 2558; SEQ ID NO: 2559; SEQ ID NO: 2560; SEQ ID NO: 2561; SEQ ID NO: 2562; SEQ ID NO: 2563; SEQ ID NO: 2564; SEQ ID NO: 2565; SEQ ID NO: 2566; SEQ ID NO: 2567; SEQ ID NO: 2568; SEQ ID NO: 2569; SEQ ID NO: 2570; SEQ ID NO: 2571; SEQ ID NO: 2572; SEQ ID NO: 2573; SEQ ID NO: 2574; SEQ ID NO: 2575; SEQ ID NO: 2576; SEQ ID NO: 2577; SEQ ID NO: 2578; SEQ ID NO: 2579; SEQ ID NO: 2580; SEQ ID NO: 2581; SEQ ID NO: 2582; SEQ ID NO: 2583; SEQ ID NO: 2584; SEQ ID NO: 2585; SEQ ID NO: 2586; SEQ ID NO: 2587; SEQ ID NO: 2588; SEQ ID NO: 2589; SEQ ID NO: 2590; SEQ ID NO: 2591; SEQ ID NO: 2592; SEQ ID NO: 2593; SEQ ID NO: 2594; SEQ ID NO: 2595; SEQ ID NO: 2596; SEQ ID NO: 2597; SEQ ID NO: 2598; SEQ ID NO: 2599; SEQ ID NO: 2600; SEQ ID NO: 2601; SEQ ID NO: 2602; SEQ ID NO: 2603; SEQ ID NO: 2604; SEQ ID NO: 2605; SEQ ID NO: 2606; SEQ ID NO: 2607; SEQ ID NO: 2608; SEQ ID NO: 2609; SEQ ID NO: 2610; SEQ ID NO: 2611; SEQ ID NO: 2612; SEQ ID NO: 2613; SEQ ID NO: 2614; SEQ ID NO: 2615; SEQ ID NO: 2616; SEQ ID NO: 2617; SEQ ID NO: 2618; SEQ ID NO: 2619; SEQ ID NO: 2620; SEQ ID NO: 2621; SEQ ID NO: 2622; SEQ ID NO: 2623; SEQ ID NO: 2624; SEQ ID NO: 2625; SEQ ID NO: 2626; SEQ ID NO: 2627; SEQ ID NO: 2628; SEQ ID NO: 2629; SEQ ID NO: 2630; SEQ ID NO: 2631; SEQ ID NO: 2632; SEQ ID NO: 2633; SEQ ID NO: 2634; SEQ ID NO: 2635; SEQ ID NO: 2636; SEQ ID NO: 2637; SEQ ID NO: 2638; SEQ ID NO: 2639; SEQ ID NO: 2640; SEQ ID NO: 2641; SEQ ID NO: 2642; SEQ ID NO: 2643; SEQ ID NO: 2644; SEQ ID NO: 2645; SEQ ID NO: 2646; SEQ ID NO: 2647; SEQ ID NO: 2648; SEQ ID NO: 2649; SEQ ID NO: 2650; SEQ ID NO: 2651; SEQ ID NO: 2652; SEQ ID NO: 2653; SEQ ID NO: 2654; SEQ ID NO: 2655; SEQ ID NO: 2656; SEQ ID NO: 2657; SEQ ID NO: 2658; SEQ ID NO: 2659; SEQ ID NO: 2660; SEQ ID NO: 2661; SEQ ID NO: 2662; SEQ ID NO: 2663; SEQ ID NO: 2664; SEQ ID NO: 2665; SEQ ID NO: 2666; SEQ ID NO: 2667; SEQ ID NO: 2668; SEQ ID NO: 2669; SEQ ID NO: 2670; SEQ ID NO: 2671; SEQ ID NO: 2672; SEQ ID NO: 2673; SEQ ID NO: 2674; SEQ ID NO: 2675; SEQ ID NO: 2676; SEQ ID NO: 2677; SEQ ID NO: 2678; SEQ ID NO: 2679; SEQ ID NO: 2680; SEQ ID NO: 2681; SEQ ID NO: 2682; SEQ ID NO: 2683; SEQ ID NO: 2684; SEQ ID NO: 2685; SEQ ID NO: 2686; SEQ ID NO: 2687; SEQ ID NO: 2688; SEQ ID NO: 2689; SEQ ID NO: 2690; SEQ ID NO: 2691; SEQ ID NO: 2692; SEQ ID NO: 2693; SEQ ID NO: 2694; SEQ ID NO: 2695; SEQ ID NO: 2696; SEQ ID NO: 2697; SEQ ID NO: 2698; SEQ ID NO: 2699; SEQ ID NO: 2700; SEQ ID NO: 2701; SEQ ID NO: 2702; SEQ ID NO: 2703; SEQ ID NO: 2704; SEQ ID NO: 2705; SEQ ID NO: 2706; SEQ ID NO: 2707; SEQ ID NO: 2708; SEQ ID NO: 2709; SEQ ID NO: 2710; SEQ ID NO: 2711; SEQ ID NO: 2712; SEQ ID NO: 2713; SEQ ID NO: 2714; SEQ ID NO: 2715; SEQ ID NO: 2716; SEQ ID NO: 2717; SEQ ID NO: 2718; SEQ ID NO: 2719; SEQ ID NO: 2720; SEQ ID NO: 2721; SEQ ID NO: 2722; SEQ ID NO: 2723; SEQ ID NO: 2724; SEQ ID NO: 2725; SEQ ID NO: 2726; SEQ ID NO: 2727; SEQ ID NO: 2728; SEQ ID NO: 2729; SEQ ID NO: 2730; SEQ ID NO: 2731; SEQ ID NO: 2732; SEQ ID NO: 2733; SEQ ID NO: 2734; SEQ ID NO: 2735; SEQ ID NO: 2736; SEQ ID NO: 2737; SEQ ID NO: 2738; SEQ ID NO: 2739; SEQ ID NO: 2740; SEQ ID NO: 2741; SEQ ID NO: 2742; SEQ ID NO: 2743; SEQ ID NO: 2744; SEQ ID NO: 2745; SEQ ID NO: 2746; SEQ ID NO: 2747; SEQ ID NO: 2748; SEQ ID NO: 2749; SEQ ID NO: 2750; SEQ ID NO: 2751; SEQ ID NO: 2752; SEQ ID NO: 2753; SEQ ID NO: 2754; SEQ ID NO: 2755; SEQ ID NO: 2756; SEQ ID NO: 2757; SEQ ID NO: 2758; SEQ ID NO: 2759; SEQ ID NO: 2760; SEQ ID NO: 2761; SEQ ID NO: 2762; SEQ ID NO: 2763; SEQ ID NO: 2764; SEQ ID NO: 2765; SEQ ID NO: 2766; SEQ ID NO: 2767; SEQ ID NO: 2768; SEQ ID NO: 2769; SEQ ID NO: 2770; SEQ ID NO: 2771; SEQ ID NO: 2772; SEQ ID NO: 2773; SEQ ID NO: 2774; SEQ ID NO: 2775; SEQ ID NO: 2776; SEQ ID NO: 2777; SEQ ID NO: 2778; SEQ ID NO: 2779; SEQ ID NO: 2780; SEQ ID NO: 2781; SEQ ID NO: 2782; SEQ ID NO: 2783; SEQ ID NO: 2784; SEQ ID NO: 2785; SEQ ID NO: 2786; SEQ ID NO: 2787; SEQ ID NO: 2788; SEQ ID NO: 2789; SEQ ID NO: 2790; SEQ ID NO: 2791; SEQ ID NO: 2792; SEQ ID NO: 2793; SEQ ID NO: 2794; SEQ ID NO: 2795; SEQ ID NO: 2796; SEQ ID NO: 2797; SEQ ID NO: 2798; SEQ ID NO: 2799; SEQ ID NO: 2800; SEQ ID NO: 2801; SEQ ID NO: 2802; SEQ ID NO: 2803; SEQ ID NO: 2804; SEQ ID NO: 2805; SEQ ID NO: 2806; SEQ ID NO: 2807; SEQ ID NO: 9605; SEQ ID NO: 9606; SEQ ID NO: 9607; SEQ ID NO: 9608.

[0156] In another embodiment, the H. pylori cytoplasmic polypeptide or a fragment thereof is an H. pylori polypeptide involved in secretion and adhesion or a fragment thereof encoded by a nucleic acid having a sequence selected from the group consisting of SEQ ID NO: 2808; SEQ ID NO: 2809; SEQ ID NO: 2810; SEQ ID NO: 2811; SEQ ID NO: 2812; SEQ ID NO: 2813; SEQ ID NO: 2814; SEQ ID NO: 2815; SEQ ID NO: 2816; SEQ ID NO: 2817; SEQ ID NO: 2818; SEQ ID NO: 2819; SEQ ID NO: 2820; SEQ ID NO: 2821; SEQ ID NO: 2822; SEQ ID NO: 2823; SEQ ID NO: 2824.

[0157] In another embodiment, the H. pylori cytoplasmic polypeptide or a fragment thereof is an H. pylori polypeptide involved in outer membrane and cell wall biogenesis or a fragment thereof encoded by a nucleic acid having a sequence selected from the group consisting of SEQ ID NO: 2825; SEQ ID NO: 2826; SEQ ID NO: 2827; SEQ ID NO: 2828; SEQ ID NO: 2829; SEQ ID NO: 2830; SEQ ID NO: 2831; SEQ ID NO: 2832; SEQ ID NO: 2833; SEQ ID NO: 2834; SEQ ID NO: 2835; SEQ ID NO: 2836; SEQ ID NO: 2837; SEQ ID NO: 2838; SEQ ID NO: 2839; SEQ ID NO: 2840; SEQ ID NO: 2841; SEQ ID NO: 2842; SEQ ID NO: 2843; SEQ ID NO: 2844; SEQ ID NO: 2845; SEQ ID NO: 2846; SEQ ID NO: 2847; SEQ ID NO: 2848; SEQ ID NO: 2849; SEQ ID NO: 2850; SEQ ID NO: 2851; SEQ ID NO: 2852; SEQ ID NO: 2853; SEQ ID NO: 2854; SEQ ID NO: 2855; SEQ ID NO: 2856; SEQ ID NO: 2857; SEQ ID NO: 2858; SEQ ID NO: 2859; SEQ ID NO: 2860; SEQ ID NO: 2861; SEQ ID NO: 2862; SEQ ID NO: 2863; SEQ ID NO: 2864; SEQ ID NO: 2865; SEQ ID NO: 2866; SEQ ID NO: 2867; SEQ ID NO: 2868; SEQ ID NO: 2869; SEQ ID NO: 2870; SEQ ID NO: 2871; SEQ ID NO: 2872; SEQ ID NO: 2873; SEQ ID NO: 2874; SEQ ID NO: 2875; SEQ ID NO: 2876; SEQ ID NO: 2877; SEQ ID NO: 9609; and SEQ ID NO: 9610.

[0158] In another embodiment, the H. pylori cytoplasmic polypeptide or a fragment thereof is an H. pylori polypeptide involved in protein folding and stabilization or a fragment thereof encoded by a nucleic acid having a sequence selected from the group consisting of SEQ ID NO:2878; SEQ ID NO: 2879; SEQ ID NO: 2880; SEQ ID NO: 2881; SEQ ID NO: 2882; SEQ ID NO: 2883; SEQ ID NO: 2884; SEQ ID NO: 2885; SEQ ID NO: 2886; SEQ ID NO: 2887; SEQ ID NO: 2888; SEQ ID NO: 2889; SEQ ID NO: 2890; SEQ ID NO: 2891; SEQ ID NO: 2892; SEQ ID NO: 2893; SEQ ID NO: 2894; SEQ ID NO: 2895; SEQ ID NO: 2896; SEQ ID NO: 2897; SEQ ID NO: 2898; SEQ ID NO: 2899; SEQ ID NO: 2900; SEQ ID NO: 2901; SEQ ID NO: 2902; SEQ ID NO: 2903; SEQ ID NO: 2904; SEQ ID NO: 2905; SEQ ID NO: 2906; SEQ ID NO: 2907; SEQ ID NO: 2908; SEQ ID NO: 2909; SEQ ID NO: 2910; SEQ ID NO: 2911; SEQ ID NO: 2912; SEQ ID NO: 2913; SEQ ID NO: 2914; SEQ ID NO: 2915; SEQ ID NO: 2916; SEQ ID NO: 2917; SEQ ID NO: 2918; SEQ ID NO: 9611 and SEQ ID NO: 9612.

[0159] Particularly preferred is an isolated H. pylori secreted polypeptide or a fragment thereof, wherein the polypeptide has an amino acid sequence selected from the group consisting of SEQ ID NO: 8778; SEQ ID NO: 79; SEQ ID NO: 8780; SEQ ID NO: 8781; SEQ ID NO: 8782; SEQ ID NO: 8783; SEQ ID NO: 8784; SEQ ID NO: 8785; SEQ ID NO: 8786; SEQ ID NO: 8787; SEQ ID NO: 8788; SEQ ID NO: 8789; SEQ ID NO: 8790; SEQ ID NO: 8791; SEQ ID NO: 8792; SEQ ID NO: 8793; SEQ ID NO: 8794; SEQ ID NO: 8795; SEQ ID NO: 8796; SEQ ID NO: 8797; SEQ ID NO: 8798; SEQ ID NO: 8799; SEQ ID NO: 8800; SEQ ID NO: 8801; SEQ ID NO: 8802; SEQ ID NO: 8803; SEQ ID NO: 8804; SEQ ID NO: 8805; SEQ ID NO: 8806; SEQ ID NO: 8807; SEQ ID NO: 8808; SEQ ID NO: 8809; SEQ ID NO: 8810; SEQ ID NO: 8811; SEQ ID NO: 8812; SEQ ID NO: 8813; SEQ ID NO: 8814; SEQ ID NO: 8815; SEQ ID NO: 8816; SEQ ID NO: 8817; SEQ ID NO: 8818; SEQ ID NO: 8819; SEQ ID NO: 8820; SEQ ID NO: 8821; SEQ ID NO: 8822; SEQ ID NO: 8823; SEQ ID NO: 8824; SEQ ID NO: 8825; SEQ ID NO: 8826; SEQ ID NO: 8827; SEQ ID NO: 8828; SEQ ID NO: 8829; SEQ ID NO: 8830; SEQ ID NO: 8831; SEQ ID NO: 8832; SEQ ID NO: 8833; SEQ ID NO: 8834; SEQ ID NO: 8835; SEQ ID NO: 8836; SEQ ID NO: 8837; SEQ ID NO: 8838; SEQ ID NO: 8839; SEQ ID NO: 8840; SEQ ID NO: 8841; SEQ ID NO:8842; SEQ ID NO:8843; SEQ ID NO:8844; SEQ ID NO:8845; SEQ ID NO: 8846; SEQ ID NO: 8847; SEQ ID NO: 8848; SEQ ID NO: 8849; SEQ ID NO: 8850; SEQ ID NO: 8851; SEQ ID NO: 8852; SEQ ID NO: 8853; SEQ ID NO: 8854; SEQ ID NO: 8855; SEQ ID NO: 8856; SEQ ID NO: 8857; SEQ ID NO: 8858; SEQ ID NO: 8859; SEQ ID NO: 8860; SEQ ID NO: 8861; SEQ ID NO: 8862; SEQ ID NO: 8863; SEQ ID NO: 8864; SEQ ID NO: 8865; SEQ ID NO: 8866; SEQ ID NO: 8867; SEQ ID NO: 8868; SEQ ID NO: 8869; SEQ ID NO: 8870; SEQ ID NO: 8871; SEQ ID NO: 8872; SEQ ID NO: 8873; SEQ ID NO: 8874; SEQ ID NO: 8875; SEQ ID NO: 8876; SEQ ID NO: 8877; SEQ ID NO: 8878; SEQ ID NO: 8879; SEQ ID NO: 8880; SEQ ID NO: 8881; SEQ ID NO: 8882; SEQ ID NO: 8883; SEQ ID NO: 8884; SEQ ID NO: 8885; SEQ ID NO: 8886; SEQ ID NO: 8887; SEQ ID NO: 8888; SEQ ID NO: 8889; SEQ ID NO: 8890; SEQ ID NO: 8891; SEQ ID NO: 8892; SEQ ID NO: 8893; SEQ ID NO: 8894; SEQ ID NO: 8895; SEQ ID NO: 8896; SEQ ID NO: 8897; SEQ ID NO: 8898; SEQ ID NO: 8899; SEQ ID NO: 8900; SEQ ID NO: 8901; SEQ ID NO: 8902; SEQ ID NO: 8903; SEQ ID NO: 8904; SEQ ID NO: 8905; SEQ ID NO: 8906; SEQ ID NO: 8907; SEQ ID NO: 8908; SEQ ID NO: 8909; SEQ ID NO: 8910; SEQ ID NO: 8911; SEQ ID NO: 8912; SEQ ID NO: 8913; SEQ ID NO: 8914; SEQ ID NO: 8915; SEQ ID NO: 8916; SEQ ID NO: 8917; SEQ ID NO: 8918; SEQ ID NO: 8919; SEQ ID NO: 8920; SEQ ID NO: 8921; SEQ ID NO: 8922; SEQ ID NO: 8923; SEQ ID NO: 8924; SEQ ID NO: 8925; SEQ ID NO: 8926; SEQ ID NO: 8927; SEQ ID NO: 8928; SEQ ID NO: 8929; SEQ ID NO: 8930; SEQ ID NO: 8931; SEQ ID NO: 8932; SEQ ID NO: 8933; SEQ ID NO: 8934; SEQ ID NO: 8935; SEQ ID NO: 8936; SEQ ID NO: 8937; SEQ ID NO: 8938; SEQ ID NO: 8939; SEQ ID NO: 8940; SEQ ID NO: 8941; SEQ ID NO: 8942; SEQ ID NO: 8943; SEQ ID NO: 8944; SEQ ID NO: 8945; SEQ ID NO: 8946; SEQ ID NO: 8947; SEQ ID NO: 8948; SEQ ID NO: 8949; SEQ ID NO: 8950; SEQ ID NO: 8951; SEQ ID NO: 8952; SEQ ID NO: 8953; SEQ ID NO: 8954; SEQ ID NO: 8955; SEQ ID NO: 8956; SEQ ID NO: 8957; SEQ ID NO: 8958; SEQ ID NO: 8959; SEQ ID NO: 8960; SEQ ID NO: 8961; SEQ ID NO: 8962; SEQ ID NO: 8963; SEQ ID NO: 8964; SEQ ID NO: 8965; SEQ ID NO: 8966; SEQ ID NO: 8967; SEQ ID NO: 8968; SEQ ID NO: 8969; SEQ ID NO: 8970; SEQ ID NO: 8971; SEQ ID NO: 8972; SEQ ID NO: 8973; SEQ ID NO: 8974; SEQ ID NO: 8975; SEQ ID NO: 8976; SEQ ID NO: 8977; SEQ ID NO: 8978; SEQ ID NO: 8979; SEQ ID NO: 8980; SEQ ID NO: 8981; SEQ ID NO: 8982; SEQ ID NO: 8983; SEQ ID NO: 8984; SEQ ID NO: 8985; SEQ ID NO: 8986; SEQ ID NO: 8987; SEQ ID NO: 8988; SEQ ID NO: 8989; SEQ ID NO: 8990; SEQ ID NO: 8991; SEQ ID NO: 8992; SEQ ID NO: 8993; SEQ ID NO: 8994; SEQ ID NO: 8995; SEQ ID NO: 8996; SEQ ID NO: 8997; SEQ ID NO: 8998; SEQ ID NO: 8999; SEQ ID NO: 9000; SEQ ID NO: 9001; SEQ ID NO: 9002; SEQ ID NO: 9003; SEQ ID NO: 9004; SEQ ID NO: 9005; SEQ ID NO: 9006; SEQ ID NO: 9007; SEQ ID NO: 9008; SEQ ID NO: 9009; SEQ ID NO: 9010; SEQ ID NO: 9011; SEQ ID NO: 9012; SEQ ID NO: 9013; SEQ ID NO: 9014; SEQ ID NO: 9015; SEQ ID NO: 9016; SEQ ID NO: 9017; SEQ ID NO: 9018; SEQ ID NO: 9019; SEQ ID NO: 9020; SEQ ID NO: 9021; SEQ ID NO: 9022; SEQ ID NO: 9023; SEQ ID NO: 9024; SEQ ID NO: 9025; SEQ ID NO: 9026; SEQ ID NO: 9027; SEQ ID NO: 9028; SEQ ID NO: 9029; SEQ ID NO: 9030; SEQ ID NO: 9031; SEQ ID NO: 9032; SEQ ID NO: 9033; SEQ ID NO: 9034; SEQ ID NO: 9035; SEQ ID NO: 9036; SEQ ID NO: 9037; SEQ ID NO: 9038; SEQ ID NO: 9039; SEQ ID NO: 9040; SEQ ID NO: 9041; SEQ ID NO: 9042; SEQ ID NO: 9043; SEQ ID NO: 9044; SEQ ID NO: 9045; SEQ ID NO: 9046; SEQ ID NO: 9047; SEQ ID NO: 9048; SEQ ID NO: 9049; SEQ ID NO: 9050; SEQ ID NO: 9051; SEQ ID NO: 9052; SEQ ID NO: 9053; SEQ ID NO: 9054; SEQ ID NO: 9055; SEQ ID NO: 9056; SEQ ID NO: 9057; SEQ ID NO: 9058; SEQ ID NO: 9059; SEQ ID NO: 9060; SEQ ID NO: 9061; SEQ ID NO: 9062; SEQ ID NO: 9063; SEQ ID NO: 9064; SEQ ID NO: 9065; SEQ ID NO: 9066; SEQ ID NO: 9067; SEQ ID NO: 9068; SEQ ID NO: 9069; SEQ ID NO: 9070; SEQ ID NO: 9071; SEQ ID NO: 9072; SEQ ID NO: 9073; SEQ ID NO: 9074; SEQ ID NO: 9075; SEQ ID NO: 9076; SEQ ID NO: 9077; SEQ ID NO: 9078; SEQ ID NO: 9079; SEQ ID NO: 9080; SEQ ID NO: 9081; SEQ ID NO: 9082; SEQ ID NO: 9083; SEQ ID NO: 9084; SEQ ID NO: 9085; SEQ ID NO: 9086; SEQ ID NO: 9087; SEQ ID NO: 9088; SEQ ID NO: 9089; SEQ ID NO: 9090; SEQ ID NO: 9091; SEQ ID NO: 9092; SEQ ID NO: 9093; SEQ ID NO: 9094; SEQ ID NO: 9095; SEQ ID NO: 9096; SEQ ID NO: 9097; SEQ ID NO: 9098; SEQ ID NO: 9099; SEQ ID NO: 9100; SEQ ID NO: 9101; SEQ ID NO: 9102; SEQ ID NO: 9103; SEQ ID NO: 9104; SEQ ID NO: 9105; SEQ ID NO: 9106; SEQ ID NO: 9107; SEQ ID NO: 9108; SEQ ID NO: 9109; SEQ ID NO: 9110; SEQ ID NO: 9111; SEQ ID NO: 9112; SEQ ID NO: 9113; SEQ ID NO: 9114; SEQ ID NO: 9115; SEQ ID NO: 9116; SEQ ID NO: 9117; SEQ ID NO: 9118; SEQ ID NO: 9119; SEQ ID NO: 9120; SEQ ID NO: 9121; SEQ ID NO: 9122; SEQ ID NO: 9123; SEQ ID NO: 9124; SEQ ID NO: 9125; SEQ ID NO: 9126; SEQ ID NO: 9127; SEQ ID NO: 9128; SEQ ID NO: 9129; SEQ ID NO: 9130; SEQ ID NO: 9131; SEQ ID NO: 9132; SEQ ID NO: 9133; SEQ ID NO: 9134; SEQ ID NO: 9135; SEQ ID NO: 9136; SEQ ID NO: 9137; SEQ ID NO: 9138; SEQ ID NO: 9139; SEQ ID NO: 9140; SEQ ID NO: 9141; SEQ ID NO: 9142; SEQ ID NO: 9143; SEQ ID NO: 9144; SEQ ID NO: 9145; SEQ ID NO: 9146; SEQ ID NO: 9147; SEQ ID NO: 9148; SEQ ID NO: 9149; SEQ ID NO: 9150; SEQ ID NO: 9734; SEQ ID NO: 9735; SEQ ID NO: 9736 and SEQ ID NO: 9737.

[0160] In one embodiment, the H. pylori secreted polypeptide or a fragment thereof is a H. pylori periplasmic polypeptide or a fragment thereof having an amino acid sequence selected from the group consisting of SEQ ID NO: 8778; SEQ ID NO: 8779 and SEQ ID NO: 8780.

[0161] In a further embodiment, the H. pylori secreted polypeptide or a fragment thereof is a H. pylori polypeptide or a fragment thereof involved in secretion and adhesion having an amino acid sequence selected from the group consisting of SEQ ID NO: 8781; SEQ ID NO: 8782; SEQ ID NO: 8783; SEQ ID NO: 8784; SEQ ID NO: 8785; SEQ ID NO: 8786; SEQ ID NO: 8787; SEQ ID NO: 8788 and SEQ ID NO: 9734.

[0162] In a further embodiment, the H. pylori secreted polypeptide or a fragment thereof is a H. pylori chaperone polypeptide or a fragment thereof having an amino acid sequence selected from the group consisting of SEQ ID NO: 8789; SEQ ID NO: 8790; SEQ ID NO: 8791 and SEQ ID NO: 8792.

[0163] Particularly preferred is an isolated H. pylori secreted polypeptide or a fragment thereof, wherein the polypeptide is encoded by a nucleic acid sequence selected from the group consisting of SEQ ID NO: 4016; SEQ ID NO: 4017; SEQ ID NO: 4018; SEQ ID NO: 4019; SEQ ID NO: 4020; SEQ ID NO: 4021; SEQ ID NO: 4022; SEQ ID NO: 4023; SEQ ID NO: 4024; SEQ ID NO: 4025; SEQ ID NO: 4026; SEQ ID NO: 4027; SEQ ID NO: 4028; SEQ ID NO: 4029; SEQ ID NO: 4030; SEQ ID NO: 4031; SEQ ID NO: 4032; SEQ ID NO: 4033; SEQ ID NO: 4034; SEQ ID NO: 4035; SEQ ID NO: 4036; SEQ ID NO: 4037; SEQ ID NO: 4038; SEQ ID NO: 4039; SEQ ID NO: 4040; SEQ ID NO: 4041; SEQ ID NO: 4042; SEQ ID NO: 4043; SEQ ID NO: 4044; SEQ ID NO: 4045; SEQ ID NO: 4046; SEQ ID NO: 4047; SEQ ID NO: 4048; SEQ ID NO: 4049; SEQ ID NO: 4050; SEQ ID NO: 4051; SEQ ID NO: 4052; SEQ ID NO: 4053; SEQ ID NO: 4054; SEQ ID NO: 4055; SEQ ID NO: 4056; SEQ ID NO: 4057; SEQ ID NO: 4058; SEQ ID NO: 4059; SEQ ID NO: 4060; SEQ ID NO: 4061; SEQ ID NO: 4062; SEQ ID NO: 4063; SEQ ID NO: 4064; SEQ ID NO: 4065; SEQ ID NO: 4066; SEQ ID NO: 4067; SEQ ID NO: 4068; SEQ ID NO: 4069; SEQ ID NO: 4070; SEQ ID NO: 4071; SEQ ID NO: 4072; SEQ ID NO: 4073; SEQ ID NO: 4074; SEQ ID NO: 4075; SEQ ID NO: 4076; SEQ ID NO: 4077; SEQ ID NO: 4078; SEQ ID NO: 4079; SEQ ID NO: 4080; SEQ ID NO: 4081; SEQ ID NO: 4082; SEQ ID NO: 4083; SEQ ID NO: 4084; SEQ ID NO: 4085; SEQ ID NO: 4086; SEQ ID NO: 4087; SEQ ID NO: 4088; SEQ ID NO: 4089; SEQ ID NO: 4090; SEQ ID NO: 4091; SEQ ID NO: 4092; SEQ ID NO: 4093; SEQ ID NO: 4094; SEQ ID NO: 4095; SEQ ID NO: 4096; SEQ ID NO: 4097; SEQ ID NO: 4098; SEQ ID NO: 4099; SEQ ID NO: 4100; SEQ ID NO: 4101; SEQ ID NO: 4102; SEQ ID NO: 4103; SEQ ID NO: 4104; SEQ ID NO: 4105; SEQ ID NO: 4106; SEQ ID NO: 4107; SEQ ID NO: 4108; SEQ ID NO: 4109; SEQ ID NO: 4110; SEQ ID NO: 4111; SEQ ID NO: 4112; SEQ ID NO: 4113; SEQ ID NO: 4114; SEQ ID NO: 4115; SEQ ID NO: 4116; SEQ ID NO: 4117; SEQ ID NO: 4118; SEQ ID NO: 4119; SEQ ID NO: 4120; SEQ ID NO: 4121; SEQ ID NO: 4122; SEQ ID NO: 4123; SEQ ID NO: 4124; SEQ ID NO: 4125; SEQ ID NO: 4126; SEQ ID NO: 4127; SEQ ID NO: 4128; SEQ ID NO: 4129; SEQ ID NO: 4130; SEQ ID NO: 4131; SEQ ID NO: 4132; SEQ ID NO: 4133; SEQ ID NO: 4134; SEQ ID NO: 4135; SEQ ID NO: 4136; SEQ ID NO: 4137; SEQ ID NO: 4138; SEQ ID NO: 4139; SEQ ID NO: 4140; SEQ ID NO: 4141; SEQ ID NO: 4142; SEQ ID NO: 4143; SEQ ID NO: 4144; SEQ ID NO: 4145; SEQ ID NO: 4146; SEQ ID NO: 4147; SEQ ID NO: 4148; SEQ ID NO: 4149; SEQ ID NO: 4150; SEQ ID NO: 4151; SEQ ID NO: 4152; SEQ ID NO: 4153; SEQ ID NO: 4154; SEQ ID NO: 4155; SEQ ID NO: 4156; SEQ ID NO: 4157; SEQ ID NO: 4158; SEQ ID NO: 4159; SEQ ID NO: 4160; SEQ ID NO: 4161; SEQ ID NO: 4162; SEQ ID NO: 4163; SEQ ID NO: 4164; SEQ ID NO: 4165; SEQ ID NO: 4166; SEQ ID NO: 4167; SEQ ID NO: 4168; SEQ ID NO: 4169; SEQ ID NO: 4170; SEQ ID NO: 4171; SEQ ID NO: 4172; SEQ ID NO: 4173; SEQ ID NO: 4174; SEQ ID NO: 4175; SEQ ID NO: 4176; SEQ ID NO: 4177; SEQ ID NO: 4178; SEQ ID NO: 4179; SEQ ID NO: 4180; SEQ ID NO: 4181; SEQ ID NO: 4182; SEQ ID NO: 4183; SEQ ID NO: 4184; SEQ ID NO: 4185; SEQ ID NO: 4186; SEQ ID NO: 4187; SEQ ID NO: 4188; SEQ ID NO: 4189; SEQ ID NO: 4190; SEQ ID NO: 4191; SEQ ID NO: 4192; SEQ ID NO: 4193; SEQ ID NO: 4194; SEQ ID NO: 4195; SEQ ID NO: 4196; SEQ ID NO: 4197; SEQ ID NO: 4198; SEQ ID NO: 4199; SEQ ID NO: 4200; SEQ ID NO: 4201; SEQ ID NO: 4202; SEQ ID NO: 4203; SEQ ID NO: 4204; SEQ ID NO: 4205; SEQ ID NO: 4206; SEQ ID NO: 4207; SEQ ID NO: 4208; SEQ ID NO: 4209; SEQ ID NO: 4210; SEQ ID NO: 4211; SEQ ID NO: 4212; SEQ ID NO: 4213; SEQ ID NO: 4214; SEQ ID NO: 4215; SEQ ID NO: 4216; SEQ ID NO: 4217; SEQ ID NO: 4218; SEQ ID NO: 4219; SEQ ID NO: 4220; SEQ ID NO: 4221; SEQ ID NO: 4222; SEQ ID NO: 4223; SEQ ID NO: 4224; SEQ ID NO: 4225; SEQ ID NO: 4226; SEQ ID NO: 4227; SEQ ID NO: 4228; SEQ ID NO: 4229; SEQ ID NO: 4230; SEQ ID NO: 4231; SEQ ID NO: 4232; SEQ ID NO: 4233; SEQ ID NO: 4234; SEQ ID NO: 4235; SEQ ID NO: 4236; SEQ ID NO: 4237; SEQ ID NO: 4238; SEQ ID NO: 4239; SEQ ID NO: 4240; SEQ ID NO: 4241; SEQ ID NO: 4242; SEQ ID NO: 4243; SEQ ID NO: 4244; SEQ ID NO: 4245; SEQ ID NO: 4246; SEQ ID NO: 4247; SEQ ID NO: 4248; SEQ ID NO: 4249; SEQ ID NO: 4250; SEQ ID NO: 4251; SEQ ID NO: 4252; SEQ ID NO: 4253; SEQ ID NO: 4254; SEQ ID NO: 4255; SEQ ID NO: 4256; SEQ ID NO: 4257; SEQ ID NO: 4258; SEQ ID NO: 4259; SEQ ID NO: 4260; SEQ ID NO: 4261; SEQ ID NO: 4262; SEQ ID NO: 4263; SEQ ID NO: 4264; SEQ ID NO: 4265; SEQ ID NO: 4266; SEQ ID NO: 4267; SEQ ID NO: 4268; SEQ ID NO: 4269; SEQ ID NO: 4270; SEQ ID NO: 4271; SEQ ID NO: 4272; SEQ ID NO: 4273; SEQ ID NO: 4274; SEQ ID NO: 4275; SEQ ID NO: 4276; SEQ ID NO: 4277; SEQ ID NO: 4278; SEQ ID NO: 4279; SEQ ID NO: 4280; SEQ ID NO: 4281; SEQ ID NO: 4282; SEQ ID NO: 4283; SEQ ID NO: 4284; SEQ ID NO: 4285; SEQ ID NO: 4286; SEQ ID NO: 4287; SEQ ID NO: 4288; SEQ ID NO: 4289; SEQ ID NO: 4290; SEQ ID NO: 4291; SEQ ID NO: 4292; SEQ ID NO: 4293; SEQ ID NO: 4294; SEQ ID NO: 4295; SEQ ID NO: 4296; SEQ ID NO: 4297; SEQ ID NO: 4298; SEQ ID NO: 4299; SEQ ID NO: 4300; SEQ ID NO: 4301; SEQ ID NO: 4302; SEQ ID NO: 4303; SEQ ID NO: 4304; SEQ ID NO: 4305; SEQ ID NO: 4306; SEQ ID NO: 4307; SEQ ID NO: 4308; SEQ ID NO: 4309; SEQ ID NO: 4310; SEQ ID NO: 4311; SEQ ID NO: 4312; SEQ ID NO: 4313; SEQ ID NO: 4314; SEQ ID NO: 4315; SEQ ID NO: 4316; SEQ ID NO: 4317; SEQ ID NO: 4318; SEQ ID NO: 4319; SEQ ID NO: 4320; SEQ ID NO: 4321; SEQ ID NO: 4322; SEQ ID NO: 4323; SEQ ID NO: 4324; SEQ ID NO: 4325; SEQ ID NO: 4326; SEQ ID NO: 4327; SEQ ID NO: 4328; SEQ ID NO: 4329; SEQ ID NO: 4330; SEQ ID NO: 4331; SEQ ID NO: 4332; SEQ ID NO: 4333; SEQ ID NO: 4334; SEQ ID NO: 4335; SEQ ID NO: 4336; SEQ ID NO: 4337; SEQ ID NO: 4388; SEQ ID NO: 9622; SEQ ID NO: 9623; SEQ ID NO: 9624 and SEQ ID NO: 9625.

[0164] In one embodiment, the H. pylori secreted polypeptide or a fragment thereof is a H. pylori periplasmic polypeptide or a fragment thereof encoded by a nucleic acid having a nucleotide sequence selected from the group consisting of SEQ ID NO: 4016; SEQ ID NO: 4017 and SEQ ID NO: 4018.

[0165] In a further embodiment, the H. pylori secreted polypeptide or a fragment thereof is a H. pylori polypeptide or a fragment thereof involved in secretion and adhesion encoded by a nucleic acid sequence selected from the group consisting of SEQ ID NO: 4019; SEQ ID NO: 4020; SEQ ID NO: 4021; SEQ ID NO: 4022; SEQ ID NO: 4023; SEQ ID NO: 4024; SEQ ID NO: 4025; SEQ ID NO: 4026 and SEQ ID NO: 9622.

[0166] In a further embodiment, the H. pylori secreted polypeptide or a fragment thereof is a H. pylori chaperone polypeptide or a fragment thereof encoded by a nucleic acid having a nucleotide sequence selected from the group consisting of SEQ ID NO: 4027; SEQ ID NO: 4028; SEQ ID NO: 4029 and SEQ ID NO: 4030.

[0167] Particularly preferred is an isolated H. pylori cellular polypeptide or a fragment thereof, wherein the polypeptide has an amino acid sequence selected from the group consisting of SEQ ID NO: 9151; SEQ ID NO: 9152; SEQ ID NO: 9153; SEQ ID NO: 9154; SEQ ID NO: 9155; SEQ ID NO: 9156; SEQ ID NO: 9157; SEQ ID NO: 9158; SEQ ID NO: 9159; SEQ ID NO: 9160; SEQ ID NO: 9161; SEQ ID NO: 9162; SEQ ID NO: 9163; SEQ ID NO: 9164; SEQ ID NO: 9165; SEQ ID NO: 9166; SEQ ID NO: 9167; SEQ ID NO: 9168; SEQ ID NO: 9169; SEQ ID NO: 9170; SEQ ID NO: 9171; SEQ ID NO: 9172; SEQ ID NO: 9173; SEQ ID NO: 9174; SEQ ID NO: 9175; SEQ ID NO: 9176; SEQ ID NO: 9177; SEQ-ID NO: 9178; SEQ ID NO: 9179; SEQ ID NO: 9180; SEQ ID NO: 9181; SEQ ID NO: 9182; SEQ ID NO: 9183; SEQ ID NO: 9184; SEQ ID NO: 9185; SEQ ID NO: 9186; SEQ ID NO: 9187; SEQ ID NO: 9188; SEQ ID NO: 9189; SEQ ID NO: 9190; SEQ ID NO: 9191; SEQ ID NO: 9192; SEQ ID NO: 9193; SEQ ID NO: 9194; SEQ ID NO: 9195; SEQ ID NO: 9196; SEQ ID NO: 9197; SEQ ID NO: 9198; SEQ ID NO: 9199; SEQ ID NO: 9200; SEQ ID NO: 9201; SEQ ID NO: 9202; SEQ ID NO: 9203; SEQ ID NO: 9204; SEQ ID NO: 9205; SEQ ID NO: 9206; SEQ ID NO: 9207; SEQ ID NO: 9208; SEQ ID NO: 9209; SEQ ID NO: 9210; SEQ ID NO: 9211; SEQ ID NO: 9212; SEQ ID NO: 9213; SEQ ID NO: 9214; SEQ ID NO: 9215; SEQ ID NO: 9216; SEQ ID NO: 9217; SEQ ID NO: 9218; SEQ ID NO: 9219; SEQ ID NO: 9220; SEQ ID NO: 9221; SEQ ID NO: 9222; SEQ ID NO: 9223; SEQ ID NO: 9224; SEQ ID NO: 9225; SEQ ID NO: 9226; SEQ ID NO: 9227; SEQ ID NO: 9228; SEQ ID NO: 9229; SEQ ID NO: 9230; SEQ ID NO: 9231; SEQ ID NO: 9232; SEQ ID NO: 9233; SEQ ID NO: 9234; SEQ ID NO: 9235; SEQ ID NO: 9236; SEQ ID NO: 9237; SEQ ID NO: 9238; SEQ ID NO: 9239; SEQ ID NO: 9240; SEQ ID NO: 9241; SEQ ID NO: 9242; SEQ ID NO: 9243; SEQ ID NO: 9244; SEQ ID NO: 9245; SEQ ID NO: 9246; SEQ ID NO: 9247; SEQ ID NO: 9248; SEQ ID NO: 9249; SEQ ID NO: 9250; SEQ ID NO: 9251; SEQ ID NO: 9252; SEQ ID NO:9253; SEQ ID NO: 9254; SEQ ID NO: 9255; SEQ ID NO: 9256; SEQ ID NO: 9257; SEQ ID NO: 9258; SEQ ID NO: 9259; SEQ ID NO: 9260; SEQ ID NO: 9261; SEQ ID NO: 9262; SEQ ID NO: 9263; SEQ ID NO: 9264; SEQ ID NO: 9265; SEQ ID NO: 9266; SEQ ID NO: 9267; SEQ ID NO: 9268; SEQ ID NO: 9269; SEQ ID NO: 9270; SEQ ID NO: 9271; SEQ ID NO: 9272; SEQ ID NO: 9273; SEQ ID NO: 9274; SEQ ID NO: 9275; SEQ ID NO: 9276; SEQ ID NO: 9277; SEQ ID NO: 9278; SEQ ID NO: 9279; SEQ ID NO: 9280; SEQ ID NO: 9281; SEQ ID NO: 9282; SEQ ID NO: 9283; SEQ ID NO: 9284; SEQ ID NO: 9285; SEQ ID NO: 9286; SEQ ID NO: 9287; SEQ ID NO: 9288; SEQ ID NO: 9289; SEQ ID NO: 9290; SEQ ID NO: 9291; SEQ ID NO: 9292; SEQ ID NO: 9293; SEQ ID NO: 9294; SEQ ID NO: 9295; SEQ ID NO: 9296; SEQ ID NO: 9297; SEQ ID NO: 9298; SEQ ID NO: 9299; SEQ ID NO: 9300; SEQ ID NO: 9301; SEQ ID NO: 9302; SEQ ID NO: 9303; SEQ ID NO: 9304; SEQ ID NO: 9305; SEQ ID NO: 9306; SEQ ID NO: 9307; SEQ ID NO: 9308; SEQ ID NO: 9309; SEQ ID NO: 9310; SEQ ID NO: 9311; SEQ ID NO: 9312; SEQ ID NO: 9313; SEQ ID NO: 9314; SEQ ID NO: 9315; SEQ ID NO: 9316; SEQ ID NO: 9317; SEQ ID NO: 9318; SEQ ID NO: 9319; SEQ ID NO: 9320; SEQ ID NO: 9321; SEQ ID NO: 9322; SEQ ID NO: 9323; SEQ ID NO: 9324; SEQ ID NO: 9325; SEQ ID NO: 9326; SEQ ID NO: 9327; SEQ ID NO: 9328; SEQ ID NO: 9329; SEQ ID NO: 9330; SEQ ID NO: 9331; SEQ ID NO: 9332; SEQ ID NO: 9333; SEQ ID NO: 9334; SEQ ID NO: 9335; SEQ ID NO: 9336; SEQ ID NO: 9337; SEQ ID NO: 9338; SEQ ID NO: 9339; SEQ ID NO: 9340; SEQ ID NO: 9341; SEQ ID NO: 9342; SEQ ID NO: 9343; SEQ ID NO: 9344; SEQ ID NO: 9345; SEQ ID NO: 9346; SEQ ID NO: 9347; SEQ ID NO: 9348; SEQ ID NO: 9349; SEQ ID NO: 9350; SEQ ID NO: 9351; SEQ ID NO: 9352; SEQ ID NO: 9353; SEQ ID NO: 9354; SEQ ID NO: 9355; SEQ ID NO: 9356; SEQ ID NO: 9357; SEQ ID NO: 9358; SEQ ID NO: 9359; SEQ ID NO: 9360; SEQ ID NO: 9361; SEQ ID NO: 9362; SEQ ID NO: 9363; SEQ ID NO: 9364; SEQ ID NO: 9365; SEQ ID NO: 9366; SEQ ID NO: 9367; SEQ ID NO: 9368; SEQ ID NO: 9369; SEQ ID NO: 9370; SEQ ID NO: 9371; SEQ ID NO: 9372; SEQ ID NO: 9373; SEQ ID NO: 9374; SEQ ID NO: 9375; SEQ ID NO: 9376; SEQ ID NO: 9377; SEQ ID NO: 9378; SEQ ID NO: 9379; SEQ ID NO: 9380; SEQ ID NO: 9381; SEQ ID NO: 9382; SEQ ID NO: 9383; SEQ ID NO: 9384; SEQ ID NO: 9385; SEQ ID NO: 9386; SEQ ID NO: 9387; SEQ ID NO: 9388; SEQ ID NO: 9389; SEQ ID NO: 9390; SEQ ID NO: 9391; SEQ ID NO: 9392; SEQ ID NO: 9393; SEQ ID NO: 9394; SEQ ID NO: 9395; SEQ ID NO: 9396; SEQ ID NO: 9397; SEQ ID NO: 9398; SEQ ID NO: 9399; SEQ ID NO: 9400; SEQ ID NO: 9401; SEQ ID NO: 9402; SEQ ID NO: 9403; SEQ ID NO: 9404; SEQ ID NO: 9405; SEQ ID NO: 9406; SEQ ID NO: 9407; SEQ ID NO: 9408; SEQ ID NO: 9409; SEQ ID NO: 9410; SEQ ID NO: 9411; SEQ ID NO: 9412; SEQ ID NO: 9413; SEQ ID NO: 9414; SEQ ID NO: 9415; SEQ ID NO: 9416; SEQ ID NO: 9417; SEQ ID NO: 9418; SEQ ID NO: 9419; SEQ ID NO: 9420; SEQ ID NO: 9421; SEQ ID NO: 9422; SEQ ID NO: 9423; SEQ ID NO: 9424; SEQ ID NO: 9425; SEQ ID NO: 9426; SEQ ID NO: 9427; SEQ ID NO: 9428; SEQ ID NO: 9429; SEQ ID NO: 9430; SEQ ID NO: 9431; SEQ ID NO: 9432; SEQ ID NO: 9433; SEQ ID NO: 9434; SEQ ID NO: 9435; SEQ ID NO: 9436; SEQ ID NO: 9437; SEQ ID NO: 9438; SEQ ID NO: 9439; SEQ ID NO: 9440; SEQ ID NO: 9441; SEQ ID NO: 9442; SEQ ID NO: 9443; SEQ ID NO: 9444; SEQ ID NO: 9445; SEQ ID NO: 9446; SEQ ID NO: 9447; SEQ ID NO: 9448; SEQ ID NO: 9449; SEQ ID NO: 9450; SEQ ID NO: 9451; SEQ ID NO: 9452; SEQ ID NO: 9453; SEQ ID NO: 9454; SEQ ID NO: 9455; SEQ ID NO: 9456; SEQ ID NO: 9457; SEQ ID NO: 9458; SEQ ID NO: 9459; SEQ ID NO: 9460; SEQ ID NO: 9461; SEQ ID NO: 9462; SEQ ID NO: 9463; SEQ ID NO: 9464; SEQ ID NO: 9465; SEQ ID NO: 9466; SEQ ID NO: 9467; SEQ ID NO: 9738; SEQ ID NO: 9739; SEQ ID NO: 9740; SEQ ID NO: 9741; SEQ ID NO: 9742; SEQ ID NO: 9743; SEQ ID NO: 9744; SEQ ID NO: 9745; SEQ ID NO: 9746; SEQ ID NO: 9747 and SEQ ID NO: 9748.

[0168] Particularly preferred is an isolated H. pylori cellular polypeptide or a fragment thereof, wherein the polypeptide is encoded by a nucleic acid having a nucleotide sequence selected from the group consisting of SEQ ID NO: 4389; SEQ ID NO: 4390; SEQ ID NO: 4391; SEQ ID NO: 4392; SEQ ID NO: 4393; SEQ ID NO: 4394; SEQ ID NO: 4395; SEQ ID NO: 4396; SEQ ID NO: 4397; SEQ ID NO: 4398; SEQ ID NO: 4399; SEQ ID NO: 4400; SEQ ID NO: 4401; SEQ ID NO: 4402; SEQ ID NO: 4403; SEQ. ID NO: 4404; SEQ ID NO: 4405; SEQ ID NO: 4406; SEQ ID NO: 4407; SEQ ID NO: 4408; SEQ ID NO: 4409; SEQ ID NO: 4410; SEQ ID NO: 4411; SEQ ID NO: 4412; SEQ ID NO:4413; SEQ ID NO:4414; SEQ ID NO:4415; SEQ ID NO:4416; SEQ ID NO: 4417; SEQ ID NO: 4418; SEQ ID NO: 4419; SEQ ID NO: 4420; SEQ ID NO: 4421; SEQ ID NO: 4422; SEQ ID NO: 4423; SEQ ID NO: 4424; SEQ ID NO: 4425; SEQ ID NO: 4426; SEQ ID NO: 4427; SEQ ID NO: 4428; SEQ ID NO: 4429; SEQ ID NO: 4430; SEQ ID NO: 4431; SEQ ID NO: 4432; SEQ ID NO: 4433; SEQ ID NO: 4434; SEQ ID NO: 4435; SEQ ID NO: 4436; SEQ ID NO: 4437; SEQ ID NO: 4438; SEQ ID NO: 4439; SEQ ID NO: 4440; SEQ ID NO: 4441; SEQ ID NO: 4442; SEQ ID NO: 4443; SEQ ID NO: 4444; SEQ ID NO: 4445; SEQ ID NO: 4446; SEQ ID NO: 4447; SEQ ID NO: 4448; SEQ ID NO: 4449; SEQ ID NO: 4450; SEQ ID NO: 4451; SEQ ID NO: 4452; SEQ ID NO: 4453; SEQ ID NO: 4454; SEQ ID NO: 4455; SEQ ID NO: 4456; SEQ ID NO: 4457; SEQ ID NO: 4458; SEQ ID NO: 4459; SEQ ID NO: 4460; SEQ ID NO: 4461; SEQ ID NO: 4462; SEQ ID NO: 4463; SEQ ID NO: 4464; SEQ ID NO: 4465; SEQ ID NO: 4466; SEQ ID NO: 4467; SEQ ID NO: 4468; SEQ ID NO: 4469; SEQ ID NO: 4470; SEQ ID NO: 4471; SEQ ID NO: 4472; SEQ ID NO: 4473; SEQ ID NO: 4474; SEQ ID NO: 4475; SEQ ID NO: 4476; SEQ ID NO: 4477; SEQ ID NO:4478; SEQ ID NO:4479; SEQ ID NO:4480; SEQ ID NO: 4481; SEQ ID NO: 4482; SEQ ID NO: 4483; SEQ ID NO: 4484; SEQ ID NO: 4485; SEQ ID NO: 4486; SEQ ID NO: 4487; SEQ ID NO: 4488; SEQ ID NO: 4489; SEQ ID NO: 4490; SEQ ID NO: 4491; SEQ ID NO: 4492; SEQ ID NO: 4493; SEQ ID NO: 4494; SEQ ID NO: 4495; SEQ ID NO: 4496; SEQ ID NO: 4497; SEQ ID NO: 4498; SEQ ID NO: 4499; SEQ ID NO: 4500; SEQ ID NO: 4501; SEQ ID NO: 4502; SEQ ID NO: 4503; SEQ ID NO: 4504; SEQ ID NO: 4505; SEQ ID NO: 4506; SEQ ID NO: 4507; SEQ ID NO: 4508; SEQ ID NO: 4509; SEQ ID NO: 4510; SEQ ID NO: 4511; SEQ ID NO: 4512; SEQ ID NO: 4513; SEQ ID NO: 4514; SEQ ID NO: 4515; SEQ ID NO: 4516; SEQ ID NO: 4517; SEQ ID NO: 4518; SEQ ID NO: 4519; SEQ ID NO: 4520; SEQ ID NO: 4521; SEQ ID NO: 4522; SEQ ID NO: 4523; SEQ ID NO: 4524; SEQ ID NO: 4525; SEQ ID NO: 4526; SEQ ID NO: 4527; SEQ ID NO: 4528; SEQ ID NO: 4529; SEQ ID NO: 4530; SEQ ID NO: 4531; SEQ ID NO: 4532; SEQ ID NO: 4533; SEQ ID NO: 4534; SEQ ID NO: 4535; SEQ ID NO: 4536; SEQ ID NO: 4537; SEQ ID NO: 4538; SEQ ID NO: 4539; SEQ ID NO: 4540; SEQ ID NO: 4541; SEQ ID NO: 4542; SEQ ID NO: 4543; SEQ ID NO: 4544; SEQ ID NO: 4545; SEQ ID NO: 4546; SEQ ID NO: 4547; SEQ ID NO: 4548; SEQ ID NO: 4549; SEQ ID NO: 4550; SEQ ID NO: 4551; SEQ ID NO: 4552; SEQ ID NO: 4553; SEQ ID NO: 4554; SEQ ID NO: 4555; SEQ ID NO: 4556; SEQ ID NO: 4557; SEQ ID NO: 4558; SEQ ID NO: 4559; SEQ ID NO: 4560; SEQ ID NO: 4561; SEQ ID NO: 4562; SEQ ID NO: 4563; SEQ ID NO: 4564; SEQ ID NO: 4565; SEQ ID NO: 4566; SEQ ID NO: 4567; SEQ ID NO: 4568; SEQ ID NO: 4569; SEQ ID NO: 4570; SEQ ID NO: 4571; SEQ ID NO: 4572; SEQ ID NO: 4573; SEQ ID NO: 4574; SEQ ID NO: 4575; SEQ ID NO: 4576; SEQ ID NO: 4577; SEQ ID NO: 4578; SEQ ID NO: 4579; SEQ ID NO: 4580; SEQ ID NO: 4581; SEQ ID NO: 4582; SEQ ID NO: 4583; SEQ ID NO: 4584; SEQ ID NO: 4585; SEQ ID NO: 4586; SEQ ID NO: 4587; SEQ ID NO: 4588; SEQ ID NO: 4589; SEQ ID NO: 4590; SEQ ID NO: 4591; SEQ ID NO: 4592; SEQ ID NO: 4593; SEQ ID NO: 4594; SEQ ID NO: 4595; SEQ ID NO: 4596; SEQ ID NO: 4597; SEQ ID NO: 4598; SEQ ID NO: 4599; SEQ ID NO: 4600; SEQ ID NO: 4601; SEQ ID NO: 4602; SEQ ID NO: 4603; SEQ ID NO: 4604; SEQ ID NO: 4605; SEQ ID NO: 4606; SEQ ID NO: 4607; SEQ ID NO: 4608; SEQ ID NO: 4609; SEQ ID NO: 4610; SEQ ID NO: 4611; SEQ ID NO: 4612; SEQ ID NO: 4613; SEQ ID NO: 4614; SEQ ID NO: 4615; SEQ ID NO: 4616; SEQ ID NO: 4617; SEQ ID NO: 4618; SEQ ID NO: 4619; SEQ ID NO: 4620; SEQ ID NO: 4621; SEQ ID NO: 4622; SEQ ID NO: 4623; SEQ ID NO: 4624; SEQ ID NO: 4625; SEQ ID NO: 4626; SEQ ID NO: 4627; SEQ ID NO: 4628; SEQ ID NO: 4629; SEQ ID NO: 4630; SEQ ID NO: 4631; SEQ ID NO: 4632; SEQ ID NO: 4633; SEQ ID NO: 4634; SEQ ID NO: 4635; SEQ ID NO: 4636; SEQ ID NO: 4637; SEQ ID NO: 4638; SEQ ID NO: 4639; SEQ ID NO: 4640; SEQ ID NO: 4641; SEQ ID NO: 4642; SEQ ID NO: 4643; SEQ ID NO: 4644; SEQ ID NO: 4645; SEQ ID NO: 4646; SEQ ID NO: 4647; SEQ ID NO: 4648; SEQ ID NO: 4649; SEQ ID NO: 4650; SEQ ID NO: 4651; SEQ ID NO: 4652; SEQ ID NO: 4653; SEQ ID NO: 4654; SEQ ID NO: 4655; SEQ ID NO: 4656; SEQ ID NO: 4657; SEQ ID NO: 4658; SEQ ID NO: 4659; SEQ ID NO: 4660; SEQ ID NO: 4661; SEQ ID NO: 4662; SEQ ID NO: 4663; SEQ ID NO: 4664; SEQ ID NO: 4665; SEQ ID NO: 4666; SEQ ID NO: 4667; SEQ ID NO: 4668; SEQ ID NO: 4669; SEQ ID NO: 4670; SEQ ID NO: 4671; SEQ ID NO: 4672; SEQ ID NO: 4673; SEQ ID NO: 4674; SEQ ID NO: 4675; SEQ ID NO: 4676; SEQ ID NO: 4677; SEQ ID NO: 4678; SEQ ID NO: 4679; SEQ ID NO: 4680; SEQ ID NO: 4681; SEQ ID NO: 4682; SEQ ID NO: 4683; SEQ ID NO: 4684; SEQ ID NO: 4685; SEQ ID NO: 4686; SEQ ID NO: 4687; SEQ ID NO: 4688; SEQ ID NO: 4689; SEQ ID NO: 4690; SEQ ID NO: 4691; SEQ ID NO: 4692; SEQ ID NO: 4693; SEQ ID NO: 4694; SEQ ID NO: 4695; SEQ ID NO: 4696; SEQ ID NO: 4697; SEQ ID NO: 4698; SEQ ID NO: 4699; SEQ ID NO: 4700; SEQ ID NO: 4701; SEQ ID NO: 4702; SEQ ID NO: 4703; SEQ ID NO: 4704; SEQ ID NO: 4705; SEQ ID NO: 9626; SEQ ID NO: 9627; SEQ ID NO: 9628; SEQ ID NO: 9629; SEQ ID NO: 9630; SEQ ID NO: 9631; SEQ ID NO: 9632; SEQ ID NO: 9633; SEQ ID NO: 9634; SEQ ID NO: 9635 and SEQ ID NO: 9636.

[0169] Particularly preferred is an isolated H. pylori membrane associated polypeptide or a fragment thereof, wherein the polypeptide has an amino acid sequence selected from the group consisting of SEQ ID NO: 9468; SEQ ID NO: 9469; SEQ ID NO: 9470; SEQ ID NO: 9471; SEQ ID NO: 9472; SEQ ID NO: 9473; SEQ ID NO: 9474; SEQ ID NO: 9475; SEQ ID NO: 9476; SEQ ID NO: 9477; SEQ ID NO: 9478; SEQ ID NO: 9479; SEQ ID NO: 9480; SEQ ID NO: 9481; SEQ ID NO: 9482; SEQ ID NO: 9483; SEQ ID NO: 9484; SEQ ID NO: 9485; SEQ ID NO: 9486; SEQ ID NO: 9487; SEQ ID NO: 9488; SEQ ID NO: 9489; SEQ ID NO: 9490; SEQ ID NO: 9491; SEQ ID NO: 9492; SEQ ID NO: 9493; SEQ ID NO: 9494; SEQ ID NO: 9495; SEQ ID NO: 9496; SEQ ID NO: 9497; SEQ ID NO: 9498; SEQ ID NO: 9499; SEQ ID NO: 9500; SEQ ID NO: 9501; SEQ ID NO: 9502; SEQ ID NO: 9503; SEQ ID NO: 9504; SEQ ID NO: 9505; SEQ ID NO: 9506; SEQ ID NO: 9507; SEQ ID NO: 9508; SEQ ID NO: 9509; SEQ ID NO: 9510; SEQ ID NO: 9511; SEQ ID NO: 9512; SEQ ID NO: 9513; SEQ ID NO: 9514; SEQ ID NO: 9515; SEQ ID NO: 9516; SEQ ID NO: 9517; SEQ ID NO: 9518; SEQ ID NO: 9519; SEQ ID NO: 9520; SEQ ID NO: 9521; SEQ ID NO: 9522; SEQ ID NO: 9523 and SEQ ID NO: 9524.

[0170] In another aspect, the invention features a chimeric H. pylori polypeptide comprising at least two H. pylori polypeptides or fragments thereof, wherein the polypeptides are encoded by nucleic acid sequences selected from the group consisting of SEQ ID NO:1-SEQ ID NO:4762 and SEQ ID NO: 9525-SEQ ID NO: 9636.

[0171] In another aspect, the invention features a chimeric H. pylori polypeptide comprising at least two H. pylori polypeptides or fragments thereof, wherein the polypeptides are selected from the group consisting of SEQ ID NO: 4763-SEQ ID NO: 9524 and SEQ ID NO: 9637-SEQ ID NO: 9748.

[0172] In another aspect, the invention features a fusion protein comprising an H. pylori polypeptide which comprises an amino acid sequence selected from the group consisting of SEQ ID NO: 4763-SEQ ID NO: 9524 and SEQ ID NO: 9637-SEQ ID NO: 9748 operatively linked to a non-H. pylori polypeptide.

[0173] In another aspect, the invention features a vaccine formulation for prophylactic or therapeutic treatment of an H. pylori infection comprising an effective amount of at least one isolated nucleic acid of the invention.

[0174] Preferably, the invention features a vaccine formulation for prophylactic or therapeutic treatment of an H. pylori infection comprising an effective amount of at least one isolated nucleic acid encoding an H. pylori outer membrane polypeptide or a fragment thereof, which nucleic acid is selected from the group consisting of SEQ ID NO: 212, SEQ ID NO: 254, SEQ ID NO: 205, SEQ ID NO: 329, SEQ ID NO: 384, SEQ ID NO: 377 and SEQ ID NO: 289.

[0175] Preferably, the invention features a vaccine formulation for prophylactic or therapeutic treatment of an H. pylori infection comprising an effective amount of at least one isolated nucleic acid encoding an H. pylori cell envelope polypeptide or a fragment thereof, which nucleic acid is selected from the group consisting of SEQ ID NO: 469, SEQ ID NO: 89, SEQ ID NO: 4286, SEQ ID NO: 419, SEQ ID NO: 9618 and SEQ ID NO: 3253.

[0176] In another aspect, the invention features a vaccine formulation for prophylactic or therapeutic treatment of an H. pylori infection comprising an effective amount of at least one H. pylori polypeptide of the invention.

[0177] Preferably, the invention features a vaccine formulation for prophylactic or therapeutic treatment of an H. pylori infection comprising an effective amount of at least one H. pylori outer membrane polypeptide or a fragment thereof, which polypeptide is selected from the group consisting of SEQ ID NO: 4974, SEQ ID NO: 5016, SEQ ID NO: 4967, SEQ ID NO: 5091, SEQ ID NO: 5146, SEQ ID NO: 5139 and SEQ ID NO: 5051.

[0178] Preferably, the invention features a vaccine formulation for prophylactic or therapeutic treatment of an H. pylori infection comprising an effective amount of at least one H. pylori cell envelope polypeptide or a fragment thereof, which polypeptide is selected from the group consisting of SEQ ID NO: 5231, SEQ ID NO: 4851, SEQ ID NO: 9048, SEQ ID NO: 5181, SEQ ID NO: 9730 and SEQ ID NO: 8015.

[0179] Preferably, the vaccine formulation of the invention further includes a pharmaceutically acceptable carrier. In one embodiment, the pharmaceutically acceptable carrier includes an adjuvant. In another embodiment, the pharmaceutically acceptable carrier includes a delivery system, e.g., a live vector, e.g., a bacteria or a virus. In another embodiment, the pharmaceutically acceptable carrier includes both an adjuvant and a delivery system.

[0180] In another aspect, the invention features a method of treating or reducing a risk of H. pylori infection in a subject. The method includes administering to a subject a vaccine formulation of the invention, such that treatment or reduction of risk of H. pylori infection occurs.

[0181] In another aspect, the invention features a method of producing a vaccine formulation of the invention. The method includes combining at least one isolated H. pylori polypeptide or a fragment thereof selected from the group consisting of SEQ ID NO: 4763-SEQ ID NO: 9524 and SEQ ID NO: 9637-SEQ ID NO: 9748 with a pharmaceutically acceptable carrier to thereby form a vaccine formulation.

[0182] In another aspect, the invention features a method of producing a vaccine formulation of the invention. The method includes culturing a cell under conditions that permit expression of an H. pylori polypeptide or a fragment thereof selected from the group consisting of SEQ ID NO: 4763-SEQ ID NO: 9524 and SEQ ID NO: 9637-SEQ ID NO: 9748 isolating the H. pylori polypeptide from the cell; and combining at least one isolated H. pylori polypeptide or a fragment thereof with a pharmaceutically acceptable carrier to thereby form a vaccine formulation.

[0183] In another aspect, the invention pertains to any individual H. pylori polypeptide member or nucleic acid encoding such a member from the above-identified groups of H. pylori polypeptides.

[0184] In another aspect, the invention features nucleic acids capable of binding mRNA of H. pylori. Such nucleic acid is capable of acting as antisense nucleic acid to control the translation of mRNA of H. pylori. A further aspect features a nucleic acid which is capable of binding specifically to an H. pylori nucleic acid. These nucleic acids are also referred to herein as complements and have utility as probes and as capture reagents.

[0185] In another aspect, the invention features an expression system comprising an open reading frame corresponding to H. pylori nucleic acid. The nucleic acid further comprises a control sequence compatible with an intended host. The expression system is useful for making polypeptides corresponding to H. pylori nucleic acid.

[0186] In another aspect, the invention features a cell transformed with the expression system to produce H. pylori polypeptides.

[0187] In another aspect, the invention features a method of generating antibodies against H. pylori polypeptides which are capable of binding specifically to H. pylori polypeptides. Such antibodies have utility as reagents for immunoassays to evaluate the abundance and distribution of H. pylori-specific antigens.

[0188] In another aspect, the invention features a method of generating vaccines for immunizing an individual against H. pylori. The vaccination method includes: immunizing a subject with at least one H. pylori polypeptide according to the present invention, e.g., a surface or secreted polypeptide, or active portion thereof, and a pharmaceutically acceptable carrier. Such vaccines have therapeutic and/or prophylactic utilities.

[0189] In another aspect, the invention provides a method for generating a vaccine comprising a modified immunogenic H. pylori polypeptide, e.g., a surface or secreted polypeptide, or active portion thereof, and a pharmacologically acceptable carrier.

[0190] In another aspect, the invention features a method of evaluating a compound, e.g. a polypeptide, e.g., a fragment of a host cell polypeptide, for the ability to bind an H. pylori polypeptide. The method includes: contacting the candidate compound with an H. pylori polypeptide and determining if the compound binds or otherwise interacts with an H. pylori polypeptide. Compounds which bind H. pylori are candidates as activators or inhibitors of the bacterial life cycle. These assays can be performed in vitro or in vivo.

[0191] In another aspect, the invention features a method of evaluating a compound, e.g. a polypeptide, e.g., a fragment of a host cell polypeptide, for the ability to bind an H. pylori nucleic acid, e.g., DNA or RNA. The method includes: contacting the candidate compound with an H. pylori nucleic acid and determining if the compound binds or otherwise interacts with an H. pylori polypeptide. Compounds which bind H. pylori are candidates as activators or inhibitors of the bacterial life cycle. These assays can be performed in vitro or in vivo.

[0192] The invention features H. pylori polypeptides, preferably a substantially pure preparation of an H. pylori polypeptide, or a recombinant H. pylori polypeptide. In preferred embodiments: the polypeptide has biological activity; the polypeptide has an amino acid sequence at least 60%, 70%, 80%, 90%, 95%, 98%, or 99% identical or homologous to an amino acid sequence of the invention contained in the Sequence Listing, preferably it has about 65% sequence identity with an amino acid sequence of the invention contained in the Sequence Listing, and most preferably it has about 92% to about 99% sequence identity with an amino acid sequence of the invention contained in the Sequence Listing; the polypeptide has an amino acid sequence essentially the same as an amino acid sequence of the invention contained in the Sequence Listing; the polypeptide is at least 5, 10, 20, 50, 100, or 150 amino acid residues in length; the polypeptide includes at least 5, preferably at least 10, more preferably at least 20, more preferably at least 50, 100, or 150 contiguous amino acid residues of the invention contained in the Sequence Listing. In yet another preferred embodiment, the amino acid sequence which differs in sequence identity by about 7% to about 8% from the H. pylori amino acid sequences of the invention contained in the Sequence Listing is also encompassed by the invention.

[0193] In preferred embodiments: the H. pylori polypeptide is encoded by a nucleic acid of the invention contained in the Sequence Listing, or by a nucleic acid having at least 60%, 70%, 80%, 90%, 95%, 98%, or 99% homology with a nucleic acid of the invention contained in the Sequence Listing.

[0194] In a preferred embodiment, the subject H. pylori polypeptide differs in amino acid sequence at 1, 2, 3, 5, 10 or more residues from a sequence of the invention contained in the Sequence Listing. The differences, however, are such that the H. pylori polypeptide exhibits an H. pylori biological activity, e.g., the H. pylori polypeptide retains a biological activity of a naturally occurring H. pylori polypeptide.

[0195] In preferred embodiments, the polypeptide includes all or a fragment of an amino acid sequence of the invention contained in the Sequence Listing; fused, in reading frame, to additional amino acid residues, preferably to residues encoded by genomic DNA 5′ or 3′ to the genomic DNA which encodes a sequence of the invention contained in the Sequence Listing.

[0196] In yet other preferred embodiments, the H. pylori polypeptide is a recombinant fusion protein having a first H. pylori polypeptide portion and a second polypeptide portion, e.g., a second polypeptide portion having an amino acid sequence unrelated to H. pylori. The second polypeptide portion can be, e.g., any of glutathione-S-transferase, a DNA binding domain, or a polymerase activating domain. In preferred embodiment the fusion protein can be used in a two-hybrid assay.

[0197] Polypeptides of the invention include those which arise as a result of alternative transcription events, alternative RNA splicing events, and alternative translational and postranslational events.

[0198] The invention also encompasses an immunogenic component which includes at least one H. pylori polypeptide in an immunogenic preparation; the immunogenic component being capable of eliciting an immune response specific for the H. pylori polypeptide, e.g., a humoral response, an antibody response, or a cellular response. In preferred embodiments, the immunogenic component comprises at least one antigenic determinant from a polypeptide of the invention contained in the Sequence Listing.

[0199] In another aspect, the invention provides a substantially pure nucleic acid having a nucleotide sequence which encodes an H. pylori polypeptide. In preferred embodiments: the encoded polypeptide has biological activity; the encoded polypeptide has an amino acid sequence at least 60%, 70%, 80%, 90%, 95%, 98%, or 99% homologous to an amino acid sequence of the invention contained in the Sequence Listing; the encoded polypeptide has an amino acid sequence essentially the same as an amino acid sequence of the invention contained in the Sequence Listing; the encoded polypeptide is at least 5, 10, 20, 50, 100, or 150 amino acids in length; the encoded polypeptide comprises at least 5, preferably at least 10, more preferably at least 20, more preferably at least 50, 100, or 150 contiguous amino acids of the invention contained in the Sequence Listing.

[0200] In preferred embodiments: the nucleic acid of the invention is that contained in the Sequence Listing; the nucleic acid is at least 60%, 70%, 80%, 90%, 96%, 98%, or 99% homologous with a nucleic acid sequence of the invention contained in the Sequence Listing.

[0201] In a preferred embodiment, the encoded H. pylori polypeptide differs (e.g., by amino acid substitution, addition or deletion of at least one amino acid residue) in amino acid sequence at 1, 2, 3, 5, 10 or more residues, from a sequence of the invention contained in the Sequence Listing. The differences, however, are such that: the H. pylori encoded polypeptide exhibits a H. pylori biological activity, e.g., the encoded H. pylori enzyme retains a biological activity of a naturally occurring H. pylori.

[0202] In preferred embodiments, the encoded polypeptide includes all or a fragment of an amino acid sequence of the invention contained in the Sequence Listing; fused, in reading frame, to additional amino acid residues, preferably to residues encoded by genomic DNA 5′ or 3′ to the genomic DNA which encodes a sequence of the invention contained in the Sequence Listing.

[0203] In preferred embodiments, the subject H. pylori nucleic acid will include a transcriptional regulatory sequence, e.g. at least one of a transcriptional promoter or transcriptional enhancer sequence, operably linked to the H. pylori gene sequence, e.g., to render the H. pylori gene sequence suitable for expression in a recombinant host cell.

[0204] In yet a further preferred embodiment, the nucleic acid which encodes an H. pylori polypeptide of the invention, hybridizes under stringent conditions to a nucleic acid probe corresponding to at least 8 consecutive nucleotides of the invention contained in the Sequence Listing; more preferably to at least 12 consecutive nucleotides of the invention contained in the Sequence Listing; more preferably to at least 20 consecutive nucleotides of the invention contained in the Sequence Listing; more preferably to at least 40 consecutive nucleotides of the invention contained in the Sequence Listing.

[0205] In a preferred embodiment, the nucleic acid encodes a peptide which differs by at least one amino acid residue from the sequences of the invention contained in the Sequence Listing.

[0206] In a preferred embodiment, the nucleic acid differs by at least one nucleotide from a nucleotide sequence of the invention contained in the Sequence Listing which encodes amino acids of the invention contained in the Sequence Listing.

[0207] In another aspect, the invention encompasses: a vector including a nucleic acid which encodes an H. pylori polypeptide or an H. pylori polypeptide variant as described herein; a host cell transfected with the vector; and a method of producing a recombinant H. pylori polypeptide or H. pylori polypeptide variant; including culturing the cell, e.g., in a cell culture medium, and isolating the H. pylori or H. pylori polypeptide variant, e.g., from the cell or from the cell culture medium.

[0208] In another aspect, the invention features, a purified recombinant nucleic acid having at least 50%, 60%, 70%, 80%, 90%, 95%, 98%, or 99% homology with a sequence of the invention contained in the Sequence Listing.

[0209] The invention also provides a probe or primer which includes a substantially purified oligonucleotide. The oligonucleotide includes a region of nucleotide sequence which hybridizes under stringent conditions to at least 8 consecutive nucleotides of sense or antisense sequence of the invention contained in the Sequence Listing, or naturally occurring mutants thereof. In preferred embodiments, the probe or primer further includes a label group attached thereto. The label group can be, e.g., a radioisotope, a fluorescent compound, an enzyme, and/or an enzyme co-factor. Preferably the oligonucleotide is at least 8 and less than 10, 20, 30, 50, 100, or 150 nucleotides in length.

[0210] The invention also provides an isolated H. pylori polypeptide which is encoded by a nucleic acid which hybridizes under stringent hybridization conditions to a nucleic acid contained in the Sequence Listing.

[0211] The invention further provides nucleic acids, e.g., RNA or DNA, encoding a polypeptide of the invention. This includes double stranded nucleic acids as well as coding and antisense single strands.

[0212] The H. pylori strain, from which genomic sequences have been sequenced, has been deposited in the American Type Culture Collection (ATCC # 55679; deposited by Genome Therapeutics Corporation, 100 Beaver Street, Waltham, Mass. 02154) as strain HP-J99.

[0213] Included in the invention are: allelic variations; natural mutants; induced mutants; proteins encoded by DNA that hybridizes under high or low stringency conditions to a nucleic acid which encodes a polypeptide of the invention contained in the Sequence Listing (for definitions of high and low stringency see Current Protocols in Molecular Biology, John Wiley & Sons, New York, 1989, 6.3.1-6.3.6 and 6.4.1-6.4.10, hereby incorporated by reference); and, polypeptides specifically bound by antisera to H. pylori polypeptides, especially by antisera to an active site or binding domain of H. pylori polypeptide. The invention also includes fragments, preferably biologically active fragments. These and other polypeptides are also referred to herein as H. pylori polypeptide analogs or variants.

[0214] Putative functions have been determined for several of the H. pylori polypeptides of the invention, as shown in Table 1.

[0215] Accordingly, uses of the claimed H. pylori polypeptides based on these identified functions, as well as other functions as described herein, are also within the scope of the invention.

[0216] In addition, the present invention encompasses H. pylori polypeptides characterized as shown in Table 1 below, including: H. pylori cell envelope proteins, H. pylori secreted proteins, H. pylori cytoplasmic proteins and H. pylori cellular proteins. Members of these groups were identified by BLAST homology searches and by searches for secretion signal or transmembrane protein motifs. Polypeptides related by significant homology to the polypeptides of Table 1 are also considered to be classified in the manner of the homologs shown in Table 1.

TABLE 1

| Previously-Filed ORF | ntSeqID | aaSeqID |
|---|---|---|
| A. CELL ENVELOPE PROTEINS | | |
| A.1 Flagella-associated proteins | | |
| hp6e12267_29298130_c2_52 | 1 | 4763 |
| 29298130 | 2 | 4764 |
| 12ge20305orf11 | 3 | 4765 |
| 01ce11016orf18 | 4 | 4766 |
| hp6p80503_34199050_f1_3 | 5 | 4767 |
| hp6p80503_3986693_f2_10 | 6 | 4768 |
| 01ce11016orf21 | 7 | 4769 |
| hp6p80503_58562_f2_9 | 8 | 4770 |
| hpy01ce11016orf_0013.aa | 9 | 4771 |
| 01ce61016_58562_c1_111 | 10 | 4772 |
| 16219090 | 11 | 4773 |
| 05ep20322orf11 | 12 | 4774 |
| hpy05ep20322orf_0014.aa | 13 | 4775 |
| hp6p12311_4428127_f2_2 | 14 | 4776 |
| 02ge10116_26382032_c3_129 | 15 | 4777 |
| 29454837 | 16 | 4778 |
| 02ge10116_29454837_c2_27 | 17 | 4779 |
| 02ge20116orf34 | 18 | 4780 |
| 02ge10116_24322632_c3_128 | 19 | 4781 |
| 02ge10116_32679687_c1_73 | 20 | 4782 |
| 04gp11701_16984442_f3_17 | 21 | 4783 |
| 16984442 | 22 | 4784 |
| hp3e11168orf2 | 23 | 4785 |
| 22692187 | 24 | 4786 |
| hp5p15212orf1 | 25 | 4787 |
| 02ce10213orf7 | 26 | 4788 |
| hpy02ce10213orf_0001.aa | 27 | 4789 |
| hp5p15212_7289075_f2_5 | 28 | 4790 |
| 05ae11611orf1 | 29 | 4791 |
| hpy05ae11611orf_0001.aa | 30 | 4792 |
| 06ap30322_1986458_c3_31 | 31 | 4793 |
| 06ap10322_22663402_c2_31 | 32 | 4794 |
| 25525277 | 33 | 4795 |
| 06ep11202_25525277_c1_21 | 34 | 4796 |
| 06cp20302orf12 | 35 | 4797 |
| 203192 | 36 | 4798 |
| 06ep11202_6914712_c3_31 | 37 | 4799 |
| 06cp20302orf10 | 38 | 4800 |
| 1171928 | 39 | 4801 |
| 04cp11202_21699087_f1_9 | 40 | 4802 |
| 04ge11713orf5 | 41 | 4803 |
| hpy13ap11517orf_0014.aa | 42 | 4804 |
| 06gp71906_24417558_c2_160 | 43 | 4805 |
| 3942217 | 44 | 4806 |
| 06gp71906_3942217_c2_161 | 45 | 4807 |
| hp3e11122orf5 | 46 | 4808 |
| hpy11ap10314orf_0002.aa | 47 | 4809 |
| 11ap10314orf2 | 48 | 4810 |
| hpy11ap10314orf_0001.aa | 49 | 4811 |
| hp3e11122orf1 | 50 | 4812 |
| 06gp71906_4822162_c3_196 | 51 | 4813 |
| 14cp20718_24882763_f2_3 | 52 | 4814 |
| 24882763 | 53 | 4815 |
| 29zp10241orf6 | 54 | 4816 |
| 02cp20821orf3 | 55 | 4817 |
| hp5p15861_4556533_f2_6 | 56 | 4818 |
| 01ap11502orf1 | 57 | 4819 |
| 14ee41924_4022217_f3_49 | 58 | 4820 |
| 917152 | 59 | 4821 |
| 07ap11213_23470127_f3_16 | 60 | 4822 |
| hp2e10911orf5 | 61 | 4823 |
| hp4e13394_3368767_c1_80 | 62 | 4824 |
| 09ap11406orf2 | 63 | 4825 |
| hpy01ge10203orf_0004.aa | 64 | 4826 |
| hpy01ge10203orf_0002.aa | 65 | 4827 |
| hpy01ge10203orf_0001.aa | 66 | 4828 |
| 01ge10203orf2 | 67 | 4829 |
| hp1p13939_24322162_f3_17 | 68 | 4830 |
| 03ae10516orf14 | 69 | 4831 |
| 14gp12015orf6 | 70 | 4832 |
| 14gp12015orf8 | 71 | 4833 |
| 13727311 | 72 | 4834 |
| 06ep30223_13727311_c3_159 | 73 | 4835 |
| hpy02ae11612orf_0023.aa | 74 | 4836 |
| 01ce21104_4961067_c1_61 | 75 | 4837 |
| 01gp10401orf1 | 76 | 4838 |
| 26588588 | 77 | 4839 |
| hp6p10590_42501_c2_32 | 78 | 4840 |
| 01gp10401orf5 | 79 | 4841 |
| 01gp10401orf4 | 80 | 4842 |
| hpy01gp10401orf_0001.aa | 81 | 4843 |
| hp6p10590_4567317_c1_26 | 82 | 4844 |
| 12ap11614_24415965_f3_5 | 83 | 4845 |
| 12ap11614orf5 | 84 | 4846 |
| 19557055 | 85 | 4847 |
| hp7e10429_24423462_c3_47 | 86 | 4848 |
| 07ge20415orf27 | 87 | 4849 |
| 07ge20415orf28 | 88 | 4850 |
| 26380318 | 89 | 4851 |
| 07ge20415orf34 | 90 | 4852 |
| hp7e10429_4881342_c1_31 | 91 | 4853 |
| 07ge31107orf5 | 92 | 4854 |
| 07ge31107orf1 | 93 | 4855 |
| hpy07ge31107orf_0001.aa | 94 | 4856 |
| 07ge31107orf3 | 95 | 4857 |
| 07ge31107orf2 | 96 | 4858 |
| hp6e50324_32692588_c2_11 | 97 | 4859 |
| hpy02ae31112orf_0001.aa | 98 | 4860 |
| 11ap20714_2165628_c2_83 | 99 | 4861 |
| 14ee11217orf3 | 100 | 4862 |
| hpy14ee11217orf_0001.aa | 101 | 4863 |
| 11ap20714_5271967_c1_60 | 102 | 4864 |
| hp6p80503_13673962_f1_2 | 103 | 4865 |
| 21699087 | 9525 | 9637 |
| 25478375 | 9526 | 9638 |
| 36111066 | 9527 | 9639 |
| A.2 Outer membrane | | |
| A.2.1 Terminal phe residue | | |
| 09cp61003_14562637_c2_93 | 104 | 4866 |
| 12ge10305orf13 | 105 | 4867 |
| 03gp20123orf3 | 106 | 4868 |
| 12ge10305orf9 | 107 | 4869 |
| hp6e12267_12931513_f1_11 | 108 | 4870 |
| 01ce61016_12931513_c2_106 | 109 | 4871 |
| 11ee10423orf2 | 110 | 4872 |
| 11ee10423orf1 | 111 | 4873 |
| 09cp61003_24063587_c1_74 | 112 | 4874 |
| 21503772 | 113 | 4875 |
| 30478562 | 114 | 4876 |
| 12ge10305orf10 | 115 | 4877 |
| 12ge10305orf1 | 116 | 4878 |
| 09cp61003_30478562_c3_106 | 117 | 4879 |
| hp6e12267_30478562_f3_33 | 118 | 4880 |
| 1431462 | 119 | 4881 |
| 09cp11003_5860877_f3_7 | 120 | 4882 |
| 09cp61003_5860877_f2_23 | 121 | 4883 |
| 14ge10705orf5 | 122 | 4884 |
| 01cp11710orf16 | 123 | 4885 |
| 01cp11710orf5 | 124 | 4886 |
| hpy01cp11710orf_0001.aa | 125 | 4887 |
| 01cp11710orf6 | 126 | 4888 |
| 07ep11916_5913592_f3_18 | 127 | 4889 |
| 02ge10116_16803513_f2_34 | 128 | 4890 |
| 02gp20706_16803513_f1_1 | 129 | 4891 |
| 01cp11710orf18 | 130 | 4892 |
| 01cp11710orf9 | 131 | 4893 |
| 02gp20706_20365905_f2_8 | 132 | 4894 |
| hpyhp5e15276orf_0007.aa | 133 | 4895 |
| 02ge10116_23462_f2_43 | 134 | 4896 |
| 02gp20706_23632775_f3_32 | 135 | 4897 |
| 06ge10115orf4 | 136 | 4898 |
| 02ge10116_36367936_c1_19 | 137 | 4899 |
| 02ge10116_36367936_c1_92 | 138 | 4900 |
| 02ge20116orf25 | 139 | 4901 |
| 02ge10116_804550_f2_44 | 140 | 4902 |
| hpyhp5e15276orf_0005.aa | 141 | 4903 |
| 02ge41622_14875000_c2_65 | 142 | 4904 |
| hpy13ee10216orf_0031.aa | 143 | 4905 |
| 02ge11622_875260_f3_36 | 144 | 4906 |
| 13ee10216orf7 | 145 | 4907 |
| 12ge10610orf2 | 146 | 4908 |
| hpy12ge10610orf_0002.aa | 147 | 4909 |
| 05ep10815_26570332_c2_99 | 148 | 4910 |
| 06ee10207orf1 | 149 | 4911 |
| hpy06ee10207orf_0001.aa | 150 | 4912 |
| hpy36zp10248orf_0001.aa | 151 | 4913 |
| 14572133 | 152 | 4914 |
| 05ep10815_16131925_c2_97 | 153 | 4915 |
| 06ee10207orf2 | 154 | 4916 |
| 14ae21813orf2 | 155 | 4917 |
| 05ep10815_4719175_c1_83 | 156 | 4918 |
| 05ep10815_4719175_c1_115 | 157 | 4919 |
| 4960952 | 158 | 4920 |
| 04gp11701_4960952_c3_33 | 159 | 4921 |
| hp3e11168orf30 | 160 | 4922 |
| 01cp20708_214843_c2_49 | 161 | 4923 |
| hpyhp3e11168orf_0008.aa | 162 | 4924 |
| 01cp20708_4960952_c1_43 | 163 | 4925 |
| 35156938 | 164 | 4926 |
| hp5e15211_11676_f1_5 | 165 | 4927 |
| hp5e15211orf15 | 166 | 4928 |
| hp4e13462orf1 | 167 | 4929 |
| 14ep11115orf3 | 168 | 4930 |
| hpy14ep11115orf_0001.aa | 169 | 4931 |
| 11ee11408_4977193_c1_41 | 170 | 4932 |
| 05ae30220_4977193_c3_198 | 171 | 4933 |
| 917200 | 172 | 4934 |
| 05ae30220_917200_c3_172 | 173 | 4935 |
| 07ap80601orf5 | 174 | 4936 |
| 07ap80601_917200_f3_10 | 175 | 4937 |
| 05ae30220_9882767_f2_34 | 176 | 4938 |
| 05ae20220orf37 | 177 | 4939 |
| 06ae11016_4729625_c3_68 | 178 | 4940 |
| hpy07ee20513orf_0008.aa | 179 | 4941 |
| 24132293 | 180 | 4942 |
| 07ee20513orf28 | 181 | 4943 |
| 09ae10512_48768_c3_67 | 182 | 4944 |
| 06ep10306orf1 | 183 | 4945 |
| hpy06ep10306orf_0001.aa | 184 | 4946 |
| 01ae12001_24218781_f2_18 | 185 | 4947 |
| 07gp11807orf17 | 186 | 4948 |
| hpy07gp11807orf_0026.aa | 187 | 4949 |
| 11ae11922_12586675_f2_1 | 188 | 4950 |
| 14ap10221_13689381_c3_4 | 189 | 4951 |
| hp6p10903_4398263_f3_6 | 190 | 4952 |
| 05gp11901orf19 | 191 | 4953 |
| 06ap10609_12586675_f2_19 | 192 | 4954 |
| 06ap11119_24426508_f3_26 | 193 | 4955 |
| 06ap11119_24426508_f3_27 | 194 | 4956 |
| 07ae10923_24426508_f1_1 | 195 | 4957 |
| 11ge10309orf28 | 196 | 4958 |
| 4740887 | 197 | 4959 |
| hp1p11256orf7 | 198 | 4960 |
| 05ee10816_14495437_f2_13 | 199 | 4961 |
| 06ep10615_14495437_f3_47 | 200 | 4962 |
| 05ee10816_4103408_f2_11 | 201 | 4963 |
| 04ce11617orf16 | 202 | 4964 |
| hpy06ap10305orf_0002.aa | 203 | 4965 |
| hpy06ap10305orf_0001.aa | 204 | 4966 |
| 06ep10615_49068_c2_87 | 205 | 4967 |
| 23646885 | 206 | 4968 |
| 04cp11202_23646885_f2_26 | 207 | 4969 |
| 01ae12021orf8 | 208 | 4970 |
| 06gp71906_35158328_f3_85 | 209 | 4971 |
| hpy02cp11822orf_0009.aa | 210 | 4972 |
| hpy12gp11106orf_0001.aa | 211 | 4973 |
| 06gp71906_3941642_f2_70 | 212 | 4974 |
| 02ap21113orf2 | 213 | 4975 |
| 06gp71906_970325_c3_190 | 214 | 4976 |
| 14ap10815_20585777_c1_13 | 215 | 4977 |
| hp3e10349orf27 | 216 | 4978 |
| 07ap11015orf2 | 217 | 4979 |
| hp5p15580orf1 | 218 | 4980 |
| 07ep30818orf4 | 219 | 4981 |
| hpy07ep30818orf_0002.aa | 220 | 4982 |
| 07ap11015orf4 | 221 | 4983 |
| 07ap11015_23938312_f3_2 | 222 | 4984 |
| 02ep30607orf19 | 223 | 4985 |
| 07ee11402_2458267_c3_108 | 224 | 4986 |
| 14ee41924_2458267_c2_93 | 225 | 4987 |
| hp5p15641_12195281_c1_24 | 226 | 4988 |
| hp5p15612orf2 | 227 | 4989 |
| hp5p15641_21698387_c2_20 | 228 | 4990 |
| hp5p15641orf23 | 229 | 4991 |
| 02ae31010_30208317_f1_14 | 230 | 4992 |
| hp1p13947orf10 | 231 | 4993 |
| 06cp11217_4881263_f2_9 | 232 | 4994 |
| hp1p13852orf7 | 233 | 4995 |
| hpy06cp10117orf_0002.aa | 234 | 4996 |
| 06cp10117orf2 | 235 | 4997 |
| 05ce10420orf1 | 236 | 4998 |
| 09cp10224_1062966_c3_61 | 237 | 4999 |
| 09cp10224_1062966_c1_44 | 238 | 5000 |
| 09cp10224_1412715_c3_56 | 239 | 5001 |
| 01ce10516orf20 | 240 | 5002 |
| 09cp10224_1962590_f3_31 | 241 | 5003 |
| 1962590 | 242 | 5004 |
| 01ce10516orf2 | 243 | 5005 |
| hpy03ge10505orf_0004.aa | 244 | 5006 |
| 03ge10505orf2 | 245 | 5007 |
| hpy03ge10505orf_0002.aa | 246 | 5008 |
| hpyhp3e10302orf_0003.aa | 247 | 5009 |
| hp3e10302orf17 | 248 | 5010 |
| 06cp30603_679218_f2_34 | 249 | 5011 |
| hpy05gp11608orf_0002.aa | 250 | 5012 |
| hpy02ee10520orf_0001.aa | 251 | 5013 |
| hpy05gp11608orf_0001.aa | 252 | 5014 |
| 13ae10610_6522827_c3_37 | 253 | 5015 |
| 13ae10610_156411_c3_33 | 254 | 5016 |
| 04ge10816_22086531_f2_10 | 255 | 5017 |
| 04ge10816_859692_f3_12 | 256 | 5018 |
| 04ge11210orf1 | 257 | 5019 |
| 04ge11210orf2 | 258 | 5020 |
| hpy04ge11210orf_0001.aa | 259 | 5021 |
| 13ae10610_859692_c2_32 | 260 | 5022 |
| 13ap10511_12891718_c1_2 | 261 | 5023 |
| hpy13ap10511orf_0001.aa | 262 | 5024 |
| 32609403 | 263 | 5025 |
| 11ee11408_10584582_c3_51 | 264 | 5026 |
| 05gp11901orf25 | 265 | 5027 |
| 03ae10804_12609533_c1_26 | 266 | 5028 |
| 06ep10306orf10 | 267 | 5029 |
| hpyhp5e11726orf_0008.aa | 268 | 5030 |
| 06ep11509_35954752_f2_1 | 269 | 5031 |
| hp2p10625orf7 | 270 | 5032 |
| 03ae10804_14495437_c2_38 | 271 | 5033 |
| 03ee11215orf39 | 272 | 5034 |
| hp4e53394_11798952_c2_101 | 273 | 5035 |
| 06ep30223_34409437_f3_94 | 274 | 5036 |
| hp3e11024orf5 | 275 | 5037 |
| hp3e11024orf23 | 276 | 5038 |
| 06ep30223_34409437_f1_34 | 277 | 5039 |
| 06ep30223_34409437_f2_64 | 278 | 5040 |
| 29ge10111orf1 | 279 | 5041 |
| 29ge10111orf3 | 280 | 5042 |
| 06ce20610_1367157_f1_8 | 281 | 5043 |
| 14ee10308orf1 | 282 | 5044 |
| 14ee10308orf7 | 283 | 5045 |
| 02gp20814_3984818_f1_1 | 284 | 5046 |
| hpy14ee10308orf_0009.aa | 285 | 5047 |
| 11ae12004_4298568_c3_51 | 286 | 5048 |
| hpy14ee10308orf_0008.aa | 287 | 5049 |
| 11ae12004_3367666_c2_41 | 288 | 5050 |
| 06ge20501_4298568_c3_53 | 289 | 5051 |
| 10553192 | 290 | 5052 |
| 11ae80818_10553192_f2_16 | 291 | 5053 |
| 06cp11722orf16 | 292 | 5054 |
| 11ae80818_19632781_c3_57 | 293 | 5055 |
| 06cp11722orf11 | 294 | 5056 |
| 14ce61516_24609816_f2_9 | 295 | 5057 |
| 03ap21820orf8 | 296 | 5058 |
| 11ae80818_7952_c1_49 | 297 | 5059 |
| hpy07ee11519orf_0002aa | 298 | 5060 |
| hpy02ce10114orf_0004.aa | 299 | 5061 |
| 07ee11519orf1 | 300 | 5062 |
| hpy07ee11519orf_0001.aa | 301 | 5063 |
| hp7e10192_5869188_c3_17 | 302 | 5064 |
| 05ce10910_25598277_f3_3 | 303 | 5065 |
| hp7e10192_25598277_c2_15 | 304 | 5066 |
| 11ap20714_2077_c3_103 | 305 | 5067 |
| hpyhp5e15440orf_0009.aa | 306 | 5068 |
| 04gp11803orf11 | 307 | 5069 |
| 04gp11803orf13 | 308 | 5070 |
| 06ap20306_23437632_f3_9 | 309 | 5071 |
| 11ap20714_34023312_f3_46 | 310 | 5072 |
| hp3e10057orf3 | 311 | 5073 |
| 14ee11217orf4 | 312 | 5074 |
| 14ee11217orf2 | 313 | 5075 |
| 11ap20714_4960432_c3_97 | 314 | 5076 |
| hpy04gp11803orf_0013.aa | 315 | 5077 |
| 05ap21216orf4 | 316 | 5078 |
| 07ap20216_7227202_f3_10 | 317 | 5079 |
| 11ap20714_7227202_f3_40 | 318 | 5080 |
| 11ap20714_7227202_f3_43 | 319 | 5081 |
| hp1p14013_11726503_c2_20 | 320 | 5082 |
| hp1p14013orf17 | 321 | 5083 |
| 02cp10615_21908138_f1_4 | 322 | 5084 |
| hpyhp1p14013orf_0008.aa | 323 | 5085 |
| hp3p10304orf2 | 324 | 5086 |
| 02cp10615_26573462_c1_45 | 325 | 5087 |
| 31250333 | 9528 | 9640 |
| 24488537 | 9529 | 9641 |
| 16225006 | 9530 | 9642 |
| 486075 | 9531 | 9643 |
| 2458267 | 9532 | 9644 |
| 26614041 | 9533 | 9645 |
| 23567137 | 9535 | 9534 |
| 1367157 | 9535 | 9647 |
| A.2.2 Terminal phe residue and C- | | |
| terminal tyrosine cluster | | |
| 06ee10709_21675012_f1_2 | 326 | 5088 |
| 06ee10709orf2 | 327 | 5089 |
| hpy13ee10216orf_0036.aa | 328 | 5090 |
| 02ge41622_34176513_c1_50 | 329 | 5091 |
| 01cp20708_36134808_f2_11 | 330 | 5092 |
| 14ee10419orf5 | 331 | 5093 |
| hpy14ee10419orf_0001.aa | 332 | 5094 |
| 01ce10320_30273587_f3_38 | 333 | 5095 |
| 07ge11521_14160930_f3_23 | 342 | 5104 |
| hpy29ap11902orf_0001.aa | 343 | 5105 |
| 29ap11902orf1 | 344 | 5106 |
| 29ap10306orf3 | 345 | 5107 |
| hpy29ap10306orf_0003.aa | 346 | 5108 |
| 04ep41903_26757937_f1_2 | 347 | 5109 |
| 04ep41903_26757937_f3_16 | 348 | 5110 |
| 14ee21118orf2 | 349 | 5111 |
| hpy04cp11809orf_0001.aa | 350 | 5112 |
| hp3p11121_14454686_f2_1 | 351 | 5113 |
| 14ee21118orf1 | 352 | 5114 |
| hpy04cp11809orf_0002.aa | 353 | 5115 |
| 04ep41903_4101593_f2_10 | 354 | 5116 |
| 116018 | 355 | 5117 |
| 01ae12001_116018_c2_40 | 356 | 5118 |
| 06ap10609_116018_c3_50 | 357 | 5119 |
| 07gp11807orf48 | 358 | 5120 |
| 05ee10816_36126938_f3_16 | 359 | 5121 |
| 36126938 | 360 | 5122 |
| 06ep10615_36126938_f1_14 | 361 | 5123 |
| 04ce11617orf2 | 362 | 5124 |
| 01ge10801orf2 | 369 | 5131 |
| hpy01ge10801orf_0001.aa | 370 | 5132 |
| hpyhp3p11022orf_0002.aa | 371 | 5133 |
| hpyhp3p11022orf_0001.aa | 372 | 5134 |
| 02ae31010_12504512_f3_28 | 373 | 5135 |
| hpy12ap11614orf_0001.aa | 374 | 5136 |
| hpyhp5p15641orf_0002.aa | 375 | 5137 |
| hp7e10520_14728137_f1_1 | 376 | 5138 |
| 02ae31010_417818_f3_29 | 377 | 5139 |
| 01ge10801orf3 | 378 | 5140 |
| 3964593 | 379 | 5141 |
| 06cp30603_4687507_f1_7 | 380 | 5142 |
| 06cp30603_4687507_f1_9 | 381 | 5143 |
| 05cp20518orf9 | 382 | 5144 |
| hpy04ge11210orf_0003.aa | 383 | 5145 |
| 13ae10610_26855313_f3_15 | 384 | 5146 |
| 13ae10610orf2 | 385 | 5147 |
| hpy13ae10610orf_0001.aa | 386 | 5148 |
| 13ae10610orf1 | 387 | 5149 |
| 13ae10610_33726080_f1_1 | 388 | 5150 |
| 13ae10610_35912_f2_3 | 389 | 5151 |
| hp3p11086orf2 | 390 | 5152 |
| hp3p11086orf1 | 391 | 5153 |
| hp5p15575_33445317_f2_20 | 392 | 5154 |
| hpy06cp11722orf_0001.aa | 393 | 5155 |
| 06cp11722orf5 | 394 | 5156 |
| 11ae80818_7290627_c2_51 | 395 | 5157 |
| hp7e10590_26172564_c1_68 | 396 | 5158 |
| hp7e10590_7072317_c1_70 | 397 | 5159 |
| 4687507 | 9536 | 9648 |
| A.2.3 C-terminal tyrosine cluster motif | | |
| hpy02ap10310orf_0004.aa | 334 | 5096 |
| 02ap10310orf2 | 335 | 5097 |
| 02ap10310orf1 | 336 | 5098 |
| 02ap10310_30089800_f3_3 | 337 | 5099 |
| 02ap10310orf3 | 338 | 5100 |
| hpy02ap10310orf_0001.aa | 339 | 5101 |
| 02ap10310_22789651_f1_1 | 340 | 5102 |
| 04ep41903_21564052_c2_56 | 341 | 5103 |
| hpy29ep20112orf_0001.aa | 363 | 5125 |
| 29ep20112orf2 | 364 | 5126 |
| 06gp71906_20486556_f2_65 | 365 | 5127 |
| 06ep10615_961562_f2_41 | 366 | 5128 |
| 06ep10615_961562_f1_15 | 367 | 5129 |
| 06gp71906_961562_f3_117 | 368 | 5130 |
| 06gp10108orf2 | 398 | 5160 |
| hpy06gp10108orf_0003.aa | 399 | 5161 |
| 09cp61003_492187_c2_80 | 400 | 5162 |
| 01ce61016_492187_c3_120 | 401 | 5163 |
| 01ce10516orf21 | 402 | 5164 |
| 09cp10224_429510_c2_46 | 403 | 5165 |
| 07cp21714orf2 | 404 | 5166 |
| 07cp21714orf1 | 405 | 5167 |
| 07cp21714orf3 | 406 | 5168 |
| 07ce11019_22051291_f1_1 | 407 | 5169 |
| 14gp11423_26803801_f1_1 | 408 | 5170 |
| 06cp11217_19720300_f3_11 | 409 | 5171 |
| hp4e53394_22864682_c2_86 | 410 | 5172 |
| hp4e53394_19720300_c3_98 | 411 | 5173 |
| hp1p13852orf6 | 412 | 5174 |
| hp4e53394_26209843_c3_98 | 413 | 5175 |
| hp4e53394_26756900_c3_103 | 414 | 5176 |
| hp6p12244_5273452_c2_82 | 415 | 5177 |
| 01cp11414orf2 | 416 | 5178 |
| 07gp11909_26460892_f2_6 | 424 | 5186 |
| 02ap11117_26460892_f1_15 | 425 | 5187 |
| A.2.4 Via homology | | |
| hp6e12267_4721061_c1_41 | 417 | 5179 |
| 09cp61003_4721061_f1_16 | 418 | 5180 |
| 4721061 | 419 | 5181 |
| 12ge20305orf2 | 420 | 5182 |
| 09cp11003_5945252_f2_4 | 421 | 5183 |
| 09cp61003_5945252_f1_5 | 422 | 5184 |
| 14ge10705orf3 | 423 | 5185 |
| 01ae11010_40688_c2_38 | 426 | 5188 |
| hp4p33322_40688_c1_38 | 427 | 5189 |
| hp3e11075orf3 | 428 | 5190 |
| 14ce31519orf1 | 429 | 5191 |
| 14ce11519orf4 | 430 | 5192 |
| 04ep41903_4538588_f3_21 | 431 | 5193 |
| 04ep41903_4538588_f2_20 | 432 | 5194 |
| 05ae11108orf1 | 433 | 5195 |
| hpy05ae11108orf_0001.aa | 434 | 5196 |
| 03ce10801orf1 | 435 | 5197 |
| hpy03ce10801orf_0001.aa | 436 | 5198 |
| 03ce10801orf4 | 437 | 5199 |
| 05ae30220_4487562_c1_101 | 438 | 5200 |
| 05ae30220_26834500_c2_164 | 439 | 5201 |
| 5083193 | 440 | 5202 |
| 05ae30220_5083193_c3_165 | 441 | 5203 |
| 07ap80601orf8 | 442 | 5204 |
| 07ap80601_5083193_f3_8 | 443 | 5205 |
| hp5p15212_13729635_c3_35 | 444 | 5206 |
| 06gp10409_3398427_f2_12 | 445 | 5207 |
| 13ae10511orf3 | 446 | 5208 |
| hpy13ae10511orf_0001.aa | 447 | 5209 |
| 06gp10409_3398427_f2_12 | 448 | 5210 |
| 06gp71906_2003143_c3_217 | 449 | 5211 |
| hpy16cp30109orf_0001.aa | 450 | 5212 |
| 4490717 | 451 | 5213 |
| hpy16cp30109orf_0002.aa | 452 | 5214 |
| 16cp30109orf6 | 453 | 5215 |
| 04cp11202_4490717_f2_29 | 454 | 5216 |
| hpy06ce31218orf_0001.aa | 455 | 5217 |
| 14ee41924_1046877_c3_104 | 456 | 5218 |
| 07ee11402_1046877_c3_100 | 457 | 5219 |
| hpy02ep30607orf_0014.aa | 458 | 5220 |
| hpy02ep30607orf_0012.aa | 459 | 5221 |
| 02ep30607orf27 | 460 | 5222 |
| 14ee41924_23527267_c3_107 | 461 | 5223 |
| 07ee11402_10759567_c2_86 | 462 | 5224 |
| hpy02ep30607orf_0015.aa | 463 | 5225 |
| 14ee41924_33203917_c2_85 | 464 | 5226 |
| 3906963 | 465 | 5227 |
| 04ee11108_3906963_f1_7 | 466 | 5228 |
| 27ze10351orf5 | 467 | 5229 |
| 06cp30603_23476568_c1_44 | 468 | 5230 |
| 978477 | 469 | 5231 |
| 05cp20518orf39 | 470 | 5232 |
| 06cp30603_978517_c3_137 | 471 | 5233 |
| hpy04gp11213orf_0009.aa | 472 | 5234 |
| hpy02ce12007orf_0003.aa | 473 | 5235 |
| hpy02ce12007orf_0002.aa | 474 | 5236 |
| hp1p13939orf13 | 475 | 5237 |
| 05ce10208_4766691_c2_18 | 476 | 5238 |
| 4766691 | 477 | 5239 |
| hpyhp1p13939orf_0001.aa | 478 | 5240 |
| hp1p13939_21641016_f1_1 | 479 | 5241 |
| hp4p62853_4766691_f3_23 | 480 | 5242 |
| 03xe11215orf7 | 481 | 5243 |
| 03xe11215orf8 | 482 | 5244 |
| 02ae11612_22477267_f2_27 | 483 | 5245 |
| 02gp20814_24415958_f3_9 | 484 | 5246 |
| 14ee10308orf4 | 485 | 5247 |
| 09cp21607_31262_c2_11 | 486 | 5248 |
| 31262 | 487 | 5249 |
| 07gp31516orf4 | 488 | 5250 |
| 35887 | 489 | 5251 |
| 11ap20714_4797137_f3_45 | 490 | 5252 |
| hp3e10057orf2 | 491 | 5253 |
| A.2.5 Other outer membrane proteins | | |
| 04ep41903_23867687_c2_32 | 492 | 5254 |
| 23867687 | 493 | 5255 |
| 09ae11601orf11 | 494 | 5256 |
| 06ep10615_9842_f3_46 | 495 | 5257 |
| 06ep10615_189160_f3_47 | 496 | 5258 |
| hpy05ep11717orf_0008.aa | 497 | 5259 |
| 05ep11717orf2 | 498 | 5260 |
| 06ep10615_9842_f1_5 | 499 | 5261 |
| hpy02ae20216orf_0001.aa | 500 | 5262 |
| hpy02ce30710orf_0006.aa | 501 | 5263 |
| 02ae20216orf2 | 502 | 5264 |
| hpyhp1e10506orf_0008.aa | 503 | 5265 |
| 05cp21223_29308518_c2_24 | 504 | 5266 |
| 06ep30223_104052_c2_138 | 505 | 5267 |
| 05cp21223_23831400_c1_22 | 506 | 5268 |
| hp1e10506orf22 | 507 | 5269 |
| 14cp10923_4414000_f3_11 | 508 | 5270 |
| 4414000 | 509 | 5271 |
| 14cp10923orf8 | 510 | 5272 |
| A.3 Inner membrane | | |
| A.3.1 Proteins involved in transport | | |
| hp6e12267_1069213_f3_31 | 511 | 5273 |
| 12ge20305orf35 | 512 | 5274 |
| 11132778 | 513 | 5275 |
| hp6e12267_11132778_c2_48 | 514 | 5276 |
| 12ge10305orf16 | 515 | 5277 |
| 20032561 | 516 | 5278 |
| 09ap20802orf27 | 517 | 5279 |
| hp2p10272_4100312_c2_35 | 518 | 5280 |
| 02ge10116_24238762_c1_22 | 519 | 5281 |
| 24238762 | 520 | 5282 |
| 02ge20116orf28 | 521 | 5283 |
| hpyhp3e11168orf_0011.aa | 522 | 5284 |
| 23492181 | 523 | 5285 |
| 23853165 | 524 | 5286 |
| hp3e11168orf29 | 525 | 5287 |
| 04gp11701_23442187_c3_32 | 526 | 5288 |
| 14ce31519_15635927_f3_15 | 527 | 5289 |
| 02ce10809orf6 | 528 | 5290 |
| 02ce10809orf16 | 529 | 5291 |
| 14ce31519_24650009_c1_17 | 530 | 5292 |
| 04ep41903_16667055_c1_37 | 531 | 5293 |
| 04ep41903_19689182_c1_43 | 532 | 5294 |
| 2461062 | 533 | 5295 |
| 1179838 | 534 | 5296 |
| 05ae30220_4954526_f3_53 | 535 | 5297 |
| 05ae20220orf32 | 536 | 5298 |
| 05ae20220orf54 | 537 | 5299 |
| 05ae30220_1179838_f2_53 | 538 | 5300 |
| 5878208 | 539 | 5301 |
| 27ze10351orf29 | 540 | 5302 |
| 23728388 | 541 | 5303 |
| 27ze10351orf24 | 542 | 5304 |
| 04ee11108_23728388_c2_22 | 543 | 5305 |
| 35345228 | 544 | 5306 |
| 04ee11108_3914683_c3_27 | 545 | 5307 |
| 27ze10351orf18 | 546 | 5308 |
| hpy27ze10351orf_0001.aa | 547 | 5309 |
| 05ae30220_3914683_c1_106 | 548 | 5310 |
| 11924177 | 549 | 5311 |
| 04ee11108_56313_f1_9 | 550 | 5312 |
| 27ze10351orf7 | 551 | 5313 |
| 01ae12001_14714687_f2_16 | 552 | 5314 |
| 14714687 | 553 | 5315 |
| 07gp11807orf9 | 554 | 5316 |
| 07gp11807orf29 | 555 | 5317 |
| 19531291 | 556 | 5318 |
| 42683 | 557 | 5319 |
| 07gp11807orf49 | 558 | 5320 |
| 01ae12001_19536375_c2_41 | 559 | 5321 |
| 01ae12001_3319687_f1_10 | 560 | 5322 |
| 3319687 | 561 | 5323 |
| 07gp11807orf25 | 562 | 5324 |
| 5875152 | 563 | 5325 |
| 01ae12001_5875152_f2_15 | 564 | 5326 |
| 07gp11807orf8 | 565 | 5327 |
| 06ap11119_9860256_f1_4 | 566 | 5328 |
| hp6p10723orf11 | 567 | 5329 |
| 01ce11513orf29 | 568 | 5330 |
| 01ce11513orf33 | 569 | 5331 |
| 1464715 | 570 | 5332 |
| 06cp11118_1464715_c2_19 | 571 | 5333 |
| 06cp11118_26823300_c1_15 | 572 | 5334 |
| 06cp11118_213561_c1_15 | 573 | 5335 |
| 01ce11513orf22 | 574 | 5336 |
| 12ap11619orf1 | 575 | 5337 |
| hpy12ap11619orf_0001.aa | 576 | 5338 |
| 06cp11118_391525_c2_18 | 577 | 5339 |
| 06ep10615_15659509_c1_51 | 578 | 5340 |
| 06ep10615_5203401_c3_87 | 579 | 5341 |
| 11cp10113orf4 | 580 | 5342 |
| hpy11cp10113orf_0001.aa | 581 | 5343 |
| 29zp10241orf4 | 582 | 5344 |
| 14cp20718_20210817_f1_1 | 583 | 5345 |
| 07ap61111_33330468_f1_6 | 584 | 5346 |
| 12ae11420orf1 | 585 | 5347 |
| hpy12ae11420orf_0001.aa | 586 | 5348 |
| 14ee41924_24001568_f2_40 | 587 | 5349 |
| 07ee11402_24001568_f1_15 | 588 | 5350 |
| 07ae11611orf1 | 589 | 5351 |
| hpy07ae11611orf_0001.aa | 590 | 5352 |
| 07ee11402_32431453_f1_1 | 591 | 5353 |
| 24609593 | 592 | 5354 |
| 14ce11113orf1 | 593 | 5355 |
| hpy14ce11113orf_0001.aa | 594 | 5356 |
| 07ee11402_5127343_f3_2 | 595 | 5357 |
| hpy14ae20424orf_0002.aa | 596 | 5358 |
| 04ae61517_1048812_f1_1 | 597 | 5359 |
| 04ae21517orf1 | 598 | 5360 |
| 04ae61517_24802342_f2_3 | 599 | 5361 |
| 07ee50709_411457_f2_68 | 600 | 5362 |
| 10723412 | 601 | 5363 |
| 02ae31010_4455467_c2_84 | 602 | 5364 |
| 02ce11022orf8 | 603 | 5365 |
| 07ae32002orf3 | 604 | 5366 |
| hpy07ae32002orf_0002.aa | 605 | 5367 |
| hp4p13446orf10 | 606 | 5368 |
| hp6p10904_22069680_f3_12 | 607 | 5369 |
| hpy06gp11202orf_0001.aa | 608 | 5370 |
| hpy06gp111202orf_0002.aa | 609 | 5371 |
| 33399142 | 610 | 5372 |
| 06gp11202orf7 | 611 | 5373 |
| hpy06gp11202orf_0003.aa | 612 | 5374 |
| 09ce10413_24428452_f1_5 | 613 | 5375 |
| hp6p10904_6726062_f3_13 | 614 | 5376 |
| 09ce10413_26734687_f3_23 | 615 | 5377 |
| hpyhp3e10302orf_0001.aa | 616 | 5378 |
| 29479681 | 617 | 5379 |
| 05cp20518orf33 | 618 | 5380 |
| 06cp30603_22666625_f3_58 | 619 | 5381 |
| 06cp30603_664083_c1_94 | 620 | 5382 |
| 06cp30603orf10 | 621 | 5383 |
| 06cp30603orf9 | 622 | 5384 |
| 06cp30603_36359687_c3_78 | 623 | 5385 |
| 06cp30603_36359687_c3_161 | 624 | 5386 |
| 09cp10713_36359687_c1_119 | 625 | 5387 |
| 16406265 | 626 | 5388 |
| 12ge10321_4691563_f2_6 | 627 | 5389 |
| hp4p11352orf4 | 628 | 5390 |
| 12ae10622_24406450_f1_9 | 629 | 5391 |
| 179677 | 630 | 5392 |
| 03ae10804_22459680_f1_4 | 631 | 5393 |
| hp5e11726orf7 | 632 | 5394 |
| hp1e80523_3906693_f1_2 | 633 | 5395 |
| hp3e10929orf1 | 634 | 5396 |
| hp3e11188_26359712_f2_3 | 635 | 5397 |
| 06ep11108orf13 | 636 | 5398 |
| hpy06ep11108orf_0009.aa | 637 | 5399 |
| 01ep10216orf9 | 638 | 5400 |
| hp4e13394_19656577_f3_57 | 639 | 5401 |
| hp5e13045orf1 | 640 | 5402 |
| 02ae11611orf11 | 641 | 5403 |
| hp$$0$$ae11611orf_0005.aa | 642 | 5404 |
| hp4e53394_24744002_f1_1 | 643 | 5405 |
| hp5e13045_24744002_f1_1 | 644 | 5406 |
| hp1p13939_817683_c3_36 | 645 | 5407 |
| hp4p62853_15818754_c2_42 | 646 | 5408 |
| 783432 | 647 | 5409 |
| 05cp11911orf27 | 648 | 5410 |
| 02ae11612_14641535_c1_57 | 649 | 5411 |
| 02ae11612_4338438_c3_91 | 650 | 5412 |
| 4338438 | 651 | 5413 |
| 05cp11911orf41 | 652 | 5414 |
| hp5p15575_292564_c2_38 | 653 | 5415 |
| hp5e15084orf6 | 654 | 5416 |
| hp6e10491_31757638_f1_1 | 655 | 5417 |
| 24416083 | 656 | 5418 |
| 13ae10712orf4 | 657 | 5419 |
| 13ae10712_24416083_f2_10 | 658 | 5420 |
| 05gp20111orf1 | 659 | 5421 |
| 06ce20610_4086003_c1_28 | 660 | 5422 |
| 13ae10712orf9 | 661 | 5423 |
| 22379952 | 662 | 5424 |
| 13ae10712_4725342_f1_4 | 663 | 5425 |
| 03ap21820orf5 | 664 | 5426 |
| 03ap21820orf17 | 665 | 5427 |
| 11ae80818_36131282_c3_64 | 666 | 5428 |
| 10353192 | 667 | 5429 |
| 12ap10324_16422591_f3_4 | 668 | 5430 |
| 12ap10324orf2 | 669 | 5431 |
| 01ce11513orf21 | 670 | 5432 |
| 02ep20506_4882763_c2_19 | 671 | 5433 |
| hp7p10287_4882763_f2_9 | 672 | 5434 |
| 33203192 | 673 | 5435 |
| 06ap11418_33203192_f1_1 | 674 | 5436 |
| hp5e15440orf16 | 675 | 5437 |
| 03ae11503_4532892_c2_19 | 676 | 5438 |
| 03ae11503orf10 | 677 | 5439 |
| 4826401 | 678 | 5440 |
| 01ae22001orf5 | 679 | 5441 |
| 01ae22001orf2 | 680 | 5442 |
| 01ae22001orf1 | 681 | 5443 |
| 02cp10615_33877086_c3_61 | 682 | 5444 |
| 22453166 | 9537 | 9649 |
| 875042 | 9538 | 9650 |
| 19536375 | 9539 | 9651 |
| 10675632 | 9540 | 9652 |
| 24218968 | 9541 | 9653 |
| 13726562 | 9542 | 9654 |
| 36131282 | 9543 | 9655 |
| 16422591 | 9544 | 9656 |
| 4882763 | 9545 | 9657 |
| 36573502 | 9546 | 9658 |
| A.3.1.1 Proteins involved in amino acid | | |
| metabolism & transport | | |
| 2042312 | 683 | 5445 |
| 02gp20706_2042312_c1_44 | 684 | 5446 |
| 01cp11710orf34 | 685 | 5447 |
| 04ap20119orf5 | 686 | 5448 |
| 01cp10707orf2 | 687 | 5449 |
| 02ge11810_32538290_f1_4 | 688 | 5450 |
| 02ge11810_867187_f3_10 | 689 | 5451 |
| 02ge11810_867187_f3_9 | 690 | 5452 |
| 02ce10809orf2 | 691 | 5453 |
| 02ce10809orf4 | 692 | 5454 |
| 14ce31519_16042_f2_11 | 693 | 5455 |
| 02ce10809orf5 | 694 | 5456 |
| 14ce31519_9960937_f3_14 | 695 | 5457 |
| 24215 | 696 | 5458 |
| 06gp10409_80130_c2_24 | 697 | 5459 |
| 06gp10409_80130_c1_24 | 698 | 5460 |
| 04ep10811orf4 | 699 | 5461 |
| 02ae31522orf4 | 700 | 5462 |
| 02ae31522orf3 | 701 | 5463 |
| 14gp11720_3906693_c3_4 | 702 | 5464 |
| 02ae41522_3906693_c2_3 | 703 | 5465 |
| 35269000 | 704 | 5466 |
| 02ae11611orf1 | 705 | 5467 |
| hpy02ae11611orf_0001.aa | 706 | 5468 |
| hp4e53394_30602256_c3_124 | 707 | 5469 |
| hp5e13045_4454655_c3_14 | 708 | 5470 |
| hp4e53394_4460905_c3_121 | 709 | 5471 |
| hpy14ce10720orf_0001.aa | 710 | 5472 |
| 01ee11622orf2 | 711 | 5473 |
| hpy01ee11622orf_0001.aa | 712 | 5474 |
| hp5p15575_1955465_c3_41 | 713 | 5475 |
| 02cp11813orf1 | 714 | 5476 |
| hp6e50324_24507825_c3_12 | 715 | 5477 |
| 03ae10804orf2 | 716 | 5478 |
| hp5e11726orf2 | 717 | 5479 |
| hp5e11726orf4 | 718 | 5480 |
| 36203402 | 719 | 5481 |
| 03ae10804_192208_f2_9 | 720 | 5482 |
| 5083577 | 9547 | 9659 |
| 289711 | 9548 | 9660 |
| “A.3.1.2 Involved in nucleotide, lipid, or | | |
| cofactor metabolism & transport” | | |
| 02gp20706_24415918_f3_20 | 721 | 5483 |
| 01cp11710orf2 | 722 | 5484 |
| 12ae11404orf16 | 723 | 5485 |
| 12ae11404orf17 | 724 | 5486 |
| 12ae11404_19963577_c3_15 | 725 | 5487 |
| 12ae11404orf14 | 726 | 5488 |
| 12ae11404orf15 | 727 | 5489 |
| 12ae11404orf11 | 728 | 5490 |
| hpy12ae11404orf_0011.aa | 729 | 5491 |
| 05ee11015_26375799_c1_10 | 730 | 5492 |
| 12ae11404_992256_c3_14 | 731 | 5493 |
| 09ae10512orf3 | 732 | 5494 |
| 09ae10512orf1 | 733 | 5495 |
| hpy09ae10512orf_0001.aa | 734 | 5496 |
| 07ee20513orf11 | 735 | 5497 |
| 09ae10512_23942135_f1_1 | 736 | 5498 |
| 06ae11016_14063177_f3_23 | 737 | 5499 |
| 06gp71906_25478192_c1_131 | 738 | 5500 |
| hp3e11122orf3 | 739 | 5501 |
| 29gp20307orf1 | 740 | 5502 |
| hpy11ee21702orf_0001.aa | 741 | 5503 |
| 11ee21702orf1 | 742 | 5504 |
| hp5p15641_4335890_c2_27 | 743 | 5505 |
| 02ae31010_5085162_c1_47 | 744 | 5506 |
| 07ce10203orf11 | 745 | 5507 |
| hpy05cp20518orf_0001.aa | 746 | 5508 |
| 24824087 | 747 | 5509 |
| hpy05cp20518orf_0002.aa | 748 | 5510 |
| 06cp30603orf11 | 749 | 5511 |
| 06cp30603_14663917_c1_51 | 750 | 5512 |
| 06cp30603_24256503_c1_110 | 751 | 5513 |
| 01ge10214orf1 | 752 | 5514 |
| hpy01ge10214orf_0001.aa | 753 | 5515 |
| hp3e11188_24417800_f2_4 | 754 | 5516 |
| 03ee11215_22367062_c2_29 | 755 | 5517 |
| 03ee11215orf38 | 756 | 5518 |
| 01ge10203orf1 | 757 | 5519 |
| 01ge10203orf3 | 758 | 5520 |
| 01ge10203_4875375_f2_3 | 759 | 5521 |
| hp3e11024orf8 | 760 | 5522 |
| hp3e11024orf18 | 761 | 5523 |
| 06ep30223_204582_f1_39 | 762 | 5524 |
| 02cp11721orf20 | 763 | 5525 |
| hp7e10100_5350012_c2_18 | 764 | 5526 |
| 24806290 | 9549 | 9661 |
| A.3.1.3 Proteins involved in inorganic | | |
| ion transport | | |
| 01cp11710orf28 | 765 | 5527 |
| 01cp11710orf37 | 766 | 5528 |
| 02gp20706_24645837_c3_64 | 767 | 5529 |
| 02gp20706_4879625_f2_9 | 768 | 5530 |
| 02ge10116_4879625_f3_58 | 769 | 5531 |
| 01cp11710orf10 | 770 | 5532 |
| 06gp10409orf9 | 771 | 5533 |
| 04ep10811orf2 | 772 | 5534 |
| 06gp10409orf8 | 773 | 5535 |
| 06gp10409orf7 | 774 | 5536 |
| hpy06gp10409orf_0004.aa | 775 | 5537 |
| 06gp10409_21751016_c3_26 | 776 | 5538 |
| 06gp10409_4881318_c1_21 | 777 | 5539 |
| 06gp10409_4881318_c3_30 | 778 | 5540 |
| 14ce20219orf2 | 779 | 5541 |
| 14ce20219orf1 | 780 | 5542 |
| 14ce20219orf4 | 781 | 5543 |
| 06gp71906_667968_f3_66 | 782 | 5544 |
| 09cp10502orf18 | 783 | 5545 |
| 09cp10502orf11 | 784 | 5546 |
| 07ae11008_250652_c3_59 | 785 | 5547 |
| 07ae11008_15806538_c1_38 | 786 | 5548 |
| 16406581 | 787 | 5549 |
| 07ce11019_3931943_c1_11 | 788 | 5550 |
| 07cp21714orf13 | 789 | 5551 |
| 114505 | 790 | 5552 |
| 11ap11902orf3 | 791 | 5553 |
| hpy11ap11902orf_0001.aa | 792 | 5554 |
| 11ae80818_11188791_c3_60 | 793 | 5555 |
| 06cp11722orf12 | 794 | 5556 |
| 11ae80818_25593768_c1_44 | 795 | 5557 |
| 14cp11908_25593768_c3_97 | 796 | 5558 |
| 11ae80818_6828218_f2_19 | 797 | 5559 |
| 6828218 | 798 | 5560 |
| 06cp11722orf21 | 799 | 5561 |
| 24645837 | 9550 | 9662 |
| 3203142 | 9551 | 9663 |
| 34666680 | 9552 | 9664 |
| 22441050 | 9553 | 9665 |
| 26258562 | 9554 | 9666 |
| A.3.1.4 Proteins involved in | | |
| carbohydrate metabolism & transport | | |
| 21742157 | 800 | 5562 |
| 07ce11409orf4 | 801 | 5563 |
| 14ee41924_5865675_f1_18 | 802 | 5564 |
| A.3.2 Proteins involved in outer | | |
| membrane and cell wall formation | | |
| hp6p80503_235782_f3_18 | 803 | 5565 |
| 01ce11016orf19 | 804 | 5566 |
| 01ce11016orf22 | 805 | 5567 |
| hp6p80503_26593953_f1_4 | 806 | 5568 |
| 01ce61016_26593953_c1_113 | 807 | 5569 |
| 14ce11503orf3 | 808 | 5570 |
| 09cp11003_24646926_c2_13 | 809 | 5571 |
| 14ge10705orf11 | 810 | 5572 |
| hpy14ge10705orf_0005.aa | 811 | 5573 |
| 09cp61003_29322967_c1_75 | 812 | 5574 |
| 04ap20119orf2 | 813 | 5575 |
| 02ge11810_35282625_f3_9 | 814 | 5576 |
| 06cp20302orf1 | 815 | 5577 |
| hpy06cp20302orf_0001.aa | 816 | 5578 |
| 06ep11202_24219093_c3_30 | 817 | 5579 |
| hpy06ap10209orf_0005.aa | 818 | 5580 |
| 06ap10209orf3 | 819 | 5581 |
| 25992137 | 820 | 5582 |
| 04ge11713orf37 | 821 | 5583 |
| hpy04ge11713orf_0020.aa | 822 | 5584 |
| 04cp11202_3178500_c1_76 | 823 | 5585 |
| 04cp11202_3178500_c3_110 | 824 | 5586 |
| 11ep12011orf5 | 825 | 5587 |
| 11ep12011orf9 | 826 | 5588 |
| 06gp71906_3945965_c2_153 | 827 | 5589 |
| 13ap11517orf25 | 828 | 5590 |
| 13ap11517orf20 | 829 | 5591 |
| 06cp10411orf6 | 830 | 5592 |
| 12gp31106_5267037_c1_43 | 831 | 5593 |
| 06gp71906_5267037_f3_106 | 832 | 5594 |
| 07ae11008_24409577_c3_56 | 833 | 5595 |
| 07ae11008_24409577_c1_37 | 834 | 5596 |
| 25605166 | 835 | 5597 |
| 04ee11108_954683_c1_15 | 836 | 5598 |
| 27ze10351orf17 | 837 | 5599 |
| 14gp12015orf16 | 838 | 5600 |
| hp2e10229orf2 | 839 | 5601 |
| 14gp12015orf13 | 840 | 5602 |
| 06ep30223_4698838_f2_55 | 841 | 5603 |
| 03ap21820orf9 | 842 | 5604 |
| 03ap21820orf3 | 843 | 5605 |
| 03ap21820orf11 | 844 | 5606 |
| 11ae80818_24415917_c1_45 | 845 | 5607 |
| hpy02cp11721orf_0004.aa | 846 | 5608 |
| 02cp11721orf14 | 847 | 5609 |
| hp7e10100_1359450_c1_14 | 848 | 5610 |
| 22460468 | 9555 | 9667 |
| 23468781 | 9556 | 9668 |
| 495312 | 9557 | 9669 |
| 5267037 | 9558 | 9670 |
| 4698838 | 9559 | 9671 |
| 24415917 | 9560 | 9672 |
| A.3.3 Proteins involved in energy | | |
| conversion | | |
| hpy07ge20415orf_0003.aa | 849 | 5611 |
| hp7e10429_7132780_c2_38 | 850 | 5612 |
| 06ge10217_32615840_f3_1 | 851 | 5613 |
| 06ge10217orf1 | 852 | 5614 |
| 01ce11016orf8 | 853 | 5615 |
| hp6p80503_6845042_c2_25 | 854 | 5616 |
| 01ce61016_24492212_f1_1 | 855 | 5617 |
| 01ce11016orf1 | 856 | 5618 |
| hp6p80503_992202_c1_21 | 857 | 5619 |
| hpy04ce11408orf_0002.aa | 858 | 5620 |
| hp2p10272_5211682_c3_44 | 859 | 5621 |
| 04ce11408orf2 | 860 | 5622 |
| 02ap11117orf1 | 861 | 5623 |
| hp6p21623_6906328_c2_51 | 862 | 5624 |
| 09ge11703orf1 | 863 | 5625 |
| 14ce31519_29339030_c2_27 | 864 | 5626 |
| 09ge11703orf2 | 865 | 5627 |
| hpy09ge11703orf_0001.aa | 866 | 5628 |
| hpyhp3p10366orf_0001.aa | 867 | 5629 |
| hp3p10366orf2 | 868 | 5630 |
| 14ce31519_3364062_c1_21 | 869 | 5631 |
| 06cp11118orf5 | 870 | 5632 |
| 06cp11118_24620968_c3_24 | 871 | 5633 |
| hpy06cp11118orf_0002.aa | 872 | 5634 |
| 06cp11118orf8 | 873 | 5635 |
| 06cp11118_25445342_c2_20 | 874 | 5636 |
| hpy06cp11118orf_0006.aa | 875 | 5637 |
| 16412593 | 876 | 5638 |
| 06cp11118orf6 | 877 | 5639 |
| 06cp11118_4532588_c3_23 | 878 | 5640 |
| 04ge11613orf5 | 879 | 5641 |
| 04ge11613orf4 | 880 | 5642 |
| hp5e15419orf2 | 881 | 5643 |
| 06gp10409_24406465_c3_27 | 882 | 5644 |
| 3953143 | 883 | 5645 |
| 02ae31010_29308453_f2_25 | 884 | 5646 |
| hp1p13947orf2 | 885 | 5647 |
| 01ce10516orf18 | 886 | 5648 |
| hpy01ce10516orf_0011.aa | 887 | 5649 |
| 01ce10516orf17 | 888 | 5650 |
| 09cp10224_23570302_c1_37 | 889 | 5651 |
| 09cp10224_32042937_c1_39 | 890 | 5652 |
| 01ce10516orf25 | 891 | 5653 |
| hp1p11244orf5 | 892 | 5654 |
| 09cp10224_35585952_c1_41 | 893 | 5655 |
| 01ce10516orf24 | 894 | 5656 |
| 01ce10516orf19 | 895 | 5657 |
| 01ce10516orf15 | 896 | 5658 |
| 09cp10224_4484718_c1_38 | 897 | 5659 |
| 11cp71403orf5 | 898 | 5660 |
| 09ze10333_4962817_f3_12 | 899 | 5661 |
| 16ae10113orf1 | 900 | 5662 |
| 16ae10113orf3 | 901 | 5663 |
| hpy07ee11620orf_0001.aa | 902 | 5664 |
| 16ae10113orf2 | 903 | 5665 |
| hpy16ae10113orf_0001.aa | 904 | 5666 |
| 09ze10333_4962817_f3_11 | 905 | 5667 |
| 05ae20220orf93 | 906 | 5668 |
| hp2e51852_23711552_c3_4 | 907 | 5669 |
| 16131887 | 908 | 5670 |
| 2082012 | 909 | 5671 |
| 09ap11406orf14 | 910 | 5672 |
| 09ap11406orf5 | 911 | 5673 |
| hp4e13394_1353438_c2_103 | 912 | 5674 |
| 02ap71220orf3 | 913 | 5675 |
| 02ap71220orf2 | 914 | 5676 |
| hp4e13394_5964452_c2_97 | 915 | 5677 |
| hp4e13394_15828963_c2_90 | 916 | 5678 |
| 6093906 | 917 | 5679 |
| hp4e13394_2042837_c3_122 | 918 | 5680 |
| 09ap11406orf15 | 919 | 5681 |
| 11ce11603orf14 | 920 | 5682 |
| 11ce11603orf23 | 921 | 5683 |
| hp4e13394_23446016_c3_119 | 922 | 5684 |
| hp4e13394_23915877_c1_75 | 923 | 5685 |
| 23915877 | 924 | 5686 |
| 11ce11603orf6 | 925 | 5687 |
| hpy11ce11603orf_0004.aa | 926 | 5688 |
| 11ce11603orf2 | 927 | 5689 |
| 11ce11603orf19 | 928 | 5690 |
| hp4e13394_29977187_c1_72 | 929 | 5691 |
| hpy09ap11406orf_0001.aa | 930 | 5692 |
| 1204418 | 931 | 5693 |
| 11ce11603orf16 | 932 | 5694 |
| hp4e13394_32218775_c2_102 | 933 | 5695 |
| 4035783 | 934 | 5696 |
| hp4e13394_3908568_c3_120 | 935 | 5697 |
| 11ce11603orf25 | 936 | 5698 |
| 11ce11603orf13 | 937 | 5699 |
| 11ce11603orf12 | 938 | 5700 |
| hpy11ce11603orf_0008.aa | 939 | 5701 |
| 11ce11603orf3 | 940 | 5702 |
| 11ce11603orf22 | 941 | 5703 |
| hp4e13394_490786_c1_73 | 942 | 5704 |
| hp4e13394_677292_c3_121 | 943 | 5705 |
| 11ce11603orf26 | 944 | 5706 |
| hp4e53394_29422028_c1_84 | 945 | 5707 |
| hp1e10523orf1 | 946 | 5708 |
| hp1e10523orf2 | 947 | 5709 |
| hpyhp1e10523orf_0001.aa | 948 | 5710 |
| 01ce11104_4589005_c3_14 | 949 | 5711 |
| hp5p15575orf14 | 950 | 5712 |
| 05cp10201orf1 | 951 | 5713 |
| hpy05cp10201orf_0001.aa | 952 | 5714 |
| hp5p15575orf16 | 953 | 5715 |
| hpyhp5p15575orf_0007.aa | 954 | 5716 |
| 13ep10801orf2 | 955 | 5717 |
| hp5p15575_24246012_c2_39 | 956 | 5718 |
| hp6p10590_30521093_f2_14 | 957 | 5719 |
| 11ge11422orf3 | 958 | 5720 |
| 07ce11206orf1 | 959 | 5721 |
| hp6p10590_4817177_f3_22 | 960 | 5722 |
| hpy05gp20111orf_0005.aa | 961 | 5723 |
| 05gp20111orf12 | 962 | 5724 |
| 06ce20610_4331338_f3_18 | 963 | 5725 |
| 01gp11016_17070306_c2_16 | 964 | 5726 |
| hpy01gp11016orf_0003.aa | 965 | 5727 |
| 01gp11016orf20 | 966 | 5728 |
| 01gp11016orf16 | 967 | 5729 |
| 01gp11016_12583568_c1_10 | 968 | 5730 |
| 01gp11016_1442187_c3_18 | 969 | 5731 |
| 01gp11016orf19 | 970 | 5732 |
| hp7e10434_1442187_f3_19 | 971 | 5733 |
| hp7e10434_210827_f2_11 | 972 | 5734 |
| hpy01gp11016orf_0006.aa | 973 | 5735 |
| 12ap10324orf7 | 974 | 5736 |
| 12ap10324_23531562_f2_2 | 975 | 5737 |
| 12ap10324_16052038_f1_1 | 976 | 5738 |
| 12ap10324orf1 | 977 | 5739 |
| hpy12ap10324orf_0001.aa | 978 | 5740 |
| hp7e30434_24651068_f3_32 | 979 | 5741 |
| 01gp11016orf11 | 980 | 5742 |
| 01gp11016orf12 | 981 | 5743 |
| hpy01gp11016orf_0001.aa | 982 | 5744 |
| hp7e10434_24744012_f2_14 | 983 | 5745 |
| hp7e30434_24744012_f3_31 | 984 | 5746 |
| 01gp11016orf13 | 985 | 5747 |
| 01gp11016_4103403_c2_13 | 986 | 5748 |
| 5869090 | 987 | 5749 |
| 01gp11016_5869090_c2_14 | 988 | 5750 |
| 01gp11016orf14 | 989 | 5751 |
| 06ap11418_31813750_c2_24 | 990 | 5752 |
| hp5e15440orf8 | 991 | 5753 |
| 11ap20714_4692_f3_30 | 992 | 5754 |
| hp6p12158_3917638_c1_2 | 993 | 5755 |
| 09ap10614orf1 | 994 | 5756 |
| hp5e25328_3917638_c3_138 | 995 | 5757 |
| 32236462 | 9561 | 9673 |
| 423131 | 9562 | 9674 |
| 14455461 | 9563 | 9675 |
| 26306340 | 9564 | 9676 |
| 23531562 | 9565 | 9677 |
| A.3.4 Involved in secretion & adhesion | | |
| hp3e10946orf2 | 996 | 5758 |
| hp3e10946_7157843_f2_2 | 997 | 5759 |
| hp3e10946orf1 | 998 | 5760 |
| hp3e10946_2226010_f1_1 | 999 | 5761 |
| hp3e10946_7157843_f2_2 | 1000 | 5762 |
| hp4e13394_26750068_c3_113 | 1001 | 5763 |
| 197166 | 1002 | 5764 |
| 11ae80818_197166_c3_63 | 1003 | 5765 |
| 03ap21820orf13 | 1004 | 5766 |
| 06cp30603orf16 | 1005 | 5767 |
| 06cp30603_23452_c3_80 | 1006 | 5768 |
| 09cp10713_23452_c3_195 | 1007 | 5769 |
| 24417212 | 9566 | 9678 |
| A.3.5 Proteins involved in regulation | | |
| 01xe21717orf1 | 1008 | 5770 |
| 01xe21717orf8 | 1009 | 5771 |
| 01xe21717orf7 | 1010 | 5772 |
| 01xe21717orf17 | 1011 | 5773 |
| 05ep10815_204827_c2_92 | 1012 | 5774 |
| 01xe21717orf2 | 1013 | 5775 |
| 26261040 | 1014 | 5776 |
| 01xe21717orf18 | 1015 | 5777 |
| 05ep10815_21566387_c3_104 | 1016 | 5778 |
| 03ce11207_23852058_c3_270 | 1017 | 5779 |
| hpy09cp10713orf_0002.aa | 1018 | 5780 |
| hpy09cp10713orf_0005.aa | 1019 | 5781 |
| hpy09cp10713orf_0004.aa | 1020 | 5782 |
| 09cp10713orf27 | 1021 | 5783 |
| 09cp10713orf32 | 1022 | 5784 |
| 09cp10713_21915943_c3_34 | 1023 | 5785 |
| 09cp10713_21915943_c3_33 | 1024 | 5786 |
| 32422343 | 1025 | 5787 |
| 02ae11612_32422343_c2_83 | 1026 | 5788 |
| 02ae11612orf25 | 1027 | 5789 |
| A.3.6 Chaperones | | |
| 06ep10306orf12 | 1028 | 5790 |
| 24651083 | 1029 | 5791 |
| 03ae10804_13862626_c3_45 | 1030 | 5792 |
| 06ep10306orf3 | 1031 | 5793 |
| 30089217 | 9567 | 9679 |
| A.3.7 Proteins involved in cell division | | |
| 01ce11016orf13 | 1032 | 5794 |
| 11cp11224orf4 | 1033 | 5795 |
| hpy11cp11224orf_0001.aa | 1034 | 5796 |
| hp6p80503_20051588_c3_36 | 1035 | 5797 |
| 19626250 | 1036 | 5798 |
| 02ge10116_22704567_c3_33 | 1037 | 5799 |
| 02ge10116_22704567_c3_159 | 1038 | 5800 |
| 02ge20116orf22 | 1039 | 5801 |
| hp6p10723orf8 | 1040 | 5802 |
| 06ap11119_33259403_f3_17 | 1041 | 5803 |
| 12gp31106_958182_f3_39 | 1042 | 5804 |
| 13ap11517orf5 | 1043 | 5805 |
| 06gp71906_24882783_c2_156 | 1044 | 5806 |
| 12gp31106_24902212_f1_12 | 1045 | 5807 |
| 13ap11517orf9 | 1046 | 5808 |
| 04ge11713orf2 | 1047 | 5809 |
| 04ge11713orf11 | 1048 | 5810 |
| 04cp11202_956260_f3_35 | 1049 | 5811 |
| 06gp10920orf3 | 1050 | 5812 |
| hp6p10606_26851452_c1_22 | 1051 | 5813 |
| hp8e10080_26851452_c1_66 | 1052 | 5814 |
| 22704567 | 9568 | 9680 |
| 24427340 | 9569 | 9681 |
| A.3.8 Proteins involved in motility | | |
| 06ep30223_12921892_f1_35 | 1053 | 5815 |
| hp3e11024orf14 | 1054 | 5816 |
| A.3.9 Other inner membrane proteins | | |
| hpy11cp12002orf_0003.aa | 1055 | 5817 |
| hp7p10290_24223782_c2_22 | 1056 | 5818 |
| 1365943 | 1057 | 5819 |
| hp5e12982_1365943_c1_13 | 1058 | 5820 |
| hp5e12982orf14 | 1059 | 5821 |
| 02ge10116_431293_f2_45 | 1060 | 5822 |
| hpyhp5e15276orf_0004.aa | 1061 | 5823 |
| 02ge11810_67_f1_3 | 1062 | 5824 |
| 4339708 | 1063 | 5825 |
| hpy06ee10709orf_0007.aa | 1064 | 5826 |
| 06ee10709orf16 | 1065 | 5827 |
| 06ee10709_4339708_c2_15 | 1066 | 5828 |
| 05ae30220_29406392_c3_119 | 1067 | 5829 |
| 05ae20220orf125 | 1068 | 5830 |
| hpyhp3e11168orf_0013.aa | 1069 | 5831 |
| 24039587 | 1070 | 5832 |
| hp3e11168orf15 | 1071 | 5833 |
| 04gp11701_24039587_f2_12 | 1072 | 5834 |
| 1385937 | 1073 | 5835 |
| 05ep10815_25415887_c2_94 | 1074 | 5836 |
| 01xe21717orf5 | 1075 | 5837 |
| 01ae11010_33593_c2_51 | 1076 | 5838 |
| hpyhp4e14522orf_0005.aa | 1077 | 5839 |
| 05ep10815_34179577_c1_78 | 1078 | 5840 |
| 34179577 | 1079 | 5841 |
| 01xe21717orf12 | 1080 | 5842 |
| 01ae11612_6017137_f3_10 | 1081 | 5843 |
| hp6e10180_6921933_f2_2 | 1082 | 5844 |
| 29ep10720_17089217_f3_18 | 1083 | 5845 |
| 17089217 | 1084 | 5846 |
| 11ge10309orf18 | 1085 | 5847 |
| 23439633 | 1086 | 5848 |
| 04ep41903_23439633_c2_31 | 1087 | 5849 |
| 09ae11601orf14 | 1088 | 5850 |
| 05ae20220orf35 | 1089 | 5851 |
| hp5p15870_14350428_f1_1 | 1090 | 5852 |
| 05ae20220orf56 | 1091 | 5853 |
| 05ae20220orf10 | 1092 | 5854 |
| 05ae30220_14350428_f1_9 | 1093 | 5855 |
| hpy05ae10307orf_0002.aa | 1094 | 5856 |
| 05ae30220_24220937_c2_135 | 1095 | 5857 |
| 24798427 | 1096 | 5858 |
| 05ae30220_24798427_f3_52 | 1097 | 5859 |
| 05ae20220orf31 | 1098 | 5860 |
| 05ae30220_4708337_c3_116 | 1099 | 5861 |
| 4708337 | 1100 | 5862 |
| 05ae20220orf88 | 1101 | 5863 |
| 23438840 | 1102 | 5864 |
| 12ae11404_23438840_c1_10 | 1103 | 5865 |
| 12ae11404orf12 | 1104 | 5866 |
| hpy03ae10516orf_0006.aa | 1105 | 5867 |
| 33476715 | 1106 | 5868 |
| 03ae10516orf11 | 1107 | 5869 |
| 06ap30322_4726503_c2_27 | 1108 | 5870 |
| 06ap11119_218_f3_18 | 1109 | 5871 |
| hp6p10723orf2 | 1110 | 5872 |
| 06ap11119_26351567_f1_6 | 1111 | 5873 |
| 26351567 | 1112 | 5874 |
| hp6p10723orf13 | 1113 | 5875 |
| 06ap11119_4726068_f1_5 | 1114 | 5876 |
| hp6p10723orf12 | 1115 | 5877 |
| 06ap11119_4744128_c3_65 | 1116 | 5878 |
| 4744128 | 1117 | 5879 |
| hp6p10723orf43 | 1118 | 5880 |
| 06cp11118_789033_f3_11 | 1119 | 5881 |
| 01ce11513orf9 | 1120 | 5882 |
| hp6e10967_33986087_c3_25 | 1121 | 5883 |
| 33986087 | 1122 | 5884 |
| hp2p10625orf14 | 1123 | 5885 |
| 06ep11202_36562767_c3_32 | 1124 | 5886 |
| 06cp20302orf11 | 1125 | 5887 |
| 15126875 | 1126 | 5888 |
| 12gp31106_15126875_c3_68 | 1127 | 5889 |
| 13ap11517orf31 | 1128 | 5890 |
| 23473437 | 1129 | 5891 |
| 14cp10119orf14 | 1130 | 5892 |
| hpy14cp10119orf_0001.aa | 1131 | 5893 |
| 04cp11202_1953337_f3_49 | 1132 | 5894 |
| 06gp71906_26567586_f1_14 | 1133 | 5895 |
| hpy04ge11713orf_0011.aa | 1134 | 5896 |
| 2111040 | 1135 | 5897 |
| 07ae11008_1307312_c3_58 | 1136 | 5898 |
| 09cp10502orf14 | 1137 | 5899 |
| hpy09cp10502orf_0012.aa | 1138 | 5900 |
| 09cp10502orf12 | 1139 | 5901 |
| 14gp11820orf13 | 1140 | 5902 |
| hpy14gp11820orf_0011.aa | 1141 | 5903 |
| 07ae11008_14494077_c2_47 | 1142 | 5904 |
| 09cp20502_14494077_c1_34 | 1143 | 5905 |
| 23438887 | 1144 | 5906 |
| 09cp10502orf16 | 1145 | 5907 |
| 24409577 | 1146 | 5908 |
| 07ae11008_431591_c1_38 | 1147 | 5909 |
| 09cp10502orf17 | 1148 | 5910 |
| 07ae11008_10546918_f1_5 | 1149 | 5911 |
| 07ae11008_29548890_f3_20 | 1150 | 5912 |
| 09cp10502orf7 | 1151 | 5913 |
| 3953952 | 1152 | 5914 |
| 09cp20502_3953952_c1_33 | 1153 | 5915 |
| 14gp11820orf4 | 1154 | 5916 |
| 30730068 | 1155 | 5917 |
| 07ae11008_4484500_c2_52 | 1156 | 5918 |
| 09cp10502orf22 | 1157 | 5919 |
| 14ap10815_23631317_c3_27 | 1158 | 5920 |
| 23631317 | 1159 | 5921 |
| hp3e10349orf25 | 1160 | 5922 |
| 14cp20718_25812655_c3_20 | 1161 | 5923 |
| 07ap61111_24744430_c3_112 | 1162 | 5924 |
| 29zp10241orf14 | 1163 | 5925 |
| 07ap61111_9776562_c2_86 | 1164 | 5926 |
| 9776562 | 1165 | 5927 |
| 14cp20718_9776562_c1_14 | 1166 | 5928 |
| 13865928 | 1167 | 5929 |
| 14ee41924_13865928_c1_71 | 1168 | 5930 |
| 02ep30607orf31 | 1169 | 5931 |
| 14ee41924_26833437_f2_36 | 1170 | 5932 |
| 30100332 | 1171 | 5933 |
| hp2e10911_31363125_c2_92 | 1172 | 5934 |
| hp2e10911_24744076_c1_81 | 1173 | 5935 |
| hp2e10911orf30 | 1174 | 5936 |
| 07ee50709_16601067_f1_28 | 1175 | 5937 |
| hpy07ce10203orf_0013.aa | 1176 | 5938 |
| hpy07ce10203orf_0012.aa | 1177 | 5939 |
| hpy07ce10203orf_0014.aa | 1178 | 5940 |
| 07ce10203orf22 | 1179 | 5941 |
| 02ae31010_16679640_f2_21 | 1180 | 5942 |
| 23526667 | 1181 | 5943 |
| 02ae31010_24395801_f1_8 | 1182 | 5944 |
| 07ee50709_16679640_f3_60 | 1183 | 5945 |
| 207817 | 1184 | 5946 |
| 29ge30321_207817_f2_8 | 1185 | 5947 |
| 01ce11618orf10 | 1186 | 5948 |
| hp5p15641_23945317_f3_13 | 1187 | 5949 |
| 23945317 | 1188 | 5950 |
| hp5p15641orf9 | 1189 | 5951 |
| 1071890 | 1190 | 5952 |
| 02ae31010_4719050_c2_83 | 1191 | 5953 |
| 02ce11022orf7 | 1192 | 5954 |
| 598933 | 1193 | 5955 |
| hp1p13852orf5 | 1194 | 5956 |
| 06cp11217_6540927_f1_7 | 1195 | 5957 |
| 07ge11717_6540927_c1_16 | 1196 | 5958 |
| 09ce10413_33257312_c3_25 | 1197 | 5959 |
| 09cp10224_3946875_f1_2 | 1198 | 5960 |
| hp1p11244orf10 | 1199 | 5961 |
| 26758437 | 1200 | 5962 |
| 14ap11617_26758437_c2_10 | 1201 | 5963 |
| 05ap11505orf10 | 1202 | 5964 |
| 1364378 | 1203 | 5965 |
| 09ze10333_24484777_c1_14 | 1204 | 5966 |
| 03ge10505orf14 | 1205 | 5967 |
| 09cp10713_3984818_c2_28 | 1206 | 5968 |
| 13ae10610_26054808_c1_25 | 1207 | 5969 |
| 13ae10610_6097567_c3_36 | 1208 | 5970 |
| 12ee10904orf1 | 1209 | 5971 |
| hpy12ee10904orf_0001.aa | 1210 | 5972 |
| 14gp11423orf3 | 1211 | 5973 |
| 14gp11423_24407165_c2_21 | 1212 | 5974 |
| 14gp11423_35667791_c1_13 | 1213 | 5975 |
| 14gp11423orf4 | 1214 | 5976 |
| 14gp11423_19812527_c3_95 | 1215 | 5977 |
| 12694087 | 1216 | 5978 |
| 12ae10622_24004137_f3_33 | 1217 | 5979 |
| 04ep71403orf12 | 1218 | 5980 |
| 12ae10622_259665_f2_18 | 1219 | 5981 |
| 259665 | 1220 | 5982 |
| 12ae10622orf9 | 1221 | 5983 |
| 32663212 | 1222 | 5984 |
| 07ce11019_26596881_c1_12 | 1223 | 5985 |
| 07cp21714orf14 | 1224 | 5986 |
| 12ge10321_36362687_f2_11 | 1225 | 5987 |
| 06gp11920orf8 | 1226 | 5988 |
| 04ep71403orf10 | 1227 | 5989 |
| 34194093 | 1228 | 5990 |
| 50062 | 1229 | 5991 |
| 04ep71403orf15 | 1230 | 5992 |
| 12ae10622_50062_f3_32 | 1231 | 5993 |
| 24222885 | 1232 | 5994 |
| hp3e10342_24222885_c3_18 | 1233 | 5995 |
| 01ge11619_24222885_c3_16 | 1234 | 5996 |
| 11ge10309orf14 | 1235 | 5997 |
| 05ep21124_189017_f1_1 | 1236 | 5998 |
| hp3e11188_189017_c1_19 | 1237 | 5999 |
| hp4e13394_24411011_f2_27 | 1238 | 6000 |
| 24411011 | 1239 | 6001 |
| hp4e13394orf5 | 1240 | 6002 |
| 04ep10206orf5 | 1241 | 6003 |
| hp1e13852_2115918_f1_2 | 1242 | 6004 |
| 03ee11215_2150290_f3_19 | 1243 | 6005 |
| 2150290 | 1244 | 6006 |
| 03ee11215orf20 | 1245 | 6007 |
| 13704718 | 1246 | 6008 |
| hp1e13852_5861458_c1_21 | 1247 | 6009 |
| 04ep10206orf22 | 1248 | 6010 |
| hp4e53394_36131715_f1_14 | 1249 | 6011 |
| hp1e13852_4486092_f2_7 | 1250 | 6012 |
| 4486092 | 1251 | 6013 |
| 06ae11020orf2 | 1252 | 6014 |
| 06ce10808orf2 | 1253 | 6015 |
| hpy06ce10808orf_0002.aa | 1254 | 6016 |
| hp1p13939_25397327_f3_22 | 1255 | 6017 |
| 06ep30223_1206675_f1_38 | 1256 | 6018 |
| 1206675 | 1257 | 6019 |
| hp3e11024orf17 | 1258 | 6020 |
| 12617677 | 1259 | 6021 |
| 06ep30223_12617677_f3_88 | 1260 | 6022 |
| 14gp12015orf14 | 1261 | 6023 |
| hpy02ae20515orf_0001.aa | 1262 | 6024 |
| hpy02xp10215orf_0001.aa | 1263 | 6025 |
| hpy02xp10215orf_0003.aa | 1264 | 6026 |
| 07ee30411_9797156_f1_1 | 1265 | 6027 |
| 06ep30223_5078388_c2_136 | 1266 | 6028 |
| 01ce11104_11878127_c1_9 | 1267 | 6029 |
| 16ep10117orf6 | 1268 | 6030 |
| 26052137 | 1269 | 6031 |
| 02ae11612_20118768_f2_28 | 1270 | 6032 |
| 05cp11911orf15 | 1271 | 6033 |
| 21511555 | 1272 | 6034 |
| 02ae11612_21511555_f1_18 | 1273 | 6035 |
| 05cp11911orf13 | 1274 | 6036 |
| 02ae11612_23437502_f3_39 | 1275 | 6037 |
| 23437502 | 1276 | 6038 |
| 02ae11612orf14 | 1277 | 6039 |
| 01ce11104_36134661_c2_11 | 1278 | 6040 |
| 36134661 | 1279 | 6041 |
| 16ep10117orf7 | 1280 | 6042 |
| 03xe11215orf5 | 1281 | 6043 |
| 02ae11612_3933437_c3_96 | 1282 | 6044 |
| 01ce21104_3933437_c2_78 | 1283 | 6045 |
| 3933437 | 1284 | 6046 |
| hp6e10264_2534579_c1_3 | 1285 | 6047 |
| hp6e30264_24022187_c2_6 | 1286 | 6048 |
| hp5e15084orf5 | 1287 | 6049 |
| hp6e10491_17038885_f2_7 | 1288 | 6050 |
| hp6e40491_36329178_f1_1 | 1289 | 6051 |
| 35360843 | 1290 | 6052 |
| hp6p10509_21540625_f3_7 | 1291 | 6053 |
| 16ae10508orf3 | 1292 | 6054 |
| 24413512 | 1293 | 6055 |
| 12ap10605_4491302_c1_6 | 1294 | 6056 |
| 29gp10119orf7 | 1295 | 6057 |
| 20976500 | 1296 | 6058 |
| 07ep11916_20976500_f1_8 | 1297 | 6059 |
| hp6p12244_20976500_f2_21 | 1298 | 6060 |
| 01cp11414orf10 | 1299 | 6061 |
| hpy02ae11211orf_0001.aa | 1300 | 6062 |
| hp6p12244_34609662_f1_1 | 1301 | 6063 |
| 34172639 | 1302 | 6064 |
| hp6p12244_5869768_f2_24 | 1303 | 6065 |
| hp1p13922orf1 | 1304 | 6066 |
| hp6p22217_25398250_f3_16 | 1305 | 6067 |
| 25398250 | 1306 | 6068 |
| 13ee12016orf18 | 1307 | 6069 |
| 01ae11421orf4 | 1308 | 6070 |
| hpy01ae11421orf_0001.aa | 1309 | 6071 |
| 01ae11421orf3 | 1310 | 6072 |
| 13ae10712_14100018_f2_12 | 1311 | 6073 |
| 14cp10705orf4 | 1312 | 6074 |
| 13ae10712_5109376_f3_18 | 1313 | 6075 |
| 06ge20501_14100018_c1_34 | 1314 | 6076 |
| 11ae12004_14100018_c1_32 | 1315 | 6077 |
| 4728193 | 1316 | 6078 |
| 02gp20814_4728193_f1_3 | 1317 | 6079 |
| 14ee10308orf9 | 1318 | 6080 |
| hpy07ge20415orf_0019.aa | 1319 | 6081 |
| 10745275 | 1320 | 6082 |
| 07ge20415orf30 | 1321 | 6083 |
| hp7e10429_22141052_c3_41 | 1322 | 6084 |
| 5993958 | 1323 | 6085 |
| hp7e10429_24023462_c2_36 | 1324 | 6086 |
| 07ge20415orf39 | 1325 | 6087 |
| hp7p90421_23477042_c2_43 | 1326 | 6088 |
| 33218912 | 1327 | 6089 |
| hp3p10349orf32 | 1328 | 6090 |
| 02ce41018_33367812_f2_14 | 1329 | 6091 |
| 24078837 | 1330 | 6092 |
| 07ap20216_24078837_f1_4 | 1331 | 6093 |
| 05ap21216orf7 | 1332 | 6094 |
| hp1p14013orf16 | 1333 | 6095 |
| 02cp10615orf1 | 1334 | 6096 |
| hp1p14013orf13 | 1335 | 6097 |
| hpyhp1p14013orf_0015.aa | 1336 | 6098 |
| hp1p14013_21507007_c2_19 | 1337 | 6099 |
| hp8e10080_16267837_c3_92 | 1338 | 6100 |
| 02cp10615_6515756_f1_1 | 1339 | 6101 |
| hpyhp1p14013orf_0013.aa | 1340 | 6102 |
| 663530 | 1341 | 6103 |
| hp1p14013orf4 | 1342 | 6104 |
| hp1p14013_4556713_f3_11 | 1343 | 6105 |
| 03gp20123orf2 | 1344 | 6106 |
| hpy03gp20123orf_0002.aa | 1345 | 6107 |
| hpyhp4p12360orf_0001.aa | 1346 | 6108 |
| 09cp61003_13710936_c1_73 | 1347 | 6109 |
| hp7p10290_24226550_f1_4 | 1348 | 6110 |
| hp3p10156orf11 | 1349 | 6111 |
| hp5e11634orf2 | 1350 | 6112 |
| 03ep12017orf1 | 1351 | 6113 |
| 11cp12002orf7 | 1352 | 6114 |
| hp7p10290_244843_c1_16 | 1353 | 6115 |
| 12ge10305orf3 | 1354 | 6116 |
| 12ge10305orf4 | 1355 | 6117 |
| hp6e12267_32424058_f2_22 | 1356 | 6118 |
| hp2p10272orf6 | 1357 | 6119 |
| hp2p10272orf3 | 1358 | 6120 |
| hp2p10272_23880380_f2_11 | 1359 | 6121 |
| 06ge10115orf10 | 1360 | 6122 |
| hpy06ge10115orf_0011.aa | 1361 | 6123 |
| 02gp20706_14494561_c1_37 | 1362 | 6124 |
| 02gp20706_23535062_f1_2 | 1363 | 6125 |
| 01cp11710orf7 | 1364 | 6126 |
| 02gp20706_5314192_f2_11 | 1365 | 6127 |
| 01cp11710orf12 | 1366 | 6128 |
| 12969218 | 1367 | 6129 |
| 02ge11622_23494043_f1_6 | 1368 | 6130 |
| 13ee10216orf5 | 1369 | 6131 |
| hpyhp2e11875orf_0004.aa | 1370 | 6132 |
| 06gp11209orf3 | 1371 | 6133 |
| hpy06gp11209orf_0001.aa | 1372 | 6134 |
| hpy01ce10320orf_0009.aa | 1373 | 6135 |
| 01ce10320_10742802_f1_5 | 1374 | 6136 |
| 01cp20708_19542968_c1_46 | 1375 | 6137 |
| 14ee10419orf19 | 1376 | 6138 |
| hpy06ep10822orf_0002.aa | 1377 | 6139 |
| 06ep10822orf1 | 1378 | 6140 |
| hpy06ep10822orf_0001.aa | 1379 | 6141 |
| hp2e11875orf4 | 1380 | 6142 |
| 01ae11010_29308578_c1_38 | 1381 | 6143 |
| 14ce31519_1299140_f1_4 | 1382 | 6144 |
| 02ce10809orf1 | 1383 | 6145 |
| 04ep41903_23437543_c3_40 | 1384 | 6146 |
| 02cp10815orf1 | 1385 | 6147 |
| 09ae11601orf2 | 1386 | 6148 |
| 04ep41903_5351512_f2_13 | 1387 | 6149 |
| 23867207 | 1388 | 6150 |
| hp5p15212_13095752_c3_36 | 1389 | 6151 |
| 02ce10213orf23 | 1390 | 6152 |
| hpy07ee20513orf_0004.aa | 1391 | 6153 |
| 07ee20513orf1 | 1392 | 6154 |
| 07ee20513orf12 | 1393 | 6155 |
| 06ae11016_15634702_f2_7 | 1394 | 6156 |
| 09ae10512_15634702_f3_15 | 1395 | 6157 |
| 07ee20513orf10 | 1396 | 6158 |
| 09ae10512_6929702_f1_5 | 1397 | 6159 |
| 06ae11016_6929702_f3_27 | 1398 | 6160 |
| 13ee10424orf2 | 1399 | 6161 |
| 06ap10305orf2 | 1400 | 6162 |
| 06ep10615_1230462_c3_105 | 1401 | 6163 |
| 13ee10424_1230462_f3_4 | 1402 | 6164 |
| hpy07ge11107orf_0001.aa | 1403 | 6165 |
| 11ee11718orf1 | 1404 | 6166 |
| 06ep10615_16226577_c1_67 | 1405 | 6167 |
| 06gp10409_33337812_f2_10 | 1406 | 6168 |
| 04ge11613orf2 | 1407 | 6169 |
| 06gp10409_5204827_f3_15 | 1408 | 6170 |
| 06gp10409orf4 | 1409 | 6171 |
| 04cp11202_19532827_c3_111 | 1410 | 6172 |
| 04ge11713orf38 | 1411 | 6173 |
| 04cp11202_29938885_f3_33 | 1412 | 6174 |
| 04cp11202orf3 | 1413 | 6175 |
| hpy04cp11202orf_0001.aa | 1414 | 6176 |
| 06gp71906_24352311_c3_199 | 1415 | 6177 |
| hpy04cp11202orf_0003.aa | 1416 | 6178 |
| 04ge11713orf16 | 1417 | 6179 |
| hpy04ge11713orf_0001.aa | 1418 | 6180 |
| 04cp11202orf1 | 1419 | 6181 |
| 04cp11202_25394506_f2_14 | 1420 | 6182 |
| hpy02cp11822orf_0010.aa | 1421 | 6183 |
| 02cp11822orf4 | 1422 | 6184 |
| 02cp11822orf3 | 1423 | 6185 |
| 01ae12021orf1 | 1424 | 6186 |
| hpy01ae12021orf_0001.aa | 1425 | 6187 |
| 02cp11822orf8 | 1426 | 6188 |
| 04cp11202_4899192_f2_29 | 1427 | 6189 |
| 06gp71906_4899192_c3_210 | 1428 | 6190 |
| 04cp11202_4899192_f3_44 | 1429 | 6191 |
| hp5p15861_12698442_f1_3 | 1430 | 6192 |
| 02cp20821orf12 | 1431 | 6193 |
| hp5p15861_14557666_f3_13 | 1432 | 6194 |
| 02cp20821orf9 | 1433 | 6195 |
| 14ee41924_12698442_f2_35 | 1434 | 6196 |
| hp2e10911orf46 | 1435 | 6197 |
| 07ap11213_21534415_c3_34 | 1436 | 6198 |
| 01ce11618orf19 | 1437 | 6199 |
| 11ae10212orf4 | 1438 | 6200 |
| 29ge30321_34569437_f2_9 | 1439 | 6201 |
| hp2e10911_34569437_c2_85 | 1440 | 6202 |
| 29ge30321_470158_f1_2 | 1441 | 6203 |
| 01ce11618orf23 | 1442 | 6204 |
| 11ep11915orf1 | 1443 | 6205 |
| hpy11ep11915orf_0001.aa | 1444 | 6206 |
| hp6p10904_1297062_c3_24 | 1445 | 6207 |
| 01ee20804orf3 | 1446 | 6208 |
| 09cp10224_25394752_c1_42 | 1447 | 6209 |
| 09cp10405orf4 | 1448 | 6210 |
| hp4e13394_6854542_c3_114 | 1449 | 6211 |
| hp1e13852_6285437_c3_39 | 1450 | 6212 |
| 04ep10206orf16 | 1451 | 6213 |
| hp1e13852_2915903_c1_22 | 1452 | 6214 |
| 04ep10206orf23 | 1453 | 6215 |
| hp4e53394_2915903_f2_43 | 1454 | 6216 |
| 20173437 | 1455 | 6217 |
| 06ep30223_20173437_f1_37 | 1456 | 6218 |
| hp3e11024orf16 | 1457 | 6219 |
| 06ce11002_25391000_f1_2 | 1458 | 6220 |
| 06ce11002orf5 | 1459 | 6221 |
| 06ep30223_26444203_c1_118 | 1460 | 6222 |
| 07gp10713orf1 | 1461 | 6223 |
| 06ep30223_34180312_f2_65 | 1462 | 6224 |
| hp3e11024orf10 | 1463 | 6225 |
| 06ep30223_3964062_f3_96 | 1464 | 6226 |
| hp3e11024orf7 | 1465 | 6227 |
| 06ce11002orf6 | 1466 | 6228 |
| 06ce11002orf9 | 1467 | 6229 |
| 06ce11002orf4 | 1468 | 6230 |
| 06ce11002_4461718_f1_3 | 1469 | 6231 |
| 06ep30223_5078517_f3_89 | 1470 | 6232 |
| 14gp12015orf15 | 1471 | 6233 |
| 29ae22003orf5 | 1472 | 6234 |
| hpy29ae22003orf_0001.aa | 1473 | 6235 |
| 01cp31002_19539202_f3_8 | 1474 | 6236 |
| hpyhp4e14155orf_0004.aa | 1475 | 6237 |
| hpyhp4e14155orf_0003.aa | 1476 | 6238 |
| 06ap11008orf1 | 1477 | 6239 |
| hpy06ap11008orf_0001.aa | 1478 | 6240 |
| hp6p10590_22290637_f2_11 | 1479 | 6241 |
| 12ap10605_22459405_f2_2 | 1480 | 6242 |
| 29gp10119orf2 | 1481 | 6243 |
| hp3e10302orf25 | 1482 | 6244 |
| hp6p12129_2847212_f1_1 | 1483 | 6245 |
| 02ae11211orf7 | 1484 | 6246 |
| 02ae11211orf2 | 1485 | 6247 |
| 02ae11211orf10 | 1486 | 6248 |
| hp6p12244_3987580_f2_17 | 1487 | 6249 |
| 02ce11418orf2 | 1488 | 6250 |
| 01cp11414orf14 | 1489 | 6251 |
| hp6p12244_5913592_f1_7 | 1490 | 6252 |
| hpy29ge10111orf_0003.aa | 1491 | 6253 |
| 29ge10111orf9 | 1492 | 6254 |
| 06ce20610_26448380_c2_31 | 1493 | 6255 |
| 12ap11614_24400293_c2_10 | 1494 | 6256 |
| 12ap11614orf11 | 1495 | 6257 |
| hp7e10429_25525302_c2_37 | 1496 | 6258 |
| 07ge20415orf42 | 1497 | 6259 |
| 03ap21820orf15 | 1498 | 6260 |
| 03ap21820orf14 | 1499 | 6261 |
| 03ap21820orf1 | 1500 | 6262 |
| 11ae80818_421888_c2_52 | 1501 | 6263 |
| 02ep20506_23712750_f2_7 | 1502 | 6264 |
| 01ce11513orf6 | 1503 | 6265 |
| hpyhp5e15440orf_0015.aa | 1504 | 6266 |
| hp3p10343orf5 | 1505 | 6267 |
| 14ee11217orf5 | 1506 | 6268 |
| 14ee11217orf1 | 1507 | 6269 |
| 11ap20714_33992032_c1_62 | 1508 | 6270 |
| 06ap11418_33992032_f2_10 | 1509 | 6271 |
| hp1p14013orf1 | 1510 | 6272 |
| hp1p14013_24239055_f3_8 | 1511 | 6273 |
| hp1p14013orf21 | 1512 | 6274 |
| hp1p14013orf15 | 1513 | 6275 |
| hp1p14013_34187518_c3_24 | 1514 | 6276 |
| 4714375 | 9570 | 9682 |
| 29302003 | 9571 | 9683 |
| 4726503 | 9572 | 9684 |
| 40339452 | 9573 | 9685 |
| 3242337 | 9574 | 9686 |
| 3385833 | 9575 | 9687 |
| 19536458 | 9576 | 9688 |
| 34097707 | 9577 | 9689 |
| 3360130 | 9578 | 9690 |
| 2548562 | 9579 | 9691 |
| 20023400 | 9580 | 9692 |
| 29531590 | 9581 | 9693 |
| 23494043 | 9582 | 9694 |
| 36520792 | 9583 | 9695 |
| 34109763 | 9584 | 9696 |
| 907827 | 9585 | 9697 |
| 12698442 | 9586 | 9698 |
| 55843 | 9587 | 9699 |
| 25976418 | 9588 | 9700 |
| 34573431 | 9589 | 9701 |
| 3987580 | 9590 | 9702 |
| 33595708 | 9591 | 9703 |
| A.4 Other cell envelope proteins | | |
| hpy12ge20305orf_0013.aa | 1515 | 6277 |
| 01ce61016_16619192_c3_161 | 1516 | 6278 |
| 09cp61003_16619192_c2_83 | 1517 | 6279 |
| 01ce61016_1056562_c3_123 | 1518 | 6280 |
| hpy06ge10115orf_0008.aa | 1519 | 6281 |
| 02gp20706_1050787_c3_60 | 1520 | 6282 |
| 06ge10115orf8 | 1521 | 6283 |
| 02ge10116_15632000_c2_114 | 1522 | 6284 |
| 23610905 | 1523 | 6285 |
| 05ep10815_1222937_f2_39 | 1524 | 6286 |
| 01xe21717orf40 | 1525 | 6287 |
| 20415937 | 1526 | 6288 |
| 04cp11202_20415937_f2_25 | 1527 | 6289 |
| 01ae12021orf7 | 1528 | 6290 |
| 04ge11713orf28 | 1529 | 6291 |
| 04ge11713orf35 | 1530 | 6292 |
| 04ge11713orf36 | 1531 | 6293 |
| 04cp11202_24256567_c3_117 | 1532 | 6294 |
| hp5e15044_4554652_f3_3 | 1533 | 6295 |
| hpyhp1p13868orf_0008.aa | 1534 | 6296 |
| 07cp10312orf5 | 1535 | 6297 |
| hp6p10233_12273302_f1_1 | 1536 | 6298 |
| 07ce10312_4554652_f3_2 | 1537 | 6299 |
| 04ae61517_21744091_f3_5 | 1538 | 6300 |
| hpy13ap11420orf_0001.aa | 1539 | 6301 |
| 04ae61517_12345837_f1_2 | 1540 | 6302 |
| 04ae61517_12345837_f2_4 | 1541 | 6303 |
| 11cp12006orf10 | 1542 | 6304 |
| 11cp12006orf13 | 1543 | 6305 |
| hp2e10911_24855312_c1_69 | 1544 | 6306 |
| 01ce11618orf24 | 1545 | 6307 |
| hpy01ce11618orf_0014.aa | 1546 | 6308 |
| 29ge30321_34157812_f3_10 | 1547 | 6309 |
| hpy01ce11618orf_0008.aa | 1548 | 6310 |
| 29ge30321_12913562_f1_1 | 1549 | 6311 |
| 29ge30321_135253_f2_6 | 1550 | 6312 |
| 01ce11618orf22 | 1551 | 6313 |
| 01ce11618orf7 | 1552 | 6314 |
| 01ce11618orf15 | 1553 | 6315 |
| hp2e10911_3349_c1_63 | 1554 | 6316 |
| 02ae31010_4818967_f3_41 | 1555 | 6317 |
| 01ce11618orf5 | 1556 | 6318 |
| 02ae31010_15652187_f1_17 | 1557 | 6319 |
| 07ee50709_4818967_f2_43 | 1558 | 6320 |
| 04ap12016_25501501_f1_1 | 1559 | 6321 |
| 29ep10720_25501501_c2_33 | 1560 | 6322 |
| 25501501 | 1561 | 6323 |
| 11ge10309orf63 | 1562 | 6324 |
| 02ae11612orf23 | 1563 | 6325 |
| 02ae11612_31453292_c3_97 | 1564 | 6326 |
| 02ae11612_6536567_c2_81 | 1565 | 6327 |
| hp5e25328_6539692_c3_148 | 1566 | 6328 |
| 02ae11612orf31 | 1567 | 6329 |
| hp5p15575_1053590_c1_35 | 1568 | 6330 |
| hpyhp5p15575orf_0005.aa | 1569 | 6331 |
| hp5p15575_29300311_c1_29 | 1570 | 6332 |
| 14ce10720orf3 | 1571 | 6333 |
| hp7e10433_5345837_c3_13 | 1572 | 6334 |
| hp7e10433_25520337_c2_8 | 1573 | 6335 |
| hpy01ee21118orf_0002.aa | 1574 | 6336 |
| hp7e10433_5345837_c2_8 | 1575 | 6337 |
| 24256572 | 9592 | 9704 |
| B. CYTOPLASMIC PROTEINS | | |
| B.1 Proteins involved in energy metabolism | | |
| 09ap20802orf36 | 1576 | 6338 |
| hp2p10272_11885836_c1_27 | 1577 | 6339 |
| hp6p21623_16491412_f1_1 | 1578 | 6340 |
| 07gp11909_19665932_c3_16 | 1579 | 6341 |
| 07gp11909orf3 | 1580 | 6342 |
| 02ap11117_19665932_c2_62 | 1581 | 6343 |
| hp2p10272_23835927_f2_13 | 1582 | 6344 |
| 09ap20802orf16 | 1583 | 6345 |
| 07gp11909orf1 | 1584 | 6346 |
| 07gp11909_993792_f3_8 | 1585 | 6347 |
| 09ap20802orf15 | 1586 | 6348 |
| 09ap20802orf7 | 1587 | 6349 |
| 09ap20802orf6 | 1588 | 6350 |
| hp2p10272_26366562_f1_3 | 1589 | 6351 |
| 02ge11622_24245875_f3_44 | 1590 | 6352 |
| 13ee10216orf12 | 1591 | 6353 |
| 4897177 | 1592 | 6354 |
| 02ge11622_36126312_c1_53 | 1593 | 6355 |
| 13ee10216orf56 | 1594 | 6356 |
| 13ee10216orf14 | 1595 | 6357 |
| hpy04ep11803orf_0001.aa | 1596 | 6358 |
| 04ep11803orf3 | 1597 | 6359 |
| 02ge11622_4101568_f3_46 | 1598 | 6360 |
| 06ee10709_10270878_f1_1 | 1599 | 6361 |
| 06ee10709orf1 | 1600 | 6362 |
| hpy06ee10709orf_0001.aa | 1601 | 6363 |
| 02ge41622_4102312_f1_17 | 1602 | 6364 |
| 02ge41622_24803341_f2_38 | 1603 | 6365 |
| 02ge11622_5271943_f3_45 | 1604 | 6366 |
| 13ee10216orf13 | 1605 | 6367 |
| hpy13ee10216orf_0015.aa | 1606 | 6368 |
| 13ee10216orf74 | 1607 | 6369 |
| 13ee10216orf85 | 1608 | 6370 |
| 02ge11622_6301_c1_55 | 1609 | 6371 |
| 02ge41622_6301_c2_71 | 1610 | 6372 |
| 01ae11010_24220625_f2_13 | 1611 | 6373 |
| 01ce10320orf1 | 1612 | 6374 |
| hpy01ce10320orf_0004.aa | 1613 | 6375 |
| 01ce10320orf2 | 1614 | 6376 |
| 01ce10320_24641662_f2_6 | 1615 | 6377 |
| 01ce10320_35673442_f1_2 | 1616 | 6378 |
| 01ce10320orf8 | 1617 | 6379 |
| 06ae11405orf11 | 1618 | 6380 |
| hpy06ae11405orf_0010.aa | 1619 | 6381 |
| 02ap10801orf1 | 1620 | 6382 |
| 05ep10815_26679687_c1_73 | 1621 | 6383 |
| 03ce11207_5351377_c3_267 | 1622 | 6384 |
| 09ae11601orf13 | 1623 | 6385 |
| 04ep41903_3251550_c3_39 | 1624 | 6386 |
| 05ae30220_26351674_c1_64 | 1625 | 6387 |
| hpy05ae20220orf_0043.aa | 1626 | 6388 |
| hp2e10626orf2 | 1627 | 6389 |
| hpyhp2e10626orf_0002.aa | 1628 | 6390 |
| 05ae30220_22861038_c2_136 | 1629 | 6391 |
| 05ae30220_10977343_c1_140 | 1630 | 6392 |
| hp5p15861_1443817_f3_8 | 1631 | 6393 |
| 02cp20821orf4 | 1632 | 6394 |
| 14ee41924_6819555_f1_10 | 1633 | 6395 |
| 11ce10917orf4 | 1634 | 6396 |
| 11ce10917orf5 | 1635 | 6397 |
| 11ce10917orf1 | 1636 | 6398 |
| 11ce10917orf7 | 1637 | 6399 |
| 14ee41924_4507757_f3_43 | 1638 | 6400 |
| 07ee11402_6819555_f1_4 | 1639 | 6401 |
| 07ap11213_10628313_c2_29 | 1640 | 6402 |
| hp2e10911orf26 | 1641 | 6403 |
| 02ae31010_6651712_f3_40 | 1642 | 6404 |
| 01ce11618orf4 | 1643 | 6405 |
| hpy09ce10413orf_0001.aa | 1644 | 6406 |
| 02ce10216orf11 | 1645 | 6407 |
| 02ce10216orf13 | 1646 | 6408 |
| 09ce10413_4875018_c1_19 | 1647 | 6409 |
| hp1p11244orf6 | 1648 | 6410 |
| hp1p11244orf9 | 1649 | 6411 |
| hp1p11244orf7 | 1650 | 6412 |
| 09cp10224_24823437_c2_49 | 1651 | 6413 |
| hpy02ep20220orf_0002.aa | 1652 | 6414 |
| 12ae10622_20322877_f2_25 | 1653 | 6415 |
| hpy05gp11901orf_0010.aa | 1654 | 6416 |
| 05gp11901orf17 | 1655 | 6417 |
| hpy05gp11901orf_0011.aa | 1656 | 6418 |
| 04ee11506orf1 | 1657 | 6419 |
| hpy04ee11506orf_0001.aa | 1658 | 6420 |
| 05ge20108_25945418_c1_6 | 1659 | 6421 |
| 11ee11408_24650879_c2_40 | 1660 | 6422 |
| hp1e80523_24650879_c1_36 | 1661 | 6423 |
| hp4e13394_3391637_c1_70 | 1662 | 6424 |
| 11ce11603orf18 | 1663 | 6425 |
| hpy11ce11603orf_0001.aa | 1664 | 6426 |
| hp4e13394_6125462_c3_116 | 1665 | 6427 |
| hpy04ep10206orf_0001.aa | 1666 | 6428 |
| 04ep10206orf14 | 1667 | 6429 |
| hp1e13852_1178175_c2_31 | 1668 | 6430 |
| hp4e53394_1178175_f1_14 | 1669 | 6431 |
| hpy03ee11215orf_0013.aa | 1670 | 6432 |
| 03ee11215orf26 | 1671 | 6433 |
| hpy03ee11215orf_0011.aa | 1672 | 6434 |
| 03ee11215orf25 | 1673 | 6435 |
| 03ee11215_6494193_c2_27 | 1674 | 6436 |
| 06ap12018orf2 | 1675 | 6437 |
| hp3e11024orf35 | 1676 | 6438 |
| 06ep30223_2079552_c2_131 | 1677 | 6439 |
| 06ce11002orf1 | 1678 | 6440 |
| hpy06ce11002orf_0001.aa | 1679 | 6441 |
| 06ce11002_113327_f1_1 | 1680 | 6442 |
| 06ep30223_23442842_c1_103 | 1681 | 6443 |
| 06ep30223_24613567_c3_150 | 1682 | 6444 |
| hpy06ap12018orf_0001.aa | 1683 | 6445 |
| 34099062 | 1684 | 6446 |
| 06ce11002orf2 | 1685 | 6447 |
| 06ce11002_34099062_f3_5 | 1686 | 6448 |
| 01ce21104_203142_c3_86 | 1687 | 6449 |
| 11ee10118orf2 | 1688 | 6450 |
| hpy11ee10118orf_0001.aa | 1689 | 6451 |
| hp5e25328_14261087_c1_80 | 1690 | 6452 |
| 11ge10308_5256_f2_1 | 1691 | 6453 |
| 11ge10308orf1 | 1692 | 6454 |
| hpy11ge10308orf_0001.aa | 1693 | 6455 |
| hp6p12158_21698387_f3_1 | 1694 | 6456 |
| hp7e10557_21698387_f1_1 | 1695 | 6457 |
| 02ae11612_600280_f3_37 | 1696 | 6458 |
| 02ae11612orf12 | 1697 | 6459 |
| hpy02ae11612orf_0001.aa | 1698 | 6460 |
| hp5e25328_34250033_f2_26 | 1699 | 6461 |
| 01ce21104_24274137_f1_1 | 1700 | 6462 |
| 03ee11115_205166_f3_2 | 1701 | 6463 |
| 03ee11115_25525876_f1_1 | 1702 | 6464 |
| 03ee11115orf1 | 1703 | 6465 |
| hpy03ee11115orf_0001.aa | 1704 | 6466 |
| 03ee11115orf2 | 1705 | 6467 |
| hp5e25328_4884687_c3_139 | 1706 | 6468 |
| hp5p15575_5861593_c1_34 | 1707 | 6469 |
| hp5p15575_5861593_c2_45 | 1708 | 6470 |
| hp6p10590_34063916_f1_4 | 1709 | 6471 |
| 02gp20814_5350312_f3_8 | 1710 | 6472 |
| 14ee10308orf6 | 1711 | 6473 |
| 07ee11905orf1 | 1712 | 6474 |
| hpy07ee11905orf_0003.aa | 1713 | 6475 |
| 14ce61516_4303467_f1_4 | 1714 | 6476 |
| hp3p10343orf1 | 1715 | 6477 |
| hpyhp3p10343orf_0002.aa | 1716 | 6478 |
| 11ap20714_33375062_f1_3 | 1717 | 6479 |
| hpy13ep12003orf_0005.aa | 1718 | 6480 |
| 13ep12003orf18 | 1719 | 6481 |
| hp6p10606_24237937_c2_27 | 1720 | 6482 |
| hp1p14013_36126562_f1_1 | 1721 | 6483 |
| hp1p14013orf5 | 1722 | 6484 |
| hp1p14013_3257800_f2_4 | 1723 | 6485 |
| hp1p14013orf10 | 1724 | 6486 |
| 02cp10615_36126562_c3_70 | 1725 | 6487 |
| 29500075 | 9593 | 9705 |
| 10737627 | 9594 | 9706 |
| B.2 Proteins involved in amino acid | | |
| metabolism | | |
| 6696887 | 1726 | 6488 |
| 02ge10116_6696887_f2_46 | 1727 | 6489 |
| 11ae10305orf4 | 1728 | 6490 |
| 02ge11622_30105343_f2_15 | 1729 | 6491 |
| 13ee10216orf38 | 1730 | 6492 |
| 02ge41622_30105343_f2_15 | 1731 | 6493 |
| 31681556 | 1732 | 6494 |
| 11gp20904_26212885_c3_33 | 1733 | 6495 |
| 11gp10904orf27 | 1734 | 6496 |
| hpyhp4e14522orf_0001.aa | 1735 | 6497 |
| 01ae11010_26344041_c1_44 | 1736 | 6498 |
| 01ae11010_26353437_c3_57 | 1737 | 6499 |
| hp4e14522orf18 | 1738 | 6500 |
| 01ae11010_788312_c1_43 | 1739 | 6501 |
| 07cp10312orf19 | 1740 | 6502 |
| 01ae11010_26353437_c2_28 | 1741 | 6503 |
| 01xe21717orf13 | 1742 | 6504 |
| 01xe21717orf21 | 1743 | 6505 |
| 05ep10815_3228467_c1_81 | 1744 | 6506 |
| 01cp20708_4568818_f2_12 | 1745 | 6507 |
| 14ee10419orf6 | 1746 | 6508 |
| 07ge11504orf9 | 1747 | 6509 |
| hpy07ge11504orf_0007.aa | 1748 | 6510 |
| 12ge10610orf1 | 1749 | 6511 |
| hpy12ge10610orf_0001.aa | 1750 | 6512 |
| 05ep10815_4864693_c2_98 | 1751 | 6513 |
| hpyhp3p10018orf_0001.aa | 1752 | 6514 |
| 09ge10522orf2 | 1753 | 6515 |
| hpy09ge10522orf_0002.aa | 1754 | 6516 |
| 05ep10815_4901462_f2_35 | 1755 | 6517 |
| hpy11ap11819orf_0001.aa | 1756 | 6518 |
| 04ep41903_36225883_f2_11 | 1757 | 6519 |
| 05ae20220orf21 | 1758 | 6520 |
| 05ae20220orf47 | 1759 | 6521 |
| 05ae20220orf65 | 1760 | 6522 |
| 05ae30220_4698842_f2_42 | 1761 | 6523 |
| hpy07ee20513orf_0015.aa | 1762 | 6524 |
| 07ee20513orf9 | 1763 | 6525 |
| 09ae10512_4336568_f3_24 | 1764 | 6526 |
| 06ep11202_4884677_c1_17 | 1765 | 6527 |
| 06cp20302orf5 | 1766 | 6528 |
| hp3e11122orf4 | 1767 | 6529 |
| 06gp31906orf3 | 1768 | 6530 |
| 06gp31906orf4 | 1769 | 6531 |
| hpy06gp31906orf_0002.aa | 1770 | 6532 |
| 06gp71906_31290937_c2_163 | 1771 | 6533 |
| 06gp71906_37592_f1_27 | 1772 | 6534 |
| hp4p11393orf3 | 1773 | 6535 |
| hpyhp4p11393orf_0001.aa | 1774 | 6536 |
| hp4p11393orf4 | 1775 | 6537 |
| 06gp71906_3986502_f3_111 | 1776 | 6538 |
| 14gp11820orf20 | 1777 | 6539 |
| 14gp11820orf27 | 1778 | 6540 |
| 09cp20502_23475342_f2_18 | 1779 | 6541 |
| 23475342 | 1780 | 6542 |
| 14gp11820orf7 | 1781 | 6543 |
| 14gp11820orf3 | 1782 | 6544 |
| 09cp20502_24613337_c2_43 | 1783 | 6545 |
| 07ae11008_24613337_c3_55 | 1784 | 6546 |
| 34189716 | 1785 | 6547 |
| 29ge30321_34189716_f3_12 | 1786 | 6548 |
| 01ce11618orf18 | 1787 | 6549 |
| 09ce52017_4005267_c1_20 | 1788 | 6550 |
| 01ep30520orf23 | 1789 | 6551 |
| 24409641 | 1790 | 6552 |
| 06cp30603_23567890_c1_86 | 1791 | 6553 |
| 05cp20518orf61 | 1792 | 6554 |
| 05cp20518orf12 | 1793 | 6555 |
| 05cp20518orf32 | 1794 | 6556 |
| 06cp30603_23595967_f2_33 | 1795 | 6557 |
| 11ge61517_23595967_f1_20 | 1796 | 6558 |
| 06cp30603_5364452_c3_141 | 1797 | 6559 |
| 04gp11213orf49 | 1798 | 6560 |
| hp4e13394orf3 | 1799 | 6561 |
| hp4e13394orf7 | 1800 | 6562 |
| hp4e13394_1296888_f2_28 | 1801 | 6563 |
| 09ap11406orf27 | 1802 | 6564 |
| 09ap11406orf17 | 1803 | 6565 |
| hp4e13394_23470963_f2_29 | 1804 | 6566 |
| hp4e13394_24636562_f2_44 | 1805 | 6567 |
| 06ep11108orf15 | 1806 | 6568 |
| 06ce10907orf2 | 1807 | 6569 |
| 09gp10903orf3 | 1808 | 6570 |
| hpy09gp10903orf_0004.aa | 1809 | 6571 |
| hp4e13394_25563962_f3_47 | 1810 | 6572 |
| 06ce10907orf1 | 1811 | 6573 |
| hpy06ce10907orf_0001.aa | 1812 | 6574 |
| hp4e13394_26736040_f1_2 | 1813 | 6575 |
| 09gp10903orf2 | 1814 | 6576 |
| 09ap11406orf26 | 1815 | 6577 |
| 09gp10903orf5 | 1816 | 6578 |
| hp4e13394_33306533_f1_3 | 1817 | 6579 |
| 09ap11406orf19 | 1818 | 6580 |
| hp4e13394_34171916_f1_4 | 1819 | 6581 |
| 04ep10206orf13 | 1820 | 6582 |
| hp1e13852_23477192_c2_30 | 1821 | 6583 |
| hp4e53394_23477192_f1_13 | 1822 | 6584 |
| 12ge10513orf2 | 1823 | 6585 |
| hpy12ge10513orf_0001.aa | 1824 | 6586 |
| 03ee11215_7320937_f1_8 | 1825 | 6587 |
| 03ee11215orf11 | 1826 | 6588 |
| hp4e53394_7320937_f1_11 | 1827 | 6589 |
| 14cp11121orf1 | 1828 | 6590 |
| 14cp11121orf7 | 1829 | 6591 |
| 05ce10208_36128141_f3_13 | 1830 | 6592 |
| 02ae11612_16834692_f1_15 | 1831 | 6593 |
| 05cp11911orf10 | 1832 | 6594 |
| hp4e14535orf7 | 1833 | 6595 |
| hp4e14535orf8 | 1834 | 6596 |
| hp4e14535orf3 | 1835 | 6597 |
| 06ep11917_24803153_c3_24 | 1836 | 6598 |
| 4570262 | 1837 | 6599 |
| 02ae11612_4570262_f3_38 | 1838 | 6600 |
| 02ae11612orf13 | 1839 | 6601 |
| 14ce10720orf4 | 1840 | 6602 |
| 14ce10720orf1 | 1841 | 6603 |
| hp5p15575_34156437_c2_36 | 1842 | 6604 |
| 05ge11422orf2 | 1843 | 6605 |
| 05ge11422orf1 | 1844 | 6606 |
| hpy05ge11422orf_0001.aa | 1845 | 6607 |
| 06ce20610_12925201_c3_35 | 1846 | 6608 |
| hp7e10228_4892592_f1_1 | 1847 | 6609 |
| hpy14ep11807orf_0001.aa | 1848 | 6610 |
| 45914063 | 1849 | 6611 |
| 12ap11614orf4 | 1850 | 6612 |
| hpy12ap11614orf_0010.aa | 1851 | 6613 |
| 12ap11614_34469527_f2_3 | 1852 | 6614 |
| 09cp21607_989055_c1_9 | 1853 | 6615 |
| 07gp31516orf6 | 1854 | 6616 |
| 11ae10710orf1 | 1855 | 6617 |
| hpy11ae10710orf_0001.aa | 1856 | 6618 |
| hp7p10287_24666030_f2_5 | 1857 | 6619 |
| hpyhp3p10349orf_0009.aa | 1858 | 6620 |
| 02ce41018_24303276_f3_19 | 1859 | 6621 |
| hp3p10349orf23 | 1860 | 6622 |
| hp7e10420_24484767_f3_18 | 1861 | 6623 |
| 06ap20306_22269807_c2_17 | 1862 | 6624 |
| 04gp11803orf6 | 1863 | 6625 |
| 03ae11503_4883587_c1_15 | 1864 | 6626 |
| 11ap20714_4883587_f3_47 | 1865 | 6627 |
| 03ae11503orf7 | 1866 | 6628 |
| 02cp11721orf11 | 1867 | 6629 |
| hp7e10100_3254805_c3_19 | 1868 | 6630 |
| 21976637 | 9595 | 9707 |
| 677088 | 9596 | 9708 |
| B.3 Proteins involved in cofactor | | |
| metabolism | | |
| hp6e12267_1204050_c2_46 | 1869 | 6631 |
| 12ge10305orf14 | 1870 | 6632 |
| hp6e12267_24089437_c3_61 | 1871 | 6633 |
| 24089437 | 1872 | 6634 |
| 12ge20305orf14 | 1873 | 6635 |
| 09ae10323orf2 | 1874 | 6636 |
| 09ae10323orf4 | 1875 | 6637 |
| 09cp61003_283442_f1_19 | 1876 | 6638 |
| 12ge20305orf28 | 1877 | 6639 |
| hp6e12267_4298467_f3_30 | 1878 | 6640 |
| hp6e12267_4428467_c2_51 | 1879 | 6641 |
| 12ge20305orf10 | 1880 | 6642 |
| hp2p10272_14094708_f2_9 | 1881 | 6643 |
| hpyhp2p10272orf_0002.aa | 1882 | 6644 |
| hp6p21623_14882837_f3_24 | 1883 | 6645 |
| hp2p10272orf4 | 1884 | 6646 |
| hpyhp2p10272orf_0001.aa | 1885 | 6647 |
| 02ap11117_14882837_c2_67 | 1886 | 6648 |
| hp5e12982_415907_f1_2 | 1887 | 6649 |
| hp5e12982orf5 | 1888 | 6650 |
| 14480927 | 1889 | 6651 |
| 02ge10116_24417562_c2_26 | 1890 | 6652 |
| 02ge10116_24417562_c2_123 | 1891 | 6653 |
| 02ge20116orf33 | 1892 | 6654 |
| hp5e15276orf8 | 1893 | 6655 |
| 02ge10116_4765638_c3_145 | 1894 | 6656 |
| 02ge10116_9956415_c1_83 | 1895 | 6657 |
| 04ap10921orf3 | 1896 | 6658 |
| hpy04ap10921orf_0001.aa | 1897 | 6659 |
| 02ge11810_26359537_f2_5 | 1898 | 6660 |
| 13ee10216orf42 | 1899 | 6661 |
| 13ee10216orf8 | 1900 | 6662 |
| 02ge11622_4897842_f2_19 | 1901 | 6663 |
| 09ge21419orf1 | 1902 | 6664 |
| 01ee60820_14183378_f2_18 | 1903 | 6665 |
| 03ce11207_14183378_f3_150 | 1904 | 6666 |
| 11gp10904orf14 | 1905 | 6667 |
| 11gp10904orf13 | 1906 | 6668 |
| 11gp20904_4414717_f2_13 | 1907 | 6669 |
| 01ee60820_4414717_f1_6 | 1908 | 6670 |
| 01ce10320orf6 | 1909 | 6671 |
| hpy01ce10320orf_0001.aa | 1910 | 6672 |
| 01ce10320_26054633_f3_8 | 1911 | 6673 |
| 01ce10320orf4 | 1912 | 6674 |
| 05ep10815orf2 | 1913 | 6675 |
| hpy05ep10815orf_0001.aa | 1914 | 6676 |
| 05ep10815_7818_c1_89 | 1915 | 6677 |
| 03ce11207_7818_c1_187 | 1916 | 6678 |
| hpy05ae20220orf_0042.aa | 1917 | 6679 |
| 05ae20220orf94 | 1918 | 6680 |
| 05ae30220_24507712_c2_80 | 1919 | 6681 |
| 02ce10213orf10 | 1920 | 6682 |
| 02ce10213orf3 | 1921 | 6683 |
| hp5p15212_23635441_f3_17 | 1922 | 6684 |
| 02ce10213orf18 | 1923 | 6685 |
| hp5p15212_4687538_f2_7 | 1924 | 6686 |
| 06ep11202_133293_c1_19 | 1925 | 6687 |
| 06cp20302orf3 | 1926 | 6688 |
| 04cp11202_36522218_c3_113 | 1927 | 6689 |
| 04ge11713orf40 | 1928 | 6690 |
| 04cp11202_5114015_f3_38 | 1929 | 6691 |
| 04ge11713orf20 | 1930 | 6692 |
| hpyhp2e10911orf_0009.aa | 1931 | 6693 |
| hp2e10911_34173401_c2_90 | 1932 | 6694 |
| hpyhp2e10911orf_0008.aa | 1933 | 6695 |
| 07ap11213_35156577_c1_24 | 1934 | 6696 |
| hp2e10911orf35 | 1935 | 6697 |
| 07ee50709_35156577_f3_80 | 1936 | 6698 |
| 09ze10333_4710386_f2_8 | 1937 | 6699 |
| 03ge10505orf3 | 1938 | 6700 |
| 09ze10333_4710386_f2_7 | 1939 | 6701 |
| 1408 | 1940 | 6702 |
| 09cp10713_30470301_c2_31 | 1941 | 6703 |
| 09cp10713_30470301_c2_30 | 1942 | 6704 |
| 09cp10713orf29 | 1943 | 6705 |
| 12ge10321_6923512_f2_8 | 1944 | 6706 |
| hp4p11352orf7 | 1945 | 6707 |
| 06ep10306orf4 | 1946 | 6708 |
| 03ae10804_976702_c2_34 | 1947 | 6709 |
| 06ep10306orf13 | 1948 | 6710 |
| hp2e10619orf2 | 1949 | 6711 |
| hp2e10619orf1 | 1950 | 6712 |
| hp4e13394_16984790_f2_41 | 1951 | 6713 |
| hpy11cp10916orf_0002.aa | 1952 | 6714 |
| hp4e53394_4556458_f1_12 | 1953 | 6715 |
| hp4e53394_16211062_f3_61 | 1954 | 6716 |
| 03ee11215_23985910_c3_33 | 1955 | 6717 |
| hp4e53394_23985910_c3_117 | 1956 | 6718 |
| 03ee11215orf34 | 1957 | 6719 |
| 03ee11215_35960937_f1_6 | 1958 | 6720 |
| hp4e53394_35960937_f1_9 | 1959 | 6721 |
| 03ee11215orf9 | 1960 | 6722 |
| 01ge10203_16689377_c1_11 | 1961 | 6723 |
| 01ge10203orf8 | 1962 | 6724 |
| 05ae11506orf3 | 1963 | 6725 |
| 01ge10203orf11 | 1964 | 6726 |
| hp1p13939_22656457_c2_34 | 1965 | 6727 |
| 01ge10203_22656457_c2_15 | 1966 | 6728 |
| hp4p62853_22656457_c1_35 | 1967 | 6729 |
| 06ep30223_23557202_c2_130 | 1968 | 6730 |
| hp3e11024orf49 | 1969 | 6731 |
| hpy02ce11220orf_0001.aa | 1970 | 6732 |
| 05ee10411orf5 | 1971 | 6733 |
| hpy05ee10411orf_0001.aa | 1972 | 6734 |
| 06ep30223_5109443_c1_109 | 1973 | 6735 |
| 10407625 | 1974 | 6736 |
| 02ae11612_24335942_c2_84 | 1975 | 6737 |
| 02ae11612orf26 | 1976 | 6738 |
| 2040717 | 1977 | 6739 |
| 02ae11612_32710417_c1_62 | 1978 | 6740 |
| 02ae11612orf36 | 1979 | 6741 |
| hp5e25328_4490967_c2_126 | 1980 | 6742 |
| hp7e10434_25394812_f2_8 | 1981 | 6743 |
| 06ce10515orf2 | 1982 | 6744 |
| 02ce41018_4976537_f1_7 | 1983 | 6745 |
| hp3p10349orf26 | 1984 | 6746 |
| 02ce41018_35945968_f3_25 | 1985 | 6747 |
| hp3p10349orf22 | 1986 | 6748 |
| hp7p90421_4976537_f3_27 | 1987 | 6749 |
| 11ap20714_20494837_f3_42 | 1988 | 6750 |
| hpy04gp11803orf_0002.aa | 1989 | 6751 |
| 11ap20714_21759681_c1_63 | 1990 | 6752 |
| hp5e15440orf25 | 1991 | 6753 |
| 23442642 | 1992 | 6754 |
| 06ap11418_23442642_f1_6 | 1993 | 6755 |
| hp5e15440orf21 | 1994 | 6756 |
| 11ap20714_2588387_f3_44 | 1995 | 6757 |
| 07cp10301orf2 | 1996 | 6758 |
| 05ap21216orf16 | 1997 | 6759 |
| 05ap21216orf24 | 1998 | 6760 |
| 07ap20216_31912575_c2_24 | 1999 | 6761 |
| 11ap20714_31912575_c2_82 | 2000 | 6762 |
| hp3e10057orf1 | 2001 | 6763 |
| 11ap20714_3228437_f2_28 | 2002 | 6764 |
| 13ep12003orf3 | 2003 | 6765 |
| 13ep12003orf12 | 2004 | 6766 |
| hp6p10606_23437942_f1_5 | 2005 | 6767 |
| 485375 | 9597 | 9709 |
| B.4 Proteins involved in carbohydrate | | |
| metabolism | | |
| 2855006 | 2006 | 6768 |
| 02ge11622_13007837_f1_9 | 2007 | 6769 |
| 13ee10216orf9 | 2008 | 6770 |
| 14257751 | 2009 | 6771 |
| 02ge11622_14257751_f3_37 | 2010 | 6772 |
| 13ee10216orf43 | 2011 | 6773 |
| 02ge11622_23992687_f2_27 | 2012 | 6774 |
| 02ge41622_23992687_f1_16 | 2013 | 6775 |
| 13ee10216orf30 | 2014 | 6776 |
| 02ge11622_3988912_f3_39 | 2015 | 6777 |
| 13ee10216orf45 | 2016 | 6778 |
| hpy13ee10216orf_0027.aa | 2017 | 6779 |
| 02ge11622_683262_f2_25 | 2018 | 6780 |
| 02ge41622_683262_f1_14 | 2019 | 6781 |
| 13ee10216orf28 | 2020 | 6782 |
| 02ge41622_683262_f3_44 | 2021 | 6783 |
| 04ep41903_12110918_f1_7 | 2022 | 6784 |
| 14ce11519orf5 | 2023 | 6785 |
| 14ce11519orf2 | 2024 | 6786 |
| 09ae11601orf6 | 2025 | 6787 |
| 04ep41903_4397717_f3_20 | 2026 | 6788 |
| 14ce11519orf3 | 2027 | 6789 |
| 04ep41903_5084843_f3_19 | 2028 | 6790 |
| 04ep41903_5084843_f2_19 | 2029 | 6791 |
| 09cp10502orf15 | 2030 | 6792 |
| 07ae11008_24400293_c1_40 | 2031 | 6793 |
| 07ce11409orf1 | 2032 | 6794 |
| hpy07ce11409orf_0001.aa | 2033 | 6795 |
| hp3p10168orf1 | 2034 | 6796 |
| hpyhp3p10168orf_0001.aa | 2035 | 6797 |
| 14ee41924_19790902_f3_54 | 2036 | 6798 |
| 14ee41924_24226562_f2_37 | 2037 | 6799 |
| 07ce11409orf6 | 2038 | 6800 |
| 06cp11217_34427203_c2_16 | 2039 | 6801 |
| hp1p13852orf14 | 2040 | 6802 |
| 01ep30520orf7 | 2041 | 6803 |
| 03ge11517orf2 | 2042 | 6804 |
| hpy03ge11517orf_0001.aa | 2043 | 6805 |
| 09ce52017_5080442_f3_18 | 2044 | 6806 |
| 09cp10224_22554651_c2_56 | 2045 | 6807 |
| 09ze10333_5861452_c1_17 | 2046 | 6808 |
| hpy03ge10505orf_0005.aa | 2047 | 6809 |
| 15807794 | 2048 | 6810 |
| 06cp30603_23610930_c3_72 | 2049 | 6811 |
| 05cp20518orf64 | 2050 | 6812 |
| 06cp30603_33443_f3_32 | 2051 | 6813 |
| 05cp20518orf27 | 2052 | 6814 |
| 13ap11119orf1 | 2053 | 6815 |
| hpy13ap11119orf_0001.aa | 2054 | 6816 |
| 05ap12011orf1 | 2055 | 6817 |
| hpy05ap12011orf_0001.aa | 2056 | 6818 |
| 07ce11019_23439204_c1_10 | 2057 | 6819 |
| 14gp11423_25416691_c2_75 | 2058 | 6820 |
| hpy09cp10614orf_0001.aa | 2059 | 6821 |
| 09cp10614orf3 | 2060 | 6822 |
| 12ae10622_4492342_f1_16 | 2061 | 6823 |
| 14gp11423_4492342_c2_74 | 2062 | 6824 |
| 23912807 | 2063 | 6825 |
| hp4e13394_24298127_c2_106 | 2064 | 6826 |
| 09ap11406orf8 | 2065 | 6827 |
| hpy05cp11911orf_0001.aa | 2066 | 6828 |
| 02ee10810orf1 | 2067 | 6829 |
| hpy02ee10810orf_0001.aa | 2068 | 6830 |
| 02ee10810_20179790_f1_1 | 2069 | 6831 |
| 02ae11612_4328518_f3_42 | 2070 | 6832 |
| 01ce21104_4328518_f1_6 | 2071 | 6833 |
| hp7e10429_34250036_c1_25 | 2072 | 6834 |
| hpy12ap11614orf_0006.aa | 2073 | 6835 |
| 12ap11614orf3 | 2074 | 6836 |
| 12ap11614orf2 | 2075 | 6837 |
| 12ap11614_4562712_f2_2 | 2076 | 6838 |
| 13723593 | 9598 | 9710 |
| 24298127 | 9599 | 9711 |
| B.5 Proteins involved in nucleic acid | | |
| metabolism | | |
| 09ae10323orf3 | 2077 | 6839 |
| 09cp61003_4297967_f3_56 | 2078 | 6840 |
| 09cp61003_6142965_f2_37 | 2079 | 6841 |
| 09ae10323orf1 | 2080 | 6842 |
| hpy13ee10216orf_0008.aa | 2081 | 6843 |
| 02ge41622_14469018_f2_25 | 2082 | 6844 |
| 02ge11622_14726062_f1_4 | 2083 | 6845 |
| 13ee10216orf17 | 2084 | 6846 |
| hp6p31058_35156592_f3_1 | 2085 | 6847 |
| 02ge41622_14469018_f3_33 | 2086 | 6848 |
| 3261306 | 2087 | 6849 |
| 06ee10709_7118818_f3_9 | 2088 | 6850 |
| 06ee10709orf5 | 2089 | 6851 |
| 01ae11010_29297936_c3_43 | 2090 | 6852 |
| hp3e11075orf4 | 2091 | 6853 |
| 01ae11010_35581562_c1_37 | 2092 | 6854 |
| 01ae11010_40963_c1_36 | 2093 | 6855 |
| 29ee12019orf1 | 2094 | 6856 |
| 03ce11207_40963_f1_45 | 2095 | 6857 |
| 04gp11701_4687842_c2_29 | 2096 | 6858 |
| hp3e11168orf26 | 2097 | 6859 |
| 06ap10609orf3 | 2098 | 6860 |
| 06ap10609orf2 | 2099 | 6861 |
| hpy06ap10609orf_0001.aa | 2100 | 6862 |
| 06ap10609_3390656_c1_41 | 2101 | 6863 |
| 06cp10411orf1 | 2102 | 6864 |
| 06cp10411orf2 | 2103 | 6865 |
| 06gp71906_16494193_c3_191 | 2104 | 6866 |
| 14574201 | 2105 | 6867 |
| hpy02cp11822orf_0007.aa | 2106 | 6868 |
| 02cp11822orf26 | 2107 | 6869 |
| 04cp11202_4339813_c1_73 | 2108 | 6870 |
| 04cp11202_4339813_c3_107 | 2109 | 6871 |
| 14ee41924_14313885_c3_100 | 2110 | 6872 |
| 14313885 | 2111 | 6873 |
| 11ce10917orf14 | 2112 | 6874 |
| 07ce11409orf11 | 2113 | 6875 |
| hpy07ce11409orf_0005.aa | 2114 | 6876 |
| 07ce11409orf12 | 2115 | 6877 |
| 14ee41924_5080087_c1_57 | 2116 | 6878 |
| 01ep11504orf1 | 2117 | 6879 |
| 01ge10801orf4 | 2118 | 6880 |
| 01ep11504orf4 | 2119 | 6881 |
| 01ep11504orf3 | 2120 | 6882 |
| hpy01ep11504orf_0001.aa | 2121 | 6883 |
| 02ae31010_16828135_f3_32 | 2122 | 6884 |
| hp5p15641_24412842_f1_2 | 2123 | 6885 |
| hp5p15641orf11 | 2124 | 6886 |
| 02ae31010_33203166_f1_13 | 2125 | 6887 |
| hp1p13947orf9 | 2126 | 6888 |
| hpyhp1p13947orf_0007.aa | 2127 | 6889 |
| hp1p13947orf3 | 2128 | 6890 |
| 02ae31010_5080463_f2_26 | 2129 | 6891 |
| 14ae20424orf1 | 2130 | 6892 |
| 04ae61517_5869133_f2_4 | 2131 | 6893 |
| hp4p12313orf4 | 2132 | 6894 |
| hp4p12313orf3 | 2133 | 6895 |
| 09cp10224_22554651_c2_51 | 2134 | 6896 |
| 32144532 | 2135 | 6897 |
| 06cp30603_10739532_f1_5 | 2136 | 6898 |
| 05cp20518orf5 | 2137 | 6899 |
| 04ge10816orf1 | 2138 | 6900 |
| 02ee10520orf7 | 2139 | 6901 |
| 02ee10520orf4 | 2140 | 6902 |
| hpy02ee10520orf_0005.aa | 2141 | 6903 |
| 04ge10816orf3 | 2142 | 6904 |
| hpy04ge10816orf_0001.aa | 2143 | 6905 |
| 13ae10610_3962568_c3_37 | 2144 | 6906 |
| 04ge10816orf2 | 2145 | 6907 |
| 13ae10610_16407276_c2_31 | 2146 | 6908 |
| 13ae10610_3962568_c1_26 | 2147 | 6909 |
| 12ge10321_4298468_f3_15 | 2148 | 6910 |
| hp4p11352orf10 | 2149 | 6911 |
| 09cp10405orf3 | 2150 | 6912 |
| 09cp10405orf1 | 2151 | 6913 |
| hpy09cp10405orf_0001.aa | 2152 | 6914 |
| hp4e13394_4119017_c2_95 | 2153 | 6915 |
| hpy01ep30520orf_0002.aa | 2154 | 6916 |
| 01ep30520orf8 | 2155 | 6917 |
| hpy01ep30520orf_0001.aa | 2156 | 6918 |
| 06ep30223_23476067_c1_119 | 2157 | 6919 |
| 06ep30223_23476067_c1_115 | 2158 | 6920 |
| 06ep30223_23476067_c1_118 | 2159 | 6921 |
| 6517040 | 2160 | 6922 |
| 06ep30223_33600817_f2_63 | 2161 | 6923 |
| hp3e11024orf24 | 2162 | 6924 |
| 867183 | 2163 | 6925 |
| 06ep11917_21522805_c3_25 | 2164 | 6926 |
| hp4e14535orf4 | 2165 | 6927 |
| hp6p12129_16192812_c2_22 | 2166 | 6928 |
| 01ep12002_16192812_c1_13 | 2167 | 6929 |
| 04ep10515orf8 | 2168 | 6930 |
| hp2e10692orf3 | 2169 | 6931 |
| 14ce61516_6025312_f1_6 | 2170 | 6932 |
| hpy05ae10808orf_0003.aa | 2171 | 6933 |
| 11ae80818_6900292_c3_67 | 2172 | 6934 |
| 11ae80818_976506_f2_20 | 2173 | 6935 |
| hpy06cp11722orf_0004.aa | 2174 | 6936 |
| 04ae21413_26360918_f3_2 | 2175 | 6937 |
| 04ae11413orf3 | 2176 | 6938 |
| 04ae11413orf1 | 2177 | 6939 |
| 04ae21413_19532530_f1_1 | 2178 | 6940 |
| 11ap20714_34663910_f3_29 | 2179 | 6941 |
| 04ae11413orf2 | 2180 | 6942 |
| hp5e15440orf7 | 2181 | 6943 |
| hp8e10065_4962812_f2_18 | 2182 | 6944 |
| 1581937 | 9600 | 9712 |
| B.6 Proteins involved in lipid metabolism | | |
| hp6e12267_14650278_f3_29 | 2183 | 6945 |
| 12ge20305orf26 | 2184 | 6946 |
| 13ee10216orf1 | 2185 | 6947 |
| hpy13ee10216orf_0001.aa | 2186 | 6948 |
| 02ge11622_26023917_f1_1 | 2187 | 6949 |
| 02ge41622_33985402_f1_1 | 2188 | 6950 |
| hp3e11060orf16 | 2189 | 6951 |
| 09ae10512_4334717_f1_7 | 2190 | 6952 |
| 422937 | 2191 | 6953 |
| 29zp10241orf11 | 2192 | 6954 |
| 14cp20718_22767327_c3_19 | 2193 | 6955 |
| hp5p15861_16579692_f2_7 | 2194 | 6956 |
| 02cp20821orf2 | 2195 | 6957 |
| 14ee41924_23834800_f2_32 | 2196 | 6958 |
| 11ce10917orf10 | 2197 | 6959 |
| 14ee41924_6672317_f2_30 | 2198 | 6960 |
| 11ce10917orf8 | 2199 | 6961 |
| 32705252 | 2200 | 6962 |
| hp4p11352orf6 | 2201 | 6963 |
| hp4p11352orf2 | 2202 | 6964 |
| 12ge10321_35445843_f2_7 | 2203 | 6965 |
| 06ep11917_19539202_c1_21 | 2204 | 6966 |
| 43490713 | 2205 | 6967 |
| 06ep11917_5114568_c2_23 | 2206 | 6968 |
| hp4e14535orf2 | 2207 | 6969 |
| 14ce61516_16814158_f1_5 | 2208 | 6970 |
| 14ce61516_14162751_f3_14 | 2209 | 6971 |
| hp2e10692orf2 | 2210 | 6972 |
| hp2e10692orf1 | 2211 | 6973 |
| 02ce21018orf4 | 2212 | 6974 |
| 02ce41018_24314075_c3_46 | 2213 | 6975 |
| 11ap20714_4578452_f1_8 | 2214 | 6976 |
| 07ap20216_4578452_f1_5 | 2215 | 6977 |
| 05ap21216orf8 | 2216 | 6978 |
| hp1p14013_35179683_f2_6 | 2217 | 6979 |
| hp1p14013orf3 | 2218 | 6980 |
| 5138 | 9601 | 9713 |
| 35445843 | 9602 | 9714 |
| B.7 Proteins involved in mRNA translation | | |
| and ribosome biogenesis | | |
| 05ee20322orf13 | 2219 | 6981 |
| 02ge10116_36464702_f3_70 | 2220 | 6982 |
| 03ap10105orf2 | 2221 | 6983 |
| 03ap10105orf1 | 2222 | 6984 |
| hpy11gp10904orf_0001.aa | 2223 | 6985 |
| 01ee60820_36132778_c3_43 | 2224 | 6986 |
| 03ce11207_36132778_c2_225 | 2225 | 6987 |
| 785437 | 2226 | 6988 |
| 01ae11010_5192143_c3_32 | 2227 | 6989 |
| hp4e14522orf11 | 2228 | 6990 |
| 05ep10815_5318766_c1_87 | 2229 | 6991 |
| 07ge11504orf7 | 2230 | 6992 |
| 11gp10904orf24 | 2231 | 6993 |
| 11gp20904_6136000_c2_29 | 2232 | 6994 |
| 11gp20904_791318_c3_32 | 2233 | 6995 |
| 11gp10904orf28 | 2234 | 6996 |
| 05ae30220_14647183_c2_83 | 2235 | 6997 |
| 05ae20220orf72 | 2236 | 6998 |
| 05gp11901orf27 | 2237 | 6999 |
| 05gp11901orf21 | 2238 | 7000 |
| hp5p15496orf1 | 2239 | 7001 |
| 11ee11408_3955010_c1_36 | 2240 | 7002 |
| 04ee11108_4801318_f1_8 | 2241 | 7003 |
| 27ze10351orf6 | 2242 | 7004 |
| 06ae11122orf1 | 2243 | 7005 |
| hpy06ae11122orf_0001.aa | 2244 | 7006 |
| 05ae30801_22556543_c2_19 | 2245 | 7007 |
| 05ae30801_24792212_c1_16 | 2246 | 7008 |
| hpyhp1e10446orf_0002.aa | 2247 | 7009 |
| 05ae30801_26306562_c3_23 | 2248 | 7010 |
| 05ae30801_33204692_c2_21 | 2249 | 7011 |
| 05ae30801_33290942_c2_17 | 2250 | 7012 |
| hp1e10446orf5 | 2251 | 7013 |
| 05ae30801_34196062_c3_24 | 2252 | 7014 |
| 05ae30801_4955468_c2_18 | 2253 | 7015 |
| 14gp11419orf1 | 2254 | 7016 |
| 24500088 | 2255 | 7017 |
| hp5p15212_806540_f2_8 | 2256 | 7018 |
| 02ce10213orf2 | 2257 | 7019 |
| 01ae12001_3907688_c2_37 | 2258 | 7020 |
| 07gp11807orf45 | 2259 | 7021 |
| hp6e10967_4506518_c1_16 | 2260 | 7022 |
| hp2p10625orf24 | 2261 | 7023 |
| 06ep11202_3956713_c2_25 | 2262 | 7024 |
| 14ge10402orf1 | 2263 | 7025 |
| 02cp11822orf23 | 2264 | 7026 |
| 02cp11822orf18 | 2265 | 7027 |
| 04cp11202_4490968_c2_78 | 2266 | 7028 |
| 04cp11202_4490968_c3_113 | 2267 | 7029 |
| hpy02cp11822orf_0004.aa | 2268 | 7030 |
| 4895327 | 2269 | 7031 |
| 04cp11202_4895327_c1_74 | 2270 | 7032 |
| 04cp11202_4895327_c3_108 | 2271 | 7033 |
| 02cp11822orf22 | 2272 | 7034 |
| 06gp71906_4895327_f3_94 | 2273 | 7035 |
| 07ae11008_24023588_c2_42 | 2274 | 7036 |
| hp5e15003orf1 | 2275 | 7037 |
| hp5p15003orf2 | 2276 | 7038 |
| hpyhp5p15003orf_0001.aa | 2277 | 7039 |
| 14gp11820orf5 | 2278 | 7040 |
| hpy14gp11820orf_0001.aa | 2279 | 7041 |
| 07ae11008_26258557_c3_52 | 2280 | 7042 |
| 09cp20502_26258557_c2_41 | 2281 | 7043 |
| 14gp11820orf2 | 2282 | 7044 |
| 14gp11820orf11 | 2283 | 7045 |
| 09cp20502_4562512_c1_32 | 2284 | 7046 |
| hp5e15003orf2 | 2285 | 7047 |
| 07ae11008_6680318_c2_41 | 2286 | 7048 |
| 14cp20718_24250207_c3_18 | 2287 | 7049 |
| 29zp10241orf13 | 2288 | 7050 |
| hpy07ap11111orf_0003.aa | 2289 | 7051 |
| 07ap11111orf20 | 2290 | 7052 |
| hpy07ap11111orf_0001.aa | 2291 | 7053 |
| 07ap11111_26172193_c1_13 | 2292 | 7054 |
| 14cp12009orf5 | 2293 | 7055 |
| 14cp12009orf2 | 2294 | 7056 |
| hpy14cp12009orf_0001.aa | 2295 | 7057 |
| 01ap10322orf2 | 2296 | 7058 |
| 07ap11111_31884687_f2_7 | 2297 | 7059 |
| 07ap11111orf5 | 2298 | 7060 |
| hpy14cp12009orf_0003.aa | 2299 | 7061 |
| 14cp12009orf4 | 2300 | 7062 |
| 07ap61111_31884687_f3_39 | 2301 | 7063 |
| 07ap61111_31884687_f3_41 | 2302 | 7064 |
| 14ee41924_16282067_c1_72 | 2303 | 7065 |
| 02ep30607orf32 | 2304 | 7066 |
| 02ep30607orf23 | 2305 | 7067 |
| 14ee41924_19565702_c1_69 | 2306 | 7068 |
| 07ee11402_19565702_c2_88 | 2307 | 7069 |
| hp5p15861_26360952_f3_11 | 2308 | 7070 |
| 02cp20821orf7 | 2309 | 7071 |
| 01ce11618orf50 | 2310 | 7072 |
| 01ce11618orf32 | 2311 | 7073 |
| 29ge30321_212832_c2_22 | 2312 | 7074 |
| 07ap11213_22400307_c2_32 | 2313 | 7075 |
| hp2e10911orf29 | 2314 | 7076 |
| hp5p15641_34101462_f2_8 | 2315 | 7077 |
| hp5p15641orf3 | 2316 | 7078 |
| 07ap11213_4897193_c1_25 | 2317 | 7079 |
| hp2e10911orf48 | 2318 | 7080 |
| 02cp11404orf4 | 2319 | 7081 |
| hpy02cp11404orf_0001.aa | 2320 | 7082 |
| 02cp11404orf8 | 2321 | 7083 |
| 07ge11521_2579708_c2_30 | 2322 | 7084 |
| 02cp11404orf7 | 2323 | 7085 |
| 07ge11521_16992087_c1_26 | 2324 | 7086 |
| 07ge11521_16992087_c2_33 | 2325 | 7087 |
| 33601578 | 2326 | 7088 |
| 07ge11521_33601578_c3_36 | 2327 | 7089 |
| 02cp11404orf11 | 2328 | 7090 |
| 07ge11521_4476568_c3_37 | 2329 | 7091 |
| 02cp11404orf12 | 2330 | 7092 |
| 07ge11521_5859713_c2_31 | 2331 | 7093 |
| 02cp11404orf2 | 2332 | 7094 |
| hp1p11244orf8 | 2333 | 7095 |
| 01ee20804orf4 | 2334 | 7096 |
| hpy01ee20804orf_0002.aa | 2335 | 7097 |
| 09cp10224_3906717_c2_50 | 2336 | 7098 |
| 09cp10224_4720437_c2_47 | 2337 | 7099 |
| hp1p11244orf1 | 2338 | 7100 |
| 11ce11005orf1 | 2339 | 7101 |
| 06cp30603_16523452_c2_95 | 2340 | 7102 |
| 05cp20518orf16 | 2341 | 7103 |
| 05cp20518orf26 | 2342 | 7104 |
| 06cp30603_24886308_f2_15 | 2343 | 7105 |
| 06cp30603_24886308_f2_27 | 2344 | 7106 |
| 05cp20518orf17 | 2345 | 7107 |
| 05cp20518orf2 | 2346 | 7108 |
| 06cp30603_34178762_f1_3 | 2347 | 7109 |
| 09cp10713_5194218_c1_25 | 2348 | 7110 |
| 09cp10713orf21 | 2349 | 7111 |
| 09cp10713orf28 | 2350 | 7112 |
| 09cp10713_23852057_c2_30 | 2351 | 7113 |
| 09cp10713_5194218_c2_29 | 2352 | 7114 |
| hpy07ap11112orf_0001.aa | 2353 | 7115 |
| 07ap11112orf1 | 2354 | 7116 |
| hp3e10946_34175837_f3_3 | 2355 | 7117 |
| hp3e10946_32609412_f3_4 | 2356 | 7118 |
| hp3p10048orf3 | 2357 | 7119 |
| hp4e13394_1209687_c2_94 | 2358 | 7120 |
| 01ep10216orf5 | 2359 | 7121 |
| hpy01ep10216orf_0003.aa | 2360 | 7122 |
| hp4e13394_14554676_f1_19 | 2361 | 7123 |
| hp4e13394_3942318_f1_25 | 2362 | 7124 |
| 06ep11108orf24 | 2363 | 7125 |
| hp4e13394_415657_f1_23 | 2364 | 7126 |
| 06ep11108orf18 | 2365 | 7127 |
| 07ap11622orf14 | 2366 | 7128 |
| 06ae11020orf1 | 2367 | 7129 |
| 07ap11622orf10 | 2368 | 7130 |
| hp1e13852_23599087_f1_1 | 2369 | 7131 |
| 07gp10713orf3 | 2370 | 7132 |
| 06ep30223_34244037_c2_139 | 2371 | 7133 |
| 06ep30223_6110937_c2_140 | 2372 | 7134 |
| 01ee10520orf1 | 2373 | 7135 |
| hpy01ee10520orf_0001.aa | 2374 | 7136 |
| 06ep30223_4035262_c1_117 | 2375 | 7137 |
| hp5e15555_4035262_c3_166 | 2376 | 7138 |
| 02ae11612_23598811_c1_63 | 2377 | 7139 |
| 02ae11612orf37 | 2378 | 7140 |
| 02ae11612_26835305_f3_43 | 2379 | 7141 |
| 05cp11911orf7 | 2380 | 7142 |
| 02ae11612_4488967_f2_29 | 2381 | 7143 |
| 05cp11911orf16 | 2382 | 7144 |
| hp3e11086orf9 | 2383 | 7145 |
| hp3e11086orf4 | 2384 | 7146 |
| hp3e11086orf5 | 2385 | 7147 |
| hp5p15575_15900317_f3_23 | 2386 | 7148 |
| hp5p15575_23438812_f2_15 | 2387 | 7149 |
| 14ee11113orf1 | 2388 | 7150 |
| hp5p15575_33478126_f2_14 | 2389 | 7151 |
| hp5p15575_4886087_f3_25 | 2390 | 7152 |
| hp6e10491_25595443_c1_14 | 2391 | 7153 |
| hpyhp5e15084orf_0003.aa | 2392 | 7154 |
| hp6e10491_34415816_c1_16 | 2393 | 7155 |
| 03ee10521orf2 | 2394 | 7156 |
| hp6e10491_36385438_c3_21 | 2395 | 7157 |
| hp5e15084orf14 | 2396 | 7158 |
| 04ee30405_3911693_f3_6 | 2397 | 7159 |
| hpy16ae10508orf_0010.aa | 2398 | 7160 |
| hpy16ae10508orf_0009.aa | 2399 | 7161 |
| 16ae10508orf18 | 2400 | 7162 |
| 07cp11107orf1 | 2401 | 7163 |
| 07cp11107orf2 | 2402 | 7164 |
| 16ae10508orf19 | 2403 | 7165 |
| hp6p10509_12695436_c2_15 | 2404 | 7166 |
| 07ep11916_10973880_c1_19 | 2405 | 7167 |
| 01cp11414orf1 | 2406 | 7168 |
| hp6p12244_34157500_f1_3 | 2407 | 7169 |
| 02ae11211orf5 | 2408 | 7170 |
| 07ep11916_4042162_c3_30 | 2409 | 7171 |
| 01cp11414orf6 | 2410 | 7172 |
| hp6p12244_4883452_f3_33 | 2411 | 7173 |
| 02ae11211orf1 | 2412 | 7174 |
| 11ae12004_26275300_c3_48 | 2413 | 7175 |
| hpy14cp10705orf_0002.aa | 2414 | 7176 |
| hp7e10433_32228441_f2_4 | 2415 | 7177 |
| hp5p15504orf8 | 2416 | 7178 |
| 14ce21516_22394702_f2_2 | 2417 | 7179 |
| 14ce21516orf2 | 2418 | 7180 |
| 14ce61516_7031692_f1_1 | 2419 | 7181 |
| hp7e10590_33406577_c2_91 | 2420 | 7182 |
| 06cp11722orf20 | 2421 | 7183 |
| 11ae80818_3961000_f2_18 | 2422 | 7184 |
| 25595387 | 2423 | 7185 |
| hp7e10434_25595387_f3_16 | 2424 | 7186 |
| 06ce10515orf4 | 2425 | 7187 |
| 06ae10902_1209842_f2_2 | 2426 | 7188 |
| 06ae10902orf1 | 2427 | 7189 |
| hp7p10325_22861641_f2_2 | 2428 | 7190 |
| 06ae10902_24610937_f3_7 | 2429 | 7191 |
| 06ae10902orf2 | 2430 | 7192 |
| 06ae10902_26758380_f3_6 | 2431 | 7193 |
| 06ap11418_548837_c2_25 | 2432 | 7194 |
| hp5e15440orf9 | 2433 | 7195 |
| 13ep12003orf14 | 2434 | 7196 |
| 4177212 | 2435 | 7197 |
| 01ee11621orf6 | 2436 | 7198 |
| 13ep12003orf11 | 2437 | 7199 |
| hp6p10606_1875_f1_10 | 2438 | 7200 |
| 24803280 | 9603 | 9715 |
| 32036462 | 9604 | 9716 |
| “B.8 Proteins involved in genome | | |
| replication, transcription, recombination and | | |
| repair” | | |
| 11719687 | 2439 | 7201 |
| hp3p10156orf8 | 2440 | 7202 |
| hp7p10290_1994062_f1_1 | 2441 | 7203 |
| hp6e12267_23955008_f1_2 | 2442 | 7204 |
| 12ge20305orf34 | 2443 | 7205 |
| hp2p10272_26354187_c2_36 | 2444 | 7206 |
| 09ap20802orf28 | 2445 | 7207 |
| hp2p10272_4899052_c3_46 | 2446 | 7208 |
| 09ap20802orf34 | 2447 | 7209 |
| hp3e10950orf2 | 2448 | 7210 |
| 02gp20706_32242202_c3_57 | 2449 | 7211 |
| hp6p12311_12894031_c3_12 | 2450 | 7212 |
| 05ep20322orf5 | 2451 | 7213 |
| hp6p12311_4110627_c2_11 | 2452 | 7214 |
| 05ep20322orf3 | 2453 | 7215 |
| 02ge10116_4110627_f3_70 | 2454 | 7216 |
| 06ee10709orf11 | 2455 | 7217 |
| 06ee10709orf18 | 2456 | 7218 |
| 06ee10709_24228168_c1_12 | 2457 | 7219 |
| 01cp20708_12289077_f2_13 | 2458 | 7220 |
| 14ee10419orf7 | 2459 | 7221 |
| 05ep10815_16305252_c3_111 | 2460 | 7222 |
| 16305252 | 2461 | 7223 |
| 07ge11504orf4 | 2462 | 7224 |
| 05ep10815_16600757_f2_41 | 2463 | 7225 |
| 01xe21717orf27 | 2464 | 7226 |
| 01cp20708_203167_c3_61 | 2465 | 7227 |
| 14ee10419orf14 | 2466 | 7228 |
| hp3e11168orf7 | 2467 | 7229 |
| hp3e11168orf6 | 2468 | 7230 |
| 04gp11701_23625010_f3_21 | 2469 | 7231 |
| 14ee10419orf17 | 2470 | 7232 |
| hpy14ee10419orf_0010.aa | 2471 | 7233 |
| hp3e11168orf36 | 2472 | 7234 |
| 04gp11701_39068_c1_25 | 2473 | 7235 |
| 14ee10419orf18 | 2474 | 7236 |
| 01cp20708_39068_c2_52 | 2475 | 7237 |
| 07ap80601orf9 | 2476 | 7238 |
| 07ap80601orf4 | 2477 | 7239 |
| 07ap80601_19726452_f1_3 | 2478 | 7240 |
| 11ee11408_23603162_c1_38 | 2479 | 7241 |
| hp5p15496orf7 | 2480 | 7242 |
| 11ee11408_7927_c1_37 | 2481 | 7243 |
| hp5p15496orf2 | 2482 | 7244 |
| 07ap80601orf3 | 2483 | 7245 |
| 07ap80601_24808433_f1_2 | 2484 | 7246 |
| 07ap80601_976413_f3_9 | 2485 | 7247 |
| 07ap80601orf2 | 2486 | 7248 |
| 05ae30220_976413_c3_204 | 2487 | 7249 |
| 09ae10512_23618812_c3_64 | 2488 | 7250 |
| hp3e11060orf6 | 2489 | 7251 |
| 09ae10512_23860625_c1_41 | 2490 | 7252 |
| hp3e11060orf10 | 2491 | 7253 |
| 09ae10512_24274162_c1_39 | 2492 | 7254 |
| hp3e11060orf8 | 2493 | 7255 |
| 24818802 | 2494 | 7256 |
| 09ae10512_24818802_c2_49 | 2495 | 7257 |
| hp3e11060orf2 | 2496 | 7258 |
| 03ce21717orf2 | 2497 | 7259 |
| hp1p10488orf7 | 2498 | 7260 |
| 06ae11016_25431251_f2_22 | 2499 | 7261 |
| 03ae10516orf13 | 2500 | 7262 |
| 06ap30322_1213427_c1_26 | 2501 | 7263 |
| 01ae12001_19695883_c2_45 | 2502 | 7264 |
| 07gp11807orf55 | 2503 | 7265 |
| 06ap10609_19695883_c1_38 | 2504 | 7266 |
| 24036302 | 2505 | 7267 |
| 01ae12001_23625827_c3_54 | 2506 | 7268 |
| 07gp11807orf35 | 2507 | 7269 |
| 14ap10221_36615625_c2_3 | 2508 | 7270 |
| 11ee11408_36615625_c3_52 | 2509 | 7271 |
| 05gp11901orf26 | 2510 | 7272 |
| 01ae12001_7320277_c3_53 | 2511 | 7273 |
| 07gp11807orf34 | 2512 | 7274 |
| 29ep10720_21677217_f2_9 | 2513 | 7275 |
| 11ge10309orf29 | 2514 | 7276 |
| 06ap11119_975187_f3_22 | 2515 | 7277 |
| hp6p10723orf6 | 2516 | 7278 |
| 06cp11118_117325_f3_12 | 2517 | 7279 |
| 01ce11513orf10 | 2518 | 7280 |
| 01ce11513orf11 | 2519 | 7281 |
| 01ce11513orf2 | 2520 | 7282 |
| 06cp11118_24406312_f2_7 | 2521 | 7283 |
| 05ap11505orf7 | 2522 | 7284 |
| hpy05ap11505orf_0007.aa | 2523 | 7285 |
| 11ge10309orf11 | 2524 | 7286 |
| 14ap11617_2040750_f1_1 | 2525 | 7287 |
| hp6e10967_10834443_c3_26 | 2526 | 7288 |
| hp2p10625orf15 | 2527 | 7289 |
| 05ee10816_34258562_f1_2 | 2528 | 7290 |
| 04ce11617orf11 | 2529 | 7291 |
| hpy05ee10816orf_0001.aa | 2530 | 7292 |
| hpy05ee10816orf_0004.aa | 2531 | 7293 |
| 05ee10816orf2 | 2532 | 7294 |
| 05ee10816orf1 | 2533 | 7295 |
| 06ep10615_34662502_f1_11 | 2534 | 7296 |
| 06ep10615_34662502_f1_11 | 2535 | 7297 |
| 04ce11617orf1 | 2536 | 7298 |
| hpy04ce11617orf_0001.aa | 2537 | 7299 |
| 05ee10816_36199207_f3_14 | 2538 | 7300 |
| 06ep10615_36199207_f1_12 | 2539 | 7301 |
| 06ep10615_34662502_f2_26 | 2540 | 7302 |
| 04ce11617orf26 | 2541 | 7303 |
| 04ce11617orf27 | 2542 | 7304 |
| 05ee10816_4687651_c1_22 | 2543 | 7305 |
| 06cp20302orf9 | 2544 | 7306 |
| 06ep11202_104706_c3_33 | 2545 | 7307 |
| 06ep11202_26179002_c1_20 | 2546 | 7308 |
| 06cp20302orf4 | 2547 | 7309 |
| 06ep11202_26179002_c3_32 | 2548 | 7310 |
| 06ep11202_3020312_f1_1 | 2549 | 7311 |
| 06ep11202orf1 | 2550 | 7312 |
| hpy06ep11202orf_0001.aa | 2551 | 7313 |
| hpy14ce20219orf_0004.aa | 2552 | 7314 |
| 06gp71906_36125062_f1_1 | 2553 | 7315 |
| 07ap61111_23992002_c1_66 | 2554 | 7316 |
| 07cp10312_23992002_f2_5 | 2555 | 7317 |
| hpyhp1p13868orf_0007.aa | 2556 | 7318 |
| 07ap61111_24406593_c3_108 | 2557 | 7319 |
| 11cp10113orf5 | 2558 | 7320 |
| hpy11cp10113orf_0003.aa | 2559 | 7321 |
| hpy01ap10322orf_0001.aa | 2560 | 7322 |
| 07ap61111_25599087_f2_20 | 2561 | 7323 |
| 14ap10815_5274093_f2_5 | 2562 | 7324 |
| hp3e10349orf9 | 2563 | 7325 |
| 260941 | 2564 | 7326 |
| 04gp11213orf36 | 2565 | 7327 |
| 14ap10815_6312_c2_22 | 2566 | 7328 |
| hp3e10349orf18 | 2567 | 7329 |
| 07cp10312_24415633_f1_3 | 2568 | 7330 |
| hpyhp1p13868orf_0006.aa | 2569 | 7331 |
| 14ee41924_23598962_f2_23 | 2570 | 7332 |
| 23598962 | 2571 | 7333 |
| 02ep30607orf10 | 2572 | 7334 |
| 4882652 | 2573 | 7335 |
| hp5p15861_4015682_f1_1 | 2574 | 7336 |
| 02cp20821orf10 | 2575 | 7337 |
| 14ee41924_4165950_f2_25 | 2576 | 7338 |
| 02ep30607orf12 | 2577 | 7339 |
| 07ee30709_16681432_f2_2 | 2578 | 7340 |
| 07ae11020orf4 | 2579 | 7341 |
| 07ee50709_32613307_f1_2 | 2580 | 7342 |
| 07ae11020orf2 | 2581 | 7343 |
| 07ee30709_1000_f3_3 | 2582 | 7344 |
| 07ee50709_36031953_f3_76 | 2583 | 7345 |
| 32627125 | 2584 | 7346 |
| 09ce52017_35283337_c2_25 | 2585 | 7347 |
| hpy01ep30520orf_0006.aa | 2586 | 7348 |
| hpy01ep30520orf_0007.aa | 2587 | 7349 |
| 01ep30520orf20 | 2588 | 7350 |
| 09ce52017_32627125_c3_30 | 2589 | 7351 |
| 09ce52017_32627125_c2_25 | 2590 | 7352 |
| 11ge10309orf51 | 2591 | 7353 |
| 29ep10720_24495437_f3_22 | 2592 | 7354 |
| 29ep10720_34553192_f1_7 | 2593 | 7355 |
| 23440814 | 2594 | 7356 |
| hpy11ge10309orf_0031.aa | 2595 | 7357 |
| 29ep10720_4099093_c1_23 | 2596 | 7358 |
| 02ap21102_4099093_c2_30 | 2597 | 7359 |
| 05ap11505orf1 | 2598 | 7360 |
| 06cp30603_12375083_c2_57 | 2599 | 7361 |
| 05cp20518orf51 | 2600 | 7362 |
| 12ae10622_13863791_f3_16 | 2601 | 7363 |
| 05cp20518orf56 | 2602 | 7364 |
| 04gp11213orf23 | 2603 | 7365 |
| 04gp11213orf6 | 2604 | 7366 |
| hp6e20339_23556318_c2_47 | 2605 | 7367 |
| hp6e20339_24391525_c2_45 | 2606 | 7368 |
| 06cp30603_24391525_f3_70 | 2607 | 7369 |
| 04gp11213orf21 | 2608 | 7370 |
| 06cp30603_32663437_c1_48 | 2609 | 7371 |
| 11ge61517_24429687_c2_161 | 2610 | 7372 |
| 05cp20518orf65 | 2611 | 7373 |
| hp6e20339_2523462_c3_56 | 2612 | 7374 |
| 04gp11213orf4 | 2613 | 7375 |
| hp3e10302orf13 | 2614 | 7376 |
| 06cp30603_33250211_f3_65 | 2615 | 7377 |
| 11cp10410_33250211_f2_2 | 2616 | 7378 |
| hpy04gp11213orf_0023.aa | 2617 | 7379 |
| 04gp11213orf27 | 2618 | 7380 |
| 03gp11402orf1 | 2619 | 7381 |
| hpy03gp11402orf_0001.aa | 2620 | 7382 |
| hp6e20339_963963_f2_15 | 2621 | 7383 |
| 06cp30603_33989092_c1_78 | 2622 | 7384 |
| 23880087 | 2623 | 7385 |
| 06cp30603_34174212_c3_71 | 2624 | 7386 |
| 05cp20518orf63 | 2625 | 7387 |
| 06cp30603_3942318_c3_155 | 2626 | 7388 |
| 05cp20518orf55 | 2627 | 7389 |
| 06cp30603_3942318_c2_61 | 2628 | 7390 |
| 06cp30603_4881577_f2_17 | 2629 | 7391 |
| 06cp30603_4881577_f1_5 | 2630 | 7392 |
| 05cp20518orf19 | 2631 | 7393 |
| 04gp11213orf16 | 2632 | 7394 |
| 04gp11213orf26 | 2633 | 7395 |
| hp6e20339_10197827_c3_59 | 2634 | 7396 |
| hp6e20339_5272277_c2_49 | 2635 | 7397 |
| 04gp11213orf8 | 2636 | 7398 |
| 06cp30603_5272277_f1_22 | 2637 | 7399 |
| hp6e20339_16188561_c1_41 | 2638 | 7400 |
| 04gp11213orf24 | 2639 | 7401 |
| 06cp30603_5351512_f3_73 | 2640 | 7402 |
| hpyhp3e10302orf_0011.aa | 2641 | 7403 |
| hpyhp3e10302orf_0010.aa | 2642 | 7404 |
| hpyhp3e10302orf_0007.aa | 2643 | 7405 |
| hp3e10302orf41 | 2644 | 7406 |
| hp3e10302orf37 | 2645 | 7407 |
| 06cp30603_7164010_c2_108 | 2646 | 7408 |
| hp6e20339_7241093_c1_42 | 2647 | 7409 |
| 04gp11213orf25 | 2648 | 7410 |
| 06cp30603_9781882_f1_17 | 2649 | 7411 |
| hp3e10302orf7 | 2650 | 7412 |
| 04ge10816_4032626_f2_9 | 2651 | 7413 |
| hpy12ae10622orf_0005.aa | 2652 | 7414 |
| 12ae10622orf15 | 2653 | 7415 |
| 12ae10622_16129812_c2_60 | 2654 | 7416 |
| 04ep71403orf11 | 2655 | 7417 |
| 04ep71403orf14 | 2656 | 7418 |
| 12ae10622_24305312_f1_8 | 2657 | 7419 |
| 12ge10321_26597180_f1_4 | 2658 | 7420 |
| 02ep20220orf9 | 2659 | 7421 |
| 06gp11920orf9 | 2660 | 7422 |
| 12ge10321_34094067_f2_12 | 2661 | 7423 |
| 12ae10622_34094067_f1_15 | 2662 | 7424 |
| 03ae10804_33782135_c3_44 | 2663 | 7425 |
| 06ep10306orf2 | 2664 | 7426 |
| 05cp10102orf3 | 2665 | 7427 |
| 12ge12015orf2 | 2666 | 7428 |
| hpy12ge12015orf_0001.aa | 2667 | 7429 |
| hp3e11188_12620840_f3_14 | 2668 | 7430 |
| 06ep11108orf19 | 2669 | 7431 |
| hp4e13394_4328343_f3_59 | 2670 | 7432 |
| hp5e13045_1464455_c1_8 | 2671 | 7433 |
| hp4e53394_1464455_c1_85 | 2672 | 7434 |
| 02ae11611orf3 | 2673 | 7435 |
| hp3e10975orf10 | 2674 | 7436 |
| hp3e10975orf5 | 2675 | 7437 |
| hp3e10975orf12 | 2676 | 7438 |
| hp4e53394_22005186_c1_82 | 2677 | 7439 |
| hp4e53394_22005186_c1_81 | 2678 | 7440 |
| hpyhp3e11182orf_0001.aa | 2679 | 7441 |
| 11cp10916orf1 | 2680 | 7442 |
| hpy11cp10916orf_0001.aa | 2681 | 7443 |
| hp4e53394_5864393_f2_39 | 2682 | 7444 |
| hp4p13376_38937_f3_3 | 2683 | 7445 |
| 05ce10208_1042133_c1_14 | 2684 | 7446 |
| hp1p13939orf11 | 2685 | 7447 |
| 14ae11614orf7 | 2686 | 7448 |
| 05ae11506orf1 | 2687 | 7449 |
| hpy05ae11506orf_0001.aa | 2688 | 7450 |
| 12gp11822orf3 | 2689 | 7451 |
| 12gp11822_25398512_c2_13 | 2690 | 7452 |
| hp1p13939_25398512_c1_26 | 2691 | 7453 |
| 14ae11614orf5 | 2692 | 7454 |
| hpy14ae11614orf_0005.aa | 2693 | 7455 |
| 14ae11614orf4 | 2694 | 7456 |
| 09cp71809orf3 | 2695 | 7457 |
| 12gp11822_4095312_c1_10 | 2696 | 7458 |
| hp3e11024orf4 | 2697 | 7459 |
| hp3e11024orf3 | 2698 | 7460 |
| 06ep30223_12538542_f2_58 | 2699 | 7461 |
| hp1e10506orf1 | 2700 | 7462 |
| 05cp21223_35710908_f2_11 | 2701 | 7463 |
| 07gp10713orf4 | 2702 | 7464 |
| hpy07gp10713orf_0001.aa | 2703 | 7465 |
| 06ep30223_1445250_f2_45 | 2704 | 7466 |
| 06ep30223_16512_c3_160 | 2705 | 7467 |
| hp3e10128orf1 | 2706 | 7468 |
| 02ae11612_26212767_c1_65 | 2707 | 7469 |
| 02ae11612orf40 | 2708 | 7470 |
| 16ep10117orf10 | 2709 | 7471 |
| 01ce11104_4689143_c2_13 | 2710 | 7472 |
| hp5e25328_4689143_f3_47 | 2711 | 7473 |
| hp5p15575orf10 | 2712 | 7474 |
| hp5p15575orf6 | 2713 | 7475 |
| hp5p15575_20037506_f3_19 | 2714 | 7476 |
| 04ee30405_6837792_f2_4 | 2715 | 7477 |
| hp5e15084orf12 | 2716 | 7478 |
| 01gp10401orf6 | 2717 | 7479 |
| hp6p10590_26181287_c1_27 | 2718 | 7480 |
| hp6p10590_338_c2_34 | 2719 | 7481 |
| 01gp10401orf3 | 2720 | 7482 |
| hp6p12244_23726552_f2_32 | 2721 | 7483 |
| hpy14cp10923orf_0001.aa | 2722 | 7484 |
| 13ee12016orf16 | 2723 | 7485 |
| hpy13ee12016orf_0001.aa | 2724 | 7486 |
| 13ee12016orf17 | 2725 | 7487 |
| 13ee12016orf9 | 2726 | 7488 |
| hp6p22217_24507800_f3_10 | 2727 | 7489 |
| hpy02ge10814orf_0001.aa | 2728 | 7490 |
| 11ae12004_24422692_f1_1 | 2729 | 7491 |
| 06ce20610orf9 | 2730 | 7492 |
| 11ae12004_14087833_f3_21 | 2731 | 7493 |
| 11ae12004orf1 | 2732 | 7494 |
| hpy11ae12004orf_0001.aa | 2733 | 7495 |
| 06ge10717orf3 | 2734 | 7496 |
| 06ce20610orf7 | 2735 | 7497 |
| 11ae12004_26384838_f2_6 | 2736 | 7498 |
| 06ce20610_26369057_c3_39 | 2737 | 7499 |
| hp7e10228_26369057_f1_5 | 2738 | 7500 |
| 13ae10712_3987531_f2_8 | 2739 | 7501 |
| 13ae10712orf6 | 2740 | 7502 |
| 07ge20415orf7 | 2741 | 7503 |
| 07ge20415orf16 | 2742 | 7504 |
| hp7e10429_4960880_f2_16 | 2743 | 7505 |
| hpy14ep11905orf_0006.aa | 2744 | 7506 |
| 14ep11905orf10 | 2745 | 7507 |
| hpy14ep11905orf_0008.aa | 2746 | 7508 |
| hpy14ep11905orf_0005.aa | 2747 | 7509 |
| 14ep11905orf7 | 2748 | 7510 |
| 14ce61516_1250_f1_7 | 2749 | 7511 |
| 14ce61516_1250_f1_7 | 2750 | 7512 |
| 14ep11905orf9 | 2751 | 7513 |
| hpy14ep11905orf_0001.aa | 2752 | 7514 |
| 14ep11905orf13 | 2753 | 7515 |
| 14ce61516_13073577_f2_12 | 2754 | 7516 |
| hp7e10590_13073577_c3_107 | 2755 | 7517 |
| 14ce61516_25402267_f1_8 | 2756 | 7518 |
| 14ce61516_12600937_f2_11 | 2757 | 7519 |
| 14ep11905orf8 | 2758 | 7520 |
| hpy14ep11905orf_0003.aa | 2759 | 7521 |
| 14cp11908_25402267_c3_104 | 2760 | 7522 |
| 04ap20904orf3 | 2761 | 7523 |
| 14ce21516orf1 | 2762 | 7524 |
| 14ce21516_85786_f1_1 | 2763 | 7525 |
| 07gp31516orf8 | 2764 | 7526 |
| 07gp31516orf1 | 2765 | 7527 |
| 09cp21607_33282767_c3_15 | 2766 | 7528 |
| 07gp31516orf2 | 2767 | 7529 |
| 07gp31516orf10 | 2768 | 7530 |
| 09cp21607_42950_c2_13 | 2769 | 7531 |
| hp7e30434_42950_f1_9 | 2770 | 7532 |
| hp7e10192_992337_f1_3 | 2771 | 7533 |
| 02ce10114orf2 | 2772 | 7534 |
| hpy02cp12005orf_0001.aa | 2773 | 7535 |
| hpy02cp12005orf_0002.aa | 2774 | 7536 |
| 05ae10702orf2 | 2775 | 7537 |
| 05ae10702orf1 | 2776 | 7538 |
| 05ge11017orf6 | 2777 | 7539 |
| 05ae10702orf4 | 2778 | 7540 |
| 05ge11017orf7 | 2779 | 7541 |
| 02cp12005orf4 | 2780 | 7542 |
| hpy02cp12005orf_0003.aa | 2781 | 7543 |
| 05ge11017orf5 | 2782 | 7544 |
| 06ae10902_13087518_f2_5 | 2783 | 7545 |
| hp2e11835orf2 | 2784 | 7546 |
| hp2p11834orf1 | 2785 | 7547 |
| 06ae10902_24306512_f2_3 | 2786 | 7548 |
| hp2p11834orf2 | 2787 | 7549 |
| 06ae10902_25394513_f1_1 | 2788 | 7550 |
| hp7p10325_24306512_f1_1 | 2789 | 7551 |
| 02ce41018_4960818_c3_41 | 2790 | 7552 |
| hp3p10349orf10 | 2791 | 7553 |
| 06ap20306_14455043_f3_8 | 2792 | 7554 |
| 04gp11803orf15 | 2793 | 7555 |
| 10677187 | 2794 | 7556 |
| 06ap11418_204202_f1_3 | 2795 | 7557 |
| hp5e15440orf18 | 2796 | 7558 |
| hpy03ae11503orf_0003.aa | 2797 | 7559 |
| 03ae11503orf6 | 2798 | 7560 |
| hpy03ae11503orf_0001.aa | 2799 | 7561 |
| 03ae11503orf11 | 2800 | 7562 |
| 03ae11503orf8 | 2801 | 7563 |
| 03ae11503_21602187_c1_16 | 2802 | 7564 |
| 07ap20216_33312808_f2_6 | 2803 | 7565 |
| 05ap21216orf1 | 2804 | 7566 |
| hp3p10343orf2 | 2805 | 7567 |
| hpyhp3p10343orf_0001.aa | 2806 | 7568 |
| 11ap20714_33376087_f2_25 | 2807 | 7569 |
| 12520952 | 9605 | 9717 |
| 487750 | 9606 | 9718 |
| 85786 | 9607 | 9719 |
| 36523442 | 9608 | 9720 |
| B.9 Proteins involved in secretion and | | |
| adhesion | | |
| hp6e12267_14642202_c2_47 | 2808 | 7570 |
| 12ge10305orf15 | 2809 | 7571 |
| 14642202 | 2810 | 7572 |
| 30662792 | 2811 | 7573 |
| 14cp10119orf16 | 2812 | 7574 |
| 34427317 | 2813 | 7575 |
| 14cp10119orf15 | 2814 | 7576 |
| 14cp10119orf12 | 2815 | 7577 |
| 04cp11202_13781712_f2_27 | 2816 | 7578 |
| 02cp11404orf1 | 2817 | 7579 |
| 6517192 | 2818 | 7580 |
| 02cp11404orf9 | 2819 | 7581 |
| 07ge11521_21494062_c1_27 | 2820 | 7582 |
| 03ae11503orf9 | 2821 | 7583 |
| hp3e10057orf5 | 2822 | 7584 |
| hpyhp3e10057orf_0004.aa | 2823 | 7585 |
| 03ae11503_24881306_c2_18 | 2824 | 7586 |
| B.10 Cytoplasmic proteins involved in outer | | |
| membrane & cell wall biogenesis | | |
| hpy11gp10904orf_0002.aa | 2825 | 7587 |
| 14713512 | 2826 | 7588 |
| 11gp10904orf29 | 2827 | 7589 |
| 11gp20904_14713512_c1_27 | 2828 | 7590 |
| hp5e15211_11884425_c2_27 | 2829 | 7591 |
| hp5e15211orf32 | 2830 | 7592 |
| 4578469 | 2831 | 7593 |
| hp5e15211_4578467_c2_23 | 2832 | 7594 |
| hp5e15211orf22 | 2833 | 7595 |
| 04ee11108_23486342_c2_20 | 2834 | 7596 |
| 23486342 | 2835 | 7597 |
| 27ze10351orf22 | 2836 | 7598 |
| hpy02ap21113orf_0003.aa | 2837 | 7599 |
| hpy11ep12011orf_0003.aa | 2838 | 7600 |
| 02ap21113orf1 | 2839 | 7601 |
| hpy11ep12011orf_0004.aa | 2840 | 7602 |
| 06gp71906_1257700_c1_124 | 2841 | 7603 |
| 04ep41903_14729692_f3_15 | 2842 | 7604 |
| 29ap10306orf2 | 2843 | 7605 |
| 11253 | 2844 | 7606 |
| 09ce52017_25890837_c2_24 | 2845 | 7607 |
| 01ep30520orf27 | 2846 | 7608 |
| 09cp10224orf6 | 2847 | 7609 |
| 09cp10224orf3 | 2848 | 7610 |
| 09cp10224orf7 | 2849 | 7611 |
| 09cp10224_34180312_c3_64 | 2850 | 7612 |
| 06cp10117orf1 | 2851 | 7613 |
| hpy06cp10117orf_0001.aa | 2852 | 7614 |
| 09cp10224_4578292_c3_62 | 2853 | 7615 |
| 12ae10622_5192075_f2_17 | 2854 | 7616 |
| 12ae10622orf8 | 2855 | 7617 |
| hpy12ae10622orf_0001.aa | 2856 | 7618 |
| 05gp10919_11148454_c2_2 | 2857 | 7619 |
| 05gp10919orf1 | 2858 | 7620 |
| hpy05gp10919orf_0001.aa | 2859 | 7621 |
| hp1e80523_1208413_f1_3 | 2860 | 7622 |
| 02ae11612orf43 | 2861 | 7623 |
| 02ae11612_12695250_c3_99 | 2862 | 7624 |
| 05cp11911orf33 | 2863 | 7625 |
| 02ae11612_24257818_c2_72 | 2864 | 7626 |
| 06ep11917_4563939_c1_19 | 2865 | 7627 |
| hp5e25328_5084843_f1_20 | 2866 | 7628 |
| 429192 | 2867 | 7629 |
| hp6p10509_24304675_c1_13 | 2868 | 7630 |
| 16ae10508orf21 | 2869 | 7631 |
| hpy13ee12016orf_0004.aa | 2870 | 7632 |
| 30082267 | 2871 | 7633 |
| 13ee12016orf10 | 2872 | 7634 |
| hp6p22217_33398377_f3_11 | 2873 | 7635 |
| hp7e10590_14162751_c1_77 | 2874 | 7636 |
| 23535937 | 2875 | 7637 |
| 06cp11722orf15 | 2876 | 7638 |
| 11ae80818_3322192_f3_37 | 2877 | 7639 |
| 24441412 | 9609 | 9721 |
| 34265691 | 9610 | 9722 |
| B.11 Cytoplasmic proteins involved in | | |
| protein folding and stabilization | | |
| hpy05ap11821orf_0001.aa | 2878 | 7640 |
| 11ae11815orf1 | 2879 | 7641 |
| hpy11ae11815orf_0001.aa | 2880 | 7642 |
| 05ap11821orf4 | 2881 | 7643 |
| hpy05ap11821orf_0002.aa | 2882 | 7644 |
| 09cp61003_4879443_c1_60 | 2883 | 7645 |
| hp5e12982orf16 | 2884 | 7646 |
| hp5e12982orf13 | 2885 | 7647 |
| hpyhp5e12982orf_0001.aa | 2886 | 7648 |
| hp5e12982_32455418_c1_15 | 2887 | 7649 |
| hp6p21623_32455418_f2_11 | 2888 | 7650 |
| 05gp11602orf1 | 2889 | 7651 |
| 06ap30322orf10 | 2890 | 7652 |
| hpy06ap30322orf_0004.aa | 2891 | 7653 |
| 06ap30322_24509666_c2_9 | 2892 | 7654 |
| 06ap30322_4727318_c3_32 | 2893 | 7655 |
| hp1p13947orf8 | 2894 | 7656 |
| 29gp10716orf1 | 2895 | 7657 |
| hp1p13947orf1 | 2896 | 7658 |
| hpyhp1p13947orf_0001.aa | 2897 | 7659 |
| 02ae31010_24408387_f3_35 | 2898 | 7660 |
| hp6p10904_260887_c1_19 | 2899 | 7661 |
| hp4p13446orf2 | 2900 | 7662 |
| hp4p13446orf8 | 2901 | 7663 |
| 14ep10823orf4 | 2902 | 7664 |
| hpy14ep10823orf_0001.aa | 2903 | 7665 |
| hp6p10904_260887_c2_20 | 2904 | 7666 |
| 09cp10224_24220313_c1_44 | 2905 | 7667 |
| hpy09cp10224orf_0002.aa | 2906 | 7668 |
| 09cp10224_3932187_c1_45 | 2907 | 7669 |
| hp3e11024orf20 | 2908 | 7670 |
| hp3e11024orf25 | 2909 | 7671 |
| 06ep30223_31449217_f3_97 | 2910 | 7672 |
| 13ae10712_4031500_f3_15 | 2911 | 7673 |
| 13ae10712orf8 | 2912 | 7674 |
| 11ae80818_4500342_f2_17 | 2913 | 7675 |
| 06cp11722orf17 | 2914 | 7676 |
| 09cp21607_34647812_c1_8 | 2915 | 7677 |
| 07gp31516orf5 | 2916 | 7678 |
| 05ce10910_23712780_c1_4 | 2917 | 7679 |
| hp7e10192_23712780_f2_5 | 2918 | 7680 |
| 12343763 | 9611 | 9723 |
| 6845425 | 9612 | 9724 |
| B.12 Other cytoplasmic proteins | | |
| hp7p10290_1378917_f3_13 | 2919 | 7681 |
| hp3p10156orf5 | 2920 | 7682 |
| hp6e12267_2038152_c1_40 | 2921 | 7683 |
| 12ge20305orf1 | 2922 | 7684 |
| 09cp61003_23861502_f2_38 | 2923 | 7685 |
| 11ee10423orf3 | 2924 | 7686 |
| hpy11ee10423orf_0001.aa | 2925 | 7687 |
| hp4p12360orf2 | 2926 | 7688 |
| 09cp61003_25546943_c3_110 | 2927 | 7689 |
| hpy01ce11016orf_0004.aa | 2928 | 7690 |
| hpy01ce11016orf_0005.aa | 2929 | 7691 |
| hp6p80503_32462717_f1_5 | 2930 | 7692 |
| 11cp12002orf3 | 2931 | 7693 |
| 11cp12002orf2 | 2932 | 7694 |
| hp7p10290_35156558_f3_15 | 2933 | 7695 |
| hp6p80503_35742151_f3_15 | 2934 | 7696 |
| 11cp11224orf1 | 2935 | 7697 |
| hp6e12267_4095342_f1_4 | 2936 | 7698 |
| 12ge20305orf21 | 2937 | 7699 |
| hp3p10156orf7 | 2938 | 7700 |
| hp7p10290_4351718_f1_6 | 2939 | 7701 |
| 03gp10711orf2 | 2940 | 7702 |
| hpy03gp10711orf_0001.aa | 2941 | 7703 |
| 09cp61003_4414068_c2_95 | 2942 | 7704 |
| hp7p10290_4531713_f2_10 | 2943 | 7705 |
| hp3p10156orf1 | 2944 | 7706 |
| hp6e12267_4570263_f2_24 | 2945 | 7707 |
| 12ge10305orf12 | 2946 | 7708 |
| 01ge11619_1962500_c2_10 | 2947 | 7709 |
| 14ap11617_32031525_c1_9 | 2948 | 7710 |
| 01cp10108_1962500_c3_8 | 2949 | 7711 |
| hpy05ap11505orf_0003.aa | 2950 | 7712 |
| 11ge10309orf3 | 2951 | 7713 |
| hp6p21623_22843812_c2_52 | 2952 | 7714 |
| hpy09ap20802orf_0020.aa | 2953 | 7715 |
| hp6p21623_24476562_f3_25 | 2954 | 7716 |
| hp5e12982_26362717_f1_1 | 2955 | 7717 |
| hp5e12982orf4 | 2956 | 7718 |
| hp6p21623_33475205_f3_23 | 2957 | 7719 |
| hpyhp5e12982orf_0003.aa | 2958 | 7720 |
| hp6p21623_34172075_c2_54 | 2959 | 7721 |
| hpy09ap20802orf_0015.aa | 2960 | 7722 |
| hp6p21623_34833_c1_40 | 2961 | 7723 |
| hpy09ap20802orf_0011.aa | 2962 | 7724 |
| hp6p21623_35162518_f2_10 | 2963 | 7725 |
| hpyhp5e12982orf_0004.aa | 2964 | 7726 |
| 01ae10202_4710925_f1_2 | 2965 | 7727 |
| 11ge10309orf30 | 2966 | 7728 |
| 04ap12016_4725311_c1_5 | 2967 | 7729 |
| 29ep10720_4725311_f3_21 | 2968 | 7730 |
| 02ap21102_4725311_f2_15 | 2969 | 7731 |
| 11ge10309orf21 | 2970 | 7732 |
| 02gp20706_3336468_c3_61 | 2971 | 7733 |
| 02ge10116_3336468_c2_109 | 2972 | 7734 |
| 06ge10115orf9 | 2973 | 7735 |
| 02ge10116_10756328_c1_93 | 2974 | 7736 |
| hp6p12311_24240708_c1_7 | 2975 | 7737 |
| 05ep20322orf9 | 2976 | 7738 |
| 02ge10116_12307812_f3_71 | 2977 | 7739 |
| 02ge10116_12505125_c3_31 | 2978 | 7740 |
| 12505125 | 2979 | 7741 |
| 02ge20116orf20 | 2980 | 7742 |
| 02ge10116_1376592_f2_50 | 2981 | 7743 |
| 05ep20322orf7 | 2982 | 7744 |
| 02ge10116_14182328_f2_29 | 2983 | 7745 |
| 02ge20116orf2 | 2984 | 7746 |
| 02gp20706_14507827_c3_65 | 2985 | 7747 |
| 01cp11710orf38 | 2986 | 7748 |
| 02ge10116_14649212_c1_20 | 2987 | 7749 |
| 02ge20116orf26 | 2988 | 7750 |
| hpy11ae10305orf_0002.aa | 2989 | 7751 |
| 02ge10116_19667752_f3_68 | 2990 | 7752 |
| hpy05ee20322orf_0004.aa | 2991 | 7753 |
| hpy05ee20322orf_0002.aa | 2992 | 7754 |
| 02ge10116_22854818_f2_47 | 2993 | 7755 |
| 02ge10116_23650308_f1_24 | 2994 | 7756 |
| hpyhp5e15276orf_0003.aa | 2995 | 7757 |
| 24070250 | 2996 | 7758 |
| 02gp20706_24070250_c1_42 | 2997 | 7759 |
| 02ge10116_24070250_c3_150 | 2998 | 7760 |
| 06ge10115orf15 | 2999 | 7761 |
| 02ge10116_26431543_f2_8 | 3000 | 7762 |
| 02ge20116orf1 | 3001 | 7763 |
| 02ge10116_31798312_c1_94 | 3002 | 7764 |
| hpy02ge20116orf_0011.aa | 3003 | 7765 |
| hp5e15276orf15 | 3004 | 7766 |
| 02ge10116_33313816_f3_67 | 3005 | 7767 |
| 02ge10116_36230312_c2_114 | 3006 | 7768 |
| hpy01cp11710orf_0013.aa | 3007 | 7769 |
| 02ge20116orf7 | 3008 | 7770 |
| 02ge20116orf13 | 3009 | 7771 |
| 02ge10116_36369175_f1_1 | 3010 | 7772 |
| hpy05ep20322orf_0011.aa | 3011 | 7773 |
| 05ep20322orf12 | 3012 | 7774 |
| 05ep20322orf13 | 3013 | 7775 |
| hp6p12311_4689000_f2_3 | 3014 | 7776 |
| 02ge10116_4689000_c3_130 | 3015 | 7777 |
| 02gp20706_4767967_f3_21 | 3016 | 7778 |
| 01cp11710orf3 | 3017 | 7779 |
| 02ge10116_797180_c2_118 | 3018 | 7780 |
| hpy01cp11710orf_0011.aa | 3019 | 7781 |
| 02ge10116_977183_f3_52 | 3020 | 7782 |
| hpy02ge20116orf_0005.aa | 3021 | 7783 |
| 02ge10116_9899142_f3_14 | 3022 | 7784 |
| 02ge20116orf8 | 3023 | 7785 |
| 02gp20706_12303811_c3_59 | 3024 | 7786 |
| 02gp20706_992200_c1_38 | 3025 | 7787 |
| 06ge10115orf11 | 3026 | 7788 |
| 06ge10115orf7 | 3027 | 7789 |
| 02ge10116_992200_c2_107 | 3028 | 7790 |
| hp6p12311_9928957_c2_10 | 3029 | 7791 |
| 02ge10116_9928957_f1_26 | 3030 | 7792 |
| 05ep20322orf1 | 3031 | 7793 |
| 02ge11810orf1 | 3032 | 7794 |
| hpy02ge11810orf_0001.aa | 3033 | 7795 |
| 02ge11810_1457812_f1_1 | 3034 | 7796 |
| 04ap10921orf4 | 3035 | 7797 |
| 04ap10921orf6 | 3036 | 7798 |
| 04ap10921orf1 | 3037 | 7799 |
| 02ge11810_4532768_f1_2 | 3038 | 7800 |
| 02ge41622_212825_f1_2 | 3039 | 7801 |
| hpy13ee10216orf_0005.aa | 3040 | 7802 |
| 13ee10216orf20 | 3041 | 7803 |
| 13ee10216orf40 | 3042 | 7804 |
| 02ge11622_23469167_f2_17 | 3043 | 7805 |
| 02ge11622_24401536_f1_3 | 3044 | 7806 |
| 13ee10216orf3 | 3045 | 7807 |
| 03ce10801orf2 | 3046 | 7808 |
| hpy06ee10709orf_0009.aa | 3047 | 7809 |
| 02ep30607orf4 | 3048 | 7810 |
| hpy05ap10120orf_0004.aa | 3049 | 7811 |
| 06ee30709_23573392_c3_32 | 3050 | 7812 |
| 02ge41622_2926257_c3_96 | 3051 | 7813 |
| 13ee10216orf36 | 3052 | 7814 |
| 13ee10216orf35 | 3053 | 7815 |
| 02ge11622_4296877_f3_32 | 3054 | 7816 |
| 02ge11622_5884392_f2_14 | 3055 | 7817 |
| 13ee10216orf16 | 3056 | 7818 |
| 05ae30220_29458178_f3_47 | 3057 | 7819 |
| 29458178 | 3058 | 7820 |
| 05ae20220orf51 | 3059 | 7821 |
| 05ae30220_36132687_f1_4 | 3060 | 7822 |
| 05ae20220orf4 | 3061 | 7823 |
| 04ap20412_5250252_c3_1 | 3062 | 7824 |
| hp1p10543orf6 | 3063 | 7825 |
| 07ge11504orf5 | 3064 | 7826 |
| 07ge11504orf1 | 3065 | 7827 |
| hpy07ge11504orf_0001.aa | 3066 | 7828 |
| 05ep10815_10972587_c1_85 | 3067 | 7829 |
| 05ep10815_14273452_c3_105 | 3068 | 7830 |
| 01xe21717orf3 | 3069 | 7831 |
| 05ep10815_14646876_f3_63 | 3070 | 7832 |
| hpy01xe21717orf_0019.aa | 3071 | 7833 |
| 11gp20904_22447333_f1_8 | 3072 | 7834 |
| 03ce11207_15041083_f1_44 | 3073 | 7835 |
| 11gp10904orf5 | 3074 | 7836 |
| 01cp20708_15625202_c3_60 | 3075 | 7837 |
| hpy14ee10419orf_0008.aa | 3076 | 7838 |
| 11gp20904_23442160_f2_11 | 3077 | 7839 |
| 11gp10904orf11 | 3078 | 7840 |
| hpy06ae11405orf_0001.aa | 3079 | 7841 |
| hpy06ae11405orf_0003.aa | 3080 | 7842 |
| 01xe21717orf15 | 3081 | 7843 |
| hpy01xe21717orf_0001.aa | 3082 | 7844 |
| hpy06ae11405orf_0002.aa | 3083 | 7845 |
| 05ep10815_23845162_c1_75 | 3084 | 7846 |
| 06ep10822orf5 | 3085 | 7847 |
| hp4e14522orf2 | 3086 | 7848 |
| 01ae11010_23854175_f2_15 | 3087 | 7849 |
| 01ae11010_23854175_f1_4 | 3088 | 7850 |
| 01ae11010_23854175_f2_16 | 3089 | 7851 |
| 02ep10409_23992002_f2_4 | 3090 | 7852 |
| 01ae11010_23992002_f3_30 | 3091 | 7853 |
| 07cp10312orf1 | 3092 | 7854 |
| hpy09ge10522orf_0001.aa | 3093 | 7855 |
| 09ge10522orf1 | 3094 | 7856 |
| 05ep10815_24042550_f3_60 | 3095 | 7857 |
| 13ap10114orf1 | 3096 | 7858 |
| 01cp20708_24235943_f1_9 | 3097 | 7859 |
| 05ep10815_24406532_f3_64 | 3098 | 7860 |
| hpy01xe21717orf_0018.aa | 3099 | 7861 |
| 11ap21101_23441308_f2_2 | 3100 | 7862 |
| 01ae11010_26179686_f2_11 | 3101 | 7863 |
| hpy07cp10312orf_0004.aa | 3102 | 7864 |
| 01ce10320_26353437_f3_9 | 3103 | 7865 |
| 01ce10320orf5 | 3104 | 7866 |
| 05ep10815_26460805_c1_76 | 3105 | 7867 |
| 01xe21717orf10 | 3106 | 7868 |
| 29844512 | 3107 | 7869 |
| 11gp20904_30705212_f2_12 | 3108 | 7870 |
| 11gp10904orf12 | 3109 | 7871 |
| 03ae10522orf1 | 3110 | 7872 |
| hpy03ae10522orf_0001.aa | 3111 | 7873 |
| 05ep10815_32140957_c3_108 | 3112 | 7874 |
| 03ce11207_32140957_c2_233 | 3113 | 7875 |
| hpy01xe21717orf_0014.aa | 3114 | 7876 |
| 01xe21717orf43 | 3115 | 7877 |
| 05ep10815_33237561_f3_66 | 3116 | 7878 |
| hpy01xe21717orf_0002.aa | 3117 | 7879 |
| 01xe21717orf16 | 3118 | 7880 |
| 05ep10815_34270136_c3_102 | 3119 | 7881 |
| 156587 | 3120 | 7882 |
| 05ep10815_34649002_c2_93 | 3121 | 7883 |
| 01xe21717orf9 | 3122 | 7884 |
| 01ae11010_35945827_c1_41 | 3123 | 7885 |
| hpyhp4e14522orf_0007.aa | 3124 | 7886 |
| hp3e11170orf3 | 3125 | 7887 |
| hp3e11170orf2 | 3126 | 7888 |
| hp3e11170orf1 | 3127 | 7889 |
| hpyhp3e11170orf_0001.aa | 3128 | 7890 |
| 03ce11207orf1 | 3129 | 7891 |
| 01cp20708_35995718_c3_55 | 3130 | 7892 |
| hp3e11168orf28 | 3131 | 7893 |
| 04gp11701_36114702_c1_24 | 3132 | 7894 |
| 05ep10815_3949067_c2_91 | 3133 | 7895 |
| 06ae11405orf7 | 3134 | 7896 |
| hpyhp3p10960orf_0001.aa | 3135 | 7897 |
| 14ae21813orf1 | 3136 | 7898 |
| hpy14ae21813orf_0001.aa | 3137 | 7899 |
| 05ep10815_397937_c3_107 | 3138 | 7900 |
| 01ae11010_42813_f2_10 | 3139 | 7901 |
| 02ep10409_42813_f1_1 | 3140 | 7902 |
| hpy07cp10312orf_0003.aa | 3141 | 7903 |
| 01ae11010_5103403_c1_42 | 3142 | 7904 |
| 01ae11010_5103403_c3_34 | 3143 | 7905 |
| hp4e14522orf13 | 3144 | 7906 |
| 01cp20708_5289051_f3_29 | 3145 | 7907 |
| 14ee10419orf2 | 3146 | 7908 |
| hpy06ae11405orf_0007.aa | 3147 | 7909 |
| 06ae11405orf9 | 3148 | 7910 |
| 05ep10815_24414587_c1_74 | 3149 | 7911 |
| 03ce11207_5314018_c3_268 | 3150 | 7912 |
| 01ae11010_5314202_f1_1 | 3151 | 7913 |
| 07cp10312orf6 | 3152 | 7914 |
| 01ae11010_26620878_c2_48 | 3153 | 7915 |
| 29ee12019orf2 | 3154 | 7916 |
| hpy29ee12019orf_0001.aa | 3155 | 7917 |
| 03ce11207_6525337_f2_101 | 3156 | 7918 |
| 03cp11207orf1 | 3157 | 7919 |
| 01cp20708_7070967_c2_48 | 3158 | 7920 |
| 06ep11502orf1 | 3159 | 7921 |
| hpy06ep11502orf_0001.aa | 3160 | 7922 |
| hp5e15211_4494659_c2_26 | 3161 | 7923 |
| 03gp11902_23473457_f3_12 | 3162 | 7924 |
| hp5e15211_35163962_f1_3 | 3163 | 7925 |
| 35163962 | 3164 | 7926 |
| hp5e15211_35163962_f1_3 | 3165 | 7927 |
| hp5e15211orf13 | 3166 | 7928 |
| hp5e15211_994043_c1_24 | 3167 | 7929 |
| hpyhp5e15211orf_0003.aa | 3168 | 7930 |
| 01ae11612_16680312_f2_7 | 3169 | 7931 |
| 07ep11110orf4 | 3170 | 7932 |
| 01ae11612_22948342_f3_9 | 3171 | 7933 |
| 07ep11110orf1 | 3172 | 7934 |
| 01ae11612_30601577_f1_3 | 3173 | 7935 |
| 07ep11110orf3 | 3174 | 7936 |
| 29ep10720_23442127_f1_2 | 3175 | 7937 |
| 06ap10920_33339057_f1_1 | 3176 | 7938 |
| 11ge10309orf31 | 3177 | 7939 |
| 07ep11110orf5 | 3178 | 7940 |
| 01ae11612_4001563_f2_8 | 3179 | 7941 |
| hp5e15717_21569141_c1_1 | 3180 | 7942 |
| hpy06gp10108orf_0002.aa | 3181 | 7943 |
| 02ce10809orf3 | 3182 | 7944 |
| 02ce10809orf7 | 3183 | 7945 |
| 14ce31519_236087_f1_5 | 3184 | 7946 |
| hp5e15717_24319005_c2_2 | 3185 | 7947 |
| hpy06gp10108orf_0001.aa | 3186 | 7948 |
| 04ep41903_24319005_c2_57 | 3187 | 7949 |
| 02cp10815orf3 | 3188 | 7950 |
| hpy02cp10815orf_0002.aa | 3189 | 7951 |
| 11cp11617orf1 | 3190 | 7952 |
| 04ep41903_24423963_f1_3 | 3191 | 7953 |
| 05ae30220_127_c3_177 | 3192 | 7954 |
| hpy05ae20220orf_0026.aa | 3193 | 7955 |
| 05ae30220_1360633_c3_100 | 3194 | 7956 |
| 05ae20220orf97 | 3195 | 7957 |
| hpy05ap10120orf_0002.aa | 3196 | 7958 |
| 03ce10801orf3 | 3197 | 7959 |
| hpy05ap10120orf_0003.aa | 3198 | 7960 |
| 05ae30220_16519662_c2_128 | 3199 | 7961 |
| 05ae30220_16519662_c3_204 | 3200 | 7962 |
| 05ae30220_16523587_f3_69 | 3201 | 7963 |
| hpy05ae20220orf_0019.aa | 3202 | 7964 |
| 05ae30220_16687512_c1_66 | 3203 | 7965 |
| 05ae20220orf118 | 3204 | 7966 |
| 05ae30220_22546878_c3_171 | 3205 | 7967 |
| 05ae30220_23438156_c2_137 | 3206 | 7968 |
| 05ae30220_23636252_f2_30 | 3207 | 7969 |
| 05ae20220orf9 | 3208 | 7970 |
| 05ae30220_23945442_f3_48 | 3209 | 7971 |
| 05ae20220orf27 | 3210 | 7972 |
| 05ae30220_24297042_f3_94 | 3211 | 7973 |
| 27ze10351orf2 | 3212 | 7974 |
| 05ae30220_24812811_c1_67 | 3213 | 7975 |
| 05ae20220orf75 | 3214 | 7976 |
| 05ae30220_25400312_c2_84 | 3215 | 7977 |
| 05ae20220orf73 | 3216 | 7978 |
| 11ee11408_25431467_c2_44 | 3217 | 7979 |
| hp5p15496orf4 | 3218 | 7980 |
| 05ae30220_25587788_f2_29 | 3219 | 7981 |
| 05ae20220orf8 | 3220 | 7982 |
| 05ae30220_25656312_c3_102 | 3221 | 7983 |
| 05ae20220orf99 | 3222 | 7984 |
| 05ae30220_3240902_f1_11 | 3223 | 7985 |
| 05ae20220orf13 | 3224 | 7986 |
| 05ae30220_34022813_c3_185 | 3225 | 7987 |
| 05ae30220_24492040_f1_2 | 3226 | 7988 |
| 05ae20220orf2 | 3227 | 7989 |
| 05ae30220_36618786_f1_2 | 3228 | 7990 |
| hpy05ae20220orf_0003.aa | 3229 | 7991 |
| 05ae30220_34198517_f2_48 | 3230 | 7992 |
| 07ap80601_4304687_f2_7 | 3231 | 7993 |
| 07ap80601orf6 | 3232 | 7994 |
| 07ap80601orf13 | 3233 | 7995 |
| 07ap80601_36023958_f3_11 | 3234 | 7996 |
| 05ae30220_4304687_c1_109 | 3235 | 7997 |
| 04ee11108_4695468_f3_12 | 3236 | 7998 |
| 27ze10351orf12 | 3237 | 7999 |
| hp5p15496orf6 | 3238 | 8000 |
| 11ee11408_4881693_c3_53 | 3239 | 8001 |
| 05ae30220_5283127_f1_10 | 3240 | 8002 |
| 05ae20220orf12 | 3241 | 8003 |
| 05ae30220_7265638_f2_35 | 3242 | 8004 |
| 05ae20220orf38 | 3243 | 8005 |
| 05ae30220_15719657_f1_1 | 3244 | 8006 |
| 05ae30220_9881408_f1_1 | 3245 | 8007 |
| 05ae20220orf1 | 3246 | 8008 |
| 05ae30220_23551075_f3_71 | 3247 | 8009 |
| 05ae30801_11753308_f3_13 | 3248 | 8010 |
| 05ae30801_13869058_c3_26 | 3249 | 8011 |
| 13ap11204orf6 | 3250 | 8012 |
| hp5p15212_13883512_f1_1 | 3251 | 8013 |
| 02ce10213orf13 | 3252 | 8014 |
| 14640637 | 3253 | 8015 |
| hp5p15212_14641462_f3_14 | 3254 | 8016 |
| 02ce10213orf15 | 3255 | 8017 |
| hp5p15212_23691892_f2_6 | 3256 | 8018 |
| 02ce10213orf9 | 3257 | 8019 |
| hp5p15212_30173405_f3_15 | 3258 | 8020 |
| 02ce10213orf16 | 3259 | 8021 |
| 02ce10213orf8 | 3260 | 8022 |
| 02ce10213orf14 | 3261 | 8023 |
| hp5p15212_34172000_f3_13 | 3262 | 8024 |
| 02ce10213orf17 | 3263 | 8025 |
| 02ce10213orf1 | 3264 | 8026 |
| 4531568 | 3265 | 8027 |
| hp5p15212_4531568_f3_16 | 3266 | 8028 |
| 05ee11015orf1 | 3267 | 8029 |
| 12ae11404_29307332_f3_5 | 3268 | 8030 |
| 12ae11404orf2 | 3269 | 8031 |
| hpy12ae11404orf_0001.aa | 3270 | 8032 |
| 05ee11015_13801386_f3_5 | 3271 | 8033 |
| 12ae11404_24414087_f1_1 | 3272 | 8034 |
| 12ae11404orf7 | 3273 | 8035 |
| 09ae10512_12692805_f3_27 | 3274 | 8036 |
| hp3e11060orf13 | 3275 | 8037 |
| 09ae10512_14329791_f3_16 | 3276 | 8038 |
| 07ee20513orf2 | 3277 | 8039 |
| 06ae11016_23438577_f2_18 | 3278 | 8040 |
| hpyhp3e11060orf_0009.aa | 3279 | 8041 |
| 24220627 | 3280 | 8042 |
| 09ae10512_24220627_f1_3 | 3281 | 8043 |
| 07ee20513orf14 | 3282 | 8044 |
| 09ae10512_34023462_f3_26 | 3283 | 8045 |
| hp3e11060orf12 | 3284 | 8046 |
| 07ee20513orf21 | 3285 | 8047 |
| hpy07ee20513orf_0010.aa | 3286 | 8048 |
| 09ae10512_54187_c2_53 | 3287 | 8049 |
| 09ae10512_579425_c2_51 | 3288 | 8050 |
| hp3e11060orf4 | 3289 | 8051 |
| hp3e11060orf11 | 3290 | 8052 |
| hpyhp3e11060orf_0012.aa | 3291 | 8053 |
| 09ae10512_21642642_c1_42 | 3292 | 8054 |
| 06ae11016_579425_c2_53 | 3293 | 8055 |
| 06ae11414_7627_f1_1 | 3294 | 8056 |
| hpy11ge10309orf_0033.aa | 3295 | 8057 |
| 06ap30322_3956503_c3_34 | 3296 | 8058 |
| 06ap30322orf11 | 3297 | 8059 |
| 06ap10322_3956503_c2_34 | 3298 | 8060 |
| 06ap30322_4415912_f3_23 | 3299 | 8061 |
| 03ae10516orf3 | 3300 | 8062 |
| hpy03ae10516orf_0002.aa | 3301 | 8063 |
| hpy03ae10516orf_0003.aa | 3302 | 8064 |
| 06ap30322_781410_f2_13 | 3303 | 8065 |
| 07gp11807orf38 | 3304 | 8066 |
| 07gp11807orf51 | 3305 | 8067 |
| 01ae12001_214812_c3_49 | 3306 | 8068 |
| 35949212 | 3307 | 8069 |
| 01ae12001_35949212_c1_36 | 3308 | 8070 |
| 07gp11807orf44 | 3309 | 8071 |
| 01ae12001_4882842_c2_44 | 3310 | 8072 |
| 07gp11807orf33 | 3311 | 8073 |
| 01ae12001_3335908_c3_51 | 3312 | 8074 |
| 07gp11807orf41 | 3313 | 8075 |
| 06ap10609_4882842_c3_54 | 3314 | 8076 |
| 4882842 | 3315 | 8077 |
| 07gp11807orf36 | 3316 | 8078 |
| 14ge10814orf2 | 3317 | 8079 |
| hpy14ge10814orf_0003.aa | 3318 | 8080 |
| 01ae12001orf1 | 3319 | 8081 |
| 06ae10609orf1 | 3320 | 8082 |
| 01ae12001_1070250_c3_55 | 3321 | 8083 |
| 06ap10609_78527_c3_58 | 3322 | 8084 |
| 06ap10609_1070250_c1_41 | 3323 | 8085 |
| 21647676 | 3324 | 8086 |
| 06ap11119_11892135_f2_16 | 3325 | 8087 |
| 11ge10309orf15 | 3326 | 8088 |
| 06ap11119_14253937_c2_42 | 3327 | 8089 |
| hpyhp6p10723orf_0021.aa | 3328 | 8090 |
| hpy01ce11016orf_0014.aa | 3329 | 8091 |
| 06ap11119_14641700_f2_15 | 3330 | 8092 |
| hp6p10723orf21 | 3331 | 8093 |
| 01ae10202_24095452_f3_3 | 3332 | 8094 |
| 11ge10309orf16 | 3333 | 8095 |
| 06ap11119_33205290_f2_12 | 3334 | 8096 |
| hp6p1 0723orf18 | 3335 | 8097 |
| 06ap11119_4879713_f3_24 | 3336 | 8098 |
| 11ge10309orf26 | 3337 | 8099 |
| 06ap11119_5112776_c2_43 | 3338 | 8100 |
| hpyhp6p10723orf_0020.aa | 3339 | 8101 |
| 06ap11119_9797877_f2_13 | 3340 | 8102 |
| hp6p10723orf19 | 3341 | 8103 |
| 12gp11615_4141092_c2_5 | 3342 | 8104 |
| 02ap21102_4141092_c3_39 | 3343 | 8105 |
| hpy11ge10309orf_0002.aa | 3344 | 8106 |
| hp6e10967_19728428_f2_2 | 3345 | 8107 |
| hp2p10625orf1 | 3346 | 8108 |
| 05ee10816_236093_f3_17 | 3347 | 8109 |
| 04ce11617orf3 | 3348 | 8110 |
| 06ep10615_23866311_f1_23 | 3349 | 8111 |
| 06ce10311orf2 | 3350 | 8112 |
| 06ep10615_24410965_c3_104 | 3351 | 8113 |
| 06ep10615_32617012_c3_91 | 3352 | 8114 |
| hpyhp2p10625orf_0006.aa | 3353 | 8115 |
| 13ee10424orf1 | 3354 | 8116 |
| hpy13ee10424orf_0001.aa | 3355 | 8117 |
| 06ep10615_33416562_c2_82 | 3356 | 8118 |
| hpy05ep11717orf_0001.aa | 3357 | 8119 |
| hpy05ep11717orf_0003.aa | 3358 | 8120 |
| hpy05ep11717orf_0006.aa | 3359 | 8121 |
| hpy05ep11717orf_0005.aa | 3360 | 8122 |
| 05ep11717orf7 | 3361 | 8123 |
| 05ep11717orf6 | 3362 | 8124 |
| 06ep10615_35943787_c2_81 | 3363 | 8125 |
| 06ep11202_2773375_f3_13 | 3364 | 8126 |
| hpy06cp20302orf_0009.aa | 3365 | 8127 |
| 06ep11202_4531312_c1_23 | 3366 | 8128 |
| hpyhp2e11858orf_0002.aa | 3367 | 8129 |
| hp3e11122orf2 | 3413 | 8175 |
| 06gp71906_4494063_c2_154 | 3414 | 8176 |
| 06gp71906_5214068_f1_28 | 3415 | 8177 |
| 12gp11106orf10 | 3416 | 8178 |
| 12gp31106_6835827_f1_11 | 3417 | 8179 |
| 13ap11517orf3 | 3418 | 8180 |
| 01cp10622_2472312_c2_2 | 3419 | 8181 |
| 07ae10309_23541676_c3_5 | 3420 | 8182 |
| 07ae11008_10835762_f1_6 | 3421 | 8183 |
| 09cp10502orf8 | 3422 | 8184 |
| 09cp20502_429626_f2_21 | 3423 | 8185 |
| 14gp11820orf24 | 3424 | 8186 |
| 07ae11008orf2 | 3425 | 8187 |
| 07ae11008_4413467_c3_60 | 3426 | 8188 |
| 29zp10241orf17 | 3427 | 8189 |
| 14cp20718_23438768_c2_16 | 3428 | 8190 |
| 07ap11111_23475627_f1_1 | 3429 | 8191 |
| 07ap11111orf6 | 3430 | 8192 |
| 29zp10241orf5 | 3431 | 8193 |
| 14cp20718_23595006_f1_2 | 3432 | 8194 |
| 07ap11111_2382762_f2_5 | 3433 | 8195 |
| 23490686 | 3434 | 8196 |
| 07ap11111orf3 | 3435 | 8197 |
| 07ap61111_24238327_f2_21 | 3436 | 8198 |
| 11cp10113orf6 | 3437 | 8199 |
| 01ae11010_24241562_f1_2 | 3438 | 8200 |
| 07cp10312orf7 | 3439 | 8201 |
| hpy29zp10241orf_0009.aa | 3440 | 8202 |
| 07ap61111_24416693_c2_83 | 3441 | 8203 |
| 11cp10113orf2 | 3442 | 8204 |
| 07ap61111_24740908_c2_88 | 3443 | 8205 |
| 26197187 | 3444 | 8206 |
| 14cp20718_26197187_f2_4 | 3445 | 8207 |
| 29zp10241orf7 | 3446 | 8208 |
| hp6p10233_33397538_f2_9 | 3447 | 8209 |
| 33397538 | 3448 | 8210 |
| hp1p13868orf24 | 3449 | 8211 |
| 07ap11111_4554637_f1_2 | 3450 | 8212 |
| 07ap11111orf12 | 3451 | 8213 |
| 07ap61111_4805338_c1_57 | 3452 | 8214 |
| 07ap61111_4805338_c2_76 | 3453 | 8215 |
| hpyhp3e10349orf_0007.aa | 3454 | 8216 |
| 07ap61111_4976512_c2_94 | 3455 | 8217 |
| 06ap11206_6917518_f3_5 | 3456 | 8218 |
| 07cp10312orf4 | 3457 | 8219 |
| hpyhp3p10180orf_0001.aa | 3458 | 8220 |
| 07ap61111_9938162_c1_57 | 3459 | 8221 |
| hpyhp3e10349orf_0009.aa | 3460 | 8222 |
| 07ce11221_26204752_f1_1 | 3461 | 8223 |
| 07ce11221orf1 | 3462 | 8224 |
| hpy07ce11221orf_0001.aa | 3463 | 8225 |
| 14ee41924_11715_f3_53 | 3464 | 8226 |
| hpy07ap11015orf_0003.aa | 3465 | 8227 |
| 14ee41924_12207031_f1_1 | 3466 | 8228 |
| 07ee11402_19581265_f3_36 | 3467 | 8229 |
| hp5p15861_22697062_f3_9 | 3468 | 8230 |
| 02cp20821orf5 | 3469 | 8231 |
| 14ee41924_24334507_f2_24 | 3470 | 8232 |
| 02ep30607orf11 | 3471 | 8233 |
| 14ee41924_24351577_c2_86 | 3472 | 8234 |
| 02ep30607orf13 | 3473 | 8235 |
| 05ae10307orf2 | 3474 | 8236 |
| 14ee41924_33477177_f3_52 | 3475 | 8237 |
| 14ee41924_665937_f3_46 | 3476 | 8238 |
| 02ep30607orf2 | 3477 | 8239 |
| 02ae31010_10196928_f2_28 | 3478 | 8240 |
| 01ce11618orf2 | 3479 | 8241 |
| 02ae31010_1064125_f1_11 | 3480 | 8242 |
| hpy07ce10203orf_0005.aa | 3481 | 8243 |
| 02ae31010_4396902_c2_58 | 3482 | 8244 |
| 07ee50709_1304651_c1_143 | 3483 | 8245 |
| 07ce10203orf23 | 3484 | 8246 |
| 07ce10203orf18 | 3485 | 8247 |
| 02ae31010_1386712_f1_9 | 3486 | 8248 |
| 02ce11022orf1 | 3487 | 8249 |
| hpy02ce11022orf_0001.aa | 3488 | 8250 |
| 02ae31010_10835802_f2_18 | 3489 | 8251 |
| 07ee50709_14632187_f3_77 | 3490 | 8252 |
| hp2e10911_16308216_c1_72 | 3491 | 8253 |
| hpy01cp11108orf_0003.aa | 3492 | 8254 |
| 07ee50709_16308216_f1_20 | 3493 | 8255 |
| 02ae31010_20991293_c2_73 | 3494 | 8256 |
| 07ce10203orf7 | 3495 | 8257 |
| 02ae31010_22539712_f2_20 | 3496 | 8258 |
| hp5p15641_23534818_f3_11 | 3497 | 8259 |
| hp5p15641orf7 | 3498 | 8260 |
| hp5p15641_24804536_f1_4 | 3499 | 8261 |
| 02ae31010_24898377_f3_37 | 3500 | 8262 |
| hp1p13947orf5 | 3501 | 8263 |
| 02ae31010_250312_f2_24 | 3502 | 8264 |
| hpy07ce10203orf_0004.aa | 3503 | 8265 |
| 05ap10914orf1 | 3504 | 8266 |
| hp5p15641_26367041_c2_30 | 3505 | 8267 |
| hpy07ce10203orf_0002.aa | 3506 | 8268 |
| 07ce10203orf17 | 3507 | 8269 |
| hpy07ce10203orf_0001.aa | 3508 | 8270 |
| 02ae31010_2117087_f3_34 | 3509 | 8271 |
| 02ae31010_26438968_f1_12 | 3510 | 8272 |
| 07ce10203orf21 | 3511 | 8273 |
| 07ee50709_26438968_f2_36 | 3512 | 8274 |
| 01ce11618orf14 | 3513 | 8275 |
| 02ae31010_34063887_f1_16 | 3514 | 8276 |
| 02ae31010_4539193_f3_36 | 3515 | 8277 |
| hpyhp1p13947orf_0009.aa | 3516 | 8278 |
| hp5p15641_5210892_f2_9 | 3517 | 8279 |
| hp5p15641orf4 | 3518 | 8280 |
| hp5p15612orf1 | 3519 | 8281 |
| 13ep10824orf1 | 3520 | 8282 |
| hpy13ep10824orf_0001.aa | 3521 | 8283 |
| hp5p15641_6516005_c1_23 | 3522 | 8284 |
| 02ae31010_828342_f3_38 | 3523 | 8285 |
| hp1p13947orf6 | 3524 | 8286 |
| 882827 | 3525 | 8287 |
| 02ae31010_882827_f1_15 | 3526 | 8288 |
| 01ce11618orf20 | 3527 | 8289 |
| 07ge11521_10739577_c3_34 | 3528 | 8290 |
| 07ge11521_10739577_c3_36 | 3529 | 8291 |
| 02cp11404orf5 | 3530 | 8292 |
| 07ge11521_19536086_c3_40 | 3531 | 8293 |
| hpy02cp11404orf_0011.aa | 3532 | 8294 |
| hpy29ap10306orf_0001.aa | 3533 | 8295 |
| 07ge11521_26757752_f2_16 | 3534 | 8296 |
| 02cp11404orf10 | 3535 | 8297 |
| 07ge11521_4296877_c3_35 | 3536 | 8298 |
| 06cp11217_22343753_f1_3 | 3537 | 8299 |
| hp1p13852orf1 | 3538 | 8300 |
| 06cp11217_23454382_f1_4 | 3539 | 8301 |
| hp1p13852orf2 | 3540 | 8302 |
| 05ae30220_26054027_c3_176 | 3541 | 8303 |
| 06cp11217_3907012_f3_12 | 3542 | 8304 |
| hp1p13852orf11 | 3543 | 8305 |
| 06cp11217_4820443_c2_15 | 3544 | 8306 |
| hp1p13852orf13 | 3545 | 8307 |
| hpyhp4p13446orf_0005.aa | 3546 | 8308 |
| hpyhp4p13446orf_0004.aa | 3547 | 8309 |
| hp6p10904_24218817_f2_7 | 3548 | 8310 |
| hp6p10904_3386011_c3_23 | 3549 | 8311 |
| hp4p13446orf1 | 3550 | 8312 |
| 01ep30520orf1 | 3551 | 8313 |
| 09ce52017_22378887_f1_1 | 3552 | 8314 |
| 01ep30520orf9 | 3553 | 8315 |
| 09ce52017_24238312_f2_9 | 3554 | 8316 |
| hpy06ep11115orf_0001.aa | 3555 | 8317 |
| 09ce52017_25400027_f1_7 | 3556 | 8318 |
| 06ep11115orf2 | 3557 | 8319 |
| 09ce52017_5126933_f3_19 | 3558 | 8320 |
| 09cp10224_10735665_c2_48 | 3559 | 8321 |
| hp1p11244orf2 | 3560 | 8322 |
| hp6e10735_36515689_c2_1 | 3561 | 8323 |
| 09cp10224_15908376_c2_46 | 3562 | 8324 |
| hp4p13402orf12 | 3563 | 8325 |
| 09cp10224_24027187_f2_19 | 3564 | 8326 |
| 09cp10224_24506262_f2_13 | 3565 | 8327 |
| 01ce10516orf9 | 3566 | 8328 |
| 09cp10224_32243937_c3_54 | 3567 | 8329 |
| hp4p13402orf5 | 3568 | 8330 |
| hp1p11244orf15 | 3569 | 8331 |
| 09cp10224_5078443_f1_6 | 3570 | 8332 |
| 06cp30603_210042_c3_154 | 3571 | 8333 |
| hpy05cp20518orf_0010.aa | 3572 | 8334 |
| hp6e20339_22459406_c2_50 | 3573 | 8335 |
| 04gp11213orf17 | 3574 | 8336 |
| hpyhp3e10302orf_0005.aa | 3575 | 8337 |
| hpyhp3e10302orf_0006.aa | 3576 | 8338 |
| 06cp30603_22703965_c3_145 | 3577 | 8339 |
| hpy09cp10713orf_0006.aa | 3578 | 8340 |
| 09cp10713_22870317_c3_32 | 3579 | 8341 |
| 09cp10713_23944133_f1_10 | 3580 | 8342 |
| 06cp30603_26750182_c2_116 | 3581 | 8343 |
| hpy05cp20518orf_0017.aa | 3582 | 8344 |
| hp6e20339_30360883_f1_14 | 3583 | 8345 |
| 19556290 | 3584 | 8346 |
| 04gp11213orf60 | 3585 | 8347 |
| 04gp11213orf18 | 3586 | 8348 |
| hp6e20339_3162753_c2_51 | 3587 | 8349 |
| 09cp10713_31798750_c1_26 | 3588 | 8350 |
| 09cp10713orf24 | 3589 | 8351 |
| 06cp30603_31798962_c2_103 | 3590 | 8352 |
| hpy04gp11213orf_0001.aa | 3591 | 8353 |
| hp6e20339_3253901_c2_44 | 3592 | 8354 |
| 04gp11213orf20 | 3593 | 8355 |
| hp6e20339_32625017_c1_39 | 3594 | 8356 |
| 04gp11213orf13 | 3595 | 8357 |
| hpy05cp20518orf_0024.aa | 3596 | 8358 |
| hpy05cp20518orf_0025.aa | 3597 | 8359 |
| 06cp30603_36115877_c2_114 | 3598 | 8360 |
| hp6e20339_36620953_c2_48 | 3599 | 8361 |
| 04gp11213orf7 | 3600 | 8362 |
| 05cp20518orf36 | 3601 | 8363 |
| 06cp30603_3906693_c1_42 | 3602 | 8364 |
| 7031343 | 3603 | 8365 |
| 09cp10713_7031343_c1_28 | 3604 | 8366 |
| 09cp10713_7031343_c1_27 | 3605 | 8367 |
| 09cp10713orf26 | 3606 | 8368 |
| 06cp30603_9804653_c1_87 | 3607 | 8369 |
| hpy05cp20518orf_0023.aa | 3608 | 8370 |
| hp6e52639_21987687_c3_8 | 3609 | 8371 |
| 01cp11009_23469574_c1_2 | 3610 | 8372 |
| hpy05ap11505orf_0006.aa | 3611 | 8373 |
| hpy11ge10309orf_0005.aa | 3612 | 8374 |
| 05ee21703_24804712_c1_9 | 3613 | 8375 |
| 06cp10218_26176689_c1_2 | 3614 | 8376 |
| hpy05ap11505orf_0002.aa | 3615 | 8377 |
| 13ae10610_5079642_c3_38 | 3616 | 8378 |
| 02ee10520orf5 | 3617 | 8379 |
| 06cp30603_24257137_c2_119 | 3618 | 8380 |
| 32431687 | 3619 | 8381 |
| 04ep71403orf13 | 3620 | 8382 |
| hpy04ep71403orf_0008.aa | 3621 | 8383 |
| 12ae10622_34020812_f1_7 | 3622 | 8384 |
| 12ge10321_34166510_f3_16 | 3623 | 8385 |
| hp4p11352orf11 | 3624 | 8386 |
| hpyhp4p11352orf_0012.aa | 3625 | 8387 |
| 14gp11423_34166510_c2_69 | 3626 | 8388 |
| 12ge10321_3964812_f1_2 | 3627 | 8389 |
| hp4p11352orf3 | 3628 | 8390 |
| 12ge10321_4040928_f3_13 | 3629 | 8391 |
| 4040928 | 3630 | 8392 |
| hp4p11352orf8 | 3631 | 8393 |
| hp4p11352orf5 | 3632 | 8394 |
| hp4p11352orf9 | 3633 | 8395 |
| 12ae10622_4821082_f2_21 | 3634 | 8396 |
| 03ae10804_10188535_f2_12 | 3635 | 8397 |
| 06ep10306orf20 | 3636 | 8398 |
| 06ep10306orf17 | 3637 | 8399 |
| hpy06ep10306orf_0017.aa | 3638 | 8400 |
| 03ae10804_14878438_c2_38 | 3639 | 8401 |
| 16251627 | 3640 | 8402 |
| 03ae10804_1990878_c2_35 | 3641 | 8403 |
| 06ep10306orf14 | 3642 | 8404 |
| 03ae10804_21698400_c2_32 | 3643 | 8405 |
| 06ep10306orf11 | 3644 | 8406 |
| 03ae10804_26350302_f1_2 | 3645 | 8407 |
| hp5e11726orf5 | 3646 | 8408 |
| 03ae10804_3182663_f1_3 | 3647 | 8409 |
| hp5e11726orf6 | 3648 | 8410 |
| 06ep10306orf8 | 3649 | 8411 |
| 06ep10306orf9 | 3650 | 8412 |
| 03ae10804_4507717_c1_25 | 3651 | 8413 |
| 06ep10306orf16 | 3652 | 8414 |
| 03ae10804_489413_c3_48 | 3653 | 8415 |
| 06ep10306orf6 | 3654 | 8416 |
| hp1e80523_489413_c3_65 | 3655 | 8417 |
| hp5p15006orf1 | 3656 | 8418 |
| hpyhp5p15006orf_0001.aa | 3657 | 8419 |
| 06ge11904orf2 | 3658 | 8420 |
| hpy06ge11904orf_0001.aa | 3659 | 8421 |
| 06ee11611orf2 | 3660 | 8422 |
| hp3e11188_1379531_f3_13 | 3661 | 8423 |
| hp3p10807orf5 | 3662 | 8424 |
| hp5e12930orf4 | 3663 | 8425 |
| hp5e12930orf6 | 3664 | 8426 |
| hp3e11188_26750012_f3_11 | 3665 | 8427 |
| hp3p10807_26750012_f3_9 | 3666 | 8428 |
| hp3p10807_189075_f2_4 | 3667 | 8429 |
| hp3p10807orf6 | 3668 | 8430 |
| hpyhp3p10807orf_0001.aa | 3669 | 8431 |
| hp3e11188_47327_f2_5 | 3670 | 8432 |
| hp3e11188_47327_f2_9 | 3671 | 8433 |
| 05ge11120orf1 | 3672 | 8434 |
| hp3e11188_910656_f2_10 | 3673 | 8435 |
| 23441078 | 3674 | 8436 |
| hp4e13394_23441078_f1_20 | 3675 | 8437 |
| 01ep10216orf6 | 3676 | 8438 |
| hp4e13394_24735767_f1_22 | 3677 | 8439 |
| 06ep11108orf22 | 3678 | 8440 |
| 09cp10405orf2 | 3679 | 8441 |
| 02ap71220orf1 | 3680 | 8442 |
| hp4e13394_36110762_c2_96 | 3681 | 8443 |
| 09ap11406orf9 | 3682 | 8444 |
| 09ap11406orf3 | 3683 | 8445 |
| hp4e13394_3906592_c2_107 | 3684 | 8446 |
| hp4e13394_648452_c3_118 | 3685 | 8447 |
| 11ce11603orf20 | 3686 | 8448 |
| hp4e13394_953883_c2_99 | 3687 | 8449 |
| 11ce11603orf11 | 3688 | 8450 |
| hpy07ap11622orf_0005.aa | 3689 | 8451 |
| 01ce10303_9767312_f1_1 | 3690 | 8452 |
| hpy04ep10206orf_0004.aa | 3691 | 8453 |
| hp4e53394_15789052_f2_44 | 3692 | 8454 |
| 03ee11215orf28 | 3693 | 8455 |
| 03ee11215orf37 | 3694 | 8456 |
| 03ee11215_16991092_c2_28 | 3695 | 8457 |
| 03ee11215_22265691_c1_22 | 3696 | 8458 |
| 22265691 | 3697 | 8459 |
| 03ee11215orf29 | 3698 | 8460 |
| 24407533 | 3699 | 8461 |
| hp5e13045_24407533_c2_12 | 3700 | 8462 |
| 02ae11611orf5 | 3701 | 8463 |
| hp4e53394_267312_f2_47 | 3702 | 8464 |
| hpy07ap11622orf_0003.aa | 3703 | 8465 |
| 12ge10513orf1 | 3704 | 8466 |
| hpy12ge10513orf_0002.aa | 3705 | 8467 |
| hp4e53394_30203287_f3_58 | 3706 | 8468 |
| 3157067 | 3707 | 8469 |
| 03ee11215_3157067_f2_17 | 3708 | 8470 |
| 03ee11215orf15 | 3709 | 8471 |
| hpy03ee11215orf_0003.aa | 3710 | 8472 |
| hpy03ee11215orf_0002.aa | 3711 | 8473 |
| hp4e53394_32618752_c1_81 | 3712 | 8474 |
| hp1e13852_4469063_f1_4 | 3713 | 8475 |
| 04ep10206orf7 | 3714 | 8476 |
| 03ee11215_5350062_f2_15 | 3715 | 8477 |
| 03ee11215orf13 | 3716 | 8478 |
| hp4e53394_6652327_f1_5 | 3717 | 8479 |
| 03ee11215orf18 | 3718 | 8480 |
| hp5e13045_7055257_c3_15 | 3719 | 8481 |
| 02ae11611orf2 | 3720 | 8482 |
| hp4e53394_8562_f3_65 | 3721 | 8483 |
| 07ap11622orf1 | 3722 | 8484 |
| hp4p13376_13828932_c2_5 | 3723 | 8485 |
| hp4p13376_10020149_c1_4 | 3724 | 8486 |
| hp2e10350orf1 | 3725 | 8487 |
| hp4p13376_26673166_f1_1 | 3726 | 8488 |
| 05ce10208_14485263_f1_7 | 3727 | 8489 |
| 14cp11121orf8 | 3728 | 8490 |
| 14cp11121orf2 | 3729 | 8491 |
| 05ce10208_23671877_f2_10 | 3730 | 8492 |
| hp4p62853_23671877_c1_41 | 3731 | 8493 |
| 06ce10808orf1 | 3732 | 8494 |
| hpy06ce10808orf_0001.aa | 3733 | 8495 |
| hp1p13939_33209817_c2_30 | 3734 | 8496 |
| 12gp11822_36125062_c2_12 | 3735 | 8497 |
| 14ae11614orf6 | 3736 | 8498 |
| 15824052 | 3737 | 8499 |
| 06ep30223_15824052_f2_54 | 3738 | 8500 |
| 14gp12015orf12 | 3739 | 8501 |
| hpy02ce30710orf_0003.aa | 3740 | 8502 |
| 06ep30223_22272187_c2_137 | 3741 | 8503 |
| 02ce30710orf4 | 3742 | 8504 |
| 06ep30223_26757775_f3_93 | 3743 | 8505 |
| hp3e11024orf13 | 3744 | 8506 |
| 02ce30710orf1 | 3745 | 8507 |
| 06ep30223_29736011_c1_114 | 3746 | 8508 |
| hp5p10786orf1 | 3747 | 8509 |
| 06ep30223_30500957_c2_135 | 3748 | 8510 |
| 7225666 | 3749 | 8511 |
| 01ep30520orf16 | 3750 | 8512 |
| 06ep20223_35197255_c2_1 | 3751 | 8513 |
| hp3e11024orf11 | 3752 | 8514 |
| 06ep30223_36125005_f2_66 | 3753 | 8515 |
| hp5e15555_36125005_f3_95 | 3754 | 8516 |
| 06ep30223_35197255_c2_142 | 3755 | 8517 |
| hp5e15555_3910937_c2_141 | 3756 | 8518 |
| 4062813 | 3757 | 8519 |
| hp3e11024orf15 | 3758 | 8520 |
| 06ep30223_4062813_f3_95 | 3759 | 8521 |
| hp3e11024orf6 | 3760 | 8522 |
| 06ep30223_4062813_f1_22 | 3761 | 8523 |
| 05cp21223_4725443_f3_14 | 3762 | 8524 |
| hp1e10506orf5 | 3763 | 8525 |
| 09ap10418orf1 | 3764 | 8526 |
| hpy09ap10418orf_0001.aa | 3765 | 8527 |
| hpy02ce30710orf_0001.aa | 3766 | 8528 |
| 06ep30223_7304760_c1_113 | 3767 | 8529 |
| 01ce21104_13789077_c2_71 | 3768 | 8530 |
| hpy05cp11911orf_0014.aa | 3769 | 8531 |
| hpy02ae11612orf_0009.aa | 3770 | 8532 |
| 02ae11612orf27 | 3771 | 8533 |
| 02ae11612_16664827_c2_85 | 3772 | 8534 |
| 02ae11612_19535962_f1_12 | 3773 | 8535 |
| 05cp11911orf14 | 3774 | 8536 |
| 06ep11917_22692800_c3_26 | 3775 | 8537 |
| hp4e14535orf5 | 3776 | 8538 |
| hpy02ae11612orf_0015.aa | 3777 | 8539 |
| hpy02ae11612orf_0014.aa | 3778 | 8540 |
| 01ce21104_24484438_c1_64 | 3779 | 8541 |
| 01ce11104_24803330_f2_3 | 3780 | 8542 |
| 16ep10117orf1 | 3781 | 8543 |
| 01ce21104_4554713_c2_80 | 3782 | 8544 |
| hpy02ae11612orf_0016.aa | 3783 | 8545 |
| hpy02ae11612orf_0019.aa | 3784 | 8546 |
| hpy02ae11612orf_0020.aa | 3785 | 8547 |
| 01ce21104_4804068_c3_100 | 3786 | 8548 |
| 10664078 | 3787 | 8549 |
| 02ae11612_5114693_f1_16 | 3788 | 8550 |
| 05cp11911orf11 | 3789 | 8551 |
| 02ae11612_6837812_f3_45 | 3790 | 8552 |
| 05cp11911orf9 | 3791 | 8553 |
| hp5p15575_4729717_f1_1 | 3792 | 8554 |
| hpyhp5p15575orf_0004.aa | 3793 | 8555 |
| 09ap10515_16212692_f2_1 | 3794 | 8556 |
| 03ge31106orf2 | 3795 | 8557 |
| 01xe21717orf28 | 3796 | 8558 |
| 05ep10815_23441262_f3_61 | 3797 | 8559 |
| hp6p10509_12618813_c2_16 | 3798 | 8560 |
| hpy16ae10508orf_0006.aa | 3799 | 8561 |
| 14864452 | 3800 | 8562 |
| hp6p10509_25417812_c3_18 | 3801 | 8563 |
| 16ae10508orf10 | 3802 | 8564 |
| hp6p10522_79703_f1_1 | 3803 | 8565 |
| 19541302 | 3804 | 8566 |
| hp6p10590_14742212_f2_13 | 3805 | 8567 |
| 11gp11422orf2 | 3806 | 8568 |
| hpy11gp11422orf_0001.aa | 3807 | 8569 |
| hp6p10590_33336566_f3_21 | 3808 | 8570 |
| 05ae10218orf3 | 3809 | 8571 |
| hpy04ee70114orf_0005.aa | 3810 | 8572 |
| hpy04ee70114orf_0003.aa | 3811 | 8573 |
| hp6p10590_4350342_c3_40 | 3812 | 8574 |
| hp6p10590_4688818_c2_33 | 3813 | 8575 |
| 01gp10401orf2 | 3814 | 8576 |
| 4787562 | 3815 | 8577 |
| hp6p10590_4787562_f1_5 | 3816 | 8578 |
| 11gp11422orf1 | 3817 | 8579 |
| 01ep12002_16457267_c2_17 | 3818 | 8580 |
| 04ep10515orf10 | 3819 | 8581 |
| hpy04ep10515orf_0002.aa | 3820 | 8582 |
| hp6p12129_26172077_c1_20 | 3821 | 8583 |
| hp6p12129_26172077_c2_23 | 3822 | 8584 |
| hpyhp3e10302orf_0018.aa | 3823 | 8585 |
| hp3e10302orf24 | 3824 | 8586 |
| hp6p12129_5320151_f3_13 | 3825 | 8587 |
| 14cp10923orf4 | 3826 | 8588 |
| 14cp10923_10181291_f2_8 | 3827 | 8589 |
| 14cp10923_10427207_f2_7 | 3828 | 8590 |
| 14cp10923orf6 | 3829 | 8591 |
| hp1p13922orf2 | 3830 | 8592 |
| hp1p13922orf7 | 3831 | 8593 |
| hp6p12244_10828331_f3_39 | 3832 | 8594 |
| 24611590 | 3833 | 8595 |
| hp1p13922orf30 | 3834 | 8596 |
| 34089087 | 3835 | 8597 |
| hp1p13922orf22 | 3836 | 8598 |
| hp6p12244_14539063_c2_72 | 3837 | 8599 |
| hp6p12244_14628127_c1_51 | 3838 | 8600 |
| hp6p12244_21688926_c1_63 | 3839 | 8601 |
| 14cp10923_22554712_f1_5 | 3840 | 8602 |
| hp5e15653orf2 | 3841 | 8603 |
| 14cp10923_24023442_f1_2 | 3842 | 8604 |
| 14cp10923orf2 | 3843 | 8605 |
| hpyhp1p13922orf_0015.aa | 3844 | 8606 |
| hp6p12244_242291_c1_50 | 3845 | 8607 |
| 03ap20115orf2 | 3846 | 8608 |
| 03ap20115orf1 | 3847 | 8609 |
| hp1p13922orf6 | 3848 | 8610 |
| hp6p12244_24415938_f1_9 | 3849 | 8611 |
| hpyhp1p13922orf_0009.aa | 3850 | 8612 |
| hp1p13922orf17 | 3851 | 8613 |
| hp6p12244_25429505_f3_40 | 3852 | 8614 |
| 3242952 | 3853 | 8615 |
| 14cp10923_3242952_f1_3 | 3854 | 8616 |
| 14cp10923orf3 | 3855 | 8617 |
| hp1p13922orf4 | 3856 | 8618 |
| hp6p12244_33214692_f2_26 | 3857 | 8619 |
| hp1p13922orf3 | 3858 | 8620 |
| hp1p13922orf8 | 3859 | 8621 |
| 16603381 | 3860 | 8622 |
| hp6p12244_33782812_f2_25 | 3861 | 8623 |
| 24492192 | 3862 | 8624 |
| 14cp10923_4864062_f1_1 | 3863 | 8625 |
| 14cp10923orf1 | 3864 | 8626 |
| 06ae11915orf5 | 3865 | 8627 |
| hp6p12244_21975662_f1_8 | 3866 | 8628 |
| hp6p12244_5282838_f3_39 | 3867 | 8629 |
| 10580417 | 3868 | 8630 |
| hp6p22217_10580417_f3_17 | 3869 | 8631 |
| 13ee12016orf19 | 3870 | 8632 |
| hp6p22217_16459375_c3_31 | 3871 | 8633 |
| 16459375 | 3872 | 8634 |
| 13ee12016orf24 | 3873 | 8635 |
| hp6p22217_21667317_c1_22 | 3874 | 8636 |
| 13ee12016orf33 | 3875 | 8637 |
| 13ae10712_22775033_f1_3 | 3876 | 8638 |
| 13ae10712orf3 | 3877 | 8639 |
| 13ae10712_23626592_f1_5 | 3878 | 8640 |
| 01ae11421orf5 | 3879 | 8641 |
| 13ae10712_23850312_f2_9 | 3880 | 8642 |
| 13ae10712orf7 | 3881 | 8643 |
| 02ge10814orf1 | 3882 | 8644 |
| 11ae12004_6906717_f3_17 | 3883 | 8645 |
| 3958537 | 3884 | 8646 |
| hp7e10429_10720208_c3_42 | 3885 | 8647 |
| 07ge20415orf22 | 3886 | 8648 |
| hpy07ge20415orf_0015.aa | 3887 | 8649 |
| hp7e10429_14495812_c1_27 | 3888 | 8650 |
| hp7e10429_24297188_c3_43 | 3889 | 8651 |
| 07ge20415orf23 | 3890 | 8652 |
| 12ap11614_32711508_f3_6 | 3891 | 8653 |
| 12ap11614orf7 | 3892 | 8654 |
| hp7e10429_34172291_c1_26 | 3893 | 8655 |
| 07ge20415orf21 | 3894 | 8656 |
| 07ge20415orf37 | 3895 | 8657 |
| 07ge20415orf36 | 3896 | 8658 |
| hp7e10429_41018_c1_32 | 3897 | 8659 |
| 07ge20415orf29 | 3898 | 8660 |
| hpy07ge20415orf_0021.aa | 3899 | 8661 |
| hp7e10429_4859652_c2_35 | 3900 | 8662 |
| 07ge20415orf18 | 3901 | 8663 |
| 07ge20415orf13 | 3902 | 8664 |
| hp7e10429_5906337_f1_3 | 3903 | 8665 |
| hp5p15504orf4 | 3904 | 8666 |
| hp5p15504orf1 | 3905 | 8667 |
| hpyhp5p15504orf_0003.aa | 3906 | 8668 |
| hp7e10433_32460937_c3_12 | 3907 | 8669 |
| 14ce61516_17000776_c2_29 | 3908 | 8670 |
| 07ee11905orf3 | 3909 | 8671 |
| 11ae80818_22692925_f3_36 | 3910 | 8672 |
| hpy06cp11722orf_0010.aa | 3911 | 8673 |
| hpy14ep11905orf_0010.aa | 3912 | 8674 |
| 14ce61516_236452_f3_15 | 3913 | 8675 |
| 11ae80818_25957137_c3_65 | 3914 | 8676 |
| 11ae80818_39017_f3_35 | 3915 | 8677 |
| 06cp11722orf13 | 3916 | 8678 |
| 11ae80818_3954717_c3_66 | 3917 | 8679 |
| hpy05ae10808orf_0004.aa | 3918 | 8680 |
| 11ae80818_36532292_c2_54 | 3919 | 8681 |
| 03ap21820orf7 | 3920 | 8682 |
| 11ae80818_5885942_c1_48 | 3921 | 8683 |
| hp7e10434_17070306_f2_12 | 3922 | 8684 |
| hp7e10434_24101635_c1_28 | 3923 | 8685 |
| 06ce10515orf5 | 3924 | 8686 |
| hpy06ce10515orf_0009.aa | 3925 | 8687 |
| hp7e10434_31417090_f3_17 | 3926 | 8688 |
| 01gp11016_24220438_c3_17 | 3927 | 8689 |
| 01gp11016orf18 | 3928 | 8690 |
| hp7e30434_31417090_f1_3 | 3929 | 8691 |
| 12ae21111orf2 | 3930 | 8692 |
| hp6e50324_33386312_c1_10 | 3931 | 8693 |
| hp7e10434_3939018_f1_3 | 3932 | 8694 |
| 06ce10515orf6 | 3933 | 8695 |
| hp7e10434_4181638_f1_4 | 3934 | 8696 |
| 06ce10515orf7 | 3935 | 8697 |
| 06ce10515orf3 | 3936 | 8698 |
| 06ce10515orf1 | 3937 | 8699 |
| hp7e10434_4414092_f3_15 | 3938 | 8700 |
| 12ae21111orf1 | 3939 | 8701 |
| hpy12ae21111orf_0001.aa | 3940 | 8702 |
| hp6e50324_23485714_c1_9 | 3941 | 8703 |
| hp7e30434_4767717_f2_20 | 3942 | 8704 |
| hp5p15249orf1 | 3943 | 8705 |
| hpyhp5p15249orf_0001.aa | 3944 | 8706 |
| hp7e10192_12150293_f2_4 | 3945 | 8707 |
| hp7e10192_12150293_f2_2 | 3946 | 8708 |
| hp7p10191_35830427_f1_1 | 3947 | 8709 |
| hpy01ce11513orf_0013.aa | 3948 | 8710 |
| 01ce11513orf5 | 3949 | 8711 |
| 02ep20506_4334693_f3_11 | 3950 | 8712 |
| hp7p10287_4334693_c3_28 | 3951 | 8713 |
| hpy01ce11513orf_0016.aa | 3952 | 8714 |
| 01ce11513orf7 | 3953 | 8715 |
| hp7p10287_4959717_c1_19 | 3954 | 8716 |
| 02ce41018_30156593_c1_27 | 3955 | 8717 |
| hp3p10349orf13 | 3956 | 8718 |
| hp7e10420_34381937_c1_31 | 3957 | 8719 |
| hpy07gp10508orf_0001.aa | 3958 | 8720 |
| 02ce41018_4884662_c2_31 | 3959 | 8721 |
| hp3p10349orf14 | 3960 | 8722 |
| 07ap20216_2239637_f3_8 | 3961 | 8723 |
| 05ap21216orf2 | 3962 | 8724 |
| 11ap20714_26803187_c3_105 | 3963 | 8725 |
| hp5e15440orf22 | 3964 | 8726 |
| 07ap20216_36126715_f3_9 | 3965 | 8727 |
| 05ap21216orf3 | 3966 | 8728 |
| 11ap20714_3917638_c3_100 | 3967 | 8729 |
| hpyhp5e15440orf_0012.aa | 3968 | 8730 |
| 02cp10615_1070377_c3_62 | 3969 | 8731 |
| 11ze30138_12210325_f1_4 | 3970 | 8732 |
| 09gp10306orf10 | 3971 | 8733 |
| 11ze30138_127340_f1_5 | 3972 | 8734 |
| 09gp10306orf8 | 3973 | 8735 |
| 02cp10615_23447942_c2_56 | 3974 | 8736 |
| 09gp10306orf6 | 3975 | 8737 |
| hpy02cp11721orf_0007.aa | 3976 | 8738 |
| hpy02cp11721orf_0008.aa | 3977 | 8739 |
| 02cp10615_23464686_c3_66 | 3978 | 8740 |
| 11ze30138_24062812_f3_13 | 3979 | 8741 |
| 09gp10306orf3 | 3980 | 8742 |
| 11ze30138_24322792_f2_10 | 3981 | 8743 |
| 09gp10306orf11 | 3982 | 8744 |
| 02cp10615_24322792_c1_48 | 3983 | 8745 |
| 09gp10306orf1 | 3984 | 8746 |
| hpy09gp10306orf_0001.aa | 3985 | 8747 |
| hp3p10304orf1 | 3986 | 8748 |
| 02cp10615_24406693_c3_63 | 3987 | 8749 |
| 11ze30138_24406693_f1_3 | 3988 | 8750 |
| 09gp10306orf4 | 3989 | 8751 |
| 11ze30138_29454382_f3_14 | 3990 | 8752 |
| 02cp10615_29454382_c1_49 | 3991 | 8753 |
| hp1p14013_3006541_f3_10 | 3992 | 8754 |
| hp1p14013orf7 | 3993 | 8755 |
| 01ae22001orf4 | 3994 | 8756 |
| 01ce10218orf1 | 3995 | 8757 |
| hpy01ce10218orf_0001.aa | 3996 | 8758 |
| 02cp10615_781266_c1_44 | 3997 | 8759 |
| hp8e10080_33204166_f2_27 | 3998 | 8760 |
| 09gp10306orf9 | 3999 | 8761 |
| 09gp10306orf5 | 4000 | 8762 |
| 11ze30138_34250066_f3_11 | 4001 | 8763 |
| hpy02cp11721orf_0003.aa | 4002 | 8764 |
| 02cp11721orf19 | 4003 | 8765 |
| hp7e10100_4490967_c3_20 | 4004 | 8766 |
| hp6p10606_4960967_c1_20 | 4005 | 8767 |
| hpy13ep12003orf_0004.aa | 4006 | 8768 |
| 5265957 | 4007 | 8769 |
| hp7e10100_5210967_c1_13 | 4008 | 8770 |
| 02cp11721orf13 | 4009 | 8771 |
| hpy01ee11621orf_0002.aa | 4010 | 8772 |
| hpy01ee11621orf_0001.aa | 4011 | 8773 |
| hp6p10606_5368817_f2_14 | 4012 | 8774 |
| hpy09gp10306orf_0007.aa | 4013 | 8775 |
| hpy09gp10306orf_0006.aa | 4014 | 8776 |
| 02cp10615_6831900_c1_47 | 4015 | 8777 |
| 14570443 | 9613 | 9725 |
| 14645905 | 9614 | 9726 |
| 29557266 | 9615 | 9727 |
| 214812 | 9616 | 9728 |
| 1370202 | 9617 | 9729 |
| 4821082 | 9618 | 9730 |
| 34489543 | 9619 | 9731 |
| 21618785 | 9620 | 9732 |
| 22667967 | 9621 | 9733 |
| C. SECRETED PROTEINS | | |
| C.1 Periplasmic proteins | | |
| 03ae10804orf1 | 4016 | 8778 |
| 03ae10804_23473912_f1_1 | 4017 | 8779 |
| hp1e80523_24415942_f3_27 | 4018 | 8780 |
| C.2 Proteins involved in secretion and | | |
| adhesion | | |
| 12ap10324_3906712_f3_5 | 4019 | 8781 |
| 3906712 | 4020 | 8782 |
| 12ap10324orf3 | 4021 | 8783 |
| 07gp31516orf3 | 4022 | 8784 |
| 12ap10324orf6 | 4023 | 8785 |
| 12ap10324orf5 | 4024 | 8786 |
| 12ap10324_4805318_f2_3 | 4025 | 8787 |
| 12ap10324_4805318_f2_6 | 4026 | 8788 |
| 4805318 | 9622 | 9734 |
| C.3 Chaperones | | |
| 50253 | 4027 | 8789 |
| hp5e15211_50253_f2_13 | 4028 | 8790 |
| hp5e15211_50253_f2_16 | 4029 | 8791 |
| hp5e15211orf10 | 4030 | 8792 |
| C.4 Other secreted proteins | | |
| 09cp61003_23593955_c1_79 | 4031 | 8793 |
| hp6p80503_17032125_f1_1 | 4032 | 8794 |
| 01ce61016_23593955_c3_140 | 4033 | 8795 |
| 01ce61016_23609580_c3_139 | 4034 | 8796 |
| 09cp11003_19532625_c3_17 | 4035 | 8797 |
| 09cp61003_19532625_c1_78 | 4036 | 8798 |
| 14ge10705orf14 | 4037 | 8799 |
| 07cp11213orf1 | 4038 | 8800 |
| hpy07cp11213orf_0001.aa | 4039 | 8801 |
| 11ee10423orf4 | 4040 | 8802 |
| 09cp61003_24335762_c3_111 | 4041 | 8803 |
| hp3p10156orf6 | 4042 | 8804 |
| hp3p10156orf2 | 4043 | 8805 |
| hp7p10290_25548812_f3_14 | 4044 | 8806 |
| hp6e12267_4876718_f2_23 | 4045 | 8807 |
| 12ge10305orf5 | 4046 | 8808 |
| 09ap20802orf13 | 4047 | 8809 |
| hp2p10272_22692325_f3_21 | 4048 | 8810 |
| 02ap11117_23495187_c3_81 | 4049 | 8811 |
| 09ap20802orf14 | 4050 | 8812 |
| hp2p10272_23697200_f3_22 | 4051 | 8813 |
| hp2p10272_26829136_f1_1 | 4052 | 8814 |
| hp2p10272orf1 | 4053 | 8815 |
| 29ep10720_289077_f2_12 | 4054 | 8816 |
| 289077 | 4055 | 8817 |
| 11ge10309orf9 | 4056 | 8818 |
| 02gp20706_1203402_c3_58 | 4057 | 8819 |
| 09ge70821orf2 | 4058 | 8820 |
| 02gp20706_15781452_c2_51 | 4059 | 8821 |
| 02ge10116_15781452_c1_87 | 4060 | 8822 |
| 06ge10115orf17 | 4061 | 8823 |
| 36335436 | 4062 | 8824 |
| 02ge10116_36335436_f3_66 | 4063 | 8825 |
| hp5e15276orf14 | 4064 | 8826 |
| 02gp20706_4892558_f3_19 | 4065 | 8827 |
| 01cp11710orf1 | 4066 | 8828 |
| 02ge41622_20730462_f1_19 | 4067 | 8829 |
| hpy13ee10216orf_0035.aa | 4068 | 8830 |
| 02ge11622_21695936_c1_54 | 4069 | 8831 |
| 13ee10216orf57 | 4070 | 8832 |
| 23594838 | 4071 | 8833 |
| 06ee30709_33851038_c3_30 | 4072 | 8834 |
| 01ae11403orf1 | 4073 | 8835 |
| hpy01ae11403orf_0001.aa | 4074 | 8836 |
| 05ae30220_14570443_c2_94 | 4075 | 8837 |
| 05ae20220orf124 | 4076 | 8838 |
| 01cp20708_10628177_c2_50 | 4077 | 8839 |
| 22447252 | 4078 | 8840 |
| 05ep10815_22447252_c3_110 | 4079 | 8841 |
| 07ge11504orf3 | 4080 | 8842 |
| 30283516 | 4081 | 8843 |
| 05ep10815_30283516_c3_109 | 4082 | 8844 |
| 07ge11504orf2 | 4083 | 8845 |
| hp1p10543orf4 | 4084 | 8846 |
| hpyhp1p10543orf_0004.aa | 4085 | 8847 |
| hp1e10554orf1 | 4086 | 8848 |
| 05ep10815_4195292_c1_84 | 4087 | 8849 |
| 24328910 | 4088 | 8850 |
| hp5e15211_24328910_c3_34 | 4089 | 8851 |
| hp5e15211_24328910_c3_38 | 4090 | 8852 |
| hp5e15211orf21 | 4091 | 8853 |
| hp5e15211_819455_c2_24 | 4092 | 8854 |
| hp5e15211orf23 | 4093 | 8855 |
| 11876471 | 4094 | 8856 |
| 04ep41903_11876461_f1_4 | 4095 | 8857 |
| 09ae11601orf4 | 4096 | 8858 |
| 05ae30220_21619067_f3_56 | 4097 | 8859 |
| 05ae20220orf58 | 4098 | 8860 |
| 05ae30220_21720017_f2_23 | 4099 | 8861 |
| 21720017 | 4100 | 8862 |
| 05ae20220orf24 | 4101 | 8863 |
| 05ae30220_24410643_c1_79 | 4102 | 8864 |
| 24410643 | 4103 | 8865 |
| 05ae20220orf92 | 4104 | 8866 |
| hpy05ae20220orf_0031.aa | 4105 | 8867 |
| hpy05ae20220orf_0030.aa | 4106 | 8868 |
| 05ae30220_24415693_c3_175 | 4107 | 8869 |
| 05ae30220_24882812_c3_103 | 4108 | 8870 |
| 05ae20220orf119 | 4109 | 8871 |
| 05ae30220_25953163_c3_98 | 4110 | 8872 |
| 05ae20220orf95 | 4111 | 8873 |
| 4882318 | 4112 | 8874 |
| 14ep11115orf2 | 4113 | 8875 |
| 14ep11115orf1 | 4114 | 8876 |
| 11ee11408_4882318_f3_24 | 4115 | 8877 |
| 05ae30220_80257_f3_46 | 4116 | 8878 |
| 80257 | 4117 | 8879 |
| 05ae20220orf50 | 4118 | 8880 |
| 02ce10213orf5 | 4119 | 8881 |
| 24276587 | 4120 | 8882 |
| 02ce10213orf20 | 4121 | 8883 |
| 02ce10213orf11 | 4122 | 8884 |
| hp5p15212_24276587_f1_2 | 4123 | 8885 |
| hp5p15212_34064750_f2_9 | 4124 | 8886 |
| 02ce10213orf19 | 4125 | 8887 |
| hpy11ce10908orf_0002.aa | 4126 | 8888 |
| 11ce10908orf1 | 4127 | 8889 |
| hpy11ce10908orf_0001.aa | 4128 | 8890 |
| hp5p15212_6928132_c3_34 | 4129 | 8891 |
| 12ae11404orf9 | 4130 | 8892 |
| 12ae11404orf3 | 4131 | 8893 |
| 12ae11404_22303918_f3_6 | 4132 | 8894 |
| 22303918 | 4133 | 8895 |
| 3166040 | 4134 | 8896 |
| 09ae10512_3166040_c1_40 | 4135 | 8897 |
| hp3e11060orf9 | 4136 | 8898 |
| 32462543 | 4137 | 8899 |
| 01ae12001_32462543_c2_43 | 4138 | 8900 |
| 07gp11807orf32 | 4139 | 8901 |
| 34161500 | 4140 | 8902 |
| 719606 | 4141 | 8903 |
| 07gp11807orf54 | 4142 | 8904 |
| 07gp11807orf42 | 4143 | 8905 |
| 06ap10609_3952_c3_55 | 4144 | 8906 |
| 06ap11119_16594193_f1_9 | 4145 | 8907 |
| 11ge10309orf7 | 4146 | 8908 |
| hp6p10723orf7 | 4147 | 8909 |
| 06ap11119_24406401_f3_23 | 4148 | 8910 |
| 11ge10309orf25 | 4149 | 8911 |
| 06ap11119_24406401_f3_23 | 4150 | 8912 |
| 24406401 | 4151 | 8913 |
| 06cp11118orf7 | 4152 | 8914 |
| 06cp11118_212827_c1_17 | 4153 | 8915 |
| 04ce11617orf4 | 4154 | 8916 |
| hpyhp1p11256orf_0002.aa | 4155 | 8917 |
| 05ee10816_14649077_f3_18 | 4156 | 8918 |
| 06ep10615_14649077_f2_30 | 4157 | 8919 |
| 06ep10615_14649077_f3_52 | 4158 | 8920 |
| hp6e10967_23476502_f2_6 | 4159 | 8921 |
| hp2p10625orf5 | 4160 | 8922 |
| hp6e10967_24882750_f2_7 | 4161 | 8923 |
| hp2p10625orf6 | 4162 | 8924 |
| 04ce11617orf10 | 4163 | 8925 |
| 05ee10816_259703_f2_7 | 4164 | 8926 |
| 21687842 | 4165 | 8927 |
| 06ep11202_21687842_c3_35 | 4166 | 8928 |
| hp2e11858orf5 | 4167 | 8929 |
| 06gp10409_4015687_f2_11 | 4168 | 8930 |
| 14cp10119orf1 | 4169 | 8931 |
| 04cp11202_16603425_c2_72 | 4170 | 8932 |
| 04ge11713orf10 | 4171 | 8933 |
| 04cp11202_19797128_f1_5 | 4172 | 8934 |
| 04cp11202_24261588_f2_23 | 4173 | 8935 |
| 06gp71906_24261588_c2_174 | 4174 | 8936 |
| 01ae12021orf5 | 4175 | 8937 |
| 29386577 | 4176 | 8938 |
| 12gp31106_29386577_f2_24 | 4177 | 8939 |
| 13ap11517orf7 | 4178 | 8940 |
| 12gp31106_3024126_f2_25 | 4179 | 8941 |
| 13ap11517orf15 | 4180 | 8942 |
| 12gp31106_24411308_f1_13 | 4181 | 8943 |
| 13ap11517orf10 | 4182 | 8944 |
| 06gp71906_25401078_c2_155 | 4183 | 8945 |
| 06gp71906_3024126_c1_128 | 4184 | 8946 |
| 09cp20502_24001388_c1_31 | 4185 | 8947 |
| 14gp11820orf1 | 4186 | 8948 |
| 14ap10815_16603418_c3_26 | 4187 | 8949 |
| 16603418 | 4188 | 8950 |
| hp3e10349orf24 | 4189 | 8951 |
| 14ap10815_23439055_c2_21 | 4190 | 8952 |
| 23439055 | 4191 | 8953 |
| hp3e10349orf17 | 4192 | 8954 |
| 07ap11111_234693_c3_14 | 4193 | 8955 |
| 07ap11111orf13 | 4194 | 8956 |
| hpyhp2e10911orf_0017.aa | 4195 | 8957 |
| hpyhp2e10911orf_0016.aa | 4196 | 8958 |
| hp2e10911_10213593_c1_73 | 4197 | 8959 |
| hpy01cp11108orf_0002.aa | 4198 | 8960 |
| hpy01cp11108orf_0001.aa | 4199 | 8961 |
| hp2e10911orf24 | 4200 | 8962 |
| hp2e10911orf25 | 4201 | 8963 |
| hp2e10911_35567005_c2_88 | 4202 | 8964 |
| 07ap11213_35401528_c1_21 | 4203 | 8965 |
| 07ee50709_10213593_f3_77 | 4204 | 8966 |
| 02ae31010_16833312_f2_19 | 4205 | 8967 |
| 02ce11022orf2 | 4206 | 8968 |
| 29ge10307orf4 | 4207 | 8969 |
| hp5p15641_24304527_c3_35 | 4208 | 8970 |
| 29ge10307orf3 | 4209 | 8971 |
| hp5p15641_25635452_c3_34 | 4210 | 8972 |
| hp1p13947orf11 | 4211 | 8973 |
| 01ce11618orf1 | 4212 | 8974 |
| hpy01ce11618orf_0001.aa | 4213 | 8975 |
| 02ae31010_34616666_f2_27 | 4214 | 8976 |
| 01ep11504orf5 | 4215 | 8977 |
| hpy01ep11504orf_0005.aa | 4216 | 8978 |
| 02ae31010_35270000_f3_33 | 4217 | 8979 |
| 01ce11618orf3 | 4218 | 8980 |
| 01ce11618orf13 | 4219 | 8981 |
| 02ae31010_36132785_f2_29 | 4220 | 8982 |
| 01cp11108orf6 | 4221 | 8983 |
| hpy01cp11108orf_0006.aa | 4222 | 8984 |
| hpy01cp11108orf_0005.aa | 4223 | 8985 |
| hpy01cp11108orf_0004.aa | 4224 | 8986 |
| 11cp12006orf17 | 4225 | 8987 |
| hp2e10911_960952_c2_86 | 4226 | 8988 |
| 291700 | 4227 | 8989 |
| hp2e10911_13871077_c3_97 | 4228 | 8990 |
| hp2e10911_4882027_c2_87 | 4229 | 8991 |
| hpy11cp12006orf_0001.aa | 4230 | 8992 |
| 07ee50709_960952_f2_47 | 4231 | 8993 |
| 35336707 | 4232 | 8994 |
| 02ce10216orf2 | 4233 | 8995 |
| 02ce10216orf1 | 4234 | 8996 |
| 09ce10413_35336707_f2_9 | 4235 | 8997 |
| 09ce10413_414011_f1_3 | 4236 | 8998 |
| 02ce10216orf6 | 4237 | 8999 |
| 02ce10216orf7 | 4238 | 9000 |
| 02ce10216orf4 | 4239 | 9001 |
| hpy02ce10216orf_0007.aa | 4240 | 9002 |
| 09ce10413_5865665_f1_4 | 4241 | 9003 |
| 09ce52017_29324062_c1_21 | 4242 | 9004 |
| 01ep30520orf24 | 4243 | 9005 |
| 03ge10505orf6 | 4244 | 9006 |
| hpy11cp71403orf_0002.aa | 4245 | 9007 |
| 09ze10333_1457137_f3_11 | 4246 | 9008 |
| 06cp30603_10744075_c3_136 | 4247 | 9009 |
| hpy04gp11213orf_0010.aa | 4248 | 9010 |
| hp6e20339_1190660_c2_46 | 4249 | 9011 |
| 04gp11213orf22 | 4250 | 9012 |
| 06cp30603_21492187_f2_41 | 4251 | 9013 |
| hp6e20339_21492187_c1_40 | 4252 | 9014 |
| 04gp11213orf14 | 4253 | 9015 |
| 23912707 | 4254 | 9016 |
| 09cp10713_23912707_c1_27 | 4255 | 9017 |
| 09cp10713_23912707_c1_26 | 4256 | 9018 |
| 09cp10713orf25 | 4257 | 9019 |
| 06cp30603_2772578_c1_46 | 4258 | 9020 |
| 2843912 | 4259 | 9021 |
| 05cp20518orf41 | 4260 | 9022 |
| 06cp30603_2772578_c2_117 | 4261 | 9023 |
| hp6e20339_34024187_c1_37 | 4262 | 9024 |
| 04gp11213orf11 | 4263 | 9025 |
| hp6e20339_24317062_c3_57 | 4264 | 9026 |
| 04gp11213orf5 | 4265 | 9027 |
| 06cp30603_34024187_f1_20 | 4266 | 9028 |
| 09cp10713_34024187_f1_31 | 4267 | 9029 |
| 06cp30603_4689068_c3_79 | 4268 | 9030 |
| 06cp30603orf15 | 4269 | 9031 |
| 12ge10321_24308513_f3_20 | 4270 | 9032 |
| 06gp11920orf11 | 4271 | 9033 |
| 06gp11920orf7 | 4272 | 9034 |
| 06gp11920orf6 | 4273 | 9035 |
| 12ae10622_30273255_f1_13 | 4274 | 9036 |
| 03ae10804_23485968_c3_47 | 4275 | 9037 |
| 06ep10306orf5 | 4276 | 9038 |
| 03ae10804_16187640_c2_36 | 4277 | 9039 |
| 06ep10306orf15 | 4278 | 9040 |
| hp1e80523_23485968_c2_49 | 4279 | 9041 |
| 01ge11619_22448587_c1_9 | 4280 | 9042 |
| hp3e10342_22448587_c2_15 | 4281 | 9043 |
| hpy06ep11108orf_0007.aa | 4282 | 9044 |
| 06ep11108orf17 | 4283 | 9045 |
| hp4e13394_35957200_f1_21 | 4284 | 9046 |
| hp4e13394_5088562_f3_54 | 4285 | 9047 |
| 7116626 | 4286 | 9048 |
| hp4e13394_5908553_f1_1 | 4287 | 9049 |
| hp4e13394orf2 | 4288 | 9050 |
| 1416312 | 4289 | 9051 |
| 03ee11215_1416312_c3_35 | 4290 | 9052 |
| 03ee11215orf30 | 4291 | 9053 |
| hp4e53394_1416312_c3_119 | 4292 | 9054 |
| 22542803 | 4293 | 9055 |
| 03ee11215_22542803_f1_7 | 4294 | 9056 |
| 03ee11215orf10 | 4295 | 9057 |
| 23631292 | 4296 | 9058 |
| 05ce10208_23631292_f1_6 | 4297 | 9059 |
| 14cp11121orf6 | 4298 | 9060 |
| 05ce10208_26423583_c3_22 | 4299 | 9061 |
| 26423583 | 4300 | 9062 |
| hp1p13939orf9 | 4301 | 9063 |
| hpyhp1p13939orf_0004.aa | 4302 | 9064 |
| 05ce10208_4707035_c2_17 | 4303 | 9065 |
| hpy05ee10411orf_0002.aa | 4304 | 9066 |
| 06ep30223_176437_c2_134 | 4305 | 9067 |
| 2445812 | 4306 | 9068 |
| 06ep30223_2774062_f1_33 | 4307 | 9069 |
| hp3e11024orf22 | 4308 | 9070 |
| hp2e10229orf4 | 4309 | 9071 |
| 06ep30223_5271902_c1_106 | 4310 | 9072 |
| 02ae11612_1074212_f1_1 | 4311 | 9073 |
| 02ae11612orf1 | 4312 | 9074 |
| 01ce11104_10742963_c2_12 | 4313 | 9075 |
| 16ep10117orf8 | 4314 | 9076 |
| 10742963 | 4315 | 9077 |
| 02ae11612_23598175_f1_2 | 4316 | 9078 |
| 02ae11612orf15 | 4317 | 9079 |
| 02ae11612_24609431_f1_17 | 4318 | 9080 |
| 24609431 | 4319 | 9081 |
| 05cp11911orf12 | 4320 | 9082 |
| 05cp11911orf35 | 4321 | 9083 |
| hpy11ee10118orf_0002.aa | 4322 | 9084 |
| 01ce21104_33203250_c3_87 | 4323 | 9085 |
| 02ae11612_33203250_c1_51 | 4324 | 9086 |
| 02ae11612_35704718_f2_21 | 4325 | 9087 |
| 35704718 | 4326 | 9088 |
| 02ae11612orf4 | 4327 | 9089 |
| hp1e10523orf3 | 4328 | 9090 |
| 01ce11104_36125337_c1_8 | 4329 | 9091 |
| hpy14ce10720orf_0006.aa | 4330 | 9092 |
| hp5p15575_26016387_f2_16 | 4331 | 9093 |
| hp5p15575_6140713_f2_18 | 4332 | 9094 |
| 14ce10720orf12 | 4333 | 9095 |
| 26301059 | 4334 | 9096 |
| hp5p23057_16416459_c2_5 | 4335 | 9097 |
| 09ap10515_36147908_f3_2 | 4336 | 9098 |
| 03ge31106orf1 | 4337 | 9099 |
| hpy02ae11211orf_0008.aa | 4338 | 9100 |
| hpyhp1e13813orf_0001.aa | 4339 | 9101 |
| hp6p12244_4881375_c3_97 | 4340 | 9102 |
| 23564012 | 4341 | 9103 |
| hp6p22217_23564012_f1_5 | 4342 | 9104 |
| 13ee12016orf8 | 4343 | 9105 |
| hp6p22217_272058_f1_2 | 4344 | 9106 |
| 272058 | 4345 | 9107 |
| 13ee12016orf5 | 4346 | 9108 |
| 23958179 | 4347 | 9109 |
| 13ee12016orf15 | 4348 | 9110 |
| hpy13ee12016orf_0014.aa | 4349 | 9111 |
| hp6p22217_2922143_f2_9 | 4350 | 9112 |
| 02gp20814_24230058_f1_2 | 4351 | 9113 |
| 24230058 | 4352 | 9114 |
| 14ee10308orf8 | 4353 | 9115 |
| 06ce20610_29298537_c2_32 | 4354 | 9116 |
| 05gp20111orf4 | 4355 | 9117 |
| 13ae10712_29569208_c2_27 | 4356 | 9118 |
| 13ae10712orf15 | 4357 | 9119 |
| 06ce20610_34647187_c2_33 | 4358 | 9120 |
| hpy05gp20111orf_0004.aa | 4359 | 9121 |
| 06ce20610_3913967_c3_36 | 4360 | 9122 |
| 05gp20111orf6 | 4361 | 9123 |
| hp7e10433_6273452_f1_3 | 4362 | 9124 |
| 01ee211.18orf1 | 4363 | 9125 |
| hp7e10433_36339535_f3_3 | 4364 | 9126 |
| hp7e10433_36339535_f3_3 | 4365 | 9127 |
| 11ae80818_35787667_c2_55 | 4366 | 9128 |
| 03ap21820orf16 | 4367 | 9129 |
| 11ae80818_5953343_c1_46 | 4368 | 9130 |
| 03ap21820orf12 | 4369 | 9131 |
| 11ae80818_783127_c3_63 | 4370 | 9132 |
| 03ap21820orf4 | 4371 | 9133 |
| 14cp11908_783127_c1_72 | 4372 | 9134 |
| 12ap10324orf4 | 4373 | 9135 |
| 12ap10324orf8 | 4374 | 9136 |
| 12ap10324_13178562_f3_6 | 4375 | 9137 |
| 09cp21607_7224187_c2_12 | 4376 | 9138 |
| 07gp31516orf9 | 4377 | 9139 |
| hpy07gp10508orf_0002.aa | 4378 | 9140 |
| hp7e10420_24391078_f1_3 | 4379 | 9141 |
| hp6p10606_15664656_c3_32 | 4380 | 9142 |
| hpy13ep12003orf_0008.aa | 4381 | 9143 |
| hpy13ep12003orf_0007.aa | 4382 | 9144 |
| hp6p10606_19546933_c3_31 | 4383 | 9145 |
| 13ep12003orf21 | 4384 | 9146 |
| hp8e10080_19546933_c2_88 | 4385 | 9147 |
| 23493756 | 4386 | 9148 |
| hp6p10606_23493756_c1_21 | 4387 | 9149 |
| 13ep12003orf20 | 4388 | 9150 |
| 2035936 | 9623 | 9735 |
| 2774062 | 9624 | 9736 |
| 13178562 | 9625 | 9737 |
| D. OTHER CELLULAR PROTEINS | | |
| 24104558 | 4389 | 9151 |
| hp7p10290_12693942_f1_5 | 4390 | 9152 |
| hp3p10156orf12 | 4391 | 9153 |
| 24396937 | 4392 | 9154 |
| hp6p80503_20964382_f2_11 | 4393 | 9155 |
| 01ce11016orf14 | 4394 | 9156 |
| hpyhp3p10156orf_0005.aa | 4395 | 9157 |
| hpyhp3p10156orf_0004.aa | 4396 | 9158 |
| hp3p10156orf3 | 4397 | 9159 |
| hpyhp3p10156orf_0006.aa | 4398 | 9160 |
| hp7p10290_25585941_f3_12 | 4399 | 9161 |
| hp6e12267_4095342_f2_17 | 4400 | 9162 |
| 4095342 | 4401 | 9163 |
| 12ge20305orf30 | 4402 | 9164 |
| 12ge10305orf17 | 4403 | 9165 |
| 12ge10305orf21 | 4404 | 9166 |
| hp6e12267_4875342_c2_49 | 4405 | 9167 |
| 01ge11619_13788141_c2_11 | 4406 | 9168 |
| 11ge10309orf4 | 4407 | 9169 |
| 09ap20802orf22 | 4408 | 9170 |
| 09ap20802orf30 | 4409 | 9171 |
| hp2p10272_21671910_c2_38 | 4410 | 9172 |
| hpy09ap20802orf_0021.aa | 4411 | 9173 |
| hp2p10272_24406280_c1_26 | 4412 | 9174 |
| 09ap20802orf21 | 4413 | 9175 |
| 32704686 | 4414 | 9176 |
| 09ap20802orf5 | 4415 | 9177 |
| hp2p10272_34042518_f1_2 | 4416 | 9178 |
| 09ap20802orf8 | 4417 | 9179 |
| 09ap20802orf1 | 4418 | 9180 |
| hp2p10272_3906568_f3_23 | 4419 | 9181 |
| 29ep10720_24220926_f2_8 | 4420 | 9182 |
| hp4e12063orf1 | 4421 | 9183 |
| 11ge10309orf56 | 4422 | 9184 |
| 12ae10224orf1 | 4423 | 9185 |
| 11ge10309orf66 | 4424 | 9186 |
| 29ep10720_24495312_c1_28 | 4425 | 9187 |
| 06ge10115orf19 | 4426 | 9188 |
| 02gp20706_23866562_c2_53 | 4427 | 9189 |
| 14ae10212orf1 | 4428 | 9190 |
| hpy14ae10212orf_0001.aa | 4429 | 9191 |
| 01cp11710orf33 | 4430 | 9192 |
| 02gp20706_6644630_c3_62 | 4431 | 9193 |
| 02gp20706_4083212_c1_43 | 4432 | 9194 |
| 02ge10116_23866562_c3_146 | 4433 | 9195 |
| 02ge10116_36617176_f1_7 | 4434 | 9196 |
| 02ge20116orf19 | 4435 | 9197 |
| 05ep20322orf4 | 4436 | 9198 |
| 05ep20322orf10 | 4437 | 9199 |
| 05ep20322orf2 | 4438 | 9200 |
| hp6p12311_4111712_c1_8 | 4439 | 9201 |
| 02gp20706_4491093_c1_39 | 4440 | 9202 |
| 4491093 | 4441 | 9203 |
| 06ge10115orf12 | 4442 | 9204 |
| 914087 | 4443 | 9205 |
| 02ge11622_25428152_c1_52 | 4444 | 9206 |
| 13ee10216orf55 | 4445 | 9207 |
| 6136430 | 4446 | 9208 |
| 06ee10709_6136430_c1_11 | 4447 | 9209 |
| 06ee10709orf17 | 4448 | 9210 |
| 06ae11405orf8 | 4449 | 9211 |
| 22687687 | 4450 | 9212 |
| 06ae11405orf10 | 4451 | 9213 |
| 05ep10815_2087568_c3_101 | 4452 | 9214 |
| hpy07cp10312orf_0007.aa | 4453 | 9215 |
| hp3e10185_42813_f3_4 | 4454 | 9216 |
| hp6p30249_42813_c1_6 | 4455 | 9217 |
| 01ae11010_26437877_c2_52 | 4456 | 9218 |
| hpyhp4e14522orf_0003.aa | 4457 | 9219 |
| 01ae11010_5891077_c3_56 | 4458 | 9220 |
| hpyhp4e14522orf_0004.aa | 4459 | 9221 |
| hp4p33322_5891077_c2_45 | 4460 | 9222 |
| 05ep10815_9785327_c1_80 | 4461 | 9223 |
| 01xe21717orf20 | 4462 | 9224 |
| 5312712 | 4463 | 9225 |
| 24329712 | 4464 | 9226 |
| hp5e15211_25411557_c1_22 | 4465 | 9227 |
| hp5e15211orf29 | 4466 | 9228 |
| 29ep10720_24432762_c3_39 | 4467 | 9229 |
| 11ge10309orf39 | 4468 | 9230 |
| 14ce31519orf3 | 4469 | 9231 |
| 15039062 | 4470 | 9232 |
| 11ee11408_15039062_c1_35 | 4471 | 9233 |
| 05gp11901orf20 | 4472 | 9234 |
| 07ap80601_24219012_f2_6 | 4473 | 9235 |
| 24219012 | 4474 | 9236 |
| 07ap80601orf12 | 4475 | 9237 |
| hpy05ae20220orf_0028.aa | 4476 | 9238 |
| 05ae30220_4548792_f2_27 | 4477 | 9239 |
| 4548792 | 4478 | 9240 |
| 05ae20220orf6 | 4479 | 9241 |
| 5078593 | 4480 | 9242 |
| 07ap80601_5078593_f1_4 | 4481 | 9243 |
| 07ap80601orf10 | 4482 | 9244 |
| 05ae30220_54628_c1_116 | 4483 | 9245 |
| hp3p21118_54628_c3_3 | 4484 | 9246 |
| hpy05ae20220orf_0024.aa | 4485 | 9247 |
| hpy02ce10213orf_0023.aa | 4486 | 9248 |
| 02ce10213orf32 | 4487 | 9249 |
| 02ce10213orf22 | 4488 | 9250 |
| hp5p15212_24219500_c1_22 | 4489 | 9251 |
| 35417942 | 4490 | 9252 |
| 12ae11404_24789202_f1_2 | 4491 | 9253 |
| 12ae11404orf8 | 4492 | 9254 |
| 03ce21717orf1 | 4493 | 9255 |
| 06ae11016_30579712_f2_21 | 4494 | 9256 |
| 01ae12001_6490640_c1_34 | 4495 | 9257 |
| 01ae12001_3952_c3_52 | 4496 | 9258 |
| 14726542 | 4497 | 9259 |
| 06ap11119_14726542_f3_21 | 4498 | 9260 |
| hp6p10723orf5 | 4499 | 9261 |
| 06ap11119_23831562_f2_14 | 4500 | 9262 |
| 23831562 | 4501 | 9263 |
| hp6p10723orf20 | 4502 | 9264 |
| 32952 | 4503 | 9265 |
| hp6e10967_32952_c2_20 | 4504 | 9266 |
| hp2p10625orf28 | 4505 | 9267 |
| 6495137 | 4506 | 9268 |
| hp6e10967_657638_f3_9 | 4507 | 9269 |
| hp2p10625orf8 | 4508 | 9270 |
| 02ae21214orf1 | 4509 | 9271 |
| hpy02ae21214orf_0001.aa | 4510 | 9272 |
| hp2e11858orf6 | 4511 | 9273 |
| 06ep11202_26353438_c1_22 | 4512 | 9274 |
| 4569693 | 4513 | 9275 |
| 06ep11202_4569693_c2_28 | 4514 | 9276 |
| 06cp20302orf8 | 4515 | 9277 |
| 06cp20302orf6 | 4516 | 9278 |
| 06cp20302orf7 | 4517 | 9279 |
| 06ep11202_792962_c1_18 | 4518 | 9280 |
| 06cp20302orf2 | 4519 | 9281 |
| 06ep11202_792962_c2_26 | 4520 | 9282 |
| 06gp71906_15115637_f2_59 | 4521 | 9283 |
| hp4p11393orf2 | 4522 | 9284 |
| hpy06ap10209orf_0002.aa | 4523 | 9285 |
| hpy02cp11822orf_0001.aa | 4524 | 9286 |
| 06ap10209orf4 | 4525 | 9287 |
| 06ap10209orf1 | 4526 | 9288 |
| hpy06ap10209orf_0001.aa | 4527 | 9289 |
| 04cp11202_23553177_c1_75 | 4528 | 9290 |
| 04cp11202_23553177_c3_109 | 4529 | 9291 |
| hpy13ee11718orf_0003.aa | 4530 | 9292 |
| hpy13ee11718orf_0002.aa | 4531 | 9293 |
| 1038312 | 4532 | 9294 |
| 13ee11718orf2 | 4533 | 9295 |
| 06gp71906_24348416_f2_61 | 4534 | 9296 |
| 3991067 | 4535 | 9297 |
| 04cp11202_24413202_c1_65 | 4536 | 9298 |
| 04ge11713orf41 | 4537 | 9299 |
| 5111308 | 4538 | 9300 |
| 04cp11202_5350012_c2_85 | 4539 | 9301 |
| 04ge11713orf27 | 4540 | 9302 |
| hpyhp1p13868orf_0003.aa | 4541 | 9303 |
| hpyhp1p13868orf_0004.aa | 4542 | 9304 |
| 07cp10312orf9 | 4543 | 9305 |
| 391313 | 4544 | 9306 |
| 14ee41924_236712_f2_31 | 4545 | 9307 |
| 11ce10917orf9 | 4546 | 9308 |
| 4572168 | 4547 | 9309 |
| hp5p15861_4572168_f3_12 | 4548 | 9310 |
| 02cp20821orf8 | 4549 | 9311 |
| hp2e10911_15680337_c3_105 | 4550 | 9312 |
| hpyhp2e10911orf_0011.aa | 4551 | 9313 |
| hp5p15641orf5 | 4552 | 9314 |
| hp5p15612orf3 | 4553 | 9315 |
| hp5p15641_21563752_f2_10 | 4554 | 9316 |
| hpy01ce11618orf_0017.aa | 4555 | 9317 |
| 01ce11618orf9 | 4556 | 9318 |
| 29ge30321_21673965_f2_7 | 4557 | 9319 |
| 01ce11618orf11 | 4558 | 9320 |
| 01ce11618orf27 | 4559 | 9321 |
| 29ge30321_24336712_f1_5 | 4560 | 9322 |
| hp2e10911_24804577_c3_104 | 4561 | 9323 |
| hpyhp2e10911orf_0012.aa | 4562 | 9324 |
| 05ce10613orf2 | 4563 | 9325 |
| 05ce10613orf1 | 4564 | 9326 |
| hpy05ce10613orf_0002.aa | 4565 | 9327 |
| hp5p15641_30273312_c2_28 | 4566 | 9328 |
| hpy11ae10212orf_0001.aa | 4567 | 9329 |
| hp2e10911_32234750_c1_68 | 4568 | 9330 |
| hp1e10506orf6 | 4569 | 9331 |
| 17787558 | 4570 | 9332 |
| hp5p15641_3907968_f1_3 | 4571 | 9333 |
| hp5p15641orf12 | 4572 | 9334 |
| 05ap10914orf3 | 4573 | 9335 |
| hpy05ap10914orf_0001.aa | 4574 | 9336 |
| hp5p15641_5211687_c2_29 | 4575 | 9337 |
| 06cp11217_4897077_f1_6 | 4576 | 9338 |
| hp1p13852orf4 | 4577 | 9339 |
| hp6p10904_2214676_c1_14 | 4578 | 9340 |
| hp4p13446orf3 | 4579 | 9341 |
| hp6p10904_23704412_f2_5 | 4580 | 9342 |
| hp4p13446orf13 | 4581 | 9343 |
| hp6p10904_7089062_c1_16 | 4582 | 9344 |
| hp4p13446orf5 | 4583 | 9345 |
| hp4p13402orf2 | 4584 | 9346 |
| hpyhp4p13402orf_0004.aa | 4585 | 9347 |
| 1256885 | 4586 | 9348 |
| hp4p13402orf1 | 4587 | 9349 |
| 09cp10224_24317005_c3_53 | 4588 | 9350 |
| 06cp30603_26070252_c3_140 | 4589 | 9351 |
| 23573294 | 4590 | 9352 |
| 06cp30603_33984562_c2_56 | 4591 | 9353 |
| 05cp20518orf50 | 4592 | 9354 |
| hpy04gp11213orf_0021.aa | 4593 | 9355 |
| 24414687 | 4594 | 9356 |
| hp6e20339_4017188_f1_1 | 4595 | 9357 |
| 25925 | 4596 | 9358 |
| 12ae10622orf16 | 4597 | 9359 |
| 12ae10622_4726568_c2_61 | 4598 | 9360 |
| 03ae10804_235286_f3_19 | 4599 | 9361 |
| 09ge11604_4804692_c1_8 | 4600 | 9362 |
| hpy05ap11505orf_0005.aa | 4601 | 9363 |
| hp2p10610_21987687_c2_5 | 4602 | 9364 |
| 01ge11619_23711062_c3_14 | 4603 | 9365 |
| 11ge10309orf12 | 4604 | 9366 |
| 01ge11619_24415880_c2_12 | 4605 | 9367 |
| 11ge10309orf5 | 4606 | 9368 |
| 01ge11619_24417813_c1_8 | 4607 | 9369 |
| 11ge10309orf24 | 4608 | 9370 |
| hpyhp3p10807orf_0005.aa | 4609 | 9371 |
| hp3p10807_29343768_f1_1 | 4610 | 9372 |
| hp3p10807orf4 | 4611 | 9373 |
| hp3p10807_29352212_f2_5 | 4612 | 9374 |
| hp3p10807orf7 | 4613 | 9375 |
| hp3e11188_5082842_f3_12 | 4614 | 9376 |
| 06ee11611orf1 | 4615 | 9377 |
| hp4e13394_26182793_f2_45 | 4616 | 9378 |
| hpy06ep11108orf_0004.aa | 4617 | 9379 |
| hpy03ee11215orf_0001.aa | 4618 | 9380 |
| hpyhp3e10975orf_0005.aa | 4619 | 9381 |
| hp4e53394_2082126_c2_102 | 4620 | 9382 |
| hp3e11168orf35 | 4621 | 9383 |
| 05ce10208_5211002_c2_15 | 4622 | 9384 |
| 14cp11121orf10 | 4623 | 9385 |
| 01ge10203orf14 | 4624 | 9386 |
| 01ge10203orf7 | 4625 | 9387 |
| 01ge10203_35281542_c3_16 | 4626 | 9388 |
| hp4p62853_5914693_c3_52 | 4627 | 9389 |
| 01ge10203_860166_f3_9 | 4628 | 9390 |
| 01ge10203orf6 | 4629 | 9391 |
| hp1e10506orf2 | 4630 | 9392 |
| 06ce11002orf3 | 4631 | 9393 |
| 06ce11002orf8 | 4632 | 9394 |
| 06ce11002_194415_f2_4 | 4633 | 9395 |
| 06ep30223_25402187_c1_112 | 4634 | 9396 |
| 3930468 | 4635 | 9397 |
| hpy02ce11220orf_0003.aa | 4636 | 9398 |
| 02ce11220orf2 | 4637 | 9399 |
| 06ep30223_3930468_c1_110 | 4638 | 9400 |
| 06ep30223_4876077_c3_149 | 4639 | 9401 |
| hp3e11024orf34 | 4640 | 9402 |
| hp6e10491_12712706_f3_12 | 4641 | 9403 |
| hpyhp5e15084orf_0002.aa | 4642 | 9404 |
| 30703183 | 4643 | 9405 |
| hp6p10509_12600691_c3_22 | 4644 | 9406 |
| 16ae10508orf14 | 4645 | 9407 |
| 14642217 | 4646 | 9408 |
| 16ae10508orf13 | 4647 | 9409 |
| hp6p10509_14642217_c2_17 | 4648 | 9410 |
| hp6p10509_14642217_c3_25 | 4649 | 9411 |
| hpy04ee70114orf_0001.aa | 4650 | 9412 |
| 04ee70114orf10 | 4651 | 9413 |
| hp6p10590_23440913_c2_31 | 4652 | 9414 |
| hp6p10847_26194552_f2_1 | 4653 | 9415 |
| 14094816 | 4654 | 9416 |
| 12ap10605_14094816_c1_5 | 4655 | 9417 |
| 29gp10119orf6 | 4656 | 9418 |
| hpyhp3e10302orf_0016.aa | 4657 | 9419 |
| hp3e10302orf26 | 4658 | 9420 |
| hp6p12129_16603417_f3_14 | 4659 | 9421 |
| hp6p12129_12542880_c3_29 | 4660 | 9422 |
| hpy04ep10515orf_0001.aa | 4661 | 9423 |
| hp6p12129_17067265_c3_29 | 4662 | 9424 |
| hp6p12129_214055_f1_2 | 4663 | 9425 |
| hp6p12129_214055_f3_17 | 4664 | 9426 |
| hpy29gp10119orf_0003.aa | 4665 | 9427 |
| 12ap10605_30603402_c1_4 | 4666 | 9428 |
| 30603402 | 4667 | 9429 |
| 29gp10119orf5 | 4668 | 9430 |
| hp6p12244_33492712_c3_88 | 4669 | 9431 |
| hp6p12244_32458287_c3_90 | 4670 | 9432 |
| hp5p15653orf3 | 4671 | 9433 |
| hp5p15653orf1 | 4672 | 9434 |
| hp5p15653orf2 | 4673 | 9435 |
| hpyhp5p15653orf_0001.aa | 4674 | 9436 |
| hp4p12005orf2 | 4675 | 9437 |
| hp6p12244_3948467_c1_52 | 4676 | 9438 |
| hp6p12244_3948467_c3_88 | 4677 | 9439 |
| hp6p22217_23470967_f1_4 | 4678 | 9440 |
| 13ee12016orf7 | 4679 | 9441 |
| 01ae11421orf6 | 4680 | 9442 |
| 01ae11421orf1 | 4681 | 9443 |
| 03ge10505orf1 | 4682 | 9444 |
| hpy03ge10505orf_0001.aa | 4683 | 9445 |
| 13ae10712_24415957_f2_13 | 4684 | 9446 |
| 12ap11614_26054702_c1_8 | 4685 | 9447 |
| hp7e10429_26054702_f3_23 | 4686 | 9448 |
| 12ap11614orf8 | 4687 | 9449 |
| 26054702 | 4688 | 9450 |
| 07ge20415orf6 | 4689 | 9451 |
| 24634750 | 4690 | 9452 |
| 14ce21516_24634750_f2_3 | 4691 | 9453 |
| 14ce21516orf3 | 4692 | 9454 |
| hp7e10192_4412568_f2_5 | 4693 | 9455 |
| 02ce10114orf3 | 4694 | 9456 |
| 16440842 | 4695 | 9457 |
| 02ce10114orf1 | 4696 | 9458 |
| hp7e10192_5917593_f1_2 | 4697 | 9459 |
| 02ep20506_24611325_f2_6 | 4698 | 9460 |
| 01ce11513orf17 | 4699 | 9461 |
| hp7p10287_24611325_c2_24 | 4700 | 9462 |
| 07gp10508orf4 | 4701 | 9463 |
| hpy07gp10508orf_0003.aa | 4702 | 9464 |
| hp3p10349orf16 | 4703 | 9465 |
| 02ce41018_25509687_f3_18 | 4704 | 9466 |
| hp5e15440orf19 | 4705 | 9467 |
| 489057 | 9626 | 9738 |
| 5879160 | 9627 | 9739 |
| 2738378 | 9628 | 9740 |
| 24495312 | 9629 | 9741 |
| 16839562 | 9630 | 9742 |
| 21563752 | 9631 | 9743 |
| 194415 | 9632 | 9744 |
| 24300682 | 9633 | 9745 |
| 12897656 | 9634 | 9746 |
| 36594167 | 9635 | 9747 |
| 4492217 | 9636 | 9748 |
| E. MEMBRANE ASSOCIATED PROTEINS | | |
| 09cp61003_1410927_f1_14 | 4706 | 9468 |
| 09cp61003_5079842_c3_112 | 4707 | 9469 |
| 01ce61016_4960283_c2_142 | 4708 | 9470 |
| 09cp61003_78267_c1_61 | 4709 | 9471 |
| 02ge10116_34584465_c3_160 | 4710 | 9472 |
| 02ge41622_14875000_c1_53 | 4711 | 9473 |
| hpy13ee10216orf_0032.aa | 4712 | 9474 |
| 07gp10513_167167_f3_2 | 4713 | 9475 |
| 27ze10351orf8 | 4714 | 9476 |
| hpy27ze10351orf_0014.aa | 4715 | 9477 |
| 05ae30220_19728437_c1_102 | 4716 | 9478 |
| 05ae30220_24244512_c3_172 | 4717 | 9479 |
| hpy05ae20220orf_0037.aa | 4718 | 9480 |
| 05ae30220_26758552_c2_157 | 4719 | 9481 |
| hpy05ae20220orf_0005.aa | 4720 | 9482 |
| 06ap10609_2738188_f3_30 | 4721 | 9483 |
| 07gp11807orf24 | 4722 | 9484 |
| hpy07gp11807orf_0014.aa | 4723 | 9485 |
| hpy07gp11807orf_0015.aa | 4724 | 9486 |
| 06ap10609_31359837_c3_54 | 4725 | 9487 |
| hpy07gp11807orf_0011.aa | 4726 | 9488 |
| hpy07gp11807orf_0012.aa | 4727 | 9489 |
| 06ap10609_99192_c2_45 | 4728 | 9490 |
| hpyhp6p10723orf_0004.aa | 4729 | 9491 |
| hpyhp6p10723orf_0005.aa | 4730 | 9492 |
| 06ap11119_16495313_c1_36 | 4731 | 9493 |
| 06ep10615_25665908_f1_10 | 4732 | 9494 |
| 06gp71906_24417581_f3_93 | 4733 | 9495 |
| hpy04ge11713orf_0012.aa | 4734 | 9496 |
| hpy11ep12011orf_0002.aa | 4735 | 9497 |
| 06gp71906_32219827_c1_125 | 4736 | 9498 |
| hpy12gp11106orf_0009.aa | 4737 | 9499 |
| 06gp71906_34157561_f3_115 | 4738 | 9590 |
| 09cp10707_23541676_f2_1 | 4739 | 9501 |
| 07ae11008_4472192_f2_19 | 4740 | 9502 |
| 14gp11820orf28 | 4741 | 9503 |
| 07ap61111_23540930_c2_82 | 4742 | 9504 |
| hpyhp1p13868orf_0005.aa | 4743 | 9505 |
| 07ap61111_26678562_f1_14 | 4744 | 9506 |
| hp3e10349orf1 | 4745 | 9507 |
| 07cp10312_5880188_f1_1 | 4746 | 9508 |
| 02ae31010_24040901_c3_103 | 4747 | 9509 |
| 02ae31010_992092_f3_39 | 4748 | 9510 |
| hpyhp1p13947orf_0012.aa | 4749 | 9511 |
| 09cp10224_3209752_c1_40 | 4750 | 9512 |
| hpy01ce10516orf_0004.aa | 4751 | 9513 |
| 06cp30603_3985338_c3_126 | 4752 | 9514 |
| 13ae10610_23634567_f3_24 | 4753 | 9515 |
| hpy12ee10904orf_0002.aa | 4754 | 9516 |
| hpy05gp11901orf_0008.aa | 4755 | 9517 |
| hpy05gp11901orf_0007.aa | 4756 | 9518 |
| 11ee11408_23447952_c2_41 | 4757 | 9519 |
| hp3e11188_4882056_c3_34 | 4758 | 9520 |
| hpyhp3p10807orf_0004.aa | 4759 | 9521 |
| hp3e11188_4882056_c1_29 | 4760 | 9522 |
| 11ap20714_4900017_c2_81 | 4761 | 9523 |
| 05ap21216orf23 | 4762 | 9524 |

[0217] [In Table 1, “nt” represents nucleotide Seq. ID number and “aa” represents amino acid Seq. ID number]

[0218] Definitions

[0219] The terms “purified polypeptide” and “isolated polypeptide” and “a substantially pure preparation of a polypeptide” are used interchangeably herein and, as used herein, mean a polypeptide that has been substantially, and preferably completely, separated from other proteins, lipids, and nucleic acids with which it naturally occurs. Preferably, the polypeptide is also separated from substances, e.g., antibodies or gel matrix, e.g., polyacrylamide, which are used to purify it. Preferably, the polypeptide constitutes at least 10, 20, 50, 70, 80 or 95% dry weight of the purified preparation. Preferably, the preparation contains: sufficient polypeptide to allow protein sequencing; at least 1, 10, or 100 μg of the polypeptide; at least 1, 10, or 100 mg of the polypeptide. Furthermore, the terms “purified polypeptide” and “isolated polypeptide” and “a substantially pure preparation of a polypeptide,” as used herein, refer to both a polypeptide obtained from nature or produced by recombinant DNA techniques as described herein.

[0220] For example, an “isolated” or “purified” protein or biologically active portion thereof is substantially free of cellular material or other contaminating proteins from the cell or tissue source from which the H. pylori protein is derived, or substantially free from chemical precursors or other chemicals when chemically synthesized. The language “substantially free of cellular material” includes preparations of H. pylori protein in which the protein is separated from cellular components of the cells from which it is isolated or recombinantly produced. In one embodiment, the language “substantially free of cellular material” includes preparations of H. pylori protein having less than about 30% (by dry weight) of non-H. pylori protein (also referred to herein as a “contaminating protein”), more preferably less than about 20% of non-H. pylori protein, still more preferably less than about 10% of non-H. pylori protein, and most preferably less than about 5% non-H. pylori protein. When the H. pylori protein or biologically active portion thereof is recombinantly produced, it is also preferably substantially free of culture medium, i.e., culture medium represents less than about 20%, more preferably less than about 10%, and most preferably less than about 5% of the volume of the protein preparation.

[0221] The language “substantially free of chemical precursors or other chemicals” includes preparations of H. pylori protein in which the protein is separated from chemical precusors or other chemicals which are involved in the synthesis of the protein. In one embodiment, the language “substantially free of chemical precursors or other chemicals” includes preparations of H. pylori protein having less than about 30% (by dry weight) of chemical precursors or non-H. pylori chemicals, more preferably less than about 20% chemical precursors or non-H. pylori chemicals, still more preferably less than about 10% chemical precursors or non-H. pylori chemicals, and most preferably less than about 5% chemical precursors or non-H. pylori chemicals.

[0222] A purified preparation of cells refers to, in the case of plant or animal cells, an in vitro preparation of cells and not an entire intact plant or animal. In the case of cultured cells or microbial cells, it consists of a preparation of at least 10% and more preferably 50% of the subject cells.

[0223] A purified or isolated or a substantially pure nucleic acid, e.g., a substantially pure DNA, (are terms used interchangeably herein) is a nucleic acid which is one or both of the following: not immediately contiguous with both of the coding sequences with which it is immediately contiguous (i.e., one at the 5′ end and one at the 3′ end) in the naturally-occurring genome of the organism from which the nucleic acid is derived; or which is substantially free of a nucleic acid with which it occurs in the organism from which the nucleic acid is derived. The term includes, for example, a recombinant DNA which is incorporated into a vector, e.g., into an autonomously replicating plasmid or virus, or into the genomic DNA of a prokaryote or eukaryote, or which exists as a separate molecule (e.g., a cDNA or a genomic DNA fragment produced by PCR or restriction endonuclease treatment) independent of other DNA sequences. Substantially pure DNA also includes a recombinant DNA which is part of a hybrid gene encoding additional H. pylori DNA sequence.

[0224] A “contig” as used herein is a nucleic acid representing a continuous stretch of genomic sequence of an organism.

[0225] An “open reading frame”, also referred to herein as ORF, is a region of nucleic acid which encodes a polypeptide. This region may represent a portion of a coding sequence or a total sequence and can be determined from a stop to stop codon or from a start to stop codon.

[0226] As used herein, a “coding sequence” is a nucleic acid which is transcribed into messenger RNA and/or translated into a polypeptide when placed under the control of appropriate regulatory sequences. The boundaries of the coding sequence are determined by a translation start codon at the five prime terminus and a translation stop code at the three prime terminus. A coding sequence can include but is not limited to messenger RNA, synthetic DNA, and recombinant nucleic acid sequences.

[0227] A “complement” of a nucleic acid as used herein referes to an anti-parallel or antisense sequence that participates in Watson-Crick base-pairing with the original sequence.

[0228] A “gene product” is a protein or structural RNA which is specifically encoded by a gene.

[0229] As used herein, the term “probe” refers to a nucleic acid, peptide or other chemical entity which specifically binds to a molecule of interest. Probes are often associated with or capable of associating with a label. A label is a chemical moiety capable of detection. Typical labels comprise dyes, radioisotopes, luminescent and chemiluminescent moieties, fluorophores, enzymes, precipitating agents, amplification sequences, and the like. Similarly, a nucleic acid, peptide or other chemical entity which specifically binds to a molecule of interest and immobilizes such molecule is referred herein as a “capture ligand”. Capture ligands are typically associated with or capable of associating with a support such as nitro-cellulose, glass, nylon membranes, beads, particles and the like. The specificity of hybridization is dependent on conditions such as the base pair composition of the nucleotides, and the temperature and salt concentration of the reaction. These conditions are readily discernable to one of ordinary skill in the art using routine experimentation.

[0230] Homologous refers to the sequence similarity or sequence identity between two polypeptides or between two nucleic acid molecules. When a position in both of the two compared sequences is occupied by the same base or amino acid monomer subunit, e.g., if a position in each of two DNA molecules is occupied by adenine, then the molecules are homologous at that position. The percent of homology between two sequences is a function of the number of matching or homologous positions shared by the two sequences divided by the number of positions compared×100. For example, if 6 of 10 of the positions in two sequences are matched or homologous then the two sequences are 60% homologous. By way of example, the DNA sequences ATTGCC and TATGGC share 50% homology. Generally, a comparison is made when two sequences are aligned to give maximum homology.

[0231] Nucleic acids are hybridizable to each other when at least one strand of a nucleic acid can anneal to the other nucleic acid under defined stringency conditions. Stringency of hybridization is determined by: (a) the temperature at which hybridization and/or washing is performed; and (b) the ionic strength and polarity of the hybridization and washing solutions. Hybridization requires that the two nucleic acids contain complementary sequences; depending on the stringency of hybridization, however, mismatches may be tolerated. Typically, hybridization of two sequences at high stingency (such as, for example, in a solution of 0.5×SSC, at 65° C.) requires that the sequences be essentially completely homologous. Conditions of intermediate stringency (such as, for example, 2×SSC at 65° C.) and low stringency (such as, for example 2×SSC at 55° C.), require correspondingly less overall complementarity between the hybridizing sequences. (1×SSC is 0.15 M NaCl, 0.015 M Na citrate). A preferred, non-limiting example of stringent hybridization conditions are hybridization in 6× sodium chloride/sodium citrate (SSC) at about 45° C., followed by one or more washes in 0.2×SSC, 0.1% SDS at 50-65° C.

[0232] The terms peptides, proteins, and polypeptides are used interchangeably herein.

[0233] As used herein, the term “surface protein” refers to all surface accessible proteins, e.g. inner and outer membrane proteins, proteins adhering to the cell wall, and secreted proteins.

[0234] A polypeptide has H. pylori biological activity if it has one, two and preferably more of the following properties: (1) if when expressed in the course of an H. pylori infection, it can promote, or mediate the attachment of H. pylori to a cell; (2) it has an enzymatic activity, structural or regulatory function characteristic of an H. pylori protein; (3) the gene which encodes it can rescue a lethal mutation in an H. pylori gene; (4) or it is immunogenic in a subject. A polypeptide has biological activity if it is an antagonist, agonist, or super-agonist of a polypeptide having one of the above-listed properties.

[0235] A biologically active fragment or analog is one having an in vivo or in vitro activity which is characteristic of the H. pylori polypeptides of the invention contained in the Sequence Listing, or of other naturally occurring H. pylori polypeptides, e.g., one or more of the biological activities described herein. Especially preferred are fragments which exist in vivo, e.g., fragments which arise from post transcriptional processing or which arise from translation of alternatively spliced RNA's. Fragments include those expressed in native or endogenous cells as well as those made in expression systems, e.g., in CHO cells. Because peptides such as H. pylori polypeptides often exhibit a range of physiological properties and because such properties may be attributable to different portions of the molecule, a useful H. pylori fragment or H. pylori analog is one which exhibits a biological activity in any biological assay for H. pylori activity. Most preferably the fragment or analog possesses 10%, preferably 40%, more preferably 60%, 70%, 80% or 90% or greater of the activity of H. pylori, in any in vivo or in vitro assay.

[0236] Analogs can differ from naturally occurring H. pylori polypeptides in amino acid sequence or in ways that do not involve sequence, or both. Non-sequence modifications include changes in acetylation, methylation, phosphorylation, carboxylation, or glycosylation. Preferred analogs include H. pylori polypeptides (or biologically active fragments thereof) whose sequences differ from the wild-type sequence by one or more conservative amino acid substitutions or by one or more non-conservative amino acid substitutions, deletions, or insertions which do not substantially diminish the biological activity of the H. pylori polypeptide. Conservative substitutions typically include the substitution of one amino acid for another with similar characteristics, e.g., substitutions within the following groups: valine, glycine; glycine, alanine; valine, isoleucine, leucine; aspartic acid, glutamic acid; asparagine, glutamine; serine, threonine; lysine, arginine; and phenylalanine, tyrosine. Other conservative substitutions can be made in view of the table below.

TABLE 2
CONSERVATIVE AMINO ACID REPLACEMENTS

| For Amino Acid | Code | Replace with any of |
|---|---|---|
| Alanine | A | D-Ala, Gly, beta-Ala, L-Cys, D-Cys |
| Arginine | R | D-Arg, Lys, D-Lys, homo-Arg, |
| | | D-homo-Arg, Met, Ile, |
| | | D-Met, D-Ile, Orn, D-Orn |
| Asparagine | N | D-Asn, Asp, D-Asp, Glu, D-Glu, Gln, D-Gln |
| Aspartic Acid | D | D-Asp, D-Asn, Asn, Glu, D-Glu, Gln, D-Gln |
| Cysteine | C | D-Cys, S-Me-Cys, Met, D-Met, Thr, D-Thr |
| Glutamine | Q | D-Gln, Asn, D-Asn, Glu, D-Glu, Asp, D-Asp |
| Glutamic Acid | E | D-Glu, D-Asp, Asp, Asn, D-Asn, Gln, D-Gln |
| Glycine | G | Ala, D-Ala, Pro, D-Pro, β-Ala, Acp |
| Isoleucine | I | D-Ile, Val, D-Val, Leu, D-Leu, Met, D-Met |
| Leucine | L | D-Leu, Val, D-Val, Leu, D-Leu, Met, D-Met |
| Lysine | K | D-Lys, Arg, D-Arg, homo-Arg, |
| | | D-homo-Arg, Met, D- |
| | | Met, Ile, D-Ile, Orn, D-Orn |
| Methionine | M | D-Met, S-Me-Cys, Ile, D-Ile, |
| | | Leu, D-Leu, Val, D-Val |
| Phenylalanine | F | D-Phe, Tyr, D-Thr, L-Dopa, |
| | | His, D-His, Trp, D-Trp, |
| | | Trans-3,4, or 5-phenylproline, cis-3,4, |
| | | or 5-phenylproline |
| Proline | P | D-Pro, L-I-thioazolidine-4-carboxylic |
| | | acid, D-or L-1- |
| | | oxazolidine-4-carboxylic acid |
| Serine | S | D-Ser, Thr, D-Thr, allo-Thr, |
| | | Met, D-Met, Met(O), |
| | | D-Met(O), L-Cys, D-Cys |
| Threonine | T | D-Thr, Ser, D-Ser, allo-Thr, |
| | | Met, D-Met, Met(O), |
| | | D-Met(O), Val, D-Val |
| Tyrosine | Y | D-Tyr, Phe, D-Phe, L-Dopa, His, D-His |
| Valine | V | D-Val, Leu, D-Leu, Ile, D-Ile, Met, D-Met |

[0237] Other analogs within the invention are those with modifications which increase peptide stability; such analogs may contain, for example, one or more non-peptide bonds (which replace the peptide bonds) in the peptide sequence. Also included are: analogs that include residues other than naturally occurring L-amino acids, e.g., D-amino acids or non-naturally occurring or synthetic amino acids, e.g., β or γ amino acids; and cyclic analogs.

[0238] As used herein, the term “fragment”, as applied to an H. pylori analog, will ordinarily be at least about 20 residues, more typically at least about 40 residues, preferably at least about 60 residues in length. Fragments of H. pylori polypeptides can be generated by methods known to those skilled in the art. The ability of a candidate fragment to exhibit a biological activity of H. pylori polypeptide can be assessed by methods known to those skilled in the art as described herein. Also included are H. pylori polypeptides containing residues that are not required for biological activity of the peptide or that result from alternative mRNA splicing or alternative protein processing events.

[0239] An “immunogenic component” as used herein is a moiety, such as an H. pylori polypeptide, analog or fragment thereof, that is capable of eliciting a humoral and/or cellular immune response in a host animal alone or in combination with an adjuvant.

[0240] An “antigenic component” as used herein is a moiety, such as an H. pylori polypeptide, analog or fragment thereof, that is capable of binding to a specific antibody with sufficiently high affinity to form a detectable antigen-antibody complex.

[0241] As used herein, the term “transgene” means a nucleic acid (encoding, e.g., one or more polypeptides), which is partly or entirely heterologous, i.e., foreign, to the transgenic animal or cell into which it is introduced, or, is homologous to an endogenous gene of the transgenic animal or cell into which it is introduced, but which is designed to be inserted, or is inserted, into the cell's genome in such a way as to alter the genome of the cell into which it is inserted (e.g., it is inserted at a location which differs from that of the natural gene or its insertion results in a knockout). A transgene can include one or more transcriptional regulatory sequences and any other nucleic acid, such as introns, that may be necessary for optimal expression of the selected nucleic acid, all operably linked to the selected nucleic acid, and may include an enhancer sequence.

[0242] As used herein, the term “transgenic cell” refers to a cell containing a transgene.

[0243] As used herein, a “transgenic animal” is any animal in which one or more, and preferably essentially all, of the cells of the animal includes a transgene. The transgene can be introduced into the cell, directly or indirectly by introduction into a precursor of the cell, by way of deliberate genetic manipulation, such as by process of transformation of competent cells or by microinjection or by infection with a recombinant virus. This molecule may be integrated within a chromosome, or it may be extrachromosomally replicating DNA.

[0244] The term “antibody” as used herein is intended to include fragments thereof which are specifically reactive with H. pylori polypeptides.

[0245] As used herein, the term “cell-specific promoter” means a DNA sequence that serves as a promoter, i.e., regulates expression of a selected DNA sequence operably linked to the promoter, and which effects expression of the selected DNA sequence in specific cells of a tissue. The term also covers so-called “leaky” promoters, which regulate expression of a selected DNA primarily in one tissue, but cause expression in other tissues as well.

[0246] Misexpression, as used herein, refers to a non-wild type pattern of gene expression. It includes: expression at non-wild type levels, i.e., over or under expression; a pattern of expression that differs from wild type in terms of the time or stage at which the gene is expressed, e.g., increased or decreased expression (as compared with wild type) at a predetermined developmental period or stage; a pattern of expression that differs from wild type in terms of decreased expression (as compared with wild type) in a predetermined cell type or tissue type; a pattern of expression that differs from wild type in terms of the splicing size, amino acid sequence, post-transitional modification, or biological activity of the expressed polypeptide; a pattern of expression that differs from wild type in terms of the effect of an environmental stimulus or extracellular stimulus on expression of the gene, e.g., a pattern of increased or decreased expression (as compared with wild type) in the presence of an increase or decrease in the strength of the stimulus.

[0247] As used herein, “host cells” and other such terms denoting microorganisms or higher eukaryotic cell lines cultured as unicellular entities refers to cells which can become or have been used as recipients for a recombinant vector or other transfer DNA, and include the progeny of the original cell which has been transfected. It is understood by individuals skilled in the art that the progeny of a single parental cell may not necessarily be completely identical in genomic or total DNA compliment to the original parent, due to accident or deliberate mutation.

[0248] As used herein, the term “control sequence” refers to a nucleic acid having a base sequence which is recognized by the host organism to effect the expression of encoded sequences to which they are ligated. The nature of such control sequences differs depending upon the host organism; in prokaryotes, such control sequences generally include a promoter, ribosomal binding site, terminators, and in some cases operators; in eukaryotes, generally such control sequences include promoters, terminators and in some instances, enhancers. The term control sequence is intended to include at a minimum, all components whose presence is necessary for expression, and may also include additional components whose presence is advantageous, for example, leader sequences.

[0249] As used herein, the term “operably linked” refers to sequences joined or ligated to function in their intended manner. For example, a control sequence is operably linked to coding sequence by ligation in such a way that expression of the coding sequence is achieved under conditions compatible with the control sequence and host cell.

[0250] The metabolism of a substance, as used herein, means any aspect of the, expression, function, action, or regulation of the substance. The metabolism of a substance includes modifications, e.g., covalent or non-covalent modifications of the substance. The metabolism of a substance includes modifications, e.g., covalent or non-covalent modification, the substance induces in other substances. The metabolism of a substance also includes changes in the distribution of the substance. The metabolism of a substance includes changes the substance induces in the distribution of other substances.

[0251] A “sample” as used herein refers to a biological sample, such as, for example, tissue or fluid isloated from an individual (including without limitation plasma, serum, cerebrospinal fluid, lymph, tears, saliva and tissue sections) or from in vitro cell culture constituents, as well as samples from the environment.

[0252] The practice of the invention will employ, unless otherwise indicated, conventional techniques of chemistry, molecular biology, microbiology, recombinant DNA, and immunology, which are within the skill of the art. Such techniques are explained fully in the literature. See e.g., Sambrook, Fritsch, and Maniatis, Molecular Cloning; Laboratory Manual 2nd ed. (1989); DNA Cloning, Volumes I and II (D. N Glover ed. 1985); Oligonucleotide Synthesis (M. J. Gait ed, 1984); Nucleic Acid Hybridization (B. D. Hames & S. J. Higgins eds. 1984); the series, Methods in Enzymoloqy (Academic Press, Inc.), particularly Vol. 154 and Vol. 155 (Wu and Grossman, eds.) and PCR-A Practical Approach (McPherson, Quirke, and Taylor, eds., 1991).

[0253] I. Isolation of Nucleic Acids of H. pylori and Uses Therefor

[0254] H. pylori Genomic Sequence

[0255] This invention provides nucleotide sequences of the genome of H. pylori which thus comprises a DNA sequence library of H. pylori genomic DNA. The detailed description that follows provides nucleotide sequences of H. pylori, and also describes how the sequences were obtained and how ORFs and protein-coding sequences were identified. Also described are methods of using the disclosed H. pylori sequences in methods including diagnostic and therapeutic applications. Furthermore, the library can be used as a database for identification and comparison of medically important sequences in this and other strains of H. pylori.

[0256] To determine the genomic sequence of H. pylori, DNA was isolated from a strain of H. pylori (ATCC # 55679; deposited by Genome Therapeutics Corporation, 100 Beaver Street, Waltham, Mass. 02154) and mechanically sheared by nebulization to a median size of 2 kb. Following size fractionation by gel electrophoresis, the fragments were blunt-ended, ligated to adapter oligonucleotides, and cloned into each of 20 different pMPX vectors (Rice et al., abstracts of Meeting of Genome Mapping and Sequencing, Cold Spring Harbor, N.Y., 5/11-5/15, 1994, p. 225) to construct a series of “shotgun” subclone libraries.

[0257] DNA sequencing was achieved using multiplex sequencing procedures essentially as disclosed in Church et al., 1988, Science 240:185; U.S. Pat. Nos. 4,942,124 and 5,149,625). DNA was extracted from pooled cultures and subjected to chemical or enzymatic sequencing. Sequencing reactions were resolved by electrophoresis, and the products were transferred and covalently bound to nylon membranes. Finally, the membranes were sequentially hybridized with a series of labelled oligonucleotides complimentary to “tag” sequences present in the different shotgun cloning vectors. In this manner, a large number of sequences could be obtained from a single set of sequencing reactions. The cloning and sequencing procedures are described in more detail in the Exemplification.

[0258] Individual sequence reads obtained in this manner were assembled using the FALCON™ program (Church et al., 1994, Automated DNA Sequencing and Analysis, J. C. Venter, ed., Academic Press) and PHRAP (P. Green, Abstracts of DOE Human Genome Program Contractor-Grantee Workshop V, January 1996, p.157). The average contig length was about 3-4 kb.

[0259] A variety of approaches are used to order the contigs so as to obtain a continuous sequence representing the entire H. pylori genome. Synthetic oligonucleotides are designed that are complementary to sequences at the end of each contig. These oligonucleotides may be hybridized to libaries of H. pylori genomic DNA in, for example, lambda phage vectors or plasmid vectors to identify clones that contain sequences corresponding to the junctional regions between individual contigs. Such clones are then used to isolate template DNA and the same oligonucleotides are used as primers in polymerase chain reaction (PCR) to amplify junctional fragments, the nucleotide sequence of which is then determined.

[0260] The H. pylori sequences were analyzed for the presence of open reading frames (ORFs) comprising at least 180 nucleotides. As a result of the analysis of ORFs based on stop-to-stop codon reads, it should be understood that these ORFs may not correspond to the ORF of a naturally-occurring H. pylori polypeptide. These ORFs may contain start codons which indicate the initiation of protein synthesis of a naturally-occurring H. pylori polypeptide. Such start codons within the ORFs provided herein can be identified by those of ordinary skill in the relevant art, and the resulting ORF and the encoded H. pylori polypeptide is within the scope of this invention. For example, within the ORFs a codon such as AUG or GUG (encoding methionine or valine) which is part of the initiation signal for protein synthesis can be identified and the ORF modified to correspond to a naturally-occurring H. pylori polypeptide. The predicted coding regions were defined by evaluating the coding potential of such sequences with the program GENEMARK™ (Borodovsky and Mclninch, 1993, Comp. Chem. 17:123).

[0261] Other H. pylori Nucleic Acids

[0262] The nucleic acids of this invention may be obtained directly from the DNA of the above referenced H. pylori strain by using the polymerase chain reaction (PCR). See “PCR, A Practical Approach” (McPherson, Quirke, and Taylor, eds., IRL Press, Oxford, UK, 1991) for details about the PCR. High fidelity PCR can be used to ensure a faithful DNA copy prior to expression. In addition, the authenticity of amplified products can be checked by conventional sequencing methods. Clones carrying the desired sequences described in this invention may also be obtained by screening the libraries by means of the PCR or by hybridization of synthetic oligonucleotide probes to filter lifts of the library colonies or plaques as known in the art (see, e.g., Sambrook et al., Molecular Cloning, A Laboratory Manual 2nd edition, 1989, Cold Spring Harbor Press, NY).

[0263] It is also possible to obtain nucleic acids encoding H. pylori polypeptides from a cDNA library in accordance with protocols herein described. A cDNA encoding an H. pylori polypeptide can be obtained by isolating total mRNA from an appropriate strain. Double stranded cDNAs can then be prepared from the total mRNA. Subsequently, the cDNAs can be inserted into a suitable plasmid or viral (e.g., bacteriophage) vector using any one of a number of known techniques. Genes encoding H. pylori polypeptides can also be cloned using established polymerase chain reaction techniques in accordance with the nucleotide sequence information provided by the invention. The nucleic acids of the invention can be DNA or RNA. Preferred nucleic acids of the invention are contained in the Sequence Listing.

[0264] The nucleic acids of the invention can also be chemically synthesized using standard techniques. Various methods of chemically synthesizing polydeoxynucleotides are known, including solid-phase synthesis which, like peptide synthesis, has been fully automated in commercially available DNA synthesizers (See e.g., Itakura et al. U.S. Pat. No. 4,598,049; Caruthers et al. U.S. Pat. No. 4,458,066; and Itakura U.S. Pat. Nos. 4,401,796 and 4,373,071, incorporated by reference herein).

[0265] Nucleic acids isolated or synthesized in accordance with features of the present invention are useful, by way of example, without limitation, as probes, primers, capture ligands, antisense genes and for developing expression systems for the synthesis of proteins and peptides corresponding to such sequences. As probes, primers, capture ligands and antisense agents, the nucleic acid normally consists of all or part (approximately twenty or more nucleotides for specificity as well as the ability to form stable hybridization products) of the nucleic acids of the invention contained in the Sequence Listing. These uses are described in further detail below.

[0266] Probes

[0267] A nucleic acid isolated or synthesized in accordance with the sequence of the invention contained in the Sequence Listing can be used as a probe to specifically detect H. pylori. With the sequence information set forth in the present application, sequences of twenty or more nucleotides are identified which provide the desired inclusivity and exclusivity with respect to H. pylori, and extraneous nucleic acids likely to be encountered during hybridization conditions. More preferably, the sequence will comprise at least twenty to thirty nucleotides to convey stability to the hybridization product formed between the probe and the intended target molecules.

[0268] Sequences larger than 1000 nucleotides in length are difficult to synthesize but can be generated by recombinant DNA techniques. Individuals skilled in the art will readily recognize that the nucleic acids, for use as probes, can be provided with a label to facilitate detection of a hybridization product.

[0269] Nucleic acid isolated and synthesized in accordance with the sequence of the invention contained in the Sequence Listing can also be useful as probes to detect homologous regions (especially homologous genes) of other Helicobacter species using appropriate stringency hybridization conditions as described herein.

[0270] Capture Ligand

[0271] For use as a capture ligand, the nucleic acid selected in the manner described above with respect to probes, can be readily associated with a support. The manner in which nucleic acid is associated with supports is well known. Nucleic acid having twenty or more nucleotides in a sequence of the invention contained in the Sequence Listing have utility to separate H. pylori nucleic acid from the nucleic acid of each other and other organisms. Nucleic acid having twenty or more nucleotides in a sequence of the invention contained in the Sequence Listing can also have utility to separate other Helicobacter species from each other and from other organisms. Preferably, the sequence will comprise at least twenty nucleotides to convey stability to the hybridization product formed between the probe and the intended target molecules. Sequences larger than 1000 nucleotides in length are difficult to synthesize but can be generated by recombinant DNA techniques.

[0272] Primers

[0273] Nucleic acid isolated or synthesized in accordance with the sequences described herein have utility as primers for the amplification of H. pylori nucleic acid. These nucleic acids may also have utility as primers for the amplification of nucleic acids in other Helicobacter species. With respect to polymerase chain reaction (PCR) techniques, nucleic acid sequences of ≧10-15 nucleotides of the invention contained in the Sequence Listing have utility in conjunction with suitable enzymes and reagents to create copies of H. pylori nucleic acid. More preferably, the sequence will comprise twenty or more nucleotides to convey stability to the hybridization product formed between the primer and the intended target molecules. Binding conditions of primers greater than 100 nucleotides are more difficult to control to obtain specificity. High fidelity PCR can be used to ensure a faithful DNA copy prior to expression. In addition, amplified products can be checked by conventional sequencing methods.

[0274] The copies can be used in diagnostic assays to detect specific sequences, including genes from H. pylori and/or other Helicobacter species. The copies can also be incorporated into cloning and expression vectors to generate polypeptides corresponding to the nucleic acid synthesized by PCR, as is described in greater detail herein.

[0275] Antisense

[0276] Nucleic acid or nucleic acid-hybridizing derivatives isolated or synthesized in accordance with the sequences described herein have utility as antisense agents to prevent the expression of H. pylori genes. These sequences also have utility as antisense agents to prevent expression of genes of other Helicobacter species.

[0277] In one embodiment, nucleic acid or derivatives corresponding to H. pylori nucleic acids is loaded into a suitable carrier such as a liposome or bacteriophage for introduction into bacterial cells. For example, a nucleic acid having twenty or more nucleotides is capable of binding to bacteria nucleic acid or bacteria messenger RNA. Preferably, the antisense nucleic acid is comprised of 20 or more nucleotides to provide necessary stability of a hybridization product of non-naturally occurring nucleic acid and bacterial nucleic acid and/or bacterial messenger RNA. Nucleic acid having a sequence greater than 1000 nucleotides in length is difficult to synthesize but can be generated by recombinant DNA techniques. Methods for loading antisense nucleic acid in liposomes is known in the art as exemplified by U.S. Pat. No. 4,241,046 issued Dec. 23, 1980 to Papahadjopoulos et al.

[0278] II. Expression of H. pylori Nucleic Acids

[0279] Nucleic acid isolated or synthesized in accordance with the sequences described herein have utility to generate polypeptides. The nucleic acid of the invention exemplified in the Sequence Listing or fragments of the nucleic acid encoding active portions of H. pylori polypeptides can be cloned into suitable vectors or used to isolate nucleic acid. The isolated nucleic acid is combined with suitable DNA linkers and cloned into a suitable vector.

[0280] The function of a specific gene or operon can be ascertained by expression in a bacterial strain under conditions where the activity of the gene product(s) specified by the gene or operon in question can be specifically measured. Alternatively, a gene product may be produced in large quantities in an expressing strain for use as an antigen, an industrial reagent, for structural studies, etc. This expression can be accomplished in a mutant strain which lacks the activity of the gene to be tested, or in a strain that does not produce the same gene product(s). This includes, but is not limited to other Helicobacter strains, or other bacterial strains such as E coli, Norcardia, Corynebacterium, Campylobacter, and Streptomyces species. In some cases the expression host will utilize the natural Helicobacter promoter whereas in others, it will be necessary to drive the gene with a promoter sequence derived from the expressing organism (e.g., an E. coli beta-galactosidase promoter for expression in E coli).

[0281] To express a gene product using the natural H. pylori promoter, a procedure such as the following can be used. A restriction fragment containing the gene of interest, together with its associated natural promoter element and regulatory sequences (identified using the DNA sequence data) is cloned into an appropriate recombinant plasmid containing an origin of replication that functions in the host organism and an appropriate selectable marker. This can be accomplished by a number of procedures known to those skilled in the art. It is most preferably done by cutting the plasmid and the fragment to be cloned with the same restriction enzyme to produce compatible ends that can be ligated to join the two pieces together. The recombinant plasmid is introduced into the host organism by, for example, electroporation and cells containing the recombinant plasmid are identified by selection for the marker on the plasmid. Expression of the desired gene product is detected using an assay specific for that gene product.

[0282] In the case of a gene that requires a different promoter, the body of the gene (coding sequence) is specifically excised and cloned into an appropriate expression plasmid. This subcloning can be done by several methods, but is most easily accomplished by PCR amplification of a specific fragment and ligation into an expression plasmid after treating the PCR product with a restriction enzyme or exonuclease to create suitable ends for cloning.

[0283] A suitable host cell for expression of a gene can be any procaryotic or eucaryotic cell. For example, an H. pylori polypeptide can be expressed in bacterial cells such as E. coli, insect cells (baculovirus), yeast, or mammalian cells such as Chinese hamster ovary cell (CHO). Other suitable host cells are known to those skilled in the art.

[0284] Expression in eucaryotic cells such as mammalian, yeast, or insect cells can lead to partial or complete glycosylation and/or formation of relevant inter- or intra-chain disulfide bonds of a recombinant peptide product. Examples of vectors for expression in yeast S. cerivisae include pYepSec1 (Baldari. et al., (1987) Embo J. 6:229-234), pMFa (Kurjan and Herskowitz, (1982) Cell 30:933-943), pJRY88 (Schultz et al., (1987) Gene 54:113-123), and pYES2 (Invitrogen Corporation, San Diego, Calif.). Baculovirus vectors available for expression of proteins in cultured insect cells (SF 9 cells) include the pAc series (Smith et al., (1983) Mol. Cell Biol. 3:2156-2165) and the pVL series (Lucklow, V. A., and Summers, M. D., (1989) Virology 170:31-39). Generally, COS cells (Gluzman, Y., (1981) Cell 23:175-182) are used in conjunction with such vectors as pCDM 8 (Aruffo, A. and Seed, B., (1987) Proc. Natl. Acad. Sci. USA 84:8573-8577) for transient amplification/expression in mammalian cells, while CHO (dhfr⁻ Chinese Hamster Ovary) cells are used with vectors such as pMT2PC (Kaufman et al. (1987), EMBO J. 6:187-195) for stable amplification/expression in mammalian cells. Vector DNA can be introduced into mammalian cells via conventional techniques such as calcium phosphate or calcium chloride co-precipitation, DEAE-dextran-mediated transfection, or electroporation. Suitable methods for transforming host cells can be found in Sambrook et al. (Molecular Cloning: A Laboratory Manual, 2nd Edition, Cold Spring Harbor Laboratory press (1989)), and other laboratory textbooks.

[0285] Expression in procaryotes is most often carried out in E. coli with either fusion or non-fusion inducible expression vectors. Fusion vectors usually add a number of NH₂ terminal amino acids to the expressed target gene. These NH₂ terminal amino acids often are referred to as a reporter group. Such reporter groups usually serve two purposes: 1) to increase the solubility of the target recombinant protein; and 2) to aid in the purification of the target recombinant protein by acting as a ligand in affinity purification. Often, in fusion expression vectors, a proteolytic cleavage site is introduced at the junction of the reporter group and the target recombinant protein to enable separation of the target recombinant protein from the reporter group subsequent to purification of the fusion protein. Such enzymes, and their cognate recognition sequences, include Factor Xa, thrombin and enterokinase. Typical fusion expression vectors include pGEX (Amrad Corp., Melbourne, Australia), pMAL (New England Biolabs, Beverly, Mass.) and pRIT5 (Pharmacia, Piscataway, N.J.) which fuse glutathione S-transferase, maltose E binding protein, or protein A, respectively, to the target recombinant protein. A preferred reporter group is poly(His), which may be fused to the amino or carboxy terminus of the protein and which renders the recombinant fusion protein easily purifiable by metal chelate chromatography.

[0286] Inducible non-fusion expression vectors include pTrc (Amann et al., (1988) Gene 69:301-315) and pET11d (Studier et al., Gene Expression Technology: Methods in Enzymology 185, Academic Press, San Diego, Calif. (1990) 60-89). While target gene expression relies on host RNA polymerase transcription from the hybrid trp-lac fusion promoter in pTrc, expression of target genes inserted into pET11d relies on transcription from the T7 gn10-lac 0 fusion promoter mediated by coexpressed viral RNA polymerase (T7 gnl). This viral polymerase is supplied by host strains BL21(DE3) or HMS174(DE3) from a resident λ prophage harboring a T7 gnl under the transcriptional control of the lacUV 5 promoter.

[0287] For example, a host cell transfected with a nucleic acid vector directing expression of a nucleotide sequence encoding an H. pylori polypeptide can be cultured under appropriate conditions to allow expression of the polypeptide to occur. The polypeptide may be secreted and isolated from a mixture of cells and medium containing the peptide. Alternatively, the polypeptide may be retained cytoplasmically and the cells harvested, lysed and the protein isolated. A cell culture includes host cells, media and other byproducts. Suitable media for cell culture are well known in the art. Polypeptides of the invention can be isolated from cell culture medium, host cells, or both using techniques known in the art for purifying proteins including ion-exchange chromatography, gel filtration chromatography, ultrafiltration, electrophoresis, and immunoaffinity purification with antibodies specific for such polypeptides. Additionally, in many situations, polypeptides can be produced by chemical cleavage of a native protein (e.g., tryptic digestion) and the cleavage products can then be purified by standard techniques.

[0288] In the case of membrane bound proteins, these can be isolated from a host cell by contacting a membrane-associated protein fraction with a detergent forming a solubilized complex, where the membrane-associated protein is no longer entirely embedded in the membrane fraction and is solubilized at least to an extent which allows it to be chromatographically isolated from the membrane fraction. Several different criteria are used for choosing a detergent suitable for solubilizing these complexes. For example, one property considered is the ability of the detergent to solubilize the H. pylori protein within the membrane fraction at minimal denaturation of the membrane-associated protein allowing for the activity or functionality of the membrane-associated protein to return upon reconstitution of the protein. Another property considered when selecting the detergent is the critical micelle concentration (CMC) of the detergent in that the detergent of choice preferably has a high CMC value allowing for ease of removal after reconstitution. A third property considered when selecting a detergent is the hydrophobicity of the detergent. Typically, membrane-associated proteins are very hydrophobic and therefore detergents which are also hydrophobic, e.g., the triton series, would be useful for solubilizing the hydrophobic proteins. Another property important to a detergent can be the capability of the detergent to remove the H. pylori protein with minimal protein-protein interaction facilitating further purification. A fifth property of the detergent which should be considered is the charge of the detergent. For example, if it is desired to use ion exchange resins in the purification process then preferably detergent should be an uncharged detergent. Chromatographic techniques which can be used in the final purification step are known in the art and include hydrophobic interaction, lectin affinity, ion exchange, dye affinity and immunoaffinity.

[0289] One strategy to maximize recombinant H. pylori peptide expression in E. coli is to express the protein in a host bacteria with an impaired capacity to proteolytically cleave the recombinant protein (Gottesman, S., Gene Expression Technology: Methods in Enzymology 185, Academic Press, San Diego, Calif. (1990) 119-128). Another strategy would be to alter the nucleic acid encoding an H. pylori peptide to be inserted into an expression vector so that the individual codons for each amino acid would be those preferentially utilized in highly expressed E. coli proteins (Wada et al., (1992) Nuc. Acids Res. 20:2111-2118). Such alteration of nucleic acids of the invention can be carried out by standard DNA synthesis techniques.

[0290] The nucleic acids of the invention can also be chemically synthesized using standard techniques. Various methods of chemically synthesizing polydeoxynucleotides are known, including solid-phase synthesis which, like peptide synthesis, has been fully automated in commercially available DNA synthesizers (See, e.g., Itakura et al. U.S. Pat. No. 4,598,049; Caruthers et al. U.S. Pat. No. 4,458,066; and Itakura U.S. Pat. Nos. 4,401,796 and 4,373,071, incorporated by reference herein).

[0291] III. H. pylori Polypeptides

[0292] This invention encompasses isolated H. pylori polypeptides encoded by the disclosed H. pylori genomic sequences, including the polypeptides of the invention contained in the Sequence Listing. Polypeptides of the invention are preferably at least 5 amino acid residues in length. Using the DNA sequence information provided herein, the amino acid sequences of the polypeptides encompassed by the invention can be deduced using methods well-known in the art. It will be understood that the sequence of an entire nucleic acid encoding an H. pylori polypeptide can be isolated and identified based on an ORF that encodes only a fragment of the cognate protein-coding region. This can be acheived, for example, by using the isolated nucleic acid encoding the ORF, or fragments thereof, to prime a polymerase chain reaction with genomic H. pylori DNA as template; this is followed by sequencing the amplified product.

[0293] The polypeptides of the invention can be isolated from wild-type or mutant H. pylori cells or from heterologous organisms or cells (including, but not limited to, bacteria, yeast, insect, plant and mammalian cells) into which an H. pylori nucleic acid has been introduced and expressed. In addition, the polypeptides can be part of recombinant fusion proteins.

[0294] H. pylori polypeptides of the invention can be chemically synthesized using commercially automated procedures such as those referenced herein.

[0295] H. pylori polypeptides of the invention are also intended to include chimeric proteins and truncated proteins as decribed herein.

[0296] Chimeric H. pylori Proteins

[0297] H. pylori chimeric polypeptides comprise one or more H. pylori polypeptides fused together. These combined sequences can be made by combining two or more genes, or two or more polypeptide encoding sequences, or at least one gene and at least one polypeptide encoding sequence in tandem, and the subsequent expression of the encoded proteins by conventional molecular biological techniques. The combined nucleotide sequences may be composed of a combination of either full length H. pylori nucleotide sequences or fragments of such sequences, e.g., fragments which contain immunologically relevant portions of the encoded H. pylori protein. These chimeric H. pylori proteins then contain the combined or synergistic vaccine potential of each individual H. pylori protein sequence and can be used in vaccine formulations of the invention.

[0298] Truncated Gene Expression and Protein Production

[0299] H. pylori proteins encoded by a given nucleotide sequence can also be used in a biologically active truncated form. Such truncation can be produced, for example, by the elimination of either 5′ and/or 3′ regions of the encoding nucleotide sequence. These truncations can affect recombinant expression of the encoded protein and/or subsequent purification of the protein. For example, truncation of a nucleotide sequence encoding a predicted export sequence of a specific protein may alter expression of the protein. Alternatively, C-terminal truncation of an H. pylori polypeptide by elimination of the 3′ end of the nucleic acid coding region may also improve protein expression and subsequent purification and use, as is outlined in Example VIIIb low. Deletion of nucleic acid regions encoding internal H. pylori protein regions can also result in improved protein expression, purification and/or efficacy as a vaccine candidate.

[0300] IV. Identification of Nucleic Acids Encoding Vaccine Components and Targets for Agents Effective Against H. pylori

[0301] The disclosed H. pylori genome sequence includes segments that direct the synthesis of ribonucleic acids and polypeptides, as well as origins of replication, promoters, other types of regulatory sequences, and intergenic nucleic acids. The invention encompasses nucleic acids encoding immunogenic components of vaccines and targets for agents effective against H. pylori. Identification of said immunogenic components involved in the determination of the function of the disclosed sequences can be achieved using a variety of approaches. Non-limiting examples of these approaches are described briefly below.

[0302] Homology to known sequences: Computer-assisted comparison of the disclosed H. pylori sequences with previously reported sequences present in publicly available databases is useful for identifying functional H. pylori nucleic acid and polypeptide sequences. It will be understood that protein-coding sequences, for example, may be compared as a whole, and that a high degree of sequence homology between two proteins (such as, for example, >80-90%) at the amino acid level indicates that the two proteins also possess some degree of functional homology, such as, for example, among enzymes involved in metabolism, DNA synthesis, or cell wall synthesis, and proteins involved in transport, cell division, etc. In addition, many structural features of particular protein classes have been identified and correlate with specific consensus sequences, such as, for example, binding domains for nucleotides, DNA, metal ions, and other small molecules; sites for covalent modifications such as phosphorylation, acylation, and the like; sites of protein:protein interactions, etc. These consensus sequences may be quite short and thus may represent only a fraction of the entire protein-coding sequence. Identification of such a feature in an H. pylori sequence is therefore useful in determining the function of the encoded protein and identifying useful targets of antibacterial drugs.

[0303] Of particular relevance to the present invention are structural features that are common to secretory, transmembrane, and surface proteins, including secretion signal peptides and hydrophobic transmembrane domains. H. pylori proteins identified as containing putative signal sequences and/or transmembrane domains are useful as immunogenic components of vaccines.

[0304] Identification of essential genes: Nucleic acids that encode proteins essential for growth or viability of H. pylori are preferred drug targets. H. pylori genes can be tested for their biological relevance to the organism by examining the effect of deleting and/or disrupting the genes, i.e., by so-called gene “knockout”, using techniques known to those skilled in the relevant art. In this manner, essential genes may be identified.

[0305] Strain-specific sequences: Because of the evolutionary relationship between different H. pylori strains, it is believed that the presently disclosed H. pylori sequences are useful for identifying, and/or discriminating between, previously known and new H. pylori strains. It is believed that other H. pylori strains will exhibit at least 70% sequence homology with the presently disclosed sequence. Systematic and routine analyses of DNA sequences derived from samples containing H. pylori strains, and comparison with the present sequence allows for the identification of sequences that can be used to discriminate between strains, as well as those that are common to all H. pylori strains. In one embodiment, the invention provides nucleic acids, including probes, and peptide and polypeptide sequences that discriminate between different strains of H. pylori. Strain-specific components can also be identified functionally by their ability to elicit or react with antibodies that selectively recognize one or more H. pylori strains.

[0306] In another embodiment, the invention provides nucleic acids, including probes, and peptide and polypeptide sequences that are common to all H. pylori strains but are not found in other bacterial species.

[0307] Specific Example: Determination Of Candidate Protein Antigens For Antibody And Vaccine Development

[0308] The selection of candidate protein antigens for vaccine development can be derived from the nucleic acids encoding H. pylori polypeptides. First, the ORF's can be analyzed for homology to other known exported or membrane proteins and analyzed using the discriminant analysis described by Klein, et al. (Klein, P., Kanehsia, M., and DeLisi, C. (1985) Biochimica et Biophysica Acta 815, 468-476) for predicting exported and membrane proteins.

[0309] Homology searches can be performed using the BLAST algorithm contained in the Wisconsin Sequence Analysis Package (Genetics Computer Group, University Research Park, 575 Science Drive, Madison, Wis. 53711) to compare each predicted ORF amino acid sequence with all sequences found in the current GenBank, SWISS-PROT and PIR databases. BLAST searches for local alignments between the ORF and the databank sequences and reports a probability score which indicates the probability of finding this sequence by chance in the database. ORF's with significant homology (e.g. probabilities lower than 1×10⁻⁶ that the homology is only due to random chance) to membrane or exported proteins represent protein antigens for vaccine development. Possible functions can be provided to H. pylori genes based on sequence homology to genes cloned in other organisms.

[0310] Discriminant analysis (Klein, et al. supra) can be used to examine the ORF amino acid sequences. This algorithm uses the intrinsic information contained in the ORF amino acid sequence and compares it to information derived from the properties of known membrane and exported proteins. This comparison predicts which proteins will be exported, membrane associated or cytoplasmic. ORF amino acid sequences identified as exported or membrane associated by this algorithm are likely protein antigens for vaccine development.

[0311] Surface exposed outer membrane proteins are likely to represent the best antigens to provide a protective immune response against H. pylori. Among the algorithms that can be used to aid in prediction of these outer membrane proteins include the presence of an amphipathic beta-sheet region at their C-terminus. This region which has been detected in a large number of outer membrane proteins in Gram negative bacteria is often characterized by hydrophobic residues (Phe or Tyr) approximately at positions 1, 3, 5, 7 and 9 from the C-terminus (e.g., see FIGS. 10-12, block F). In many of these figures of multiple sequence alignments, an asterisk is used to denote amino acid residues shared by all members of the group, and a dot is used to indicate that all members of the group share homologous amino acid residues at that position. Importantly, these sequences have not been detected at the C-termini of periplasmic proteins, thus allowing preliminary distinction between these classes of proteins based on primary sequence data. This phenomenon has been reported previously by Struyve et al. (J. Mol. Biol. 218:141-148, 1991).

[0312] Also illustrated in FIGS. 10-12 and in FIG. 13 are additional amino acid sequence motifs found in many outer membrane proteins of H. pylori. The amino acid sequence alignments in FIGS. 10-13 depict portions of the sequence of twenty-three H. pylori proteins (depicted in the single letter amino acid code) labeled with arbitrary names and their amino acid Sequence ID Numbers and shown N-terminal to C-terminal, left to right. Six distinct blocks (labeled A through F) of similar amino acid residues are found including the distinctive hydrophobic residues (Phe or Tyr; F or Y according to the single letter code for amino acid residues) frequently found at positions near the C-terminus of outer membrane proteins. The presence of several shared motifs clearly establishes the similarity between members of this group of proteins.

[0313] In addition, outer membrane proteins isolated from H. pylori frequently share a motif near the mature N-terminus (i.e., after processing to remove the secretion signal) as illustrated in the blocked amino acid residues in FIG. 4. FIG. 14 depicts the N-terminal portion of six H. pylori proteins (designated by arbitrary names and their amino acid Sequence ID Numbers and shown N-terminal to C-terminal, left to right). Varied groups of outer membrane proteins share significant homology across most of their sequences. Examples of such protein families are shown in FIGS. 15-17 (proteins are designated by an arbitrary name and their amino acid Sequence ID Numbers and shown N-terminal to C-terminal, left to right).

[0314] One skilled in the art would know that these shared sequence motifs are highly significant and establish a similarity among this group of proteins.

[0315] Infrequently it is not possible to distinguish between multiple possible nucleotides at a given position in the nucleic acid sequence. In those cases the ambiguities are denoted by an extended alphabet as follows:

[0316] These are the official IUPAC-IUB single-letter base codes

| Code | Base Description | |
|---|---|---|
| G | Guanine | |
| A | Adenine | |
| T | Thymine | |
| C | Cytosine | |
| R | Purine | (A or G) |
| Y | Pyrimidine | (C or T or U) |
| M | Amino | (A or C) |
| K | Ketone | (G or T) |
| S | Strong interaction | (C or G) |
| W | Weak interaction | (A or T) |
| H | Not-G | (A or C or T) |
| B | Not-A | (C or G or T) |
| V | Not-T (not-U) | (A or C or G) |
| D | Not-C | (A or G or T) |
| N | Any | (A or C or G or T) |

[0317] The amino acid translations of this invention account for the ambiguity in the nucleic acid sequence by translating the ambiguous codon as the letter “X”. In all cases, the permissible amino acid residues at a position are clear from an examination of the nucleic acid sequence based on the standard genetic code.

[0318] V. Production of Fragments and Analogs of H. pyloriNucleic Acids and Polypeptides

[0319] Based on the discovery of the H. pylori gene products of the invention provided in the Sequence Lsiting, one skilled in the art can alter the disclosed structure (of H. pylori genes), e.g., by producing fragments or analogs and test the newly produced structures for activity. Examples of techniques known to those skilled in the relevant art which allow the production and testing of fragments and analogs are discussed below. These, or analogous methods can be used to make and screen libraries of polypeptides, e.g., libraries of random peptides or libraries of fragments or analogs of cellular proteins for the ability to bind H. pylori polypeptides. Such screens are useful for the identification of inhibitors of H. pylori.

[0320] Generation of Fragments

[0321] Fragments of a protein can be produced in several ways, e.g., recombinantly, by proteolytic digestion, or by chemical synthesis. Internal or terminal fragments of a polypeptide can be generated by removing one or more nucleotides from one end (for a terminal fragment) or both ends (for an internal fragment) of a nucleic acid which encodes the polypeptide. Expression of the mutagenized DNA produces polypeptide fragments. Digestion with “end-nibbling” endonucleases can thus generate DNA's which encode an array of fragments. DNA's which encode fragments of a protein can also be generated by random shearing, restriction digestion or a combination of the above-discussed methods.

[0322] Fragments can also be chemically synthesized using techniques known in the art such as conventional Merrifield solid phase f-Moc or t-Boc chemistry. For example, peptides of the present invention may be arbitrarily divided into fragments of desired length with no overlap of the fragments, or divided into overlapping fragments of a desired length.

[0323] Alteration of Nucleic Acids and Polypeptides: Random Methods

[0324] Amino acid sequence variants of a protein can be prepared by random mutagenesis of DNA which encodes a protein or a particular domain or region of a protein. Useful methods include PCR mutagenesis and saturation mutagenesis. A library of random amino acid sequence variants can also be generated by the synthesis of a set of degenerate oligonucleotide sequences. (Methods for screening proteins in a library of variants are elsewhere herein).

[0325] (A) PCR Mutagenesis

[0326] In PCR mutagenesis, reduced Taq polymerase fidelity is used to introduce random mutations into a cloned fragment of DNA (Leung et al., 1989, Technique 1: 11-15). The DNA region to be mutagenized is amplified using the polymerase chain reaction (PCR) under conditions that reduce the fidelity of DNA synthesis by Taq DNA polymerase, e.g., by using a dGTP/dATP ratio of five and adding Mn²⁺ to the PCR reaction. The pool of amplified DNA fragments are inserted into appropriate cloning vectors to provide random mutant libraries.

[0327] (B) Saturation Mutagenesis

[0328] Saturation mutagenesis allows for the rapid introduction of a large number of single base substitutions into cloned DNA fragments (Mayers et al., 1985, Science 229:242). This technique includes generation of mutations, e.g., by chemical treatment or irradiation of single-stranded DNA in vitro, and synthesis of a complimentary DNA strand. The mutation frequency can be modulated by modulating the severity of the treatment, and essentially all possible base substitutions can be obtained. Because this procedure does not involve a genetic selection for mutant fragments both neutral substitutions, as well as those that alter function, are obtained. The distribution of point mutations is not biased toward conserved sequence elements.

[0329] (C) Degenerate Oligonucleotides

[0330] A library of homologs can also be generated from a set of degenerate oligonucleotide sequences. Chemical synthesis of a degenerate sequences can be carried out in an automatic DNA synthesizer, and the synthetic genes then ligated into an appropriate expression vector. The synthesis of degenerate oligonucleotides is known in the art (see for example, Narang, S A (1983) Tetrahedron 39:3; Itakura et al. (1981) Recombinant DNA, Proc 3rd Cleveland Sympos. Macromolecules, ed. AG Walton, Amsterdam: Elsevier pp273-289; Itakura et al. (1984) Annu. Rev. Biochem. 53:323; Itakura et al. (1984) Science 198:1056; Ike et al. (1983) Nucleic Acid Res. 11:477. Such techniques have been employed in the directed evolution of other proteins (see, for example, Scott et al. (1990) Science 249:386-390; Roberts et al. (1992) PNAS 89:2429-2433; Devlin et al. (1990) Science 249: 404-406; Cwirla et al. (1990) PNAS 87: 6378-6382; as well as U.S. Pat. Nos. 5,223,409, 5,198,346, and 5,096,815).

[0331] Alteration of Nucleic Acids and Polypeptides: Methods for Directed Mutagenesis

[0332] Non-random or directed, mutagenesis techniques can be used to provide specific sequences or mutations in specific regions. These techniques can be used to create variants which include, e.g., deletions, insertions, or substitutions, of residues of the known amino acid sequence of a protein. The sites for mutation can be modified individually or in series, e.g., by (1) substituting first with conserved amino acids and then with more radical choices depending upon results achieved, (2) deleting the target residue, or (3) inserting residues of the same or a different class adjacent to the located site, or combinations of options 1-3.

[0333] (A) Alanine Scanning Mutagenesis

[0334] Alanine scanning mutagenesis is a useful method for identification of certain residues or regions of the desired protein that are preferred locations or domains for mutagenesis, Cunningham and Wells (Science 244:1081-1085, 1989). In alanine scanning, a residue or group of target residues are identified (e.g., charged residues such as Arg, Asp, His, Lys, and Glu) and replaced by a neutral or negatively charged amino acid (most preferably alanine or polyalanine). Replacement of an amino acid can affect the interaction of the amino acids with the surrounding aqueous environment in or outside the cell. Those domains demonstrating functional sensitivity to the substitutions are then refined by introducing further or other variants at or for the sites of substitution. Thus, while the site for introducing an amino acid sequence variation is predetermined, the nature of the mutation per se need not be predetermined. For example, to optimize the performance of a mutation at a given site, alanine scanning or random mutagenesis may be conducted at the target codon or region and the expressed desired protein subunit variants are screened for the optimal combination of desired activity.

[0335] (B) Oligonucleotide-Mediated Mutagenesis

[0336] Oligonucleotide-mediated mutagenesis is a useful method for preparing substitution, deletion, and insertion variants of DNA, see, e.g., Adelman et al., (DNA 2:183, 1983). Briefly, the desired DNA is altered by hybridizing an oligonucleotide encoding a mutation to a DNA template, where the template is the single-stranded form of a plasmid or bacteriophage containing the unaltered or native DNA sequence of the desired protein. After hybridization, a DNA polymerase is used to synthesize an entire second complementary strand of the template that will thus incorporate the oligonucleotide primer, and will code for the selected alteration in the desired protein DNA. Generally, oligonucleotides of at least 25 nucleotides in length are used. An optimal oligonucleotide will have 12 to 15 nucleotides that are completely complementary to the template on either side of the nucleotide(s) coding for the mutation. This ensures that the oligonucleotide will hybridize properly to the single-stranded DNA template molecule. The oligonucleotides are readily synthesized using techniques known in the art such as that described by Crea et al. (Proc. Natl. Acad. Sci. USA, 75: 5765 [1978]).

[0337] (C) Cassette Mutagenesis

[0338] Another method for preparing variants, cassette mutagenesis, is based on the technique described by Wells et al. (Gene, 34:315[1985]). The starting material is a plasmid (or other vector) which includes the protein subunit DNA to be mutated. The codon(s) in the protein subunit DNA to be mutated are identified. There must be a unique restriction endonuclease site, on each side of the identified mutation site(s). If no such restriction sites exist, they may be generated using the above-described oligonucleotide-mediated mutagenesis method to introduce them at appropriate locations in the desired protein subunit DNA. After the restriction sites have been introduced into the plasmid, the plasmid is cut at these sites to linearize it. A double-stranded oligonucleotide encoding the sequence of the DNA between the restriction sites but containing the desired mutation(s) is synthesized using standard procedures. The two strands are synthesized separately and then hybridized together using standard techniques. This double-stranded oligonucleotide is referred to as the cassette. This cassette is designed to have 3′ and 5′ ends that are comparable with the ends of the linearized plasmid, such that it can be directly ligated to the plasmid. This plasmid now contains the mutated desired protein subunit DNA sequence.

[0339] (D) Combinatorial Mutagenesis

[0340] Combinatorial mutagenesis can also be used to generate mutants (Ladner et al., WO 88/06630). In this method, the amino acid sequences for a group of homologs or other related proteins are aligned, preferably to promote the highest homology possible. All of the amino acids which appear at a given position of the aligned sequences can be selected to create a degenerate set of combinatorial sequences. The variegated library of variants is generated by combinatorial mutagenesis at the nucleic acid level, and is encoded by a variegated gene library. For example, a mixture of synthetic oligonucleotides can be enzymatically ligated into gene sequences such that the degenerate set of potential sequences are expressible as individual peptides, or alternatively, as a set of larger fusion proteins containing the set of degenerate sequences.

[0341] Other Modifications of H. pylori Nucleic Acids and Polypeptides

[0342] It is possible to modify the structure of an H. pylori polypeptide for such purposes as increasing solubility, enhancing stability (e.g., shelf life ex vivo and resistance to proteolytic degradation in vivo). A modified H. pylori protein or peptide can be produced in which the amino acid sequence has been altered, such as by amino acid substitution, deletion, or addition as described herein.

[0343] An H. pylori peptide can also be modified by substitution of cysteine residues preferably with alanine, serine, threonine, leucine or glutamic acid residues to minimize dimerization via disulfide linkages. In addition, amino acid side chains of fragments of the protein of the invention can be chemically modified. Another modification is cyclization of the peptide.

[0344] In order to enhance stability and/or reactivity, an H. pylori polypeptide can be modified to incorporate one or more polymorphisms in the amino acid sequence of the protein resulting from any natural allelic variation. Additionally, D-amino acids, non-natural amino acids, or non-amino acid analogs can be substituted or added to produce a modified protein within the scope of this invention. Furthermore, an H. pylori polypeptide can be modified using polyethylene glycol (PEG) according to the method of A. Sehon and co-workers (Wie et al., supra) to produce a protein conjugated with PEG. In addition, PEG can be added during chemical synthesis of the protein. Other modifications of H. pylori proteins include reduction/alkylation (Tarr, Methods of Protein Microcharacterization, J. E. Silver ed., Humana Press, Clifton N.J. 155-194 (1986)); acylation (Tarr, supra); chemical coupling to an appropriate carrier (Mishell and Shiigi, eds, Selected Methods in Cellular Immunology, W H Freeman, San Francisco, Calif. (1980), U.S. Pat. No. 4,939,239; or mild formalin treatment (Marsh, (1971) Int. Arch. of Allergy and Appl. Immunol., 41: 199-215).

[0345] To facilitate purification and potentially increase solubility of an H. pylori protein or peptide, it is possible to add an amino acid fusion moiety to the peptide backbone. For example, hexa-histidine can be added to the protein for purification by immobilized metal ion affinity chromatography (Hochuli, E. et al., (1988) Bio/Technology, 6: 1321-1325). In addition, to facilitate isolation of peptides free of irrelevant sequences, specific endoprotease cleavage sites can be introduced between the sequences of the fusion moiety and the peptide.

[0346] To potentially aid proper antigen processing of epitopes within an H. pylori polypeptide, canonical protease sensitive sites can be engineered between regions, each comprising at least one epitope via recombinant or synthetic methods. For example, charged amino acid pairs, such as KK or RR, can be introduced between regions within a protein or fragment during recombinant construction thereof. The resulting peptide can be rendered sensitive to cleavage by cathepsin and/or other trypsin-like enzymes which would generate portions of the protein containing one or more epitopes. In addition, such charged amino acid residues can result in an increase in the solubility of the peptide.

[0347] Primary Methods for Screening Polypeptides and Analogs

[0348] Various techniques are known in the art for screening generated mutant gene products. Techniques for screening large gene libraries often include cloning the gene library into replicable expression vectors, transforming appropriate cells with the resulting library of vectors, and expressing the genes under conditions in which detection of a desired activity, e.g., in this case, binding to H. pylori polypeptide or an interacting protein, facilitates relatively easy isolation of the vector encoding the gene whose product was detected. Each of the techniques described below is amenable to high through-put analysis for screening large numbers of sequences created, e.g., by random mutagenesis techniques.

[0349] (A) Two Hybrid Systems

[0350] Two hybrid assays such as the system described above (as with the other screening methods described herein), can be used to identify polypeptides, e.g., fragments or analogs of a naturally-occurring H. pylori polypeptide, e.g., of cellular proteins, or of randomly generated polypeptides which bind to an H. pylori protein. (The H. pylori domain is used as the bait protein and the library of variants are expressed as fish fusion proteins.) In an analogous fashion, a two hybrid assay (as with the other screening methods described herein), can be used to find polypeptides which bind a H. pylori polypeptide.

[0351] (B) Display Libraries

[0352] In one approach to screening assays, the candidate peptides are displayed on the surface of a cell or viral particle, and the ability of particular cells or viral particles to bind an appropriate receptor protein via the displayed product is detected in a “panning assay”. For example, the gene library can be cloned into the gene for a surface membrane protein of a bacterial cell, and the resulting fusion protein detected by panning (Ladner et al., WO 88/06630; Fuchs et al. (1991) Bio/Technology 9:1370-1371; and Goward et al. (1992) TIBS 18:136-140). In a similar fashion, a detectably labeled ligand can be used to score for potentially functional peptide homologs. Fluorescently labeled ligands, e.g., receptors, can be used to detect homologs which retain ligand-binding activity. The use of fluorescently labeled ligands, allows cells to be visually inspected and separated under a fluorescence microscope, or, where the morphology of the cell permits, to be separated by a fluorescence-activated cell sorter.

[0353] A gene library can be expressed as a fusion protein on the surface of a viral particle. For instance, in the filamentous phage system, foreign peptide sequences can be expressed on the surface of infectious phage, thereby conferring two significant benefits. First, since these phage can be applied to affinity matrices at concentrations well over 10¹³ phage per milliliter, a large number of phage can be screened at one time. Second, since each infectious phage displays a gene product on its surface, if a particular phage is recovered from an affinity matrix in low yield, the phage can be amplified by another round of infection. The group of almost identical E. coli filamentous phages M13, fd., and fl are most often used in phage display libraries. Either of the phage gIII or gVIII coat proteins can be used to generate fusion proteins without disrupting the ultimate packaging of the viral particle. Foreign epitopes can be expressed at the NH₂-terminal end of pIII and phage bearing such epitopes recovered from a large excess of phage lacking this epitope (Ladner et al. PCT publication WO 90/02909; Garrard et al., PCT publication WO 92/09690; Marks et al. (1992) J. Biol. Chem. 267:16007-16010; Griffiths et al. (1993) EMBO J. 12:725-734; Clackson et al. (1991) Nature 352:624-628; and Barbas et al. (1992) PNAS 89:4457-4461).

[0354] A common approach uses the maltose receptor of E. coli (the outer membrane protein, LamB) as a peptide fusion partner (Charbit et al. (1986) EMBO 5, 3029-3037). Oligonucleotides have been inserted into plasmids encoding the LamB gene to produce peptides fused into one of the extracellular loops of the protein. These peptides are available for binding to ligands, e.g., to antibodies, and can elicit an immune response when the cells are administered to animals. Other cell surface proteins, e.g., OmpA (Schorr et al. (1991) Vaccines 91, pp. 387-392), PhoE (Agterberg, et al. (1990) Gene 88, 37-45), and PAL (Fuchs et al. (1991) Bio/Tech 9, 1369-1372), as well as large bacterial surface structures have served as vehicles for peptide display. Peptides can be fused to pilin, a protein which polymerizes to form the pilus-a conduit for interbacterial exchange of genetic information (Thiry et al. (1989) Appl. Environ. Microbiol. 55, 984-993). Because of its role in interacting with other cells, the pilus provides a useful support for the presentation of peptides to the extracellular environment. Another large surface structure used for peptide display is the bacterial motive organ, the flagellum. Fusion of peptides to the subunit protein flagellin offers a dense array of many peptide copies on the host cells (Kuwajima et al. (1988) Bio/Tech. 6, 1080-1083). Surface proteins of other bacterial species have also served as peptide fusion partners. Examples include the Staphylococcus protein A and the outer membrane IgA protease of Neisseria (Hansson et al. (1992) J. Bacteriol. 174, 4239-4245 and Klauser et al. (1990) EMBO J. 9, 1991-1999).

[0355] In the filamentous phage systems and the LamB system described above, the physical link between the peptide and its encoding DNA occurs by the containment of the DNA within a particle (cell or phage) that carries the peptide on its surface. Capturing the peptide captures the particle and the DNA within. An alternative scheme uses the DNA-binding protein LacI to form a link between peptide and DNA (Cull et al. (1992) PNAS USA 89:1865-1869). This system uses a plasmid containing the LacI gene with an oligonucleotide cloning site at its 3′-end. Under the controlled induction by arabinose, a LacI-peptide fusion protein is produced. This fusion retains the natural ability of LacI to bind to a short DNA sequence known as LacO operator (LacO). By installing two copies of LacO on the expression plasmid, the LacI-peptide fusion binds tightly to the plasmid that encoded it. Because the plasmids in each cell contain only a single oligonucleotide sequence and each cell expresses only a single peptide sequence, the peptides become specifically and stably associated with the DNA sequence that directed its synthesis. The cells of the library are gently lysed and the peptide-DNA complexes are exposed to a matrix of immobilized receptor to recover the complexes containing active peptides. The associated plasmid DNA is then reintroduced into cells for amplification and DNA sequencing to determine the identity of the peptide ligands. As a demonstration of the practical utility of the method, a large random library of dodecapeptides was made and selected on a monoclonal antibody raised against the opioid peptide dynorphin B. A cohort of peptides was recovered, all related by a consensus sequence corresponding to a six-residue portion of dynorphin B. (Cull et al. (1992) Proc. Natl. Acad. Sci. USA. 89-1869)

[0356] This scheme, sometimes referred to as peptides-on-plasmids, differs in two important ways from the phage display methods. First, the peptides are attached to the C-terminus of the fusion protein, resulting in the display of the library members as peptides having free carboxy termini. Both of the filamentous phage coat proteins, pill and pVIII, are anchored to the phage through their C-termini, and the guest peptides are placed into the outward-extending N-terminal domains. In some designs, the phage-displayed peptides are presented right at the amino terminus of the fusion protein. (Cwirla, et al. (1990) Proc. Natl. Acad. Sci. U.S.A. 87, 6378-6382) A second difference is the set of biological biases affecting the population of peptides actually present in the libraries. The LacI fusion molecules are confined to the cytoplasm of the host cells. The phage coat fusions are exposed briefly to the cytoplasm during translation but are rapidly secreted through the inner membrane into the periplasmic compartment, remaining anchored in the membrane by their C-terminal hydrophobic domains, with the N-termini, containing the peptides, protruding into the periplasm while awaiting assembly into phage particles. The peptides in the LacI and phage libraries may differ significantly as a result of their exposure to different proteolytic activities. The phage coat proteins require transport across the inner membrane and signal peptidase processing as a prelude to incorporation into phage. Certain peptides exert a deleterious effect on these processes and are underrepresented in the libraries (Gallop et al. (1994) J. Med. Chem. 37(9):1233-¹²⁵I). These particular biases are not a factor in the LacI display system.

[0357] The number of small peptides available in recombinant random libraries is enormous. Libraries of 10⁷-10⁹ independent clones are routinely prepared. Libraries as large as 10¹¹ recombinants have been created, but this size approaches the practical limit for clone libraries. This limitation in library size occurs at the step of transforming the DNA containing randomized segments into the host bacterial cells. To circumvent this limitation, an in vitro system based on the display of nascent peptides in polysome complexes has recently been developed. This display library method has the potential of producing libraries 3-6 orders of magnitude larger than the currently available phage/phagemid or plasmid libraries. Furthermore, the construction of the libraries, expression of the peptides, and screening, is done in an entirely cell-free format.

[0358] In one application of this method (Gallop et al. (1994) J. Med. Chem. 37(9):1233-1251), a molecular DNA library encoding 10¹² decapeptides was constructed and the library expressed in an E. coli S30 in vitro coupled transcription/translation system. Conditions were chosen to stall the ribosomes on the mRNA, causing the accumulation of a substantial proportion of the RNA in polysomes and yielding complexes containing nascent peptides still linked to their encoding RNA. The polysomes are sufficiently robust to be affinity purified on immobilized receptors in much the same way as the more conventional recombinant peptide display libraries are screened. RNA from the bound complexes is recovered, converted to cDNA, and amplified by PCR to produce a template for the next round of synthesis and screening. The polysome display method can be coupled to the phage display system. Following several rounds of screening, cDNA from the enriched pool of polysomes was cloned into a phagemid vector. This vector serves as both a peptide expression vector, displaying peptides fused to the coat proteins, and as a DNA sequencing vector for peptide identification. By expressing the polysome-derived peptides on phage, one can either continue the affinity selection procedure in this format or assay the peptides on individual clones for binding activity in a phage ELISA, or for binding specificity in a completion phage ELISA (Barret, et al. (1992) Anal. Biochem 204,357-364). To identify the sequences of the active peptides one sequences the DNA produced by the phagemid host.

[0359] Secondary Screening of Polypeptides and Analogs

[0360] The high through-put assays described above can be followed by secondary screens in order to identify further biological activities which will, e.g., allow one skilled in the art to differentiate agonists from antagonists. The type of a secondary screen used will depend on the desired activity that needs to be tested. For example, an assay can be developed in which the ability to inhibit an interaction between a protein of interest and its respective ligand can be used to identify antagonists from a group of peptide fragments isolated though one of the primary screens described above.

[0361] Therefore, methods for generating fragments and analogs and testing them for activity are known in the art. Once the core sequence of interest is identified, it is routine for one skilled in the art to obtain analogs and fragments.

[0362] Peptide Mimetics of H. pylori Polypeptides

[0363] The invention also provides for reduction of the protein binding domains of the subject H. pylori polypeptides to generate mimetics, e.g. peptide or non-peptide agents. The peptide mimetics are able to disrupt binding of a polypeptide to its counter ligand, e.g., in the case of an H. pylori polypeptide binding to a naturally occurring ligand. The critical residues of a subject H. pylori polypeptide which are involved in molecular recognition of a polypeptide can be determined and used to generate H. pylori-derived peptidomimetics which competitively or noncompetitively inhibit binding of the H. pylori polypeptide with an interacting polypeptide (see, for example, European patent applications EP-412,762A and EP-B31,080A).

[0364] For example, scanning mutagenesis can be used to map the amino acid residues of a particular H. pylori polypeptide involved in binding an interacting polypeptide, peptidomimetic compounds (e.g. diazepine or isoquinoline derivatives) can be generated which mimic those residues in binding to an interacting polypeptide, and which therefore can inhibit binding of an H. pylori polypeptide to an interacting polypeptide and thereby interfere with the function of H. pylori polypeptide. For instance, non-hydrolyzable peptide analogs of such residues can be generated using benzodiazepine (e.g., see Freidinger et al. in Peptides: Chemistry and Biology, G. R. Marshall ed., ESCOM Publisher: Leiden, Netherlands, 1988), azepine (e.g., see Huffman et al. in Peptides: Chemistry and Biology, G. R. Marshall ed., ESCOM Publisher: Leiden, Netherlands, 1988), substituted gama lactam rings (Garvey et al. in Peptides. Chemistry and Biology, G. R. Marshall ed., ESCOM Publisher: Leiden, Netherlands, 1988), keto-methylene pseudopeptides (Ewenson et al. (1986) J Med Chem 29:295; and Ewenson et al. in Peptides: Structure and Function (Proceedings of the 9th American Peptide Symposium) Pierce Chemical Co. Rockland, Ill., 1985), β-turn dipeptide cores (Nagai et al. (1985) Tetrahedron Lett 26:647; and Sato et al. (1986) J Chem Soc Perkin Trans 1:1231), and β-aminoalcohols (Gordon et al. (1985) Biochem Biophys Res Commun126:419; and Dann et al. (1986) Biochem Biophys Res Commun 134:71).

[0365] VI. Vaccine Formulations for H. pylori Nucleic Acids and Polypeptides

[0366] This invention also features vaccine compositions or formulations (used interchangeably herein) for protection against infection by H. pylori or for treatment of H. pylori infection. As used herein, the term “treatment of H. pylori infection” refers to therapeutic treatment of an existing or established H pylori infection. The terms “protection against H. pylori infection” or “prophylactic treatment” refer to the use of H. pylori vaccine formulation for reducing the risk of or preventing an infection in a subject at risk for H. pylori infection. In one embodiment, the vaccine compositions contain one or more immunogenic components, such as a surface protein, from H. pylori, or portion thereof, and a pharmaceutically acceptable carrier. For example, in one embodiment, the vaccine formulations of the invention contain at least one or combination of H. pylori polypeptides or fragments thereof, from same or different H. pylori antigens. Nucleic acids and H. pylori polypeptides for use in the vaccine formulations of the invention include the nucleic acids and polypeptides set forth in the Sequence Listing, preferably those H. pylori nucleic acids that encode surface proteins and surface proteins or fragments thereof. For example, a preferred nucleic acid and H. pylori polypeptide for use in a vaccine composition of the invention is selected from the group of nucleic acids which encode cell envelope proteins and H. pylori cell envelope proteins as set forth in Table 1. However, any nucleic acid encoding an immunogenic H. pylori protein and H. pylori polypetide, or portion thereof, can be used in the present invention. These vaccines have therapeutic and/or prophylactic utilities.

[0367] One aspect of the invention provides a vaccine composition for protection against infection by H. pylori which contains at least one immunogenic fragment of an H. pylori protein and a pharmaceutically acceptable carrier. Preferred fragments include peptides of at least about 10 amino acid residues in length, preferably about 10-20 amino acid residues in length, and more preferably about 12-16 amino acid residues in length.

[0368] Immunogenic components of the invention can be obtained, for example, by screening polypeptides recombinantly produced from the corresponding fragment of the nucleic acid encoding the full-length H. pylori protein. In addition, fragments can be chemically synthesized using techniques known in the art such as conventional Merrifield solid phase f-Moc or t-Boc chemistry.

[0369] In one embodiment, immunogenic components are identified by the ability of the peptide to stimulate T cells. Peptides which stimulate T cells, as determined by, for example, T cell proliferation or cytokine secretion are defined herein as comprising at least one T cell epitope. T cell epitopes are believed to be involved in initiation and perpetuation of the immune response to the protein allergen which is responsible for the clinical symptoms of allergy. These T cell epitopes are thought to trigger early events at the level of the T helper cell by binding to an appropriate HLA molecule on the surface of an antigen presenting cell, thereby stimulating the T cell subpopulation with the relevant T cell receptor for the epitope. These events lead to T cell proliferation, lymphokine secretion, local inflammatory reactions, recruitment of additional immune cells to the site of antigen/T cell interaction, and activation of the B cell cascade, leading to the production of antibodies. A T cell epitope is the basic element, or smallest unit of recognition by a T cell receptor, where the epitope comprises amino acids essential to receptor recognition (e.g., approximately 6 or 7 amino acid residues). Amino acid sequences which mimic those of the T cell epitopes are within the scope of this invention.

[0370] In another embodiment, immunogenic components of the invention are identified through genomic vaccination. The basic protocol is based on the idea that expression libraries consisting of all or parts of a pathogen genome, e.g., an H. pylori genome, can confer protection when used to genetically immunize a host. This expression library immunization (ELI) is analogous to expression cloning and involves reducing a genomic expression library of a pathogen, e.g., H. pylori, into plasmids that can act as genetic vaccines. The plasmids can also be designed to encode genetic adjuvants which can dramatically stimulate the humoral response. These genetic adjuvants can be introduced at remote sites and act as well extracelluraly as intracellularly.

[0371] This is a new approach to vaccine production that has many of the advantages of live/attenuated pathogens but no risk of infection. An expression library of pathogen DNA is used to immunize a host thereby producing the effects of antigen presentation of a live vaccine without the risk. For example, in the present invention, random fragments from the H. pylori genome or from cosmid or plasmid clones, as well as PCR products from genes identified by genomic sequencing, can be used to immunize a host. The feasibility of this approach has been demonstrated with Mycoplasma pulmonis (Barry et al., Nature 377:632-635, 1995), where even partial expression libraries of Mycoplasma pulnionis, a natural pathogen in rodents, provided protection against challenge from the pathogen.

[0372] ELI is a technique that allows for production of a non-infectious multipartite vaccine, even when little is known about pathogen's biology, because ELI uses the immune system to screen candidate genes. Once isolated, these genes can be used as genetic vaccines or for development of recombinant protein vaccines. Thus, ELI allows for production of vaccines in a systematic, largely mechanized fashion.

[0373] Screening immunogenic components can be accomplished using one or more of several different assays. For example, in vitro, peptide T cell stimulatory activity is assayed by contacting a peptide known or suspected of being immunogenic with an antigen presenting cell which presents appropriate MHC molecules in a T cell culture. Presentation of an immunogenic H. pylori peptide in association with appropriate MHC molecules to T cells in conjunction with the necessary costimulation has the effect of transmitting a signal to the T cell that induces the production of increased levels of cytokines, particularly of interleukin-2 and interleukin-4. The culture supernatant can be obtained and assayed for interleukin-2 or other known cytokines. For example, any one of several conventional assays for interleukin-2 can be employed, such as the assay described in Proc. Natl. Acad. Sci USA, 86: 1333 (1989) the pertinent portions of which are incorporated herein by reference. A kit for an assay for the production of interferon is also available from Genzyme Corporation (Cambridge, Mass.).

[0374] Alternatively, a common assay for T cell proliferation entails measuring tritiated thymidine incorporation. The proliferation of T cells can be measured in vitro by determining the amount of ³H-labeled thymidine incorporated into the replicating DNA of cultured cells. Therefore, the rate of DNA synthesis and, in turn, the rate of cell division can be quantified.

[0375] Vaccine compositions or formulations of the invention containing one or more immunogenic components (e.g., H. pylori polypeptide or fragment thereof or nucleic acid encoding an H. pylori polypeptide or fragment thereof) preferably include a pharmaceutically acceptable carrier. The term “pharmaceutically acceptable carrier” is intended to include any and all solvents, dispersion media, coatings, antibacterial and antifungal agents, isotonic and absorption delaying agents, and the like, compatible with pharmaceutical administration. Suitable pharmaceutically acceptable carriers include, for example, one or more of water, saline, phosphate buffered saline, dextrose, glycerol, ethanol and the like, as well as combinations thereof. Pharmaceutically acceptable carriers may further comprise minor amounts of auxiliary substances such as wetting or emulsifying agents, preservatives or buffers, which enhance the shelf life or effectiveness of the H. pylori nucleic acid or polypeptide. For vaccine formulations of the invention containing H. pylori polypeptides, the polypeptide is preferably coadministered with a suitable adjuvant and/or a delivery system described herein.

[0376] It will be apparent to those of skill in the art that the therapeutically effective amount of DNA or protein of this invention will depend, inter alia, upon the administration schedule, the unit dose of an H. pylori nucleic acid or polypeptide administered, whether the protein or nucleic acid is administered in combination with other therapeutic agents, the immune status and health of the patient, and the therapeutic activity of the particular protein or nucleic acid.

[0377] Vaccine formulations are conventionally administered parenterally, e.g., by injection, either subcutaneously or intramuscularly. Methods for intramuscular immunization are described by Wolff et al. (1990) Science 247: 1465-1468 and by Sedegah et al. (1994) Immunology 91: 9866-9870. Other modes of administration include oral and pulmonary formulations, suppositories, and transdermal applications. Oral immunization is preferred over parenteral methods for inducing protection against infection by H. pylori. Czinn et. al. (1993) Vaccine 11: 637-642. Oral formulations include such normally employed excipients as, for example, pharmaceutical grades of mannitol, lactose, starch, magnesium stearate, sodium saccharine, cellulose, magnesium carbonate, and the like.

[0378] In one embodiment, the vaccine formulation includes, as a pharmaceutically acceptable carrier, an adjuvant. Examples of the suitable adjuvants for use in the vaccine formulations of the invention include, but are not limited, to aluminum hydroxide; N-acetyl-muramyl—L-threonyl-D-isoglutamine (thr-MDP); N-acetyl-nor-muramyl-L-alanyl-D-isoglutamine (CGP 11637, referred to as nor-MDP); N-acetylmuramyl-L-alanyl-D-isoglutaminyl-L-alanine-2-(1′-2′-dipalmitoyl-sn-glycero-3-hydroxyphos-phoryloxy)-ethylamine (CGP 19835A, referred to a MTP-PE); RIBI, which contains three components from bacteria; monophosphoryl lipid A; trehalose dimycoloate; cell wall skeleton (MPL+TDM+CWS) in a 2% squalene/Tween 80 emulsion; and cholera toxin. Others which may be used are non-toxic derivatives of cholera toxin, including its B subunit, and/or conjugates or genetically engineered fusions of the H. pylori polypeptide with cholera toxin or its B subunit, procholeragenoid, fungal polysaccharides, including schizophyllan, muramyl dipeptide, muramyl dipeptide derivatives, phorbol esters, labile toxin of E. coli, non-H. pylori bacterial lysates, block polymers or saponins.

[0379] In another embodiment, the vaccine formulation includes, as a pharmaceutically acceptable carrier, a delivery system. Suitable delivery systems for use in the vaccine formulations of the invention include biodegradable microcapsules or immuno-stimulating complexes (ISCOMs), cochleates, or liposomes, genetically engineered attenuated live vectors such as viruses or bacteria, and recombinant (chimeric) virus-like particles, e.g., bluetongue. In another embodiment of the invention, the vaccine formulation includes both a delivery system and an adjuvant.

[0380] Delivery systems in humans may include enteric release capsules protecting the antigen from the acidic environment of the stomach, and including H. pylori polypeptide in an insoluble form as fusion proteins. Suitable carriers for the vaccines of the invention are enteric coated capsules and polylactide-glycolide microspheres. Suitable diluents are 0.2 N NaHCO3 and/or saline.

[0381] Vaccines of the invention can be administered as a primary prophylactic agent in adults or in children, as a secondary prevention, after successful eradication of H. pylori in an infected host, or as a therapeutic agent in the aim to induce an immune response in a susceptible host to prevent infection by H. pylori. The vaccines of the invention are administered in amounts readily determined by persons of ordinary skill in the art. Thus, for adults a suitable dosage will be in the range of 10 μg to 10 g, preferably 10 μg to 100 mg, for example 50 μg to 50 mg. A suitable dosage for adults will also be in the range of 5 μg to 500 mg. Similar dosage ranges will be applicable for children.

[0382] The amount of adjuvant employed will depend on the type of adjuvant used. For example, when the mucosal adjuvant is cholera toxin, it is suitably used in an amount of 5 μg to 50 μg, for example 10 μg to 35 μg. When used in the form of microcapsules, the amount used will depend on the amount employed in the matrix of the microcapsule to achieve the desired dosage. The determination of this amount is within the skill of a person of ordinary skill in the art.

[0383] Those skilled in the art will recognize that the optimal dose may be more or less depending upon the patient's body weight, disease, the route of administration, and other factors. Those skilled in the art will also recognize that appropriate dosage levels can be obtained based on results with known oral vaccines such as, for example, a vaccine based on an E. coli lysate (6 mg dose daily up to total of 540 mg) and with an enterotoxigenic E. coli purified antigen (4 doses of 1 mg) (Schulman et al., J. Urol. 150:917-921 (1993)); Boedecker et al., American Gastroenterological Assoc. 999:A-222 (1993)). The number of doses will depend upon the disease, the formulation, and efficacy data from clinical trials. Without intending any limitation as to the course of treatment, the treatment can be administered over 3 to 8 doses for a primary immunization schedule over 1 month (Boedeker, American Gastroenterological Assoc. 888:A-222 (1993)).

[0384] In a preferred embodiment, a vaccine composition of the invention can be based on a killed whole E coli preparation with an immunogenic fragment of an H. pylori protein of the invention expressed on its surface or it can be based on an E. coli lysate, wherein the killed E. coli acts as a carrier or an adjuvant.

[0385] It will be apparent to those skilled in the art that some of the vaccine 4 compositions of the invention are useful only for preventing H. pylori infection, some are useful only for treating H. pylori infection, and some are useful for both preventing and treating H. pylori infection. In a preferred embodiment, the vaccine composition of the invention provides protection against H. pylori infection by stimulating humoral and/or cell-mediated immunity against H. pylori. It should be understood that amelioration of any of the symptoms of H. pylori infection is a desirable clinical goal, including a lessening of the dosage of medication used to treat H. pylori-caused disease, or an increase in the production of antibodies in the serum or mucous of patients.

[0386] VII. Antibodies Reactive With H. pylori Polypeptides

[0387] The invention also includes antibodies specifically reactive with the subject H. pylori polypeptide. Anti-protein/anti-peptide antisera or monoclonal antibodies can be made by standard protocols (See, for example, Antibodies: A Laboratory Manual ed. by Harlow and Lane (Cold Spring Harbor Press: 1988)). A mammal such as a mouse, a hamster or rabbit can be immunized with an immunogenic form of the peptide. Techniques for conferring immunogenicity on a protein or peptide include conjugation to carriers or other techniques well known in the art. An immunogenic portion of the subject H. pylori polypeptide can be administered in the presence of adjuvant. The progress of immunization can be monitored by detection of antibody titers in plasma or serum. Standard ELISA or other immunoassays can be used with the immunogen as antigen to assess the levels of antibodies.

[0388] In a preferred embodiment, the subject antibodies are immunospecific for antigenic determinants of the H. pylori polypeptides of the invention, e.g. antigenic determinants of a polypeptide of the invention contained in the Sequence Listing, or a closely related human or non-human mammalian homolog (e.g., 90% homologous, more preferably at least 95% homologous). In yet a further preferred embodiment of the invention, the anti-H. pylori antibodies do not substantially cross react (i.e., react specifically) with a protein which is for example, less than 80% percent homologous to a sequence of the invention contained in the Sequence Listing. By “not substantially cross react”, it is meant that the antibody has a binding affinity for a non-homologous protein which is less than 10 percent, more preferably less than 5 percent, and even more preferably less than 1 percent, of the binding affinity for a protein of the invention contained in the Sequence Listing. In a most preferred embodiment, there is no crossreactivity between bacterial and mammalian antigens.

[0389] The term antibody as used herein is intended to include fragments thereof which are also specifically reactive with H. pylori polypeptides. Antibodies can be fragmented using conventional techniques and the fragments screened for utility in the same manner as described above for whole antibodies. For example, F(ab′)₂ fragments can be generated by treating antibody with pepsin. The resulting F(ab′)₂ fragment can be treated to reduce disulfide bridges to produce Fab′ fragments. The antibody of the invention is further intended to include bispecific and chimeric molecules having an anti-H. pylori portion.

[0390] Both monoclonal and polyclonal antibodies (Ab) directed against H. pylori polypeptides or H. pylori polypeptide variants, and antibody fragments such as Fab′ and F(ab′)₂, can be used to block the action of H. pylori polypeptide and allow the study of the role of a particular H. pylori polypeptide of the invention in aberrant or unwanted intracellular signaling, as well as the normal cellular function of the H. pylori and by microinjection of anti-H. pylori polypeptide antibodies of the present invention.

[0391] Antibodies which specifically bind H. pylori epitopes can also be used in immunohistochemical staining of tissue samples in order to evaluate the abundance and pattern of expression of H. pylori antigens. Anti H. pylori polypeptide antibodies can be used diagnostically in immuno-precipitation and immuno-blotting to detect and evaluate H. pylori levels in tissue or bodily fluid as part of a clinical testing procedure. Likewise, the ability to monitor H. pylori polypeptide levels in an individual can allow determination of the efficacy of a given treatment regimen for an individual afflicted with such a disorder. The level of an H. pylori polypeptide can be measured in cells found in bodily fluid, such as in urine samples or can be measured in tissue, such as produced by gastric biopsy. Diagnostic assays using anti-H. pylori antibodies can include, for example immunoassays designed to aid in early diagnosis of H. pylori infections. The present invention can also be used as a method of detecting antibodies contained in samples from individuals infected by this bacterium using specific H. pylori antigens.

[0392] Another application of anti-H. pylori polypeptide antibodies of the invention is in the immunological screening of cDNA libraries constructed in expression vectors such as λgt11, λgt18-23, λZAP, and λORF8. Messenger libraries of this type, having coding sequences inserted in the correct reading frame and orientation, can produce fusion proteins. For instance, λgt11 will produce fusion proteins whose amino termini consist of β-galactosidase amino acid sequences and whose carboxy termini consist of a foreign polypeptide. Antigenic epitopes of a subject H. pylori polypeptide can then be detected with antibodies, as, for example, reacting nitrocellulose filters lifted from infected plates with anti-H. pylori polypeptide antibodies. Phage, scored by this assay, can then be isolated from the infected plate. Thus, the presence of H. pylori gene homologs can be detected and cloned from other species, and alternate isoforms (including splicing variants) can be detected and cloned.

[0393] VIII. Kits Containing Nucleic Acids, Polypeptides or Antibodies of the Invention

[0394] The nucleic acid, polypeptides and antibodies of the invention can be combined with other reagents and articles to form kits. Kits for diagnostic purposes typically comprise the nucleic acid, polypeptides or antibodies in vials or other suitable vessels. Kits typically comprise other reagents for performing hybridization reactions, polymerase chain reactions (PCR), or for reconstitution of lyophilized components, such as aqueous media, salts, buffers, and the like. Kits may also comprise reagents for sample processing such as detergents, chaotropic salts and the like. Kits may also comprise immobilization means such as particles, supports, wells, dipsticks and the like. Kits may also comprise labeling means such as dyes, developing reagents, radioisotopes, fluorescent agents, luminescent or chemiluminescent agents, enzymes, intercalating agents and the like. With the nucleic acid and amino acid sequence information provided herein, individuals skilled in art can readily assemble kits to serve their particular purpose. Kits further can include instructions for use.

[0395] IX. Drug Screening Assays Using H. pylori Polypeptides

[0396] By making available purified and recombinant H. pylori polypeptides, the present invention provides assays which can be used to screen for drugs which are either agonists or antagonists of the normal cellular function, in this case, of the subject H. pylori polypeptides, or of their role in intracellular signaling. Such inhibitors or potentiators may be useful as new therapeutic agents to combat H. pylori infections in humans. A variety of assay formats will suffice and, in light of the present inventions, will be comprehended by the skilled artisan.

[0397] In many drug screening programs which test libraries of compounds and natural extracts, high throughput assays are desirable in order to maximize the number of compounds surveyed in a given period of time. Assays which are performed in cell-free systems, such as may be derived with purified or semi-purified proteins, are often preferred as “primary” screens in that they can be generated to permit rapid development and relatively easy detection of an alteration in a molecular target which is mediated by a test compound. Moreover, the effects of cellular toxicity and/or bioavailability of the test compound can be generally ignored in the in vitro system, the assay instead being focused primarily on the effect of the drug on the molecular target as may be manifest in an alteration of binding affinity with other proteins or change in enzymatic properties of the molecular target. Accordingly, in an exemplary screening assay of the present invention, the compound of interest is contacted with an isolated and purified H. pylori polypeptide.

[0398] Screening assays can be constructed in vitro with a purified H. pylori polypeptide or fragment thereof, such as an H. pylori polypeptide having enzymatic activity, such that the activity of the polypeptide produces a detectable reaction product. The efficacy of the compound can be assessed by generating dose response curves from data obtained using various concentrations of the test compound. Moreover, a control assay can also be performed to provide a baseline for comparison. Suitable products include those with distinctive absorption, fluorescence, or chemi-luminescence properties, for example, because detection may be easily automated. A variety of synthetic or naturally occurring compounds can be tested in the assay to identify those which inhibit or potentiate the activity of the H. pylori polypeptide. Some of these active compounds may directly, or with chemical alterations to promote membrane permeability or solubility, also inhibit or potentiate the same activity (e.g., enzymatic activity) in whole, live H. pylori cells.

[0399] This invention is further illustrated by the following examples which should not be construed as limiting. The contents of all references and published patent applications cited throughout this application are hereby incorporated by reference.

### EXEMPLIFICATION

[0400] I. Cloning and Sequencing of H. pylori DNA

[0401] H. pylori chromosomal DNA was isolated according to a basic DNA protocol outlined in Schleif R. F. and Wensink P. C., Practical Methods in Molecular Biology, p.98, Springer-Verlag, N.Y., 1981, with minor modifications. Briefly, cells were pelleted, resuspended in TE (10 mM Tris, 1 mM EDTA, pH 7.6) and GES lysis buffer (5.1 M guanidium thiocyanate, 0.1 M EDTA, pH 8.0, 0.5% N-laurylsarcosine) was added. Suspension was chilled and ammonium acetate (NH₄Ac) was added to final concentration of 2.0 M. DNA was extracted, first with chloroform, then with phenol-chloroform, and reextracted with chloroform. DNA was precipitated with isopropanol, washed twice with 70% EtOH, dried and resuspended in TE.

[0402] Following isolation whole genomic H. pylori DNA was nebulized (Bodenteich et al., Automated DNA Sequencing and Analysis (J. C. Venter, ed.), Academic Press, 1994) to a median size of 2000 bp. After nebulization, the DNA was concentrated and separated on a standard 1% agarose gel. Several fractions, corresponding to approximate sizes 900-1300 bp, 1300-1700 bp, 1700-2200 bp, 2200-2700 bp, were excised from the gel and purified by the GeneClean procedure (Bio101, Inc.).

[0403] The purified DNA fragments were then blunt-ended using T4 DNA polymerase. The healed DNA was then ligated to unique BstXI-linker adapters in 100-1000 fold molar excess. These linkers are complimentary to the BstXI-cut pMPX vectors, while the overhang is not self-complimentary. Therefore, the linkers will not concatemerize nor will the cut-vector religate itself easily. The linker-adopted inserts were separated from the unincorporated linkers on a 1% agarose gel and purified using GeneClean. The linker-adopted inserts were then ligated to each of the 20 pMPX vectors to construct a series of “shotgun” subclone libraries. The vectors contain an out-of-frame lacZ gene at the cloning site which becomes in-frame in the event that an adapter-dimer is cloned, allowing these to be avoided by their blue-color.

[0404] All subsequent steps were based on the multiplex DNA sequencing protocols outlined in Church G. M. and Kieffer-Higgins S., Science 240:185-188, 1988. Only major modifications to the protocols are highlighted. Briefly, each of the 20 vectors was then transformed into DH5α competent cells (Gibco/BRL, DH5α transformation protocol). The libraries were assessed by plating onto antibiotic plates containing ampicillin, methicillin and IPTG/Xgal. The plates were incubated overnight at 37° C. Successful transformants were then used for plating of clones and pooling into the multiplex pools. The clones were picked and pooled into 40 ml growth medium cultures. The cultures were grown overnight at 37° C. DNA was purified using the Qiagen Midi-prep kits and Tip-100 columns (Qiagen, Inc.). In this manner, 100 μg of DNA was obtained per pool. Fifteen 96-well plates of DNA were generated to obtain a 5-10 fold sequence redundancy assuming 250-300 base average read-lengths.

[0405] These purified DNA samples were then sequenced using the multiplex DNA sequencing based on chemical degradation methods (Church G. M. and Kieffer-Higgins S., Science 240:185-188, 1988) or by Sequthrem (Epicenter Technologies) dideoxy sequencing protocols. The sequencing reactions were electrophoresed and transferred onto nylon membranes by direct transfer electrophoresis from 40 cm gels (Richterich P. and Church G. M., Methods in Enzymology 218:187-222, 1993) or by electroblotting (Church, supra). 24 samples were run per gel. 45 successful membranes were produced by chemical sequencing and 8 were produced by dideoxy sequencing. The DNA was covalently bound to the membranes by exposure to ultraviolet light, and hybridized with labeled oligonucleotides complimentary to tag sequences on the vectors (Church, supra). The membranes were washed to rinse off non-specifically bound probe, and exposed to X-ray film to visualize individual sequence ladders. After autoradiography, the hybridized probe was removed by incubation at 65° C., and the hybridization cycle repeated with another tag sequence until the membrane had been probed 38 times for chemical sequencing membranes and 10 times for the dideoxy sequencing membranes. Thus, each gel produced a large number of films, each containing new sequencing information. Whenever a new blot was processed, it was initially probed for an internal standard sequence added to each of the pools.

[0406] Digital images of the films were generated using a laser-scanning densitometer (Molecular Dynamics, Sunnyvale, Calif.). The digitized images were processed on computer workstations (VaxStation 4000's) using the program REPLICA™ (Church et al., Automated DNA Sequencing and Analysis (J. C. Venter, ed.), Academic Press, 1994). Image processing included lane straightening, contrast adjustment to smooth out intensity differences, and resolution enhancement by iterative gaussian deconvolution. The sequences were then automatically picked in REPLICA™ and displayed for interactive proofreading before being stored in a project database. The proofreading was accomplished by a quick visual scan of the film image followed by mouse clicks on the bands of the displayed image to modify the base calls. Many of the sequence errors could be detected and corrected because multiple sequence reads covering the same portion of the genomic DNA provide adequate sequence redundancy for editing. Each sequence automatically received an identification number (corresponding to microtiter plate, probe information, and lane set number). This number serves as a permanent identifier of the sequence so it is always possible to identify the original of any particular sequence without recourse to a specialized database.

[0407] Routine assembly of H. pylori sequences was done using the program FALCON (Church, Church et al., Automated DNA Sequenicng and Analysis (J. C. Venter, ed.), Academic Press, 1994). This program has proven to be fast and reliable for most sequences. The assembled contigs were displayed using a modified version of GelAssemble, developed by the Genetics Computer Group (GCG) (Devereux et al., Nucleic Acid Res. 12:387-95, 1984) that interacts with REPLICA™. This provided for an integrated editor that allows multiple sequence gel images to be instantaneously called up from the REPLICA™ database and displayed to allow rapid scanning of contigs and proofreading of gel traces where discrepancies occurred between different sequence reads in the assembly.

[0408] II. Identification, Cloning and Expression of recombinant H. pylori DNA Sequences

[0409] To facilitate the cloning, expression and purification of membrane and secreted proteins from H. pylori a powerful gene expression system, the pET System (Novagen), for cloning and expression of recombinant proteins in E. coli, was selected. Also, a DNA sequence encoding a peptide tag, the His-Tag, was fused to the 3′ end of DNA sequences of interest in order to facilitate purification of the recombinant protein products. The 3′ end was selected for fusion in order to avoid alteration of any 5′ terminal signal sequence. The exception to the above was ppiB, a gene cloned for use as a control in the expression studies. In this study, the sequence for H. pylori ppiB contains a DNA sequence encoding a His-Tag fused to the 5′ end of the full length gene, because the protein product of this gene does not contain a signal sequence and is expressed as a cytosolic protein.

[0410] PCR Amplification and Cloning of DNA Sequences Containing ORF's for Membrane and Secreted Proteins from the J99 Strain of Helicobacter pylori.

[0411] Sequences chosen (from the list of the DNA sequences of the invention) for cloning from the J99 strain of H. pylori were prepared for amplification cloning by polymerase chain reaction (PCR). Synthetic oligonucleotide primers (Table 3) specific for the 5′ and 3′ ends of open reading frames (ORFs) were designed and purchased (GibcoBRL Life Technologies, Gaithersburg, Md., USA). All forward primers (specific for the 5′ end of the sequence) were designed to include an NcoI cloning site at the extreme 5′ terminus, except for HpSeq. 4821082 (SEQ ID NO: 9730) where NdeI was used. These primers were designed to permit initiation of protein translation at a methionine residue followed by a valine residue and the coding sequence for the remainder of the native H. pylori DNA sequence. An exception is H. pylori sequence 4821082 (SEQ ID NO: 9730) where the initiator methionine is immediately followed by the remainder of the native H. pylori DNA sequence. All reverse primers (specific for the 3′ end of any H. pylori ORF) included a EcoRI site at the extreme 5′ terminus to permit cloning of each H. pylori sequence into the reading frame of the pET-28b. The pET-28b vector provides sequence encoding an additional 20 carboxy-terminal amino acids (only 19 amino acids in HpSeq. 26380318 (SEQ ID NO: 4851) and HpSeq.14640637 (SEQ ID NO: 8015) including six histidine residues (at the extreme C-terminus), which comprise the His-Tag. An exception to the above, as noted earlier, is the vector construction for the ppiB gene. A synthetic oligonucleotide primer specific for the 5′ end of ppiB gene encoded a BamHI site at its extreme 5′ terminus and the primer for the 3′ end of the ppiB gene encoded a XhoI site at its extreme 5′ terminus.

TABLE 3

Oligonucleotide primers used for PCR amplification of H pylon DNA se-
quences

| | |
|---|---|
| Forward primer 5′ to 3′ | Reverse Primer 5′ to 3′ |

| | | |
|---|---|---|
| Outer membrane | | |
| Proteins | | |
| Protein 16225006 | 5′-TATACCATGGTGGG | 5′- |
| (aa SEQ ID NO: 9642) | CGCTAA-3′(SEQ ID | ATGAATTCGAGTAAG |
| (nt SEQ ID NO: 9530) | NO:9749) | GATTTTTG-3′ (SEQ ID |
| | | NO:9750) |
| Protein 26054702 | 5′- | 5′- |
| (aa SEQ ID NO: 9450) | TTAACCATGGTGAAA | TAGAATTCGCATAAC |
| (nt SEQ ID NO: 4688) | AGCGATA-3′ (SEQ ID | GATCAATC-3′ (SEQ ID |
| | NO:9751) | NO:9752) |
| Protein 7116626 | 5′- | 5′- |
| (aa SEQ ID NO: 9048) | ATATCCATGGTGAGT | ATGAATTCAATTTTT |
| (nt SEQ ID NO: 4286) | TTGATGA-3′ (SEQ ID | TATTTTGCCA-3′ (SEQ |
| | NO:9753) | ID NO:9754) |
| Protein 29479681 | 5′- | 5′- |
| (aa SEQ ID NO: 5379) | AATTCCATGGTGGGG | ATGAATTCTCGATAG |
| (nt SEQ ID NO: 617) | GCTATG-3′ (SEQ ID | CCAAAATC-3′ (SEQ ID |
| | NO:9755) | NO:9756) |
| Protein 14640637 | 5′- | 5′- |
| (aa SEQ ID NO: 8015) | AATTCCATGGTGCAT | AAGAATTCTCTAGCA |
| (nt SEQ ID NO: 3253) | AACTTCCATT-3′ (SEQ | TCCAAATGGA-3′ (SEQ |
| | ID NO:9757) | ID NO:9758) |
| Periplasmic/Secreted | | |
| Proteins | | |
| Protein 30100332 | 5′-ATTTCCATGGTCATG | 5′- |
| (aa SEQ ID NO: 5933) | TCTCATATT-3′ (SEQ ID | ATGAATTCCATCTTT |
| (nt SEQ ID NO: 1171) | NO:9759) | TATTCCAC-3′ (SEQ ID |
| | | NO:9760) |
| Protein 4721061 | 5′-AACCATGGTGATTT | 5′- |
| (aa SEQ ID NO: 5181) | TAAGCATTGAAAG-3′ | AAGAATTCCACTCA |
| (nt SEQ ID NO: 419) | (SEQ ID NO:9761) | AAATTTTTTAACAG-3′ |
| | | (SEQ ID NO:9762) |
| Other Surface Proteins | | |
| Protein 4821082 | 5′-GATCATCCATATGTT | 5′- |
| (aa SEQ ID NO: 9730) | ATCTTCTAAT-3′ (SEQ | TCAATCAACCATTT |
| (nt SEQ ID NO: 9618 | ID NO:9763) | TAACCCTG-3′ (SEQ ID |
| | | NO:9764) |
| Protein 978477 | 5′-TATACCATGGTGAA | 5′- |
| (aa SEQ ID NO: 5231) | ATTTTTTCTTTTA-3′ | AGAATTCAATTGCG |
| (nt SEQ ID NO: 469) | (SEQ ID NO:9765) | TCTTGTAAAAG-3′ |
| | | (SEQ ID NO:9766) |
| Inner Membrane | | |
| Protein | | |
| Protein 26380318 | 5′-TATACCATGGTGAT | 5′-ATGAATTCCCACTT |
| (aa SEQ ID NO: 4851) | GGACAAACTC-3′ (SEQ | GGGGCGATA-3′ (SEQ |
| (nt SEQ ID NO: 89) | ID NO:9767) | ID NO:9768) |
| Cytoplasmic Protein | | |
| ppi | 5′-TTATGGATCCAAAC | 5′-TATCTCGAGTTATA |
| (aa SEQ ID NO: 7674) | CAATTAAAACT-3′ (SEQ | GAGAAGGGC-3′ (SEQ |
| (nt SEQ ID NO: 2912) | ID NO:9769) | ID NO:9770) |

[0412] Genomic DNA prepared from the J99 strain of H. pylori (ATCC #55679; deposited by Genome Therapeutics Corporation, 100 Beaver Street, Waltham, Mass. 02154) was used as the source of template DNA for PCR amplification reactions (Current Protocols in Molecular Biology, John Wiley and Sons, Inc., F. Ausubel et al., eds., 1994). To amplify a DNA sequence containing an H. pylori ORF, genomic DNA (50 nanograms) was introduced into a reaction vial containing 2 mM MgCl₂, 1 micromolar synthetic oligonucleotide primers (forward and reverse primers) complementary to and flanking a defined H. pylori ORF, 0.2 mM of each deoxynucleotide triphosphate; dATP, dGTP, dCTP, dTTP and 2.5 units of heat stable DNA polymerase (Amplitaq, Roche Molecular Systems, Inc., Branchburg, N.J., USA) in a final volume of 100 microliters. The following thermal cycling conditions were used to obtain amplified DNA products for each ORF using a Perkin Elmer Cetus/GeneAmp PCR System 9600 thermal cycler:

[0413] Protein 26054702 (SEQ ID NO: 9450), Protein 7116626 (SEQ ID NO: 9048), Protein 29479681 (SEQ ID NO: 5379), Protein 30100332 (SEQ ID NO: 5933), and Protein 4821082(SEQ ID NO: 9730);

[0414] Denaturation at 94° C. for 2 min,

[0415] 2 cycles at 94° C. for 15 sec, 30° C. for 15 sec and 72° C. for 1.5 min

[0416] 23 cycles at 94° C. for 15 sec, 55° C. for 15 sec and 72° C. for 1.5 min

[0417] Reactions were concluded at 72° C. for 6 minutes.

[0418] Protein 16225006 (SEQ ID NO: 9642);

[0419] Denaturation at 94° C. for 2 min,

[0420] 25 cycles at 95° C. for 15 sec, 55° C. for 15 sec and 72° C. for 1.5 min

[0421] Reaction was concluded at 72° C. for 6 minutes.

[0422] Protein 4721061 (SEQ ID NO: 5181);

[0423] Denaturation at 94° C. for 2 min,

[0424] 2 cycles at 94° C. for 15 sec, 36° C. for 15 sec and 72° C. for 1.5 min

[0425] 23 cycles at 94° C. for 15 sec, 60° C. for 15 sec and 72° C. for 1.5 min

[0426] Reactions were concluded at 72° C. for 6 minutes.

[0427] Protein 26380318(SEQ ID NO: 4851);

[0428] Denaturation at 94° C. for 2 min,

[0429] 2 cycles at 94° C. for 15 sec, 38° C. for 15 sec and 72° C. for 1.5 min

[0430] 23 cycles at 94° C. for 15 sec, 62° C. for 15 sec and 72° C. for 1.5 min

[0431] Reactions were concluded at 72° C. for 6 minutes.

[0432] Protein 14640637 (SEQ ID NO: 8015);

[0433] Denaturation at 94° C. for 2 min,

[0434] 2 cycles at 94° C. for 15 sec, 33° C. for 15 sec and 72° C. for 1.5 min

[0435] 30 cycles at 94° C. for 15 sec, 55° C. for 15 sec and 72° C. for 1.5 min

[0436] Reactions were concluded at 72° C. for 6 minutes.

[0437] Conditions for amplification of H. pylori ppiB (SEQ ID NO: 7674);

[0438] Denaturation at 94° C. for 2 min,

[0439] 2 cycles at 94° C. for 15 sec, 32° C. for 15 sec and 72° C. for 1.5 min

[0440] 25 cycles at 94° C. for 15 sec, 56° C. for 15 sec and 72° C. for 1.5 min

[0441] Reactions were concluded at 72° C. for 6 minutes

[0442] Upon completion of thermal cycling reactions, each sample of amplified DNA was washed and purified using the Qiaquick Spin PCR purification kit (Qiagen, Gaithersburg, Md., USA). All amplified DNA samples were subjected to digestion with the restriction endonucleases, NcoI and EcoRI (New England BioLabs, Beverly, Mass., USA), or in the case of HpSeq. 4821082 (SEQ ID NO: 9730), with NdeI and EcoRI (Current Protocols in Molecular Biology, John Wiley and Sons, Inc., F. Ausubel et al., eds., 1994). DNA samples were then subjected to electrophoresis on 1.0% NuSeive (FMC BioProducts, Rockland, Me. USA) agarose gels. DNA was visualized by exposure to ethidium bromide and long wave uv irradiation. DNA contained in slices isolated from the agarose gel was purified using the Bio 101 GeneClean Kit protocol (Bio 101 Vista, Calif., USA).

[0443] Cloning of H. pylori DNA Sequences into the pET-28b Prokaryotic Expression Vector.

[0444] The pET-28b vector-was prepared for cloning by digestion with NcoI and EcoRI, or in the case of H. pylori protein 4821082 (SEQ ID NO: 9730) with NdeI and EcoRI (Current Protocols in Molecular Biology, John Wiley and Sons, Inc., F. Ausubel et al., eds., 1994). In the case of cloning ppiB, the pET-28a vector, which encodes a His-Tag that can be fused to the 5′ end of an inserted gene, was used and the cloning site prepared for cloning with the ppiB gene by digestion with BamHI and XhoI restriction endonucleases.

[0445] Following digestion, DNA inserts were cloned (Current Protocols in Molecular Biology, John Wiley and Sons, Inc., F. Ausubel et al., eds., 1994) into the previously digested pET-28b expression vector, except for the amplified insert for ppiB, which was cloned into the pET-28a expression vector. Products of the ligation reaction were then used to transform the BL21 strain of E. coli (Current Protocols in Molecular Biology, John Wiley and Sons, Inc., F. Ausubel et al., eds., 1994) as described below.

[0446] Transformation of Competent Bacteria with Recombinant Plasmids

[0447] Competent bacteria, E coli strain BL21 or E. coli strain BL21 (DE3), were transformed with recombinant pET expression plasmids carrying the cloned H. pylori sequences according to standard methods (Current Protocols in Molecular, John Wiley and Sons, Inc., F. Ausubel et al., eds., 1994). Briefly, 1 microliter of ligation reaction was mixed with 50 microliters of electrocompetent cells and subjected to a high voltage pulse, after which, samples were incubated in 0.45 milliliters SOC medium (0.5% yeast extract, 2.0% tryptone, 10 mM NaCl, 2.5 mM KCl, 10 mM MgCl2, 10 mM MgSO4 and 20, mM glucose) at 37° C. with shaking for 1 hour. Samples were then spread on LB agar plates containing 25 microgram/ml kanamycin sulfate for growth overnight. Transformed colonies of BL21 were then picked and analyzed to evaluate cloned inserts as described below.

[0448] Identification of Recombinant pET Expression Plasmids Carrying H. pylori Sequences

[0449] Individual BL21 clones transformed with recombinant pET-28b-H. pylori ORFs were analyzed by PCR amplification of the cloned inserts using the same forward and reverse primers, specific for each H. pylori sequence, that were used in the original PCR amplification cloning reactions. Successful amplification verified the integration of the H. pylori sequences in the expression vector (Current Protocols in Molecular Biology, John Wiley and Sons, Inc., F. Ausubel et al., eds., 1994).

[0450] Isolation and Preparation of Plasmid DNA from BL21 Transformants

[0451] Individual clones of recombinant pET-28b vectors carrying properly cloned H. pylori ORFs were picked and incubated in 5 mls of LB broth plus 25 microgram/ml kanamycin sulfate overnight. The following day plasmid DNA was isolated and purified using the Qiagen plasmid purification protocol (Qiagen Inc., Chatsworth, Calif., USA).

[0452] Expression of Recombinant H. pylori Sequences in E. coli

[0453] The pET vector can be propagated in any E. coli K-12 strain e.g. HMS 174, HB 101, JM 109, DH5, etc. for the purpose of cloning or plasmid preparation. Hosts for expression include E. coli strains containing a chromosomal copy of the gene for T7 RNA polymerase. These hosts are lysogens of bacteriophage DE3, a lambda derivative that carries the lacI gene, the lacUV5 promoter and the gene for T7 RNA polymerase. T7 RNA polymerase is induced by addition of isopropyl-B-D-thiogalactoside (IPTG), and the T7 RNA polymerase transcribes any target plasmid, such as pET-28b, carrying a T7 promoter and a gene of interest. Strains used include: BL21(DE3) (Studier, F. W., Rosenberg, A. H., Dunn, J. J., and Dubendorff, J. W. (1990) Meth. Enzymol. 185, 60-89).

[0454] To express recombinant H. pylori sequences, 50 nanograms of plasmid DNA isolated as described above was used to transform competent BL21 (DE3) bacteria as described above (provided by Novagen as part of the pET expression system kit). The lacZ gene (beta-galactosidase) was expressed in the pET-System as described for the H. pylori recombinant constructions. Transformed cells were cultured in SOC medium for 1 hour, and the culture was then plated on LB plates containing 25 micrograms/ml kanamycin sulfate. The following day, bacterial colonies were pooled and grown in LB medium containing kanamycin sulfate (25 micrograms/ml) to an optical density at 600 nM of 0.5 to 1.0 O.D. units, at which point, 1 millimolar IPTG was added to the culture for 3 hours to induce gene expression of the H. pylori recombinant DNA constructions.

[0455] After induction of gene expression with IPTG, bacteria were pelleted by centrifugation in a Sorvall RC-3B centrifuge at 3500×g for 15 minutes at 4° C. Pellets were resuspended in 50 milliliters of cold 10 mM Tris-HCl, pH 8.0, 0.1 M NaCl and 0.1 mM EDTA (STE buffer). Cells were then centrifuged at 2000×g for 20 min at 4° C. Wet pellets were weighed and frozen at −80° C. until ready for protein purification.

[0456] III. Purification of Recombinant Proteins from E. coli

[0457] Analytical Methods

[0458] The concentrations of purified protein preparations were quantified spectrophotometrically using absorbance coefficients calculated from amino acid content (Perkins, S. J. 1986 Eur. J. Biochem. 157, 169-180). Protein concentrations were also measured by the method of Bradford, M. M. (1976) Anal. Biochem. 72, 248-254, and Lowry, O. H., Rosebrough, N., Farr, A. L. & Randall, R. J. (1951) J. Biol. Chem. 193, pages 265-275, using bovine serum albumin as a standard.

[0459] SDS-polyacrylamide gels (12% or 4.0 to 25% acrylamide gradient gels) were purchased from BioRad (Hercules, Calif., USA), and stained with Coomassie blue. Molecular weight markers included rabbit skeletal muscle myosin (200 kDa), E. coli (-galactosidase (116 kDa), rabbit muscle phosphorylase B (97.4 kDa), bovine serum albumin (66.2 kDa), ovalbumin (45 kDa), bovine carbonic anhydrase (31 kDa), soybean trypsin inhibitor (21.5 kDa), egg white lysozyme (14.4 kDa) and bovine aprotinin (6.5 kDa).

[0460] 1. Purification of Soluble Proteins

[0461] All steps were carried out at 4° C. Frozen cells were thawed, resuspended in 5 volumes of lysis buffer (20 mM Tris, pH 7.9, 0.5 M NaCl, 5 mM imidazole with 10% glycerol, 0.1% 2-mercaptoethanol, 200 μg/ml lysozyme, 1 mM phenylmethylsulfonyl fluoride (PMSF), and 10 ug/ml each of leupeptin, aprotinin, pepstatin, L-1-chloro-3-[4-tosylamido]-7-amino-2-heptanone (TLCK), L-1-chloro-3-[4-tosylamido]-4-phenyl-2-butanone (TPCK), and soybean trypsin inhibitor, and ruptured by several passages through a small volume microfluidizer (Model M-110S, Microfluidics International Corporation, Newton, Mass.). The resultant homogenate was made 0.1% Brij 35, and centrifuged at 100,000×g for 1 hour to yield a clear supernatant (crude extract).

[0462] Following filtration through a 0.8 μm Supor filter (Gelman Sciences, FRG) the crude extract was loaded directly onto a Ni²⁺-nitrilotriacetate-agarose (NTA) with a 5 milliliter bed volume (Hochuli, E., Dbeli, H., and Schacheer, A. (1987) J. Chromatography 411, 177-184) pre-equilibrated in lysis buffer containing 10% glycerol, 0.1% Brij 35 and 1 mM PMSF. The column was washed with 250 ml (50 bed volumes) of lysis buffer containing 10% glycerol, 0.1% Brij 35, and was eluted with sequential steps of lysis buffer containing 10% glycerol, 0.05% Brij 35, 1 mM PMSF, and 20, 100, 200, and 500 mM imidazole in succession. Fractions were monitored by absorbance at OD₂₈₀ nm, and peak fractions were analyzed by SDS-PAGE. Fractions containing the recombinant protein eluted at 100 mM imidazole.

[0463] Recombinant Protein 1-, 5-0637 (SEQ ID NO: 8015) and Proteins, Beta-Galactosidase (lacZ) and Peptidyl-prolyl Cis-trans Isomerase (ppiB SEQ ID NO: 7674)

[0464] Fractions containing the recombinant proteins from the Ni²⁺-NTA-agarose columns were pooled and then concentrated to approximately 5 ml by centrifugal filtration (Centriprep-10, Amicon, Mass.), and loaded directly onto a 180-ml column (1.6×91 cm) of Sephacryl S-100 HR gel filtration medium equilibrated in Buffer A (10 mM Hepes, pH 7.5, 150 mM NaCl, 0.1 mM EGTA) and run in Buffer A at 18 ml/h. Fractions containing the recombinant protein were identified by absorbance at 280 nm and analyzed by SDS-PAGE. Fractions were pooled and concentrated by centrifugal filtration.

[0465] Recombinant Protein 7116626 (SEQ ID NO: 9048)

[0466] Fractions containing the recombinant protein from the Ni²⁺-NTA-agarose column were pooled and dialyzed overnight against 1 liter of dialysis buffer (10 mM MOPS, pH 6.5, 50 mM NaCl, 0.1 mM EGTA, 0.02% Brij 35 and 1 mM PMSF). In the morning, a fine white precipitate was removed by centrifugation and the resulting supernatant was loaded onto an 8 ml (8×75 mm) MonoS high performance liquid chromatography column (Pharmacia Biotechnology, Inc., Piscataway, N.J., USA) equilibrated in buffer B (10 mM MOPS, pH 6.5, 0.1 mM EGTA) containing 50 mM NaCl. The column was washed with 10 bed volumes of buffer B containing 50 mM NaCl, and developed with a 50 ml linear gradient of increasing NaCl (50 to 500 mM). Recombinant protein 7116626 eluted as a sharp peak at 300 mM NaCl.

[0467] 2. Purification of Insoluble Proteins from Inclusion Bodies

[0468] The following steps were carried out at 4° C. Cell pellets were resuspended in lysis buffer with 10% glycerol 200 μg/ml lysozyme, 5 mM EDTA, 1 mM PMSF and 0.1%-mercaptoethanol. After passage through the cell disrupter, the resulting homogenate was made 0.2% deoxycholate, stirred 10 minutes, then centrifuged at 20,000×g, for 30 min. The pellets were washed with lysis buffer containing 10% glycerol, 10 mM EDTA, 1% Triton X-100, 1 mM PMSF and 0.1%-mercaptoethanol, followed by several washes with lysis buffer containing 1 M urea, 1 mM PMSF and 0.1% 2-mercaptoethanol. The resulting white pellet was composed primarily of inclusion bodies, free of unbroken cells and membranous materials.

[0469] Recombinant Proteins 26054702 (SEQ ID NO: 9450), 16225006 (SEQ ID NO: 9642), 30100332 (SEQ ID NO: 5933), 4721061 (SEQ ID NO: 5181), 978977 (SEQ ID NO: 523)

[0470] The following steps were carried out at room temperature. Purified inclusion bodies were dissolved in 20 ml 8.0 M urea in lysis buffer with 1 mM PMSF and 0.1% 2-mercaptoethanol, and incubated at room temperature for 1 hour. Materials that did not dissolve were removed by centrifugation. The clear supernatant was filtered, then loaded onto a Ni²⁺-NTA agarose column pre-equilibrated in 8.0 M urea in Lysis Buffer. The column was washed with 250 ml (50 bed volumes) of lysis buffer containing 8 M urea, 1.0 mM PMSF and 0.1% 2-mercaptoethanol, and developed with sequential steps of lysis buffer containing 8M urea, 1 mM PMSF, 0.1% 2-mercaptoethanol and 20, 100, 200, and 500 mM imidazole in succession. Fractions were monitored by absorbance at OD₂₈₀ nm, and peak fractions were analyzed by SDS-PAGE. Fractions containing the recombinant protein eluted at 100 mM imidazole.

[0471] Recombinant Proteins 29479681 (SEQ ID NO: 5379), 26380318 (SEQ ID NO: 4851)

[0472] The pellet containing the inclusion bodies was solubilized in buffer B containing 8 M urea, 1 mM PMSF and 0.1% 2-mercaptoethanol, and incubated for 1 hour at room temperature. Insoluble materials were removed by centrifugation at 20,000×g for 30 min, and the cleared supernatant was loaded onto a 15 ml (1.6×7.5 cm) SP-Sepharose column pre-equilibrated in buffer B, 6 M urea, 1 mM PMSF, 0.1% 2-mercaptoethanol. After washing the column with 10 bed volumes, the column was developed with a linear gradient from 0 to 500 mM NaCl.

[0473] Dialysis and Concentration of Protein Samples

[0474] Urea was removed slowly from the protein samples by dialysis against Tris-buffered saline (TBS; 10 mM Tris pH 8.0, 150 mM NaCl) containing 0.5% deoxycholate (DOC) with sequential reduction in urea concentration as follows; 6M, 4M, 3M; 2M, 1M, 0.5 M and finally TBS without any urea. Each dialysis step was conducted for a minimum of 4 hours at room temperature.

[0475] After dialysis, samples were concentrated by pressure filtration using Amicon stirred-cells. Protein concentrations were measured using the methods of Perkins (1986 Eur. J. Biochem. 157, 169-180), Bradford ((1976) Anal. Biochem. 72, 248-254) and Lowry ((1951) J. Biol. Chem. 193, pages 265-275).

[0476] The recombinant proteins purified by the methods described above are summarized in Table 4 below.

TABLE 4

| | | | | | | | |
|---|---|---|---|---|---|---|---|
| | | | Bacterial cell | | Relative | Final | |
| | | Gene | fraction used | | MW on | concentra- | |
| J99 | Homolog | symbol | to purify | | SDS- | tion of | Compo- |
| Sequence | identified | of | recombinant | Method of | PAGE | purified | sition of |
| Identifier | by Blast | Homolog | proteins | purification | gel | protein | buffer |

Outer Membrane Proteins

| | | | | | | | |
|---|---|---|---|---|---|---|---|
| 16225006 | P28635 | YEAC | Inclusion | His-Tag | 18 kDa | 5 mg/ml | B |
| (SEQ ID | | | bodies | | | | |
| NO: 9642) | | | | | | | |
| 26054702 | P15929 | flgH | Inclusion | His-Tag | 37 kDa | 1.18 | B |
| (SEQ ID | | | bodies | | | mg/ml | |
| NO: 9450) | | | | | | | |
| | | | | | | — | as dry |
| | | | | | | | pellet |
| 7116626 | P26093 | e(P4) | Soluble | His-Tag | 29 kDa | 0.8 mg/ml | A |
| (SEQ ID | | | fraction | | | | |
| NO: 9048) | | | | | | | |
| | | | | | | 1.85 | C |
| | | | | | | mg/ml | |
| 29479681 | P13036 | fecA | Inclusions | SP- | 23 kDa | 2.36 | B |
| (SEQ ID | | | bodies | Sepharose | | mg/ml | |
| NO: 5379) | | | | | | | |
| | | | | | | 0.5 mg/ml | B |
| | | | | | | — | as dry |
| | | | | | | | pellet |
| 14640637 | P16665 | TPF1 | Soluble | His-Tag | 17 kDa | 2.4 mg/ml | A |
| (SEQ ID | | | fraction | | | | |
| NO: 8015) | | | | | | | |

gel filtration S100 HR

Periplasmic/Secreted Protein

| | | | | | | | |
|---|---|---|---|---|---|---|---|
| 30100332 | P23847 | dppA | Inclusion | His-Tag | 11 kDa | 2.88 | B |
| (SEQ ID | | | bodies | | | mg/ml | |
| NO: 5933) | | | | | | | |
| 4721061 | P36175 | GCP | Inclusion | His-Tag | 38 kDa | 2.8 mg/ml | B |
| (SEQ ID | | | bodies | | | | |
| NO: 5181) | | | | | | | |

Other Surface Proteins

| | | | | | | | |
|---|---|---|---|---|---|---|---|
| 4821082 | P08089 | M | Inclusion | His-Tag | 20 kDa | 1.16 | B |
| (SEQ ID | | protein | bodies | | | mg/ml | |
| NO: 9730) | | | | | | | |
| 978477 | L28919 | FBP54 | Inclusion | SP- | 44 kDa | 2.56 | B |
| (SEQ ID | | | bodies | Sepharose | | mg/ml | |
| NO: 5231) | | | | | | | |
| | | | | | | 0.3 mg/ml | B |

Inner Membrane Proteins

| | | | | | | | |
|---|---|---|---|---|---|---|---|
| 26380318 | P15933 | fliG | Inclusion | SP- | 11 kDa | 22 mg/ml | B |
| (SEQ ID | | | bodies | Sepharose | | | |
| NO: 4851) | | | | | | | |

Control Proteins with His-Tag

| | P00722 | lacZ | Soluble | His-Tag | 116 kDa | 10 mg/ml | A |
|---|---|---|---|---|---|---|---|
| | | | fraction | | | | |
| | | | | gel filtration S200 HR | | | |
| ppiB | | ppiB | Soluble | His-Tag | 21 kDa | 4.4 mg/ml | A |
| (SEQ ID | | | fraction | | | | |
| NO: 7674) | | | | | | | |

gel filtration S100 HR

Buffer compositions:
A = 10 mM Hepes pH 7.5, 150 mM NaCl, 0.1 mM EGTA
B = 10 mM Tris pH 8.0, 150 mM NaCl, 0.5% DOC
C = 10 mM MOPS pH 6.5, 300 mM NaCl, 0.1 EGTA

[0477] IV. Analysis of H. pylori Proteins as Vaccine Candidates

[0478] To analyze H. pylori proteins for use in the vaccine formulations of the invention, several H. pylori proteins were expressed, characterized immunologically and tested in animal efficacy studies as outlined below. Specifically, the immunomodulatory effects of H. pylori proteins were investigated in a mouse/H. pylori model which mimics the human H. pylori infection in humans. In these studies, the effect of oral immunization of selected H. pylori polypeptides in H. pylori infected mice was determined. Those skilled in the art will recognize that in the examples outlined below, the use of cholera toxin (CT) was only illustrative and is not essential for achieving oral immunization.

[0479] Identification, Cloning and Expression of Recombinant Helicobacter Pylori Sequences.

[0480] To facilitate the cloning, expression and purification of membrane and/or secreted proteins from H. pylori, the pET gene expression system (Novagen), for cloning and expression of recombinant proteins in Escherichia coli was selected. Further, for proteins that have a signal sequence at their amino-terminal end, a DNA sequence encoding a peptide tag (His-tag) was fused to the 5′ end of the H. pylori DNA sequences of interest in order to facilitate purification of the recombinant protein products.

[0481] PCR Amplification and Cloning of DNA Sequences Containing ORFs for Membrane and Secreted Proteins from the J99 Strain of Helicobacter Pylori.

[0482] The sequences selected (from the list of the DNA sequences of the invention) for cloning from H. pylori strain J99 were prepared for amplification cloning by the polymerase chain reaction (PCR). All of the selected sequences encode for outer membrane H. pylori proteins, with vac9 (SEQ ID NO:4974), vac10 (SEQ ID NO:5016), vac22 (SEQ ID NO:4967) and vac41 (SEQ ID NO:5051) sequences all sharing a terminal phenylalanine residue. Likewise, the vac32 (SEQ ID NO:5091), vac36 (SEQ ID NO:5146) and vac37 (SEQ ID NO:5139) sequences all share a terminal phenylalanine residue and a tyrosine cluster at the C-terminus. Synthetic oligonucleotide primers for each ORF of interest (Table 5) specific for the predicted mature 5′ end of the ORF and downstream (3′) of the predicted translational termination codon were designed and purchased (GibcoBRL Life Technologies, Gaithersburg, Md., USA). All forward primers (specific for the 5′ terminus of the region of ORF of interest) were designed to include a BamIII restriction site followed by a NdeI restriction site. These primers were designed to permit the initiation of protein translation at a methionine residue encoding within the NdeI restriction site sequence (in the case of producing a non His-tagged recombinant protein) or to fuse in frame with the DNA sequence encoding the His-tag (for producing His-tagged recombinant protein), followed by the coding sequence for the remainder of the native H. pylori DNA. All reverse oligonucleotide primers (specific for downstream (3′) of the predicted translational termination codon of the ORF) were designed to include an EcoRI restriction site at the 5′ terminus. This combination of primers would enable each ORF of interest to be cloned into pET28b (to produce a His-tagged recombinant protein) or pET30a (to produce a non His-tagged or native recombinant protein). The pET28b vector provides sequence encoding an additional 20 amino-terminal amino acids (plus the methionine in the NdeI restriction site) including a stretch of six histidine residues which makes up the His-tag.

[0483] Genomic DNA prepared from H. pylori strain J99 (ATCC 55679) was used as the source of template DNA for the PCR amplification reactions (Current Protocols in Molecular Biology, John Wiley and Sons, Inc., F. Ausubel et al., eds., 1994). To amplify a DNA sequence containing a specific H. pylori ORF, genomic DNA (50 nanograms) was introduced into a reaction tube containing 200 nanograms of both the forward and reverse synthetic oligonucleotide primer specific for the ORF of interest, and 45 microliters of PCR SuperMix purchased (GibcoBRL Life Technologies, Gaithersburg, Md., USA) in a total of 50 microliters. The PCR SuperMix is supplied in 1.1× concentrations and contains 22 mM Tris-HCl (pH 8.4), 55 mM KCl, 1.65 mM MgCl₂, 220 micromolar of each dATP, dCTP, dGTP and dTTP, 22 units recombinant Taq polymerase/ml and stabilizers. The following thermal cycling conditions were used to obtain amplified DNA products for each ORF using a Perkin Elmer Cetus/Gene Amp PCR System thermal cycler.

TABLE 5

Oligonucleotide primers

| | | |
|---|---|---|
| Gene | Forward primer | Reverse primer |

| | | |
|---|---|---|
| vac9 | CGCGGATCCATATGGCTGAAA | CCGGAATTCATCAGTATTCAA |
| (nt SEQ ID | AAACGCCTTTTTTTAAAACTAA | TGGGAATAAAGCC (SEQ ID |
| NO:212) | AAACCAC (SEQ ID NO: 9771) | NO: 9772) |
| (aa SEQ ID NO: 4974) | | |
| vac 10 | CGCGGATCCATATGAAAGAAG | CCGGAATTCGCTTAAAAGAAA |
| (nt SEQ ID | AAGAAAAAGAAGAAAAAAAG | ATAGTCCCCCAAACGC (SEQ |
| NO:254) | ACAGAAAGG (SEQ ID NO: 9773) | ID NO: 9774) |
| (aa SEQ ID NO: 5016) | | |
| vac22 | CGCCGGATCCATATGAAAGAG | CCGGAATTCATATAAATATCA |
| (nt SEQ ID | GTCATTCCACCCCTTCAACCCC | TATAGGCAGAAAAAC (SEQ ID |
| NO:205) | (SEQ ID NO: 9775) | NO: 9776) |
| (aa SEQ ID NO: 4967) | | |
| vac32 | CGCGGATCCATATGGAGGCAG | CCGGAATTCGATTGATTTTGTC |
| (ft SEQ ID | AGCTTGATGAAAAATC (SEQ ID | AAATCTAAAATCCC (SEQ ID |
| NO:329) | NO: 9777) | NO: 9778) |
| (aa SEQ ID NO:5091) | | |
| vac36 (hop | TATTATACATATGGAAGAAGA | TAATCTCGAGTTTAGAAGGCG |
| B) | TGGG (SEQ ID NO: 9779) | TA (SEQ ID NO: 9780) |
| (nt SEQ ID | | |
| NO:384) | | |
| (aa SEQ ID NO:5146) | | |
| vac37 | TTATATTCATATGGAAGACGAT | AATTCTCGAGCCTCTTTATAA |
| (i-hop) | GGC (SEQ ID NO: 9781) | GCC (SEQ ID NO:9782) |
| (nt SEQ ID | | |
| NO:377) | | |
| (aa SEQ ID NO: 5139) | | |
| vac41 | CGCGGATCCATATGGTAGAAG | CCGGAATTCGGAGCCAATAGG |
| (nt SEQ ID | CCTTTCAAAAACACCAAAAAG | GAGCTAAAGCC (SEQ ID NO: |
| NO:289) | ACGG (SEQ ID NO: 9783) | 9784) |
| (aa SEQ ID NO: 5051) | | |

[0484] Sequences for Vac32 (SEQ ID NO: 5091), Vac9 (SEQ ID NO: 4974) and Vac22 (SEQ ID NO: 4967)

[0485] Denaturation at 94° C. for 30 sec

[0486] 35 cycles at 94° C. for 15 sec, 55° C. for 15 sec, and 72° C. for 1.5 min

[0487] Reactions were concluded at 72° C. for 8 minutes

[0488] Sequences for Vac10 (SEQ ID NO: 5016) and Vac41 (SEQ ID NO: 5051)

[0489] Denaturation at 94° C. for 30 sec

[0490] 35 cycles at 94° C. for 15 sec, 55° C. for 15 sec, and 72° C. for 2.5 min

[0491] Reactions were concluded at 72° C. for 8 minutes

[0492] Sequences for Vac36 (SEQ ID NO: 5146) and Vac37 (SEQ ID NO: 5139)

[0493] Denaturation at

[0494] 2 cycles at 94° C. for 15 sec, 30° C. for 15 sec, and 72° C. for 1.5 min

[0495] 23 cycles at 94° C. for 15 sec, 55° C. for 1.5 sec, and 72° C. for 1.5 min

[0496] Reactions were concluded at 72° C. for 6 minutes

[0497] Upon completion of the thermal cycling reactions, each sample of amplified DNA was subjected to electrophoresis on 1.0% agarose gels. The DNA was visualized by exposure to ethidium bromide and long wave UV irradiation, and cut out in gel slices. DNA was purified using the Wizard PCR Preps Kit (Promega Corp., Madison, Wis., USA), and then subjected to digestion with BamHI and EcoRI (Current Protocols in Molecular Biology, John Wiley and Sons, Inc., F. Ausubel et al., eds., 1994). The digested PCR amplicon was then re-electrophoresed and purified as before.

[0498] Ligation of H. Pylori DNA Sequences into Cloning Vectors

[0499] The pOK12 vector (J. Vieira and J. Messing, Gene 100:189-194, 1991) was prepared for cloning for digestion with BamHI and EcoRI in the case of Vac9, 10, 22, 31 and 32, whereas the pSU21 vector (B. Bartolome et al., Gene 102:75-78, 1991) was prepared for cloning by digestion with BamHI and EcoRI in the case of Vac 41 (Current Protocols in Molecular Biology, John Wiley and Sons, Inc., F. Ausubel et al., eds., 1994). The vectors were subjected to electrophoresis on 1.0% agarose gels and purified using the Wizard PCR Preps kit (Promega Corp., Madison, Wis., USA). Following ligation of the purified, digested vector and the purified, digested amplified H. pylori ORF, the products of the ligation reaction were transformed into E. coli JM 109 competent cells according to standard methods (Current Protocols in Molecular Biology, John Wiley and Sons, Inc., F. Ausubel et al., eds., 1994). Individual bacterial colonies were screened for those containing the correct recombinant plasmids by incubating in LB broth overnight (plus 25 ug/ml kanamycin sulfate for the pOK12 based plasmids or 25 ug/ml chloramphenicol for the pSU21 based plasmids) followed by plasmid DNA preparation using the Magic Minipreps system (Promega Corp., Madison, Wis., USA), and then analyzed by restriction digestion (Current Protocols in Molecular Biology, John Wiley and Sons, Inc., F. Ausubel et al., eds., 1994).

[0500] Cloning of H. Pylori DNA Sequences into the pET28b and pET30a Prokaryotic Expression Vectors

[0501] Both the pET28b and pET30a expression vectors were prepared for cloning by digestion with NdeI and EcoRI (Current Protocols in Molecular Biology, John Wiley and Sons, Inc., F. Ausubel et al., eds., 1994). The H. pylori DNA sequences were removed from pOK12 (Vac9, 10, 23, 31 and 32) or pSU21 (Vac41) plasmid backbones by digestion with NdeI and EcoRI (Current Protocols in Molecular Biology, John Wiley and Son, Inc., F. Ausubel et al., eds., 1994). The pET28b, pET30a and H. pylori DNA sequences were all electrophoresed on a 1% agarose gel and purified using the Wizard PCR Preps kit (Promega Corp., Madison Wis., USA). Following ligation of the purified, digested expression vector and the purified, digest H. pylori DNA sequences, the products of the ligation reaction were transformed into E coli JM109 competent cells (Current Protocols in Molecular Biology, John Wiley and Sons, Inc., F. Ausubel et al., eds., 1994). Individual bacterial colonies were screened for those containing the correct recombinant plasmids by preparing plasmid DNA as described above followed by analysis by restriction digestion profiles and DNA sequencing (Current Protocols in Molecular Biology, John Wiley and Sons, Inc., F. Ausubel et al, eds., 1994). These recombinant plasmids were then used to transform specific E. coli expression strains.

[0502] Transformation of Competent Bacteria with Recombinant Expression Plasmids

[0503] Competent bacterial strains (BL21 (DE3), BL21 (DE3)pLyS, HMS174(DE3) and HMS174(DE3)pLysS were prepared and transformed with the recombinant pET28b expression plasmids carrying the cloned H. pylori sequences according to standard methods (Current Protocols in Molecular Biology, John Wiley and Sons, Inc., F. Ausubel et al., eds., 1994). These expression host strains contain a chromosomal copy of the gene for T7 RNA polymerase. These hosts are lysogens of bacteriophage DE3, a lambda derivate that carries the lacI gene, the lacUV5 promoter and the gene for T7 RNA polymerase. T7 RNA polymerase expression is induced by the addition of isopropyl-β-D thiogalactoside (1PTG), and the T7 RNA polymerase then transcribes any target plasmid, such as pET28b, that carries a T7 promoter sequence and a gene of interest.

[0504] Expression of Recombinant H. Pylori Sequences in E. Coli

[0505] Transformants were collected from LB agar plates containing 25 ug/ml kanamycin sulfate (ensures maintenance of the pET28b-based recombinant plasmids) and used to inoculate LB broth containing 25 ug/ml kanamycin sulfate and grown to an optical density at 600 nm of 0.5 to 1.0 OD units, at which point 1 mM 1 PTG was added to the culture for one to three hours to induce gene expression of the H. pylori recombinant DNA constructions. After induction of gene expression with 1PTG, bacteria were pelleted by centrifugation and resuspended in SDS-PAGE solubilization buffer and subjected to SDS-PAGE (Current Protocols in Molecular Biology, John Wiley and Sons, Inc., F. Ausubel et al., eds., 1994). Proteins were visualized by staining with Coomassie Brilliant Blue or detected by western immunoblotting using the specific anti-His tag monoclonal antibody (Clontech, Palo Alto, Calif., USA) using standard methods (Current Protocols in Molecular Biology, John Wiley and Sons, Inc., F. Ausubel et al., eds., 1994). The host strain that provided the highest level of recombinant protein production was then chosen for use in a large-scale induction in order to purify the recombinant protein. All of the following proteins listed were expressed recombinantly and the strain giving the highest level of expression listed: BL21(DE3) (vac31, vac26, vac37; BL21(DE3) pLysS (vac 9, 32); HMS174(DE3) (vac10).

[0506] Purification of Recombinant Proteins and Generation of Specific Antiserum

[0507] Large scale cultures were inoculated and grown as above, and induced with 1 mM 1 PTG for 3 hours. After induction, bacteria were pelleted by centrifugation in a Sorvall centrifuge at 3500×g for 15 min at 4° C. All of the expressed recombinant proteins were present in the insoluble inclusion body fraction. Inclusion bodies were purified according to standard protocols (Antibodies, Cold Spring Harbor Laboratory Press, E. Harlow and D. Lane, eds., 1988). The recombinant protein produced by vac32 was solubilized in 8M urea and partially purified by nickel chromatography (REF here). Denatured recombinant proteins were purified by electrophoresis on SDS-PAGE gels, and after visualization with Coomassie Brilliant Blue, the protein was excised from the gel and the gel slices homogenized. This material was used to raise specific polyclonal antibodies in mice or rabbits according to standard protocols (Antibodies, Cold Spring Harbor Laboratory Press, E. Harlow and D. Lane, eds., 1988).

[0508] Immunological Characterization of Recombinant Proteins

[0509] In all cases where antibody was attempted to be raised, high titre antisera was generated, confirming the immunogenicity of the recombinant proteins. Further, these specific antisera were used to analyze whether the protein encoded by the cloned gene was expressed in H. pylori. Western immunoblot analysis using standard protocols (Current Protocols in Molecular Biology, John Wiley and Sons, Inc., F. Ausubel et al., eds., 1994) confirmed that the H. pylori strain J99 did express proteins of the expected molecular weight that reacted with the vac10, vac32, vac31, vac36 antiserum. The specific antiserum was also used to determine the level of antigenic conservation between a large number of H. pylori isolates that had been obtained from distinct geographical sites around the world, and from all types of clinical manifestations, including gastritis, duodenal ulcer, gastric ulcer and gastric cancer. It was found that every strain produced a protein that reacted specifically with each antiserum.

[0510] Further, H. pylori cells from strains J99, 17874, AH244 and SS1 were fractionated into different cellular compartments (Doig and Trust 1994 Infect. Immun. 62:4526-4533: O'Toole et al. 1995 J. Bacteriol. 177:6049-6057). The specific antiserum was used to probe these fractions by western immunoblot to identify in which fraction the protein was localized. In all cases, the immunoreactive protein was present in the outer membrane as had been predicted by the sequence features and motif searches described herein.

[0511] Demonstration of Protein Efficacy as a Vaccine

[0512] Purification of vac36 (SEQ ID NO: 5146) for Efficacy Studies

[0513] All the following steps were carried out at 4° C. Cell pellets were resuspended in 5 volumes per gram of cell of lysis buffer (50 mM Sodium Phosphate pH 8.0, 0.5 M NaCl, 5 mM Imidazole) with 10 mM EDTA, 1 mM phenylmethylsulfonyl fluoride (PMSF) and 0.1% β-mercaptoethanol, and ruptured by several passages through a small volume microfluidizer (Model M-110S, Microfluidics International Corporation, Newton, Mass.). The resulting homogenate was made 0.2% sodium deoxycholate (DOC), stirred 20 minutes, then centrifuged (10,000 g×30 nm). The pellets were washed twice with Lysis Buffer containing 10 mM EDTA, 1% Triton X-100, 1 mM PMSF and 0.1% β-mercaptoethanol, then with lysis buffer containing 1 M urea, 1 mM PMSF and 0.1% β-mercaptoethanol. The resulting white pellet is composed primarily of inclusion bodies, free of unbroken cells and membranous materials.

[0514] The inclusion bodies were dissolved in 20 ml 6M guanidine-HCl in lysis buffer with 1 mM PMSF and 0.1% β-mercaptoethanol, and incubated on ice for 1 hour. Materials that did not dissolve were removed by centrifugation (100,000 g×30 min.) The clear supernatant was filtered through a 0.8 μm Supor filter (Gelman Sciences, FRG) and then load directly onto a 10 ml Ni²⁺-NTA agarose column (Hochuli et al. 1987) pre-equilibrated in 6M guanidine-HCl in Lysis Buffer containing 1 mM PMSF and 0.1% β-Mercaptoethanol. The column was washed with 20 ml (2 bed volumes) of Lysis Buffer containing 6M guanidine-HCl, 1 mM PMSF and 0.1% β-mercaptoethanol, then guanidine-HCl was removed slowly with a 100 ml linear gradient (from 6M to 0 M Guanidine-HCl) of lysis buffer containing 0.5% Brij 35, 1 mM PMSF, 0.1% β-mercaptochanol. Next, the column was developed with a 25 ml linear gradient of increasing imidazole (5 to 500 mM) in Lysis buffer containing 0.5% Brij 35, 1 mM PMSF and 0.1% β-mercaptoethanol. The recombinant proteins elute as a peak centered at 100 mM imidazole.

[0515] Fractions containing the recombinant proteins were pooled and then concentrated to approximately 8 ml by centrifugal filtration (Centriprep-10, Amicon, Mass.), and loaded directly onto a 350-ml column (2.2×91 cm) of Sephacyl S-100 HR gel filtration medium equilibrated in Buffer A (50 mM Sodium Phosphate, pH 8.0, 500 mM NaCl, 0.1 mM EGTA, 1 mM PMSF, 0.1%β-mercaptoethanol, 0.5% Brij 35) and ran in Buffer A at 30 ml/h. Fractions containing the recombinant protein were identified by absorbance at 280 nm and analyzed by SDS-PAGE. Fractions were pooled, concentrated to 1.5 to 2 mg/ml and dialysed overnight against 10 mM Potassium Phosphate pH 7.5, 150 mM NaCl, 0.1 mM EGTA and 0.5% Brij 35. The concentration of protein in the dialysate was quantified, then aliquoted prior to freezing at −20° C.

[0516] Mouse Model of Heliocobacter Pylori Infection

[0517] A murine model of H. pylori infection was produced by infection of C57BL/6 mice with with H. pylori Sydney strain SS1 and was used to assess the efficacy of recombinant H. pylori vac36. This mouse-adapted H. pylori strain is cagA+ vacA+, shows colonization levels in C57BL/6 mice equivalent to those observed in humans, forms adhesion pedestals, colonizes for at least 8 months, and elicits a chronic-active gastritis and mucosal atrophy (Lee et al., Gastroenterology, 112:1386-1397, 1997). Dose-response studies have shown 100% infection rates of inbred C57BL/6 and Balb/C mice at 8 weeks post-challenge with a single inoculation of 106 organisms.

[0518] Animals

[0519] Female SPF BALB/c mice were purchased from Bomholt Breeding center (Denmark). They were kept in ordinary makrolon cages with free supply of water and food. The animals were 4-6 weeks old at arrival.

[0520] Infection

[0521] After a minimum of one week of acclimatization, the animals were infected with a type 2 strain (VacA negative) of H. pylori (strain 244, originally isolated from an ulcer patient). In our hands, this strain has earlier proven to be a good colonizer of the mouse stomach. The bacteria were grown overnight in Brucella broth supplemented with 10% fetal calf serum, at 37 C in a microaerophilic atmosphere (10% CO₂, 5% O₂). The animals were given an oral dose of omeprazole (400 μmol/kg) and 3-5 h after this an oral inoculation of H. pylori in broth (approximately 10⁸ cfu/animal). Positive take of the infection was checked in some animals 2-3 weeks after the inoculation.

[0522] Antigens

[0523] Recombinant H. pylori antigens were chosen based on their association with externally exposed H. pylori cell membrane. These antigens were selected from the following groups: (1.) Outer Membrane Proteins; (2.) Periplastic/Secreted proteins; (3.) Outer Surface proteins; and (4.) Inner Membrane proteins. All recombinant proteins were constructed with a hexa-HIS tag for purification reasons and the non-Helicobacter pylori control protein (β-galactosidase from E. coli; LacZ), was constructed in the same way.

[0524] All antigens were given in a soluble form, i.e. dissolved in either a HEPES buffer or in a buffer containing 0.5% Deoxycholate (DOC).

[0525] The antigens are listed in Table 6 below.

TABLE 6
Helicobacter pylori proteins

Outer membrane Proteins
SEQ ID NO: 8015
SEQ ID NO: 5379
SEQ ID NO: 9048
SEQ ID NO: 5181
SEQ ID NO: 9642
Periplastic/Secreted proteins
SEQ ID NO: 5933
Other cell envelope proteins
SEQ ID NO: 9730
SEQ ID NO: 5231
Flagella-associated proteins
SEQ ID NO: 4851
Control proteins
β-galactosidase (LacZ)

[0526] Immunizations

[0527] Ten animals in each group were immunized 4 times over a 34 day period (day 1, 15, 25 and 35). Purified antigens in solution or suspension were given at a dose of 100 μg/mouse. As an adjuvant, the animals were also given 10 μg/mouse of Cholera toxin (CT) with each immunization. Omeprazole (400 μmol/kg) was given orally to the animals 3-5 h prior to immunization as a way of protecting the antigens from acid degradation. Infected control animals received HEPES buffer+CT or DOC buffer+CT. Animals were sacrificed 2-4 weeks after final immunization. A general outline of the study is shown in Table 7 below.

TABLE 7
Study outline, therapeutic immunization:
Mice were all infected with H. pylori strain
Ah244 at day 30. Proteins are listed by their SeqID #′

| | Mouse strain | | Dates for |
|---|---|---|---|
| Substance | n = 10 | Dose/mouse | dosing |
| 1. Controls, PBS | Balb/c | 0.3 ml | 0, 14, 24, 34 |
| 2. Cholera toxin, 10 μg | Balb/c | 0.3 ml | 0, 14, 24, 34 |
| 3. Protein 14640637 (SEQ ID NO: 8015), | Balb/c | 0.3 ml | 0 14, 24, 34 |
| 100 μg + CT 10 μg | | | |
| 4. Protein 16225006 (SEQ ID NO: 9642), | Balb/c | 0.3 ml | 0 14, 24, 34 |
| 100 μg + CT 10 μg | | | |
| 5. Protein 26054702 (SEQ ID NO: 9450), | Balb/c | 0.3 ml | 0 14, 24, 34 |
| 100 μg + CT 10 μg | | | |
| 6. Protein 26380318 (SEQ ID NO: 4851), | Balb/c | 0.3 ml | 0 14, 24, 34 |
| 100 μg + CT 10 μg | | | |
| 7. Protein 29479681 (SEQ ID NO: 5379), | Balb/c | 0.3 ml | 0 14, 24, 34 |
| 100 μg + CT 10 μg | | | |
| 8. Protein 30100332 (SEQ ID NO: 5933), | Balb/c | 0.3 ml | 0 14, 24, 34 |
| 100 μg + CT 10 μg | | | |
| 9. Protein 4721061 (SEQ ID NO: 5181), | Balb/c | 0.3 ml | 0 14, 24, 34 |
| 100 μg + CT 10 μg | | | |
| 10. Protein 4821082 (SEQ ID NO: 9730), | Balb/c | 0.3 ml | 0 14, 24, 34 |
| 100 μg + CT 10 μg | | | |
| 11. Protein 978477 (SEQ ID NO: 5231), | Balb/c | 0.3 ml | 0 14, 24, 34 |
| 100 μg + CT 10 μg | | | |
| 12. Protein 7116626 (SEQ ID NO: 9048), | Balb/c | 0.3 ml | 0 14, 24, 34 |
| 100 μg + CT 10 μg | | | |

[0528] Analysis of Infection

[0529] Mucosal infection: The mice were sacrificed by CO₂ and cervical dislocation. The abdomen was opened and the stomach removed. After cutting the stomach along the greater curvature, it was rinsed in saline. The mucosa from the antrum and corpus of an area of 25 mm² was scraped separately with a surgical scalpel. The mucosa scraping was suspended in Brucella broth and plated onto Blood Skirrow selective plates. The plates were incubated under microaerophilic conditions for 3-5 days and the number of colonies was counted. The identity of H. pylori was ascertained by urease and catalase test and by direct microscopy or Gram staining.

[0530] The urease test was performed essentially as follows. The reagent, Urea Agar Base Concentrate, was purchased from DIFCO Laboratories, Detroit, Mich. (Catalog # 0284-61-3). Urea agar base concentrate was diluted 1:10 with water. 1 ml of if the diluted concentrate was mixed with 100-200 μl of actively growing H. pylori cells. Color change to magenta indicated that cells were urease positive.

[0531] The catalase test was performed essentially as follows. The reagent, N,N,N′,N′-Tetramethyl-p-Phenylenediamine, was purchased from Sigma, St. Louis, Mo. (Catalog # T3134). A solution of the regent (1% w/v in water) was prepared. H. pylori cells were swabbed onto Whatman filter paper and overlaid with the 1% solution. Color change to dark blue indicated that the cells were catalase positive.

[0532] Serum antibodies: From all mice serum was prepared from blood drawn by heart puncture. Serum antibodies were identified by regular ELISA techniques, where the specific antigens of Helicobacter pylori were plated.

[0533] Mucosal antibodies: Gentle scrapings of a defined part of the corpus and of 4 cm of duodenum were performed in 50% of the mice in order to detect the presence of antibodies in the mucous. The antibody titers were determined by regular ELISA technique as for serum antibodies.

[0534] Statistical analysis: Wilcoxon-Mann-Whitney sign rank test was used for determination of significant effects of the antigens on Helicobacter pylori colonization. P<0.05 was considered significant. Because the antrum is the major colonization site for Helicobacter most emphasis was put upon changes in the antral colonization.

[0535] Assessment of Gastric H. Pylori Infection

[0536] The presence of H. pyloriorganisms in gastric tissue was determined by culture of gastric tissue and by a quantitative urease assay. In the latter method, a longitudinal segment of antrum, representing approximately ¼ of the total antral region was placed in 1 ml of urea broth. After 4 hr, the extent of color change resulting from urea hydrolysis and increased pH was quantiated by spectrophotometric measurement of A₅₅₀ (Fox et al., Immunol. 88:400-406, 1996). The assay sensitivity is ˜10³ H. pylori organisms. A positive (H. pylori-infected) gastric tissue was defined as that sample showing 2 standard deviations above the mean A₅₅₀ value derived from a group of unchallenged uninfected age-matched control mice.

[0537] Assessment of Local Immune Response to Immunization in Gastric Tissue

[0538] Longitudinal sections of gastric tissues from the esophageal to the duodenal junction were embedded in OCT embedding compound, frozen in liquid nitrogen, and cryosections immunostained with monoclonal antibodies recognizing CD4⁺ or CD8⁺T cells or with antisera against mouse IgA for identification of IgA containing (IgACC) plasma cells (Pappo et al., Infect. Immun. 63:1246-1252, 1995). The degree of local gastric immune response was expressed quantitatively as the number of CD4⁺, CD8⁺ or IgACC cells per mm² of gastric region examined.

[0539] Results

[0540] Antibodies in sera: All antigens tested given together with CT gave rise to a measurable specific titer in serum. The highest responses were seen with SEQ ID NOs:865, 812, 658, 447, and 820 (see FIG. 1).

[0541] Antibodies in mucus: In the mucus scrapings, specific antibodies against all antigens tested were seen. By far the strongest response was seen with SEQ ID NOs:685, followed by 447, 865, and 658 (see FIG. 2).

[0542] Therapeutic immunization effects:

[0543] All control animals (BALB/c mice) were well colonized with H. pylori (strain AH244) in both antrum and corpus of the stomach. Of the antigens tested 3 proteins (SEQ ID NOs: 812, 820, and 447) gave a good and significant reduction and/or eradication of the H. pylori infection. The degree of colonization of the antrum was lower following immunization with SEQ ID NOs: 880, 658, and 865 compared to control. The effect of SEQ ID NOs:465, 677, and 685 did not differ from control. The control protein lacZ, i.e. the non-H. pylori protein, had no eradication effect and in fact had higher Helicobacter colonization compared to the HEPES+CT control. All data are shown in FIGS. 3 and 4 for proteins dissolved in HEPES and DOC respectively. Data is shown as geometric mean values. n=8-10 Wilcoxon-Mann-Whitney sign rank test *=p<0.05;×/10=number of mice showing eradication of H. pylori over the total number of mice examined.

TABLE 8
Recombinant vac36 antigen protects
mice from challenge with H. pylori

Vaccine

| Treatment | Urease | | H. pylori | |
|---|---|---|---|---|
| Group | Activity^{a} | p^{b} | burden^{c} | p^{b} |
| vac36 (SEQ ID | 0.199 ± 0.080 | 0.0022 | 55,800 ± 12,599 | 0.0125 |
| NO: 5146) | | | | |
| H. pylori lysate | 0.057 ± 0.007 | 0.0002 | 2,360 ± 955 | 0.0002 |
| buffer | 1.655 ± 0.420 | — | 131,000 ± 18,391 | — |

^{a}Urease activity is expressed as mean A₅₅₀ ± SEM of duplicate antral samples from n = 10 mice/group.
^{b}by Wilcoxon Rank Sum Test compared with mice immunized with CT adjuvant alone
^{c}The level of H. pylori in gastric tissue was assessed by bacterial counts, and shown as mean colony forming units ± SEM

[0544] The data presented indicate that all of the H. pylori associated proteins included in this study, when used as oral immunogens in conjunction with the oral adjuvant CT, resulted in stimulation of an immune response as measured by specific serum and mucosal antibodies. A majority of the proteins led to a reduction, and in some cases complete clearance of the colonization of H. pylori in this animal model. It should be noted that the reduction or clearance was due to heterologous protection rather than homologous protection (the polypeptides were based on the H. pylori J99 strain sequence and used in the therapeutic immunization studies against a different (AH244) challenge strain), indicating the vaccine potential against a wide variety of H. pylori strains.

[0545] The highest colonization in the antrum was seen in animals treated with the non-Helicobacter protein LacZ, indicating that the effects seen with the Helicobacter pylori antigens were specific.

[0546] Taken together these data strongly support the use of these H. pylori proteins in a pharmaceutical formulation for the use in humans to treat and/or prevent H. pylori infections.

[0547] Protective activity of purified recombinant H. pylori vac36 (SEQ ID NO: 5146) antigen The ability of purified recombinant vac36 (SEQ ID NO: 5146) antigen derived from H. pylori to interfere with the establishment of an H. pylori infection was examined in mice. Groups (n=10) of 6-8 week-old female C57BL/6 mice were immunized orally 4 times at weekly intervals as follows: 1)100 μg of recombinant vac36 (SEQ ID NO: 5146) antigen and 10 μg cholera toxin (CT) adjuvant, 2) 1 mg H. pylori lysate antigens and 10 μg CT, and 3) 0.2 M bicarbonate buffer and 10 ug CT adjuvant. The mice were challenged 2 weeks later on 3 consecutive days by oral administration of 10⁸ H. pylori organisms. The experiment was terminated 2 weeks post-challenge, and the H. pylori infection level assessed by bacterial colony counts and by quantitative urease assays.

[0548] Oral immunization with vac36 (SEQ ID NO: 5146) antigen interfered with the establishment of H. pylori infection upon challenge with live H. pylori organisms. Mice immunized with purified recombinant vac36 (SEQ ID NO: 5146) antigen exhibited a significantly lower level of colonization by H. pylori, as assessed by gastric urease activity and bacterial count assays (Table 8). Oral immunization with vac36 (SEQ ID NO: 5146) antigen also resulted in the generation of a local protective gastric immune response. Greater numbers of CD4⁺T cells and of IgACC were recruited in the gastric tissues of vac36-immunized mice when compared with unimmunized H. pylori-infected mice (Table 9).

TABLE 9
vac36-immunized mice generate a local gastric immune response upon challenge with
H. pylori

Vaccine

| Treatment | CD4+ | | | CD8+ | | | IgACC | | |
|---|---|---|---|---|---|---|---|---|---|
| Group | cardia^{a} | corpus | antrum | cardia | corpus | antrum | cardia | corpus | antrum |
| vac36 | 33 ± 9^{a} | 54 ± 8* | 31 ± 8 | 3 ± 2 | 0 | 1 ± 1 | 24 ± 12 | 79 ± 16 | 67 ± 13 |
| (SEQ | | | | | | | | | |
| ID NO: | | | | | | | | | |
| 5146) | | | | | | | | | |
| H. | 31 ± 13 | 36 ± 19 | 24 ± 8 | 4 ± 2 | 2 ± 1 | 2 ± 1 | 31 ± 9 | 73 ± 13* | 79 ± 15 |
| pylori | | | | | | | | | |
| lysate | | | | | | | | | |
| buffer | 12 ± 2 | 27 ± 8 | 18 ± 4 | 1 ± 1 | 0 | 0 | 4 ± 2 | 30 ± 13 | 46 ± 14 |

^{a}Mean number of cells/mm² of gastric region ± SEM
*p < 0.05 by Wilcoxon Rank Sum Test when compared with unimmunized H. pylori infected mice

[0549] V. Sequence Variance Analysis of Genes in Helicobacter Pylori Strains

[0550] Four genes were cloned and sequenced from several strains of H. pylori to compare the DNA and deduced amino acid sequences. This information was used to determine the sequence variation between the H. pylori strain, J99, and other H. pylori strains isolated from human patients.

[0551] Preparation of Chromosomal DNA.

[0552] Cultures of H. pylori strains (as listed in Table 12) were grown in BLBB (1% Tryptone, 1% Peptamin 0.1% Glucose, 0.2% Yeast Extract 0.5% Sodium Chloride, 5% Fetal Bovine Serum) to an OD₆₀₀ of 0.2. Cells were centrifuged in a Sorvall RC-3B at 3500×g at 4° C. for 15 minutes and the pellet resuspended in 0.95 mls of 10 mM Tris-HCl, 0.1 mM EDTA (TE). Lysozyme was added to a final concentration of 1 mg/ml along with, SDS to 1% and RNAse A+T1 to 0.5 mg/ml and 5 units/ml respectively, and incubated at 37° C. for one hour. Proteinase K was then added to a final concentration of 0.4 mg/ml and the sample was incubated at 55 C for more than one hour. NaCl was added to the sample to a concentration of 0.65 M, mixed carefully, and 0.15 ml of 10% CTAB in 0.7M NaCL (final is 1% CTAB/70 mM NaCL) was added followed by incubation at 65° C. for 20 minutes. At this point, the samples were extracted with chloroform:isoamyl alcohol, extracted with phenol, and extracted again with chloroform:isoamyl alcohol. DNA was precipitated with either EtOH (1.5× volumes) or isopropanol (0.6× volumes) at −70° C. for 10 minutes, washed in 70% EtOH and resuspended in TE.

[0553] PCR Amplification and Cloning

[0554] Genomic DNA prepared from twelve strains of Helicobacter pylori was used as the source of template DNA for PCR amplification reactions (Current Protocols in Molecular Biology, John Wiley and Sons, Inc., F. Ausubel et al., editors, 1994). To amplify a DNA sequence containing an H. pylori ORF, genomic DNA (10 nanograms) was introduced into a reaction vial containing 2 mM MgCl₂, 1 micromolar synthetic oligonucleotide primers (forward and reverse primers, see Table 10) complementary to and flanking a defined H. pylori ORF, 0.2 mM of each deoxynucleotide triphosphate; dATP, dGTP, dCTP, dTTP and 0.5 units of heat stable DNA polymerase (Amplitaq, Roche Molecular Systems, Inc., Branchburg, N.J., USA) in a final volume of 20 microliters in duplicate reactions.

TABLE 10

Oligonucleotide primers used for PCR amplification of H pylon DNA se-
quences.

| Outer membrane | | |
|---|---|---|
| Proteins (SEQ ID NO: | | |
| 9450) | Forward primer 5′ to 3′ | Reverse Primer 5′ to 3′ |
| Protein 26054702 | 5′- | 5′- |
| (SEQ ID NO: 9450) | TTAACCATGGTGAAA | TAGAATTCGCCTCTA |
| (for strains AH4, | AGCGATA-3′ (SEQ ID | AAACTTTAG-3′ (SEQ |
| AH15, AH61, 5294, | NO:9785) | ID NO:9786) |
| 5640, AH18, and | | |
| AH244) | | |
| Protein 26054702 | 5′- | 5′- |
| (SEQ ID NO: 9450) | TTAACCATGGTGAAA | TAGAATTCGCATAAC |
| (for strains AH5, 5155, | AGCGATA-3′ (SEQ ID | GATCAATC-3′ (SEQ ID |
| 7958, AH24,and J99) | NO:9787) | NO:9788) |
| Protein 7116626 (SEQ | 5′- | 5′- |
| ID NO: 9048) | ATATCCATGGTGAGT | ATGAATTCAATTTTT |
| | TTGATGA-3′ (SEQ ID | TATTTTGCCA-3′ (SEQ |
| | NO:9789) | ID NO:9790) |
| Protein 29479681 | 5′- | 5′- |
| (SEQ ID NO: 5379) | AATTCCATGGCTATC | ATGAATTCGCCAAAA |
| | CAAATCCG-3′ (SEQ ID | TCGTAGTATT-3′ (SEQ |
| | NO:9791) | ID NO:9792) |
| Protein 36126938 | 5′- | 5′- |
| (SEQ ID NO: 5122) | GATACCATGGAATTT | TGAATTCGAAAAAGT |
| | ATGAAAAAG-3′ (SEQ | GTAGTTATAC-3′ (SEQ |
| | ID NO:9793) | ID NO:9794) |

[0555] The following thermal cycling conditions were used to obtain amplified DNA products for each ORF using a Perkin Elmer Cetus/GeneAmp PCR System 9600 thermal cycler:

[0556] Protein 7116626 (SEQ ID NO: 9048) and Protein 36126938 (SEQ ID NO: 5122);

[0557] Denaturation at 94° C. for 2 min,

[0558] 2 cycles at 94° C. for 15 sec, 30° C. for 15 sec and 72° C. for 1.5 min

[0559] 23 cycles at 94° C. for 15 sec, 55° C. for 15 sec and 72° C. for 1.5 min

[0560] Reactions were concluded at 72° C. for 6 minutes.

[0561] Protein 26054702 (SEQ ID NO: 9450) for strains AH5, 5155, 7958, AH24, and J99;

[0562] Denaturation at 94° C. for 2 min,

[0563] 2 cycles at 94° C. for 15 sec, 30° C. for 15 sec and 72° C. for 1.5 min

[0564] 25 cycles at 94° C. for 15 sec, 55° C. for 15 sec and 72° C. for 1.5 min

[0565] Reaction was concluded at 72° C. for 6 minutes.

[0566] Protein 26054702 (SEQ ID NO: 9450) and Protein 29479681 (SEQ ID NO: 5379) for strains AH4, AH15, AH61, 5294, 5640, AH18, and Hp244;

[0567] Denaturation at 94 C for 2 min,

[0568] 2 cycles at 94° C. for 15 sec, 30° C. for 20 sec and 72° C. for 2 min

[0569] 25 cycles at 94° C. for 15 sec, 55° C. for 20 sec and 72° C. for 2 min

[0570] Reactions were concluded at 72° C. for 8 minutes.

[0571] Upon completion of thermal cycling reactions, each pair of samples were combined and used directly for cloning into the pCR cloning vector as described below.

[0572] Cloning of H. Pylori DNA Sequences into the pCR TA Cloning Vector.

[0573] All amplified inserts were cloned into the pCR 2.1 vector by the method described in the Original TA cloning kit (Invitrogen, San Diego, Calif.). Products of the ligation reaction were then used to transform the TOP10F′ (INVaF′ in the case of H. pylori sequence 350) strain of E. coli as described below.

[0574] Transformation of Competent Bacteria with Recombinant Plasmids

[0575] Competent bacteria, E coli strain TOP10F′ or E. coli strain INVaF′ were transformed with recombinant pCR expression plasmids carrying the cloned H. pylori sequences according to standard methods (Current Protocols in Molecular Biology, John Wiley and Sons, Inc., F. Ausubel et al., editors, 1994). Briefly, 2 microliters of 0.5 micromolar BME was added to each vial of 50 microliters of competent cells. Subsequently, 2 microliters of ligation reaction was mixed with the competent cells and incubated on ice for 30 minutes. The cells and ligation mixture were then subjected to a “heat shock” at 42° C. for 30 seconds, and were subsequently placed on ice for an additional 2 minutes, after which, samples were incubated in 0.45 milliliters SOC medium (0.5% yeast extract, 2.0% tryptone, 10 mM NaCl, 2.5 mM KCl, 10 mM MgC12, 10 mM MgSO4 and 20, mM glucose) at 37° C. with shaking for 1 hour. Samples were then spread on LB agar plates containing 25 microgram/ml kanamycin sulfate or 100 micrograms/ml ampicillan for growth overnight. Transformed colonies of TOP10F′ or INVaF′ were then picked and analyzed to evaluate cloned inserts as described below.

[0576] Identification of Recombinant PCR Plasmids Carrying H. pylori Sequences

[0577] Individual TOP10F′ or INVaF′ clones transformed with recombinant pCR-H. pylori ORFs were analyzed by PCR amplification of the cloned inserts using the same forward and reverse primers, specific for each H. pylori sequence, that were used in the original PCR amplification cloning reactions. Successful amplification verified the integration of the H. pylori sequences in the cloning vector (Current Protocols in Molecular Biology, John Wiley and Sons, Inc., F. Ausubel et al., editors, 1994).

[0578] Individual clones of recombinant pCR vectors carrying properly cloned H. pylori ORFs were picked for sequence analysis. Sequence analysis was performed on ABI Sequencers using standard protocols (Perkin Elmer) using vector-specific primers (as found in PCRII or pCR2.1, Invitrogen, San Diego, Calif.) and sequencing primers specific to the ORF as listed in Table 11 below.

TABLE 11
OligonucIeotide primers used for sequencing of H vylori DNA sequences.

| Outer membrane | | |
|---|---|---|
| Proteins | Forward primers 5′ to 3′ | Reverse Primers 5′ to 3′ |
| Protein 26054702 | 5′CCCTTCATTTTAGAAA | 5′CTTTGGGTAAAAACGCA |
| (SEQ ID NO: 9450) | TCG-3′ (SEQ ID NO:9795) | TC-3′ (SEQ ID NO:9802) |
| | 5′ATTTCAACCAATTCAA | 5′CGATCTTTGATCCTAAT |
| | TGCG-3′ (SEQ ID | TCA-3′ (SEQ ID NO:9803) |
| | NO:9796) | 5′ATCAAGTTGCCTATGCT |
| | 5′GCCCCTTTTGATTTGA | GA-3′ (SEQ ID NO:9804) |
| | AGCT-3′ (SEQ ID | |
| | NO:9797) | |
| | 5′TCGCTCCAAGATACCA | |
| | AGAAGT-3′ (SEQ ID | |
| | NO:9798) | |
| | 5′CTTGAATTAGGGGCA | |
| | AAGATCG-3′ (SEQ ID | |
| | NO:9799) | |
| | 5′ATGCGTTTTTACCCAA | |
| | AGAAGT-3′ (SEQ ID | |
| | NO:9800) | |
| | 5′ATAACGCCACTTCCTT | |
| | ATTGGT-3′ (SEQ ID | |
| | NO:9801) | |
| Protein 7116626 | 5′TTGAACACTTTTGATT | 5′GTCTTTAGCAAAAATGG |
| (SEQ ID NO: 9048) | ATGCGG-3′ (SEQ ID | CGTC-3′ (SEQ ID NO:9807) |
| | NO:9805) | 5′AATGAGCGTAAGAGAG |
| | 5′GGATTATGCGATTGTT | CCTTC-3′ (SEQ ID NO:9808) |
| | TTACAAG-3′ (SEQ ID | |
| | NO:9806) | |
| Protein | 5′CTTATGGGGGTATTGT | 5′AGGTTGTTGCCTAAAGA |
| 29479681 (SEQ ID NO: 5379) | CA-3′ (SEQ ID NO:9809) | CT-3′ (SEQ ID NO:9811) |
| | 5′AGCATGTGGGTATCC | 5′- |
| | AGC-3′ (SEQ ID NO:9810) | CTGCCTCCACCTTTGATC- |
| | | 3′ (SEQ ID NO:9812) |
| Protein 36126938 | 5′ACCAATATCAATTGGC | 5′CTTGCTTGTCATATCTA |
| (SEQ ID NO: 5122) | ACT-3′ (SEQ ID NO:9813) | GC-3′ (SEQ ID NO:9815) |
| | 5′ACTTGGAAAAGCTCT | 5′- |
| | GCA-3′ (SEQ ID NO:9814) | GTTGAAGTGTTGGTGCTA- |
| | | 3′ (SEQ ID NO:9816) |
| | 5′CAAGCAAGTGGTTTG | 5′GCCCATAATCAAAAAGC |
| | GTTTTAG-3′ (SEQ ID | CCAT-3′ (SEQ ID NO:98 19) |
| | NO:98 17) | 5′CTAAAACCAAACCACTT |
| | 5′TGGAAAGAGCAAATC | GCTTGTC-3′ (SEQ ID |
| | ATTGAAG-3′ (SEQ ID | NO:9820) |
| | NO:9818) | |
| Vector Primers | 5′- | 5′- |
| | GTAAAACGACGGCCAG- | CAGGAAACAGCTATGAC- |
| | 3′ (SEQ ID NO:9821) | 3′ (SEQ ID NO:9822) |

[0579] Results

[0580] To establish the PCR error rate in these experiments, five individual clones of Protein 26054702 (SEQ ID NO: 9450), prepared from five separate PCR reaction mixtures from H. pylori strain J99, were sequenced over a total length of 897 nucleotides for a cumulative total of 4485 bases of DNA sequence. DNA sequence for the five clones was compared to a DNA sequence obtained previously by a different method, i.e., random shotgun cloning and sequencing. The PCR error rate for the experiments described herein was determined to be 2 base changes out of 4485 bases, which is equivalent to an estimated error rate of less than or equal to 0.04%.

[0581] DNA sequence analysis was performed on four different open reading frames identified as genes and amplified by PCR methods from a dozen different strains of the bacterium Helicobacter pylori. The deduced amino acid sequences of three of the four open reading frames that were selected for this study showed statistically significant BLAST homology to defined proteins present in other bacterial species. Those ORFs included: Protein 26054702 (SEQ ID NO: 9450), homologous to the val A & B genes encoding an ABC transporter in F. novicida; Protein 7116626 (SEQ ID NO: 9048), homologous to lipoprotein e (P4) present in the outer membrane of H. influenzae; Protein 29479681 (SEQ ID NO: 5379), homologous to fecA, an outer membrane receptor in iron (III) dicitrate transport in E. coli. Protein 36126938 (SEQ ID NO: 5122) was identified as an unknown open reading frame, because it showed low homology with sequences in the public databases.

[0582] To assess the extent of conservation or variance in the ORFs across various strains of H. pylori, changes in DNA sequence and the deduced protein sequence were compared to the DNA and deduced protein sequences found in the J99 strain of H. pylori (see Table 12 below). Results are presented as percent identity to the J99 strain of H. pylori sequenced by random shotgun cloning. To control for any variations in the J99 sequence each of the four open reading frames were cloned and sequenced again from the J99 bacterial strain and that sequence information was compared to the sequence information that had been collected from inserts cloned by random shotgun sequencing of the J99 strain. The data demonstrate that there is variation in the DNA sequence ranging from as little as 0.12% difference (Protein 36126938 (SEQ ID NO: 5122), J99 strain) to approximately 7% change (Protein 26054702 (SEQ ID NO: 9450), strain AH5). The deduced protein sequences show either no variation (Protein 36126938 (SEQ ID NO: 5122), strains AH18 and AH24) or up to as much as 7.66% amino acid changes (Protein 26054702 (SEQ ID NO: 9450), Strain AH5).

TABLE 12
Multiple Strain DNA Sequence analysis of H. pylori Vaccine Candidates

| | | | | | | | | |
|---|---|---|---|---|---|---|---|---|
| J99 Protein #: | 26054702 | 26054702 | 7116626 | 7116626 | 29479681 | 29479681 | 36126938 | 36126938 |
| | (SEQ ID | (SEQ ID | (SEQ ID | (SEQ ID | (SEQ ID | (SEQ ID | (SEQ ID | (SEQ ID |
| | NO: 9450) | NO: 4688) | NO: 9048) | NO: 4286) | NO: 5379) | NO: 617) | NO: 5122) | NO: 360) |

Length of Region

| Sequenced: | 248 a.a. | 746 nt. | 232 a.a. | 696 nt. | 182 a.a. | 548 nt. | 273 a.a. | 819 nt. |
|---|---|---|---|---|---|---|---|---|
| Strain Tested | AA | Nuc. | AA | Nuc. | AA | Nuc. | AA | Nuc. |
| | identity | identity | identity | identity | identity | identity | identity | identity |
| J99 | 100.00% | 100.00% | 100.00% | 100.00% | 100.00% | 100.00% | 99.63% | 99.88% |
| AH244 | 95.16% | 95.04% | n.d. | n.d. | 99.09% | 96.71% | 98.90% | 96.45% |
| AH4 | 95.97% | 95.98% | 97.84% | 95.83% | n.d. | n.d. | 97.80% | 95.73% |
| AH5 | 92.34% | 93.03% | 98.28% | 96.12% | 98.91% | 96.90% | 98.53% | 95.73% |
| AH15 | 95.16% | 94.91% | 97.41% | 95.98% | 99.82% | 97.99% | 99.63% | 96.09% |
| AH61 | n.d. | n.d. | 97.84% | 95.98% | 99.27% | 97.44% | n.d. | n.d. |
| 5155 | n.d. | n.d. | n.d. | n.d. | 99.45% | 97.08% | 98.53% | 95.60% |
| 5294 | 94.35% | 94.37% | 98.28% | 95.40% | 99.64% | 97.26% | 97.07% | 95.48% |
| 7958 | 94.35% | 94.10% | 97.84% | 95.40% | n.d. | n.d. | 99.63% | 96.46% |
| 5640 | 95.16% | 94.37% | 97.41% | 95.69% | 99.09% | 97.63% | 98.53% | 95.48% |
| AH18 | n.d. | n.d. | 98.71% | 95.69% | 99.64% | 97.44% | 100.00% | 95.97% |
| AH24 | 94.75% | 95.04% | 97.84% | 95.40% | 99.27% | 96.71% | 100.00% | 96.46% |

n.d. = not done.

[0583] VI. Experimental Knock-Out Protocol for the Determination of Essential H. Pylori Genes as Potential Therapeutic Targets

[0584] Therapeutic targets are chosen from genes whose protein products appear to play key roles in essential cell pathways such as cell envelope synthesis, DNA synthesis, transcription, translation, regulation and colonization/virulence.

[0585] The protocol for the deletion of portions of H. pylori genes/ORFs and the insertional mutagenesis of a kanamycin-resistance cassette in order to identify genes which are essential to the cell is modified from previously published methods (Labigne-Roussel et al., 1988, J. Bacteriology 170, pp. 1704-1708; Cover et al., 1994, J. Biological Chemistry 269, pp. 10566-10573; Reyrat et al., 1995, Proc. Natl. Acad. Sci. 92, pp 8768-8772). The result is a gene “knock-out.”

[0586] Identification and Cloning of H. Pylori Gene Sequences

[0587] The sequences of the genes or ORFs (open reading frames) selected as knock-out targets were identified from the H. pylori genomic sequence and used to design primers to specifically amplify the genes/ORFs. All synthetic oligonucleotide primers (Table 13) were designed with the aid of the OLIGO program (National Biosciences, Inc., Plymouth, Minn. 55447, USA), and were purchased from Gibco/BRL Life Technologies (Gaithersburg, Md., USA). Specific primers (F1 and R1) were chosen which flanked most or all of the ORF, depending on its size. If the ORF was smaller than 800 to 1000 base pairs, flanking primers were chosen outside of the open reading frame.

TABLE 13
Oligonucleotide Sequences for Knock-Out Gene/ORFs

| | | | | Deletion- | | | |
|---|---|---|---|---|---|---|---|
| | Acces- | Cloning | | creating | | Targeting | |
| Gene | sion | Primers | | Primers | | Primers | |
| Name | Number | F1 | R1 | F2 | R2 | F3 | R3 |
| rnh | P2332 | TTGCCCCAT | AGAGCGTAT | TCTTGCATC | CGGGTCAAA | AATCCGTTT | AACACTT |
| | 9 | CGTATTGAT | TTCACCCGA | TTAATCCAC | ACGACCACT | CGCTAATTT | ATTTCCT |
| | | AGA (SEQ | AAG | TCC | TAA | AGT | ATA |
| | | ID | (SEQ ID | (SEQ ID | (SEQ ID | (SEQ ID | (SEQ ID |
| | | NO: 9823) | NO: 9824) | NO: 9825) | NO: 9826) | NO: 9827) | NO: 9828 |
| ppi | P2982 | TGGTATAAG | TTGACTAAA | ATAGAGAGC | CCTTTATTG | ATGTCCGTT | TAGGGTG |
| B | 0 | GATTTGAAT | CACATGCGA | GTTGTGTTT | GTTTTGATC | GTCTGTATG | TAGGGAT |
| | | GGA | GAA | AGC | GTG | GAA | GAT |
| | | (SEQ ID | (SEQ ID | (SEQ ID | (SEQ ID | (SEQ ID | (SEQ ID |
| | | NO: 9829) | NO: 9830) | NO: 9831) | NO: 9832) | NO: 9833) | NO: 9834 |
| tsf | P3482 | GCGTTTGGC | GAAATGGAA | GCAAATCCC | GTGGCTAAA | GCTAAAACT | GTTAGGA |
| | 8 | TTCTTCGTT | AATAGCGGT | CAGCCACTT | AATGAGGGC | TCATCGCTC | TTAGAAA |
| | | GTC | CAA | CC | TT | AAT | ATTG |
| | | (SEQ ID | (SEQ ID | (SEQ ID | (SEQ ID | (SEQ ID | (SEQ ID |
| | | NO: 9835) | NO: 9836) | NO: 9837) | NO: 9838) | NO: 9839) | NO: 9840) |
| Mur | P1490 | GTTGGGCAG | CAAACAAAC | CATTGATGC | CGTGGTGGT | CGGGCATTG | TGGTCTATC |
| D | 0 | AAAATAAGG | CTGACAAGA | CTAAAACTT | TTTCCCGTT | TGTTTGTTT | ATGCGAATT |
| | | TGA | AAC | CG | AG | TT | AT |
| | | (SEQ ID | (SEQ ID | (SEQ ID | (SEQ ID | (SEQ ID | (SEQ ID |
| | | NO: 9841) | NO: 9842) | NO: 9843) | NO: 9844) | NO: 9845) | NO: 9846) |
| Mur | P2218 | GCGTTTGGG | CGCGCTAGA | GCCCTGATC | AAGGGCGTT | GGCGTTATT | TTTCACCGG |
| E | 8 | GATTTGATG | GGCTTGTAA | CATTCCCCC | TGTTTCATC | AAGCGACAT | CAATTTTAG |
| | | TTC | AA | CT | TC | CG | CC. |
| | | (SEQ ID | (SEQ ID | (SEQ ID | (SEQ ID | (SEQ ID | (SEQ ID |
| | | NO: 9847) | NO: 9848) | NO: 9849) | NO: 9850) | NO: 9851) | NO: 9852) |
| Alg | P0787 | GCGTTTTGA | GTAAAAACA | GCGTGTTTT | GGAATTTTA | AAATCTCTG | AATCAAAAA |
| A | 4 | TTCTGTCTG | CCGCTAACG | CTAAGGGTT | ACGCTCTTT | TGGGCTTAG | CAAGAGCGT |
| | | TTA | CAT | CA | TT | TG | GG |
| | | (SEQ ID | (SEQ ID | (SEQ ID | (SEQ ID | (SEQ ID | (SEQ ID |
| | | NO: 9853) | NO: 9854) | NO: 9855) | NO: 9856) | NO: 9857) | NO: 9858) |
| met | P1935 | GCCCCAGCC | GGAGGGCGC | TCACGCTTT | CGCTAATCA | TGCCCAAAA | AACGGGTTT |
| L | 8 | CCATAATAC | AATTAAACA | CTAAATCAT | CATCCTTTC | ATCCACTAA | GACACTGAT |
| | | AAA | TCG | CA | TT | CG | GA |
| | | (SEQ ID | (SEQ ID | (SEQ ID | (SEQ ID | (SEQ ID | (SEQ ID |
| | | NO: 9859) | NO: 9860) | NO: 9861) | NO: 9862) | NO: 9863) | NO: 9864) |
| fus | X1627 | GAATGCGGT | GCGTTTTTA | GGGCGATGT | GGATAGCCT | AAGTTTATG | GGAGCAATC |
| A | 8 | GGTTTTAGA | AGACTGAAT | GATTGGCGA | GCCAAAACG | CGGGCGAGA | AGCCATTTT |
| | | GAG | ACA | TT | CC | TT | TC |
| | | SEQ ID | (SEQ ID | (SEQ ID | (SEQ ID | (SEQ ID | (SEQ ID |
| | | NO: 9865) | NO: 9866) | NO: 9867) | NO: 9868) | NO: 9869) | NO: 9870) |
| Flg | U0954 | CTAGCGATT | CGGCCTCCT | AGCGGGCAG | GCATTGATC | ACGGGTTAG | CAAAAGAGG |
| E | 9 | CAAGGCGAT | TCAAACACA | TTTAGGACC | GCATTTTTA | CAGGGCAGA | CGGGTTCAT |
| | | GG | TT | AC | GCC | AT | GC |
| | | (SEQ ID | (SEQ ID | (SEQ ID | (SEQ ID | (SEQ ID | (SEQ ID |
| | | NO: 9871) | NO: 9872) | NO: 9873) | NO: 9874) | NO: 9875) | NO: 9876) |
| Fli | M3769 | TTTAGAAGT | CATACACGC | AGTGTGGTC | CCCCTAATA | CAAAAGATT | AATGGTTTT |
| M- | 1 | CGTTGATGA | TCACTTCAT | GCCTGTGGT | GTCTGTCAA | GAAGCAGAA | CCTATACCC |
| set | | GA | CG | GGAG | TCAT | GAGT | TTGA |
| A | | (SEQ ID | (SEQ ID | (SEQ ID | (SEQ ID | (SEQ ID | (SEQ ID |
| | | NO: 9877) | NO: 9878) | NO: 9879) | NO: 9880) | NO: 9881) | NO: 9882) |
| Fli | M3769 | GAGAGCAAA | CATACACGC | AGTGTGGTC | CCCCTAATA | CAAAAGATT | AATGGTTTT |
| M- | 1 | TCCTTATCC | TCACTTCAT | GCCTGTGGT | GTCTGTCAA | GAAGCAGAA | CCTATACCC |
| set | | AG | CC | GGAG | TCAT | GACT | TTGA |
| B | | (SEQ ID | (SEQ ID | (SEQ ID | (SEQ ID | (SEQ ID | (SEQ ID |
| | | NO: 9883) | NO: 9884) | NO: 9885) | NO: 9886) | NO: 9887) | NO: 9888) |
| Mur | U3279 | TTGAAACCC | TCAACTGAT | GCTAGGATT | TACGAGACA | ATAGGCATG | CCATTACAT |
| C | 4 | CAAAAGTTT | AGGTAATAT | TATGCCAAT | AAATAGGGA | CAGAATTTT | TTCGCCTC |
| | | TAC | CCC | TTA | TTT | TCC | (SEQ ID |
| | | (SEQ ID | (SEQ ID | (SEQ ID | (SEQ ID | (SEQ ID | NO: 9894) |
| | | NO: 9889) | NO: 9890) | NO: 9891) | NO: 9892) | NO: 9893) | |
| dna | M1004 | CGATAGATA | GGGCTTGTA | GTTTTAAAA | TTCTAAAAG | TAAGTCAAG | TTTTGGGGT |
| E | 0 | TTGTAGAAG | TTCATTTTG | ACGCCATAG | GTGGTAATC | CCATAAAAC | AAAAAGGCT |
| | | TCA | TAA | CCA | TTC | CAAA | GAA |
| | | (SEQ ID | (SEQ ID | (SEQ ID | (SEQ ID | (SEQ ID | (SEQ ID |
| | | NO: 9895) | NO: 9896) | NO: 9897) | NO: 9898) | NO: 9899) | NO: 9900) |
| Ser | X0501 | ATCTTTTTG | AGACAGCAC | CAGCCACAC | GTAAGGCGT | GCCCCATTA | AAAGGATAC |
| S | 7 | CCCTTGCTC | CAGTTTGAT | TTCAATGTC | TAGAAAAAT | AAATCCTTT | AAGGGGGA |
| | | ATA | AAA | TAT | ACC | TCT | (SEQ ID |
| | | (SEQ ID | (SEQ ID | (SEQ ID | (SEQ ID | (SEQ ID | NO: 9906) |
| | | NO: 9901) | NO: 9902) | NO: 9903) | NO: 9904) | NO: 9905) | |
| gly | P0096 | CTCGCTCCA | TTTTTTAGG | TGTTTGGAA | CTTTTGGGG | TTTGATAAA | TTTCAAAAC |
| | 0 | TTTTATCTT | GAGGATTGA | ATGCTGGTG | GAGTTTGAC | CGCCCACTT | GCTCACCTT |
| | | TTA | GAT | ATC | AAG | TTT | TTG |
| | | (SEQ ID | (SEQ ID | (SEQ ID | (SEQ ID | (SEQ ID | (SEQ ID |
| | | NO: 9907) | NO: 9908) | NO: 9909) | NO: 9910) | NO: 9911) | NO: 9912) |
| Glt | L1458 | TCTATTCTT | ATAATGAGT | ACAATAATA | AATTAGCCC | AACAACCGC | CTTCAGCGA |
| x | 0 | TTGATGCTC | TTGATCGTT | GGCTTTGTC | TTAAAATAG | TAAAATCAA | TACTAAAAG |
| | | TCT | ACG | TTC | ATG | AC | AT |
| | | (SEQ ID | (SEQ ID | (SEQ ID | (SEQ ID | (SEQ ID | (SEQ ID |
| | | NO: 9913) | NO: 9914) | NO: 9915) | NO: 9916) | NO: 9917) | NO: 9918) |
| Sig | M3769 | TAGGGGCGA | GCTGGATAA | TTTTTGGGG | GGCTGGTAA | AGGCTATTC | ATTCTCATC |
| 28 | 1 | TTGAAAACA | GGATTTGCT | GTATGCTAA | ATACTGGAT | AAGGTGGCT | AACGACTTC |
| (fliA) | | GC | CT | PA | AG | AAA | TAAA |
| | | (SEQ ID | (SEQ ID | (SEQ ID | (SEQ ID | (SEQ ID | (SEQ ID |
| | | NO: 9919) | NO: 9920) | NO: 9921) | NO: 9922) | NO: 9923) | NO: 9924) |
| Sig | M7344 | GCAGTTGGC | GAGAGCGAA | TGATTGTTG | AAAATCGGT | CTTTTCCTT | AAAACAAAC |
| 54 | 3 | GGTATTTGG | GTTTATGAG | GGTAGCTCT | CTGATGCTC | TCGCTTGAA | GCATCAAAA |
| | | TG | PA | CA | TTA | GA | AT |
| | | (SEQ ID | (SEQ ID | (SEQ ID | (SEQ ID | (SEQ ID | (SEQ ID |
| | | NO: 9925) | NO: 9926) | NO: 9927) | NO: 9928) | NO: 9929) | NO: 9930) |
| Mur | U1240 | CGCCCGAAT | TGATGCAAC | GGGATTTTA | CAAGCGGCA | TTTTTAAGG | TGGGTTTTA |
| I | 5 | GGATGAGTA | AAATGGACG | GAATACTTT | AGTGGAAGA | GCGTATTTT | AGGAATGTG |
| | | GG (SEQ | ACA | TGC (SEQ | TA (SEQ | TGT (SEQ | ATG (SEQ |
| | | ID | (SEQ ID | ID | ID | ID | ID |
| | | NO: 9931) | NO: 9932) | NO: 9933) | NO: 9934) | NO: 9935) | NO: 9936) |
| dna | D2618 | CGCGCTCAA | GGCCCATTC | GCCCCATTC | CGCTTTAAC | AGCGTTTTT | TCCCTATCA |
| B | 5 | AATCCCTAA | TTTCGGATA | CTGTTTTTA | GCTCCTTTC | GTAAGGGGG | TAGCGTTAG |
| | | AT | TT | GC | AC | TAT | TGC |
| | | (SEQ ID | (SEQ ID | (SEQ ID | (SEQ ID | (SEQ ID | (SEQ ID |
| | | NO: 9937) | NO: 9938) | NO: 9939) | NO: 9940) | NO: 9941) | NO: 9942) |
| Mur | D1060 | CTTAGGGGT | GCACAATTC | CCAAAGCTA | GCTCATGGA | CTTAGCCCC | CGCAAAAGG |
| G | 2 | TTTTAGCAT | CCACACGCT | AAGCGGTGT | TATAAAGGG | TTTAGTGTT | GTAGGGGAT |
| | | GAA | GC | TTT | GTATT | TA | PA |
| | | (SEQ ID | (SEQ ID | (SEQ ID | (SEQ ID | (SEQ ID | (SEQ ID |
| | | NO: 9943) | NO: 9944) | NO: 9945) | NO: 9946) | NO: 9947) | NO: 9948) |
| Ipx | U3279 | TTTTATTTT | CAAACTTAT | AAAGATAAC | TAATTCTAC | GCGGTCATG | ATTCAAAGA |
| C | 4 | TAGAAACGA | CGCCCTCTC | GCTAGGATT | AGAGTGGTT | GAATTTTTA | AAGCTGGCT |
| | | ATC | TA | TCTAC | AATGG | GA | GTCT |
| | | (SEQ ID | (SEQ ID | (SEQ ID | (SEQ ID | (SEQ ID | (SEQ ID |
| | | NO: 9949) | NO: 9950) | NO: 9951) | NO: 9952) | NO: 9953) | NO: 9954) |
| kdt | M8630 | GCTTGTGGG | GAACCCCCT | ACCATGCTC | GTAAGTTTG | AAAAAGAAA | AAAGATACT |
| A | 5 | GGTTGTTTT | AAAATGACA | ATTAACGCT | AGCGGCTAA | GAAGAACTC | CCCCTGTGA |
| | | AT | AT | AGG | TTC | GTG | TTA |
| | | (SEQ ID | (SEQ ID | (SEQ ID | (SEQ ID | (SEQ ID | (SEQ ID |
| | | NO: 9955) | NO: 9956) | NO: 9957) | NO: 9958) | NO: 9959) | NO: 9960) |
| Ipx | U0954 | CAAAGAAAC | GCATGGTAT | GCAGCGGCA | CGCCCCCAA | AAAGGTTTG | CACTTGAGC |
| B | 9 | GCAAAATAC | TCAGCGTTT | CAGCGACTT | AAAGTCGCA | AAACAAGAA | GTTAGCAAC |
| | | AG | TC | TAG | GTA | ATCT | AAT |
| | | (SEQ ID | (SEQ ID | (SEQ ID | (SEQ ID | (SEQ ID | (SEQ ID |
| | | NO: 9961) | NO: 9962) | NO: 9963) | NO: 9964) | NO: 9965) | NO: 9966) |
| KO | | GGGGTGTTT | CGCTAGGAG | CAAGGGCGT | GGGATTGTT | GGAATACAA | GCCTTTTTA |
| 24 | | GAAATTGAT | AAAGGAAGG | TTTTTGGGG | ACAGGAAAA | TAACGCATA | GACAACCCT |
| | | AGA | AAA | TAT | GAT | AAT | ACT |
| | | (SEQ ID | (SEQ ID | (SEQ ID | (SEQ ID | (SEQ ID | (SEQ ID |
| | | NO: 9967) | NO: 9968) | NO: 9969) | NO: 9970) | NO: 9971) | NO: 9972) |
| KO | | CCCCTAAAC | GCTAGAAAT | GCGATTATG | TTATTGTGG | TATGCGGCT | CCCTAAATC |
| 26 | | TCAAATCTC | GCCATGAGA | GGGTATTTA | AGTTGCTTG | CATCCTATT | CAAATCAAG |
| | | AAT | AAG | TTG | TCA | AAA | CAG |
| | | (SEQ ID | (SEQ ID | (SEQ ID | (SEQ ID | (SEQ ID | (SEQ ID |
| | | NO: 9973) | NO: 9974) | NO: 9975) | NO: 9976) | NO: 9977) | NO: 9978) |
| K02 | | CCCCCTAAC | CAAACGATA | TCCAGCTTG | GGTGGTGAT | TTTGGTTGC | TTTTGACAG |
| 7 | | CCCATAATA | GAAAGAAAT | AAATCCAAA | TAAAAACCT | TTGGTTTGA | ACGATGACA |
| | | CCG | ACG (SEQ | TCC (SEQ | TATTG | TAG (SEQ | GAA (SEQ |
| | | (SEQ ID | ID NO: | ID NO: | (SEQ ID | ID NO: | ID NO: |
| | | NO: 9979) | 9980) | 9981) | NO: 9982) | 9983) | 9984) |
| fts | | TTTGAGGGT | TGGTTTTAC | ATTTTGATT | CGCTTTTTT | AAGATTACG | CGCTTTTTT |
| Y | | GCTTATTTT | CCGCCCCAT | GGTTTTGAT | TCTTTAACC | CCCCCACCT | ATGCTGTTT |
| | | ACT | TA | ATTCA | TCTTC | TTA (SEQ | TAA (SEQ |
| | | (SEQ ID | (SEQ ID | (SEQ ID | (SEQ ID | ID NO: | ID NO: |
| | | NO: 9985) | NO: 9986) | NO: 9987) | NO: 9988) | 9989) | 9990) |
| 26K | | AATACGCTT | TCCACCATG | CACTTGTTC | GACTTGCCA | CCCACTTTA | CAAGCAGTA |
| Da_ | | GAATATGTT | TTTCCGCTG | GCTGTCAAT | TTAGGTAGG | AGCTCACGA | AAAATGAAA |
| pro | | CAT | ATT (SEQ | AG (SEQ | AA (SEQ | GTGA (SEQ | CTAT (SEQ |
| t | | (SEQ ID | ID NO: | ID NO: | ID NO: | ID NO: | ID NO: |
| | | NO: 9991) | 9992) | 9993) | 9994) | 9995) | 9996) |
| K02 | | GCTTTTTAG | ATAAGGTTT | CTCTTGTTG | CATTCGGGT | TAGGACTTC | TTTATCCAA |
| 8 | | CGTCATAGA | TGTTTGCGG | TATTCAATG | TATTTTGAC | ATAACTTTC | ATCATCTCT |
| | | TAT (SEQ | TAG (SEQ | AAACT | TAT (SEQ | ATCAT | CAAG (SEQ |
| | | ID NO: | ID NO: | (SEQ ID | ID NO: | (SEQ ID | ID NO: |
| | | 9997) | 9998) | NO: 9999) | 10000) | NO: | 10002) |
| | | | | | | 10001) | |
| VAC | | TTCTATTCG | ATCAATTTT | CGGCCCAAA | CGGTAAAAG | TTCTGGTGG | CCCATCCCA |
| 51 | | CCTAAAACC | CAGCCCTAA | ATTAGACAG | CGTTCGCAT | TTTAGCTCG | CCCCTAGAG |
| | | TAC (SEQ | CTA (SEQ | CC (SEQ | CC (SEQ | TTTGG | ATCC (SEQ |
| | | ID NO: | ID NO: | ID NO: | ID NO: | (SEQ ID | ID NO: |
| | | 10003) | 10004) | 10005) | 10006) | NO: | 10008) |
| | | | | | | 10007) | |
| mur | | CTCGTTACA | GAATGCCAT | CGGGTTTAA | CTAACGCCC | CGAACATGC | GGCTCTGTT |
| B | | GCAGCGTGA | ATTCTTGTA | TGGCGTTGT | CTAAAGTGC | TTTTAGATT | CTCATCAAT |
| | | AA (SEQ | GC (SEQ | TT (SEQ | CA (SEQ | AC (SEQ | AG (SEQ |
| | | ID NO: | ID NO: | ID NO: | ID NO: | ID NO: | ID NO: |
| | | 10009) | 10010) | 10011) | 10012) | 10013) | 10014) |

[0588] Genomic DNA prepared from the Helicobacter pylori HpJ99 strain (ATCC 55679; deposited by Genome Therapeutics Corporation, 100 Beaver Street, Waltham, Mass. 02154) is used as the source of template DNA for amplification of the ORFs by PCR (polymerase chain reaction) (Current Protocols in Molecular Biology, John Wiley and Sons, Inc., F. Ausubel et al., editors, 1994). For the preparation of genomic DNA from H. pylori, see Example I. PCR amplification is carried out by introducing 10 nanograms of genomic HpJ99 DNA into a reaction vial containing 10 mM Tris pH 8.3, 50 mM KCl, 2 mM MgCl₂, 2 microMolar synthetic oligonucleotide primers (forward=F1 and reverse=R1), 0.2 mM of each deoxynucleotide triphosphate (dATP, dGTP, dCTP, dTTP), and 1.25 units of heat stable DNA polymerase (Amplitaq, Roche Molecular Systems, Inc., Branchburg, N.J., USA) in a final volume of 40 microliters. The PCR is carried out with Perkin Elmer Cetus/GeneAmp PCR System 9600 thermal cyclers.

TABLE 14
PCR Conditions

MurC (SEQ ID NO: 7608)
Denaturation at 94° C. for 2 min.,
25 cycles of 94° C. for 15 sec, 48° C. for 15 sec, 72° C. for 1 min, 30 sec,
Final Extension of 72° C. for 20 minutes.
Sig54 (SEQ ID NO: 7023)
Denaturation at 94° C. for 2 min.,
25 cycles of 94° C. for 15 sec, 50° C. for 15 sec, 72° C. for 1 min, 30 sec,
Final Extension of 72° C. for 20 minutes.
lpxC (SEQ ID NO: 7767)
Denaturation at 94° C. for 2 min.,
32 cycles of 94° C. for 15 sec, 50° C. for 15 sec, 72° C. for 1 min, 30 sec,
Final Extension of 72° C. for 20 minutes.
KO24,(SEQ ID NO: 8390; KO27 SEQ ID NO: 8850)
Denaturation at 94° C. for 2 min.,
25 cycles of 94° C. for 15 sec, 50.5° C. for 20 sec, 72° C. for 2 min,
Final Extension of 72° C. for 20 minutes.
KO29, (SEQ ID NO: 5811; 26 kDa Protein; SEQ ID NO: 5185)
Denaturation at 94° C. for 2 min.,
28 cycles of 94° C. for 15 sec, 50.5° C. for 20 sec, 72° C. for 2 min,
Final Extension of 72° C. for 20 minutes.
DnaE (SEQ ID NO: 7200),Glycyl (SEQ ID NO: 7200)
Denaturation at 94° C. for 2 min.,
20 cycles of 94° C. for 15 sec, 51° C. for 15 sec, 72° C. for 1 min, 30 sec,
Final Extension of 72° C. for 20 minutes.
Gltx (SEQ ID NO: 7021)
Denaturation at 94° C. for 2 min.,
25 cycles of 94° C. for 15 sec, 51° C. for 15 sec, 72° C. for 1 min, 30 sec,
Final Extension of 72° C. for 20 minutes.
KO28 (SEQ ID NO: 9375)
Denaturation at 94° C. for 2 min.,
25 cycles of 94° C. for 15 sec, 51° C. for 15 sec, 72° C. for 2 min,
Final Extension of 72° C. for 20 minutes.
KO30 (SEQ ID NO: 5216)
Denaturation at 94° C. for 2 min.,
25 cycles of 94° C. for 15 sec, 51.5° C. for 15 sec, 72° C. for 1 min, 45 sec,
Final Extension of 72° C. for 20 minutes.
MurI (SEQ ID NO: 7635), MurG (SEQ ID NO: 7605)
Denaturation at 94° C. for 2 min.,
25 cycles of 94° C. for 15 sec, 52° C. for 15 sec, 72° C. for 1 min, 30 sec,
Final Extension of 72° C. for 20 minutes.
DnaB (SEQ ID NO: 7419), KdtA (SEQ ID NO: 85610),LpxB (SEQ ID NO: 6957)
Denaturation at 94° C. for 2 min.,
27 cycles of 94° C. for 15 sec, 52° C. for 15 sec. 72° C. for 1 min, 30 sec,
Final Extension of 72° C. for 20 minutes.
Tsf (SEQ ID NO: 7109),FlgE (SEQ ID NO: 4820), FliM (SEQ ID NO: 4795),Sig28
(SEQ ID NO: 7310),MurB (SEQ ID NO: 8208)
Denaturation at 94° C. for 2 min.,
30 cycles of 94° C. for 15 sec, 52° C. for 15 sec, 72° C. for 1 min, 30 sec,
Final Extension of 72° C. for 20 minutes.
PpiB (SEQ ID NO: 7674)
Denaturation at 94° C. for 2 min.,
30 cycles of 94° C. for 15 sec, 52° C. for 15 sec, 72° C. for 2 min, 30 sec,
Final Extension of 72° C. for 20 minutes.
MurD (SEQ ID NO: 7597),MurE (SEQ ID NO: 7639), AlgA (SEQ ID NO: 6351),MetL
(SEQ ID NO: 9467),FusA (SEQ ID NO: 7042),SerS (SEQ ID NO: 7182),RnhA (SEQ
ID NO: 6992)
Denaturation at 94° C. for 2 min.,
30 cycles of 94° C. for 15 sec, 55° C. for 15 sec, 72° C. for 1 min, 30 sec,
Final Extension of 72° C. for 20 minutes.

[0589] Upon completion of thermal cycling reactions, each sample of amplified DNA is visualized on a 2% TAE agarose gel stained with Ethidium Bromide (Current Protocols in Molecular Biology, John Wiley and Sons, Inc., F. Ausubel et al., editors, 1994) to determine that a single product of the expected size had resulted from the reaction. Amplified DNA is then washed and purified using the Qiaquick Spin PCR purification kit (Qiagen, Gaithersburg, Md., USA).

[0590] PCR products are cloned into the pT7Blue T-Vector (catalog#69820-1, Novagen, Inc., Madison, Wis., USA) using the TA cloning strategy (Current Protocols in Molecular Biology, John Wiley and Sons, Inc., F. Ausubel et al., editors, 1994). The ligation of the PCR product into the vector is accomplished by mixing a 6 fold molar excess of the PCR product, 10 ng of pT7Blue-T vector (Novagen), 1 microliter of T4 DNA Ligase Buffer (New England Biolabs, Beverly, Mass., USA), and 200 units of T4 DNA Ligase (New England Biolabs) into a final reaction volume of 10 microliters. Ligation is allowed to proceed for 16 hours at 16° C.

[0591] Ligation products are electroporated (Current Protocols in Molecular Biology, John Wiley and Sons, Inc., F. Ausubel et al., editors, 1994) into electroporation-competent XL-1 Blue or DH5-a E. coli cells (Clontech Lab., Inc. Palo Alto, Calif., USA). Briefly, 1 microliter of ligation reaction is mixed with 40 microliters of electrocompetent cells and subjected to a high voltage pulse (25 microFarads, 2.5 kV, 200 ohms) after which the samples are incubated in 0.45 ml SOC medium (0.5% yeast extract, 2% tryptone, 10 mM NaCl, 2.5 mM KCl, 10 mM MgCl₂, 10 mM MgSO₄ and 20 mM glucose) at 37° C. with shaking for 1 hour. Samples are then spread onto LB (10 g/l bacto tryptone, 5 g/l bacto yeast extract, 10 g/l sodium chloride) plates containing 100 microgram/ml of Ampicillin, 0.3% X-gal, and 100 microgram/ml IPTG. These plates are incubated overnight at 37° C. Ampicillin-resistant colonies with white color are selected, grown in 5 ml of liquid LB containing 100 microgram/ml of Ampicillin, and plasmid DNA is isolated using the Qiagen miniprep protocol (Qiagen, Gaithersburg, Md., USA).

[0592] To verify that the correct H. pylori DNA inserts had been cloned, these pT7Blue plasmid DNAs are used as templates for PCR amplification of the cloned inserts, using the same forward and reverse primers used for the initial amplification of the J99 H. pylori sequence. Recognition of the primers and a PCR product of the correct size as visualized on a 2% TAE, ethidium bromide stained agarose gel are confirmation that the correct inserts had been cloned. Two to six such verified clones are obtained for each knock-out target, and frozen at −70° C. for storage. To minimize errors due to PCR, plasmid DNA from these verified clones are pooled, and used in subsequent cloning steps.

[0593] The sequences of the genes/ORFs are again used to design a second pair of primers which flank the region of H. pylori DNA to be either interrupted or deleted (up to 250 basepairs) within the ORFs but are oriented away from each other. The pool of circular plasmid DNAs of the previously isolated clones are used as templates for this round of PCR. Since the orientation of amplification of this pair of deletion primers is away from each other, the portion of the ORF between the primers is not included in the resultant PCR product. The PCR product is a linear piece of DNA with H. pylori DNA at each end and the pT7Blue vector backbone between them which, in essence, resultes in the deletion of a portion of the ORFs. The PCR product is visualized on a 1% TAE, ethidium bromide stained agarose gel to confirm that only a single product of the correct size has been amplified.

[0594] A Kanamycin-resistance cassette (Labigne-Roussel et al., 1988 J. Bacteriology 170, 1704-1708) is ligated to this PCR product by the TA cloning method used previously (Current Protocols in Molecular Biology, John Wiley and Sons, Inc., F. Ausubel et al., editors, 1994). The Kanamycin cassette containing a Campylobacter kanamycin resistance gene is obtained by carrying out an EcoRI digestion of the recombinant plasmid pCTB8:kan (Cover et al., 1994, J. Biological Chemistry 269, pp. 10566-10573). The proper fragment (1.4 kb) is isolated on a 1% TAE gel, and isolated using the QIAquick gel extraction kit (Qiagen, Gaithersburg, Md., USA). The fragment is end repaired using the Klenow fill-in protocol, which involved mixing 4 ug of the DNA fragment, 1 microliter of dATP, dGTP, dCTP, dTTP at 0.5 mM, 2 microliter of Klenow Buffer (New England Biolabs) and 5 units of Klenow DNA Polymerase I Large (Klenow) Fragment (New England Biolabs) into a 20 microliter reaction, incubating at 30° C. for 15 min, and inactivating the enzyme by heating to 75° C. for 10 minutes. This blunt-ended Kanamycin cassette is then purified through a Qiaquick column (Qiagen, Gaithersburg, Md., USA) to eliminate nucleotides. The “T” overhang is then generated by mixing 5 micrograms of the blunt-ended kanamycin cassette, 10 mM Tris pH 8.3, 50 mM KCl, 2 mM MgCl₂, 5 units of DNA Polymerase (Amplitaq, Roche Molecular Systems, Inc., Branchburg, N.J., USA), 20 microliters of 5 mM dTTP, in a 100 microliter reaction and incubating the reaction for 2 hours at 37° C. The “Kan-T” cassette is purified using a QIAquick column (Qiagen, Gaithersburg, Md., USA). The PCR product of the deletion primers (F2 and R2) is ligated to the Kan-T cassette by mixing 10 to 25 ng of deletion primer PCR product, 50-75 ng Kan-T cassette DNA, 1 microliter 10× T4 DNA Ligase reaction mixture, 0.5 microliter T4 DNA Ligase (New England Biolabs, Beverly, Mass., USA) in a 10 microliter reaction and incubating for 16 hours at 16° C.

[0595] The ligation products are transformed into XL-1 Blue or DH5-a E. coli cells by electroporation as described previously. After recovery in SOC, cells are plated onto LB plates containing 100 microgram/ml Ampicillin and grown overnight at 37° C. These plates are then replica plated onto plates containing 25 microgram/ml Kanamycin and allowed to grow overnight. Resultant colonies have both the Ampicillin resistance gene present in the pT7Blue vector, and the newly introduced Kanamycin resistance gene. Colonies are picked into LB containing 25 microgram/ml Kanamycin and plasmid DNA is isolated from the cultured cells using the Qiagen miniprep protocol (Qiagen, Gaithersburg, Md., USA).

[0596] Several tests by PCR amplification are conducted on these plasmids to verify that the Kanamycin is inserted in the H. pylori gene/ORF, and to determine the orientation of the insertion of the Kanamycin-resistance gene relative to the H. pylori gene/ORF. To verify that the Kanamycin cassette is inserted into the H. pylori sequence, the plasmid DNAs are used as templates for PCR amplification with the set of primers originally used to clone the H. pylori gene/ORFs. The correct PCR product is the size of the deleted gene/ORF but increased in size by the addition of a 1.4 kilobase Kanamycin cassette. To avoid potential polar effects of the kanamycin resistance cassette on H. pylori gene expression, the orientation of the Kanamycin resistance gene with respect to the knock-out gene/ORF is determined and both orientations are eventually used in H. pylori transformations (see below). To determine the orientation of insertion of the kanamycin resistance gene, primers are designed from the ends of the kanamycin resistance gene (“Kan-1” 5′-ATCTTACCTATCACCTCAAAT-3′ (SEQ ID NO:10015)), and “Kan-2” 5′-AGACAGCAACATCTTTGTGAA-3′ (SEQ ID NO:10016)). By using each of the cloning primers in conjunction with each of the Kan primers (4 combinations of primers), the orientation of the Kanamycin cassette relative to the H. pylori sequence is determined. Positive clones are classified as either in the “A” orientation (the same direction of transcription is present for both the H. pylori gene and the Kanamycin resistance gene), or in the “B” orientation (the direction of transcription for the H. pylori gene is opposite to that of the Kanamycin resistance gene). Clones which share the same orientation (A or B) are pooled for subsequent experiments and independently transformed into H. pylori.

[0597] Transformation of Plasmid DNA into H. Pylori Cells

[0598] Two strains of H. pylori are used for transformation: ATCC 55679, the clinical isolate which provided the DNA from which the H. pylori sequence database is obtained, and AH244, an isolate which had been passaged in, and has the ability to colonize the mouse stomach. Cells for transformation are grown at 37° C., 10% CO₂, 100% humidity, either on Sheep-Blood agar plates or in Brucella Broth liquid. Cells are grown to exponential phase, and examined microscopically to determine that the cells are “healthy” (actively moving cells) and not contaminated. If grown on plates, cells are harvested by scraping cells from the plate with a sterile loop, suspended in 1 ml of Brucella Broth, spun down (1 minute, top speed in eppendorf microfuge) and resuspended in 200 microliters Brucella Broth. If grown in Brucella Broth liquid, cells are centrifuged (15 minutes at 3000 rpm in a Beckman TJ6 centrifuge and the cell pellet resuspended in 200 microliters of Brucella broth. An aliquot of cells is taken to determine the optical density at 600 nm, in order to calculate the concentration of cells. An aliquot (1 to 5 OD₆₀₀ units/25 microliter) of the resuspended cells is placed onto a prewarmed Sheep-Blood agar plate, and the plate is further incubated at 37° C., 6% CO₂, 100% humidity for 4 hours. After this incubation, 10 microliters of plasmid DNA (100 micrograms per microliter) is spotted onto these cells. A positive control (plasmid DNA with the ribonuclease H gene disrupted by kanamycin resistance gene) and a negative control (no plasmid DNA) are done in parallel. The plates are returned to 37° C., 6% CO₂ for an additional 4 hours of incubation. Cells are then spread onto that plate using a swab wetted in Brucella broth, and grown for 20 hours at 37° C., 6% CO₂. Cells are then transferred to a Sheep-Blood agar plate containing 25 micrograms/ml Kanamycin, and allowed to grow for 3 to 5 days at 37° C., 6% CO₂, 100% humidity. If colonies appear, they are picked and regrown as patches on a fresh Sheep-Blood agar plate containing 25 micrograms/ml Kanamycin.

[0599] Three sets of PCR tests are done to verify that the colonies of transform ants have arisen from homologous recombination at the proper chromosomal location. The template for PCR (DNA from the colony) is obtained by a rapid boiling DNA preparation method as follows. An aliquot of the colony (stab of the colony with a toothpick) is introduced into 100 microliters of 1% Triton X-100, 20 mM Tris, pH 8.5, and boiled for 6 minutes. An equal volume of phenol: chloroform (1:1) is added and vortexed. The mixture is microfuged for 5 minutes and the supernatant is used as DNA template for PCR with combinations of the following primers to verify homologous recombination at the proper chromosomal location.

[0600] TEST 1. PCR with cloning primers originally used to amplify the gene/ORF. A positive result of homologous recombination at the correct chromosomal location should show a single PCR product whose size is expected to be the size of the deleted gene/ORF but increased in size by the addition of a 1.4 kilobase Kanamycin cassette. A PCR product of just the size of the gene/ORF is proof that the gene had not been knocked out and that the transformant is not the result of homologous recombination at the correct chromosome location.

[0601] TEST 2. PCR with F3 (primer designed from sequences upstream of the gene/ORF and not present on the plasmid), and either primer Kan-1 or Kan-2 (primers designed from the ends of the kanamycin resistance gene), depending on whether the plasmid DNA used was of “A” or “B” orientation. Homologous recombination at the correct chromosomal location will result in a single PCR product of the expected size (i.e., from the location of F3 to the insertion site of kanamycin resistance gene). No PCR product or PCR product(s) of incorrect size(s) will prove that the plasmid had not integrated at the correct site and that the gene had not been knocked out.

[0602] TEST 3. PCR with R3 (primer designed from sequences downstream of the gene/ORF and not present on the plasmid) and either primer Kan-1 or Kan-2, depending on whether the plasmid DNA used was of “A” or “B” orientation. Homologous recombination at the correct chromosomal location will result in a single PCR product of the expected size (i.e., from the insertion site of kanamycin resistance gene to the downstream location of R3). Again, no PCR product or PCR product(s) of incorrect size(s) will prove that the plasmid had not integrated at the correct site and that the gene had not been knocked out.

[0603] Transformants showing positive results for all three tests above indicate that the gene is not essential for survival in vitro.

[0604] A negative result in any of the three above tests for each transformant indicates that the gene had not been disrupted, and that the gene is essential for survival in vitro.

[0605] In the event that no colonies result from two independent transformations while the positive control with the disrupted ribonuclease H plasmid DNA produces transformants, the plasmid DNA is further analyzed by PCR on DNA from transformant populations prior to plating for colony formation. This will verify that the plasmid can enter the cells and undergo homologous recombination at the correct site. Briefly, plasmid DNA is incubated according to the transformation protocol described above. DNA is extracted from the H. pylori cells immediately after incubation with the plasmid DNAs and the DNA is used as template for the above TEST 2 and TEST 3. Positive results in TEST 2 and TEST 3 would verify that the plasmid DNA could enter the cells and undergo homologous recombination at the correct chromosomal location. If TEST 2 and TEST 3 are positive, then failure to obtain viable transformants indicates that the gene is essential, and cells suffering a disruption in that gene are incapable of colony formation.

[0606] Genes used in these experiments have been found to be essential, non-essential, or are still in progress, as indicated in Table 15.

TABLE 15
Summary
of knock-
out

| genes/ORFs | Accession | | |
|---|---|---|---|
| Gene | Number | Pathway | Status |
| rnh | P23329 | Transcription | Not essential |
| ppiB | P29820 | Translation | Not essential |
| tsf | P34828 | Translation | Essential |
| MurD | P14900 | Cell envelope | Essential |
| MurE | P22188 | Cell envelope | Essential |
| AlgA | P07874 | Virulence/Colo- | Not essential |
| | | nization | |
| metL | P19358 | Amino acid | Not essential |
| | | biosynthesis - | |
| | | aspartate | |
| | | family | |
| fusA | X16278 | Translation | Essential |
| FlgE | U09549 | Virulence/Colo- | Not essential- |
| | | nization | motility |
| | | | impaired |
| FliM | M37691 | Virulence/Colo- | Not essential- |
| | | nization | motility |
| | | | impaired |
| MurC | U32794 | Cell envelope | Essential |
| dnaE | M10040 | DNA | Essential |
| | | replication | |
| serS | X05017 | Translation | Essential |
| gly | P00960 | Translation | Essential |
| gltX | L14580 | Translation | Essential |
| sig28 | M37691 | Regulatory | Not essential- |
| (fliA) | | functions | motility |
| | | | impaired |
| sig54 | | Regulatory | Not essential- |
| | | functions | motility |
| | | | impaired |
| MurI | U12405 | Cell envelope | Essential |
| dnaB | D26185 | DNA | Essential |
| | | replication | |
| MurG | D10602 | Cell envelope | Essential |
| lpxC/envA | U32794 | Cell envelope | Essential |
| kdtA | M86305 | Cell envelope | Essential |
| lpxB | U09549 | Cell envelope | Essential |
| KO 24 | | thiolase-like | Not Essential |
| KO 26 | | histone-like | Not Essential |
| KO 27 | | respiratory | Not Essential |
| | | chain NADH | |
| | | dehydrogenase- | |
| | | like | |
| ftsY | P44870 | Cell division | Essential |
| 26 KDa | P21762 | Antioxidant | Essential |
| protein | | | |
| KO28 | | Aldose-1- | Not Essential |
| | | epimerase-like | |
| VAC51 | | Gram-neg | Not Essential |
| | | porin-like | |
| murB | P18579 | Cell wall | Essential |
| | | biosynthesis | |

[0607] VII. High-throughput Drug Screen Assay

[0608] Cloning, Expression and Protein Purification

[0609] Cloning, transformation, expression and purification of the H. pylori target gene and its protein product, e.g., an H. pylori enzyme, to be used in a high-throughput drug screen assay, is carried out essentially as described in Examples II and III above. Development and application of a screening assay for a particular H. pylori gene product, peptidyl-propyl cis-trans isomerase, is described below as a specific example.

[0610] Enzymatic Assay

[0611] The assay is essentially as described by Fisher (Fischer, G., et. al. (1984) Biomed. Biochim. Acta 43:1101-1111). The assay measures the cis-trans isomerization of the Ala-Pro bond in the test peptide N-succinyl-Ala-Ala-Pro-Phe-p-nitroanilide (Sigma # S-7388, lot # 84H5805). The assay is coupled with α-chymotrypsin, where the ability of the protease to cleave the test peptide occurs only when the Ala-Pro bond is in trans. The conversion of the test peptide to the trans isomer in the assay is followed at 390 nm on a Beckman Model DU-650 spectophotometer. The data are collected every second with an average scanning of time of 0.5 second. Assays are carried out in 35 mM Hepes, pH 8.0, in a final volume of 400 ul, with 10 μM α-chymotrypsin (type 1-5 from bovine Pancreas, Sigma # C-7762, lot 23H7020) and 10 nM PPIase. To initiate the reaction, 10 μl of the substrate (2 mM N-Succinyl-Ala-Ala-Pro-Phe-p-nitroanilide in DMSO) is added to 390 μl of reaction mixture at room temperature.

[0612] Enzymatic Assay in Crude Bacterial Extract.

[0613] A 50 ml culture of Helicobacter pylori (strain J99) in Brucella broth is harvested at mid-log phase (OD 600 nm ˜1) and resuspended in lysis buffer with the following protease inhibitors: 1 mM PMSF, and 10 μg/ml of each of aprotinin, leupeptin, pepstatine, TLCK, TPCK, and soybean trypsin inhibitor. The suspension is subjected to 3 cycles of freeze-thaw (15 minutes at −70° C., then 30 minutes at room temperature), followed by sonication (three 20 second bursts). The lysate is centrifuged (12,000 g×30 minutes) and the supernatant is assayed for enzymatic activity as described above.

[0614] Results

[0615] PPI from H. pylori was expressed in E. coli using the pET-28b expression vector from Novagen (cat # 69868-1). The expressed recombinant protein was isolated from the soluble fraction of bacterial cells that had been disrupted by cavitation in a Microfluidics Cell disruption chamber. The expression levels of recombinant PPI produced 100 mg of protein. The recombinant protein could be purified to homogeneity by Ni²⁺ chelate chromatography and gel filtration. On sodium dodecyl sulfate polyacrylamide gels, the recombinant protein migrates as a single band at 21 kDa, in accordance with the predicted molecular weight of 20,975 deduced from the gene sequence.

[0616] The PPIase activity was assayed using the chromogenic tetrapeptide substrate succinyl-Ala-Ala-Pro-Phe-p-nitroanilide. An initial velocity of 4.9 μmole/min/mg protein was measured with the purified enzyme (FIG. 5). This corresponds to a k_{cat} of 1.6 sec⁻¹ which is similar to the one obtained for the E. coli PPIase (Liu, J. and Walsh, C. T. (1990) Proc. Natl. Acad. Sci. USA 87:4028-4032) and the one from porcine kidney (Fischer, G. (1989) Nature 337:476-478).

[0617] The recombinant protein has a high catalytic efficiency of 2.06×10⁹ M⁻¹ s⁻¹ when the assay is measured at 25° C. These values are one to two orders of magnitude higher than that observed for other characterized PPIases. However, in those studies, the ppiase assay was conducted at 10° C., which may account for the discrepency. The calalytic efficiency is very close to the 1×10⁸ to 1×10⁹ M^{-1 s}⁻¹ upper diffusinal limit for “kinetically perfect” enzymes (Albery, W. J. and Knowles, J. R. (1976) Biochemistry 15:5631-5640) and suggests that by at least one measure, the H. pylori PPIase is a highly effective catalyst in the cis-trans isomerisation of the Ala-Pro bond in the oligopeptide substrate.

[0618] The presence of PPIase was also determined in an H. pylori extract. As with the assay for the recombinant protein, PPIase activity was detected, and was dependent on the concentration of extract added (FIG. 6).

[0619] These results show that PPIase activity can be measured on either H. pylori extracts or on the recombinant protein in E. coli. The high catalytic efficiency also demonstrates that H. pylori enzymes, such as PPIase, can be expressed at high levels and in an active form in E. coli. Such high yields of purified proteins provide for the design of various high throughput drug screening assays.

[0620] VIII. Cloning, Purification and Characterization of the Gene Encoding the Glutamate Racemase of H. Pylori.

[0621] The Helicobacter pylori genome contains an open reading frame (ORF) of 255 amino acids (SEQ ID NO: 7635) that was found to have homology to the Staphylococcus haemolyticus glutamate racemase gene (dga) (NCBI Accession number U12405) and to the E. coli murI gene which encodes glutamate racemase activity in that organism. To evaluate whether this H. pylori ORF encodes a protein with glutamate racemase activity, the gene was isolated by polymerase chain reaction (PCR) amplification cloning, overexpressed in E coli, and the protein purified to apparent homogeneity. A simple assay for glutamate racemase activity resulting in the isomerization of D-glutamic acid to L-glutamic acid was developed to facilitate purification and for future use as a high-throughput drug screen.

[0622] The ORF in H. pylori has been found by gene disruption studies to be essential for viability of H. pylori cells in laboratory culture (see Example VI above). Therefore, inhibition of the enzymatic activity would be expected to be lethal for the organism, and such inhibitors may have utility in antimicrobial therapy of human infectious diseases.

[0623] Cloning of H. pylori murI Gene Encoding Glutamate Racemase

[0624] A 765 base pair DNA sequence encoding the murI gene of H. pylori was isolated by polymerase chain reaction (PCR) amplification cloning. A synthetic oligonucleotide primer (5′-AAATAGTCATATGAAAATAGGCGTTTTTG-3′ (SEQ ID NO:10017)) encoding an NdeI restriction site and the 5′ terminus of the murI gene and a primer (5′-AGAATTCTATTACAATTTGAGCCATTCT-3′ (SEQ ID NO:10018)) encoding an EcoRI restriction site and the 3′ end of the murI gene were used to amplify the murI gene of H. pylori using genomic DNA prepared from the J99 strain of H. pylori as the template DNA for the PCR amplification reactions (Current Protocols in Molecular Biology, John Wiley and Sons, Inc. F. Ausubel et al., editors, 1994). To amplify a DNA sequence containing the murI gene, genomic DNA (25 nanograms) was introduced into each of two reaction vials containing 1.0 micromole of each synthetic oligonucleotide primer, 2.0 mM MgCl₂; 0.2 mM of each deoxynucleotide triphosphate (dATP, dGTP, dCTP & dTTP), and 1.25 units of heat stable DNA polymerases (Amplitaq, Roche Molecular Systems, Inc., Branchburg, N.J., USA) in a final volume of 50 microliters. The following thermal cycling conditions were used to obtain amplified DNA products for the murI gene using a Perkin Elmer Cetus/GeneAmp PCR System 9600 thermal cycler:

[0625] Conditions for Amplification of H. Pylori MurI (SEQ ID NO: 7635);

[0626] Denaturation at 94° C. for 2 min,

[0627] 2 cycles at 94° C. for 15 sec, 30° C. for 30 sec and 72° C. for 15 sec

[0628] 23 cycles at 94° C. for 15 sec, 53° C. for 30 sec and 72° C. for 15 sec

[0629] Reactions were concluded at 72° C. for 20 minutes

[0630] Upon completion of thermal cycling reactions, the amplified DNA was washed and purified using the Qiaquick Spin PCR purification kit (Qiagen, Gaithersburg, Md., USA). The amplified DNA sample was subjected to digestion with the restriction endonucleases, NdeI and EcoRI (New England Biolabs, Beverly, Mass. USA) (Current Protocols in Molecular Biology, Ibid). The DNA samples from each of two reaction mixtures were pooled and subjected to electrophoresis on a 1.0% SeaPlaque (FMC BioProducts, Rockland, Me., USA) agarose gel. DNA was visualized by exposure to ethidium bromide and long wave uv irradiation. Amplified DNA encoding the H. pylori murI gene was isolated from agarose gel slices and purified using the Bio 101 GeneClean Kit protocol (Bio 101 Vista, Calif., USA).

[0631] Cloning of H. Pylori DNA Sequences into the pET-23 Prokaryotic Expression Vector.

[0632] The pET-23b vector can be propagated in any E. coli K-12 strain, e.g., HMS174, HB101, JM 109, DH5α, etc., for the purpose of cloning or plasmid preparation. Hosts for expression include E. coli strains containing a chromosomal copy of the gene for T7 RNA polymerase. These hosts are lysogens of bacteriophage DE3, a lambda derivative that carries the lacI gene, the lacUV5 promoter and the gene for T7 RNA polymerase. T7 RNA polymerase is induced by addition of isopropyl-B-D-thiogalactoside (IPTG), and the T7 RNA polymerase transcribes any target plasmid, such as pET-28b, carrying its gene of interest. Strains used in our laboratory include: BL21 (DE3) (Studier, F. W., Rosenberg, A. H., Dunn, J. J., and Dubendorff, J. W. (1990) Meth. Enzymol. 185, 60-89).

[0633] The pET-23b vector (Novagen, Inc., Madison, Wis., USA) was prepared for cloning by digestion with NdeI and EcoRI (Current Protocols in Molecular Biology, Ibid). Following digestion, the amplified, agarose gel-purified DNA fragment carrying the murI gene was cloned (Current Protocols in Molecular Biology, Ibid) into the previously digested pET-23b expression vector. Products of the ligation reaction were then used to transform the BL21 (DE3) strain of E. coli.

[0634] Transformation of Competent Bacteria with Recombinant Plasmids

[0635] Competent bacteria, E coli strain BL21 or E. coli strain BL21(DE3), were transformed with recombinant pET23-murI expression plasmid carrying the cloned H. pylori sequence according to standard methods (Current Protocols in Molecular, Ibid). Briefly, 1 microliter of ligation reaction was mixed with 50 microliters of electrocompetent cells and subjected to a high voltage pulse, after which, samples were incubated in 0.45 milliliters SOC medium (0.5% yeast extract, 2.0% tryptone, 10 mM NaCl, 2.5 mM KCl, 10 mM MgCl₂, 10 mM MgSO₄ and 20 mM glucose) at 37° C. with shaking for 1 hour. Samples were then spread on LB agar plates containing 100 microgram/ml ampicillin for growth overnight. Transformed colonies of BL21 were then picked and analyzed to evaluate cloned inserts as described below.

[0636] Identification of Recombinant pET Expression Plasmids Carrying H. Pylori Sequences

[0637] Individual BL21 clones transformed with recombinant pET-23-murI were analyzed by PCR amplification of the cloned inserts using the same forward and reverse primers, specific for each H. pylori sequence, that were used in the original PCR amplification cloning reactions. Successful amplification verified the integration of the H. pylori sequences in the expression vector (Current Protocols in Molecular Biology, Ibid).

[0638] Isolation and Preparation of Plasmid DNA from BL21 Transformants Colonies carrying pET-23-murI vectors were picked and incubated in 5 mls of LB broth plus 100 microgram/ml ampicillin overnight. The following day plasmid DNA was isolated and purified using the Qiagen plasmid purification protocol (Qiagen Inc., Chatsworth, Calif., USA).

[0639] Cloning and Expression of the E. Coli groE Operon

[0640] It has been demonstrated that coexpression of the E. coli murI gene with the genes in the E. coli groE operon reduces the formation of insoluble inclusion bodies containing recombinant glutamate racemase (Ashiuchi, M., Yoshimura, T., Kitamura, T., Kawata, Y., Nagai, J., Gorlatov, S., Esaki, N. and Soda, K., 1995, J. Biochem. 117, 495-498). The groE operon encodes two proteins, GroES (97 amino acids) and GroEL (548 amino acids), which are molecular chaperones. Molecular chaperones cooperate to assist the folding of new polypeptide chains (F. Ulrich Hartl, 1996, Nature London 381, pp. 571-580).

[0641] The 2210 bp DNA sequence encoding the groE operon of E. coli (NCBI Accession number X07850) was isolated by polymerase chain reaction (PCR) amplification cloning. A synthetic oligonucleotide primer (5′-GCGAATTCGATCAGAATTTTTTTTCT-3′ (SEQ ID NO:10019)) encoding an EcoRI restriction site and the 5′ terminus of the groE operon containing the endogenous promoter region of the groE operon and a primer (5′-ATAAGTACTTGTGAATCTTATACTAG-3′ (SEQ ID NO:10020)) encoding a ScaI restriction site and the 3′ end of the groEL gene contained in the groE operon were used to amplify the groE operon of E. coli using genomic DNA prepared from E. coli strain MG1655 as the template DNA for the PCR amplification reactions (Current Protocols in Molecular Biology, Ibid). To amplify a DNA sequence containing the E. coli groE operon, genomic DNA (12.5 nanograms) was introduced into each of two reaction vials containing 0.5 micromoles of each synthetic oligonucleotide primer, 1.5 mM MgCl₂, 0.2 mM each deoxynucleotide triphosph te (dATP, dGTP, dCTP & dTTP) and 2.6 units heat stable DNA polymerases (Expanded High Fidelity PCR System, Boehringer Mannheim, Indianapolis, Ind.) in a final volume of 50 microliters. The following thermal cycling conditions were used to obtain amplified DNA products for the groE operon using a Perkin Elmer Cetus/GeneAmp PCR System 9600 thermal cycler:

[0642] Conditions for amplification and cloning of the E. coli groE operon;

[0643] Denaturation at 94° C. for 2 min,

[0644] 2 cycles at 94° C. for 15 sec, 30° C. for 30 sec and 72° C. for 2 min

[0645] 23 cycles at 94 C for 15 sec, 55° C. for 30 sec and 72° C. for 2 min

[0646] Reactions were concluded at 72° C. for 8 minutes

[0647] Upon completion of thermal cycling reactions, the amplified DNA was washed and purified using the Qiaquick Spin PCR purification kit (Qiagen, Gaithersburg, Md., USA). The amplified DNA sample was subjected to digestion with the restriction endonucleases, EcoRI and ScaI New England Biolabs, Beverly, Mass. USA) (Current Protocols in Molecular Biology, Ibid). The DNAs from each of two reaction mixtures were pooled and subjected to electrophoresis in a 1.0% SeaPlaque (FMC BioProducts, Rockland, Me., USA) agarose gel. DNA was visualized by exposure to ethidium bromide and long wave uv irradiation. DNA contained in slices isolated from the agarsoe gel was purified using the Bio 101 GeneClean Kit protocol (Bio 101 Vista, Calif., USA).

[0648] A DNA fragment, EcoRI to ScaI, containing the E coli groE operon was cloned into the corresponding sites of the pACYC184 expression vector (New England Biolabs, Beverly, Mass., USA) to make pACYC184-groE. The BL21 (DE3) strain of E. coli was transformed with pACYC-groE. A tetracycline-resistant transformant overexpressing proteins of Mᵣ˜14,000 (GroES) and Mᵣ˜60,000 (GroEL) was isolated.

[0649] Transformation of E. Coli Strain BL21(DE3) Carrying the pACYC-groE plasmid of E. coli.

[0650] Competent bacteria derived from a clone of strain BL21 (DE3) carrying the pACYC-groE plasmid were transformed with 50 nanograms of pET23-murI plasmid DNA, isolated as described above (Current Protocols in Molecular Biology, Ibid). A clone of BL21(DE3) carrying both the pACYC-groE expression plasmid and the pET-23-murI plasmid was isolated and used for expression of recombinant glutamate racemase as described below.

[0651] Expression of Recombiant H. Pylori murI (SEQ ID NO: 2873; SEQ ID NO: 7635)

[0652] A bacterial clone of BL21 (DE3) carrying both the pACYC-groE expression plasmid and the pET-23-murI plasmid was cultured in LB broth supplemented with 1.0 mM D,L-glutamic acid and 100 microgram/ml ampicillin and 10 micrograms/ml tetracycline at 30° C. until an optical density at 600 nM of 0.5 to 1.0 O.D. units was reached, at which point, isopropyl-beta-D-thiogalactoside (IPTG) was added to the culture at a final concentration of 1.0 mM. Cells were cultured overnight to induce gene expression of the H. pylori recombinant DNA constructions.

[0653] After induction of gene expression with IPTG, bacteria were pelleted by centrifugation in a Sorvall RC-3B centrifuge at 3000×g for 20 minutes at 4° C. Pellets were resuspended in 50 milliliters of cold 10 mM Tris-HCl, pH 8.0, 0.1 M NaCl and 0.1 mM EDTA (STE buffer). Cells were then centrifuged at 2000×g for 20 min at 4° C. Pellets were weighed (average wet weight =6 grams/liter) and processed to purify recombinant protein as described below.

[0654] Purification of Soluble Glutamate Racemase

[0655] All steps were carried out at 4° C. Cells were suspended in 4 volumes of lysis buffer (50 mM Potassium phosphate, pH 7.0, 100 mM NaCl, 2 mM EDTA, 2 mM EGTA, 10% glycerol, 10 mM D,L-glutamic acid, 0.1% β-mercaptoethanol, 200 μg/ml lysozyme, 1 mM PMSF, and 10 ug/ml each of leupeptin, aprotinin, pepstatin, L-1-chloro-3-[4-tosylamido]-7-amino-2-heptanone (TLCK), L-1-chloro-3-[4-tosylamido]-4-phenyl-2-butanone (TPCK), and soybean trypsin inhibitor, and ruptured by three passages through a small volume microfluidizer (Model M-110S, Microfluidics International Corporation, Newton, Mass.). The resultant homogenate was diluted with 1 volume of buffer A (10 mM Tris-HCl pH 7.0, 0.1 mM EGTA, 10% glycerol, 1 mM DL-Glutamic acid, 1 mM PMSF, 0.1% beta-mercaptoethanol), made 0.1% Brij-35, and centrifuged (100,000×g, 1 h) to yield a clear supernatant (crude extract).

[0656] After filtation through a 0.80-um filter, the extract was loaded directly onto a 20 ml Q-Sepharose column pre-equilibrated in buffer A containing 100 mM NaCl and 0.02% Brij-35. The column was washed with 100 ml (5 bed volumes) of Buffer A containing 100 mM NaCl and 0.02% Brij-35, then developed with a 100-ml linear gradient of increasing NaCl (from 100 to 500 mM) in Buffer A. A band of Mᵣ=28,000 corresponding to glutamate racemase, the product of the recombinant H. pylori murI gene, eluted at a gradient concentration of approximately 200-280 mM NaCl. Individual column fractions were then characterized for glutamate racemase activity (see below for description of assay) and the protein profile of the fractions were analyzed on 12% acrylamide SDS-PAGE gels.

[0657] Fractions containing glutamate racemase were pooled, brought to 70% saturation with solid (NH₄)₂SO₄, stirred for 20 min, and then centrifuged at 27,000×g for 20 min. The resulting pellet was resuspended in lysis buffer to a final volume of 8 ml and loaded directly onto a 350-ml column (2.2×92 cm) of Sephacryl S-100HR gel filtration medium equilibrated in buffer B (10 mM Hepes pH 7.5, 150 mM NaCl, 0.1 mM EGTA, 10% glycerol, 1 mM D,L-glutamatic acid, 0.1 mM PMSF, 0.1% beta-mercaptoethanol) and run at 30 ml/h. Fractions found to contain a glutamate racemase activity were pooled, and 0.5 volume of buffer C (10 mM Tris pH 7.5, 0.1 mM EGTA, 10% glycerol, 1 mM D,L-glutamic acid, 0.1 mM PMSF, 0.1% B-mercaptoethanol) was added (to reduce the NaCl concentration to 100 mM), and loaded onto a MonoQ 10/10 high-pressure liquid chromatography column equilibrated in buffer C containing 100 mM NaCl. The column was washed with 5 bed volumes of this buffer and developed with a 40 ml linear gradient of increasing NaCl (from 100 to 500). Glutamate racemase eluted as a sharp peak at 310 mM NaCl. Fractions containing a glutamate racemase activity were pooled, concentrated by dialysis against storage buffer [50% glycerol, 10 mM 3-(N-morpholino-propanesulfonic acid (MOPS) pH 7.0, 150 mM NaCl, 0.1 mM EGTA, 0.02% Brij-35, 1 mM dithiothreitol (DTT)], and stored at −20° C.

[0658] Assays for Glutamate Racemase Activity.

[0659] Conversion of D-glutamate to L-glutamate (Two Enzyme Coupled Assay)

[0660] The activity of glutamate racemase, interconversion of the enantiomers of glutamic acid, was measured using D-glutamic acid as substrate. The method of Gallo and Knowles (Gallo, K. A. and Knowles, J. R., 1993, Biochmistry 32, 3981-3990) that was used to measure the glutamate racemase activity of Lactobacillus fermenti was adapted for the measurement of glutamate racemase activity of the H. pylori murI gene product isolated as a recombinant protein from E. coli. In this assay, the measurement of the activity of glutamate racemase is linked to an OD change in the visible range in a series of coupled reactions to the activities of L-glutamate dehydrogenase (reduction of NAD to NADH) and diaphorase (reduction of the dye p-iodonitrotetrazolium violet, INT). Initial rates were determined by following the increase in absorbance at 500 nm in a reaction volume of 200 μl containing 50 mM Tris-HCl, pH 7.8, 4% v/v glycerol, 10 mM NAD, 2 mM INT, 60 Units/ml L-glutamate dehydrogenase, 5 Units/ml diaphorase, and varying concentrations of either substrate (from 0.063 mM to 250 mM D-glutamic acid) or purified enzyme (from 1 μg to 50 μg). After a preincubation of all reagents except either the substrate (D-glutamic acid) or the enzyme (murI gene product) for a period of 5 minutes, reactions were initiated by adding the missing ingredient (i.e., the enzyme or the subtrate, as required), and the increase in optical density at 500 nm was measured in a Microplate Spectophotometer System (Molecular Devices, Spectra MAX 250). Measurements were followed for 20 minutes, and initial velocities were derived by calculating the maximum slope for the absorbance increases. The coupled reaction can be summarized as shown below:

[chemical structure]

[0661] Conversion of D-glutamate to L-glutamate (Single Enzyme Coupled Assay)

[0662] In this assay, the conversion of D-glutamic acid to L-glutamic acid is coupled to the conversion of L-glutamic acid and NAD⁺by L-glutamate dehydrogenase to 2-oxoglutarate, ammonia. The production of NADH is measured as an increase of absorbance at 340 nm (the reduction of NAD⁺ to NADH) at 37° C. The standard assay mixture (adapted from Choi, S- Y,, Esaki, N., Yoshimura, T., and Soda, K., 1991, Protein Expression and Purification 2, 90-93) contained 10 mM Tris-HCl, pH 7.5, 5 mM NAD+, 5 Units/ml L-glutamate dehydrogenase, varying concentrations of the substrate D-Glutamic Acid (0.063 mM to 250 mM), and the purified recombinant H. pylori enzyme glutamate racemase (1 μg to 50 μg). The reaction was started by the addition of either the substrate D-glutamic acid or the recombinant glutamate racemase after a preincubation at 37° C. for 5 minutes with all of the other assay ingredients. The change in absorbance at 340 nm was measured in a Spectra MAX 250. Initial velocities were derived from the initial slopes. The coupled reactions can be summarized as shown below:

[chemical structure]

[0663] Results

[0664] 1) Expression of the H. Pylori murI gene in E. Coli Cells

[0665] To examine its biochemical properties, the H. pylori glutamate racemase was overexpressed in E. coli and purified. In the presence of the E. coli chaperones GroES and GroEL, the glutamate racemase was expressed as a soluble protein. About 20 mg of soluble MurI (SEQ ID NO: 2873; SEQ ID NO: 7635) was produced per liter of culture as judged by intensity of the protein band after SDS-PAGE. No band corresponding to the molecular weight of murI protein was seen in control gel lanes containing extracts from cells transformed with the pET vector lacking a murI insert. Addition of 1 mM DL-glutamic acid during cultivation of the expressing cells increased the apparent expression level by about five-fold.

[0666] 2) Purification of Recombinant H. Pylori murI Protein

[0667] MurI was purified by cation exchange chromatography and gel filtration. Upon SDS-PAGE analysis, the purified protein migrated as a single polypeptide species with an apparent mass 29 kDa which is consistent with the predicted mass of 28,858.

[0668] 3) Kinetic Properties of Recombinant H. Pylroi murI enzyme

[0669] Kinetic constant for recombinant glutamate racemase were estimated by assaying its activity at various concentrations of protein and D-glutamic acid as described above. Purified recombinant H. pylori glutamate racemase exhibits a Vₘₐₓ of ˜300 nmoles/min/mg protein (kcat=8.6 min-1) and a Kₘ of ˜100 μM for D-glutamate. Although the Vmax value is lower than that observed for highly purified glutamate racemase from some other bacterial species, its Km for D-glutamic acid is higher than that observed for the enzyme from most other species, resulting in a catalytic efficiency (k_{cat}/Kₘ) which is typical of purified preparation from E. coli and P. Pentococcus.

[0670] 4) Characterization of MurI: Inhibition by L-serine-O Sulfate

[0671] The H. pylori glutamate racemase was tested for inactivation with a sucuide inhibitor, L-serine-O sulfate, which is known to inhibit murI from E. coli. The enzyme was incubated in the presence of 20 mM L-serine-O sulfate, and at different times interval, aliquots were removed to determine residual activity. The initial velocity of purified recombinant H. pylroi murI protein was determined in the single enzyme coupled asssay following incubation with the inhibitor L-serine-O-sulfate (LSOS) at 20 mM for the times indicated on the x-axis. The control was incubated in an identical manner but without LSOS. As shown in FIG. 7, the H. pylori glutamate racemase can be readily inactivated by the inhibitor.

[0672] Future Application of the Glutamate Racemase Activity in High Throughput Drug Screening Assays.

[0673] The assays for measurement of H. pylori glutamate racemase activity described above have been carried out in 96-well plates in which multiple reactions were conducted simultaneously. Measurements of activity in a multi-well format are readily amenable to scale-up to permit rapid analysis of numerous compounds for inhibition of the glutamate racemase activity. Compunds which inhibit the activity of glutamate racemase may have application as novel antibiotics and may be suitable for the treatment and eradication of bacterial (e.g., H. pylori) infections in humans. Known inhibitors of glutamate racemase, such as L-serine-O-sulfate, can be used to calibrate high throughput screens of new compound libraries to facilitate identification of new compounds with properties suitable for in vivo human therapeutics.

[0674] IX. Cloning Purification, and Characterization of the Gene Encoding H. Pylori MurC (SEQ ID NO: 2845; SEQ ID NO: 7607).

[0675] Background on UDP-N-acetylmuramyl-alanine Synthetase (MurC)

[0676] MurC catalyzes peptide bond formation between the lactyl ether of UDP-N-acetylmuramate and L-alanine to form UDP-N-acetylmuramyl-alanine in one of the initial steps of bacterial peptidoglycan biosynthesis. The enzyme couples the formation of an amide bond with the cleavage of ATP to ADP and inorganic phosphate.

[chemical structure]

[0677] Peptidoglycan biosynthesis is both essential and unique to bacteria. A variety of bactericidal agents exist which interrupt peptidoglycan biosynthesis (e.g., lactams, vancomycin, phosphonomycin, D-cycloserine, alafosfalin, halovinylglycines, liposydomycin B). These compounds act at various steps in the pathway and all cause the induction of cell lysis. MurC is one of two cell wall enzymes (the other is the alanine racemase) which are thought to be inhibited by the cell wall active agent alafosfalin.

[0678] The assembly of the peptide moiety of the peptidoglycan monomer unit in E. coli is carried out by the stepwise addition of L-alanine, D-glutamate, diaminopimelate and D-alanine-D-alanine onto UDP-N-acetylmuramate catalyzed by four adding enzymes (MurC, MurD, MurE and MurF, respectively). The H. pylori genome contains a 475 amino acid open reading frame with relatively high homology to MurC proteins from H. influenzae and E. coli with lower similarity to that from P. gingivalis. Alignment of H. pylori MurC with these homologs reveals an overall identity of 14%.

[0679] Overproduction and Purification of Functional H. Pylori MurC (SEQ ID NO: 7607)

[0680] The H. pylori enzyme has been successfully overproduced in E coli and purified to yield functional enzyme of the appropriate molecular weight as evidenced by SDS-PAGE. Assay of the MurC protein relies on enzymatic synthesis of the substrate, UDP-N-acetylmuramate which is accessible by linking the two preceding enzymes in the peptidoglycan biosynthetic pathway. That procedure involves the incubation of purified E. coli MurA and MurB with commercially available UDP-N-acetylglucosamine and phosphoenolpyruvate followed by reverse phase HPLC purification of the product UDP-N-acetylmuramic acid. Assay of the UDP-N-acetylmuramate synthetase activity of the MurC protein is possible through any of the three methodologies: (i) substrates and products can be monitored by reverse phase HPLC; (ii) ADP production can be monitored continuously through coupled assay with pyruvate kinase and lactate dehydrogenase by following the stoichiometric oxidation of NADH; and (iii) inorganic phosphate produced in the reaction can be monitored spectrophotometrically by complex with molybdate in the presence of the dye malachite green. The inorganic phosphate assay will be most amenable to high throughput screening against compound libraries.

[0681] Cloning and Over-expression of H. Pylori MurC (SEQ ID NO: 7607)

[0682] Two primers were designed for the PCR cloning of murC, MURCE5 GCCATATGCTTGAAACCCCAAAAGTTTTACTCAAAAACC (SEQ ID NO:10021)) and MURCE3 GCGAATTCGCTCGCTCCTATAATCCCTACG (SEQ ID NO:10022)). The 5′ primer was designed incorporating an NdeI site, and the 3′ primer was designed incorporating an EcoRI site. These restriction sites were chosen to allow for the cloning of the entire murC gene into the expression vectors pET-23a and pET-28b, the latter vector allowing for the incorporation of a His tag into the over-expressed recombinant protein to aid in the purification process. Initial stability problems were experienced when attempts were made to clone the murC gene into a high copy number vector, therefore, the murC PCR product was blunt end cloned into the EcoRV site of the low copy number pOK12 plasmid prior to insertion into the expression vectors. The murC gene was excised from pOK12 using NdeI and EcoRI, and ligated into the compatible sites within pET-23a and pET-28b. The complete murC gene was then sequenced to ensure that no aberrant mutation had occurred during the PCR process, and that the primary amino acid sequence of the isolated recombinant protein was identical to the native protein.

[0683] Purification and Assay for H. Pylori MurC (SEQ ID NO: 7607)

[0684] Approximately 15 mg of His-tagged MurC was purified to homogeneity from a six liter fermentation of E coli strain BL21 DE3/pET28b-HpMurC according to the following procedure. Freshly transformed cells (6L) were grown to an optical density (600 nm) of 0.5 in Luria-Bertani media. These cells were then induced with 1 mM isopropylthiogalactoside, allowed to grow for another 3 hours and harvested by centrifugation. Cells were resuspended in 75 ml of 100 mM Tris·HCl, pH 8, 2.5 mM 2-mercaptoethanol and 10% (vol/vol) glycerol. To that mixture, lysozyme was added to a final concentration of 0.2 mg/ml and allowed to incubate for 10 min at 4° C. with gentle mixing before two passages at 2000 psi through a French Press. Cell debris and membranes were then pelleted by centrifugation at 200,000 g for 60 min. The resulting supernatant was applied to a Pharmacia HiTrap chelating nickel-charged column (10 ml) and washed with 5 column volumes of 20 mM sodium phosphate, 0.5 M NaCl, 10 mM imidazole, pH 7.5. The nickel column was then eluted with 500 mM imidizole in the above buffer. The nickel column eluate was subsequently dialyzed overnight against 50 mM Tris·HCl, 2.5 mM 2-mercaptoethanol, 10% glycerol, pH 8.0. The dialysate was then loaded onto a 15 ml Resource Q (Pharmacia) anion exchange column equilibrated in 50 mM Tris·HCl, 2.5 mM 2-mercaptoethanol, 10% glycerol, pH 8.0 and washed with ten column volumes of the same buffer. The column was then subjected to a 120 ml gradient from 0 to 500 mM KCl. MurC eluted with about 150 mM KCl and a total volume of 22 ml was quick-frozen with liquid nitrogen in 0.5 ml aliquots for subsequent assay.

[0685] UDP-N-acetylmurmate was synthesized enzymatically with partially purified E. coli MurA and MurB from overproducing strains described previously (Benson et al., 1993, Biochemistry 32:2024; Brown et al., 1994, Biochemistry 33:10638). The enzymatic synthesis involved purification of a 1 hour incubation of 0.5 mg MurA, 0.5 mg MurB, 20 mM UDP-GlcNAc, 20 mM PEP, 10 mM KCl; 20 mM NADPH, 5 mM DTT, 100 mM Tris·HCl, pH 8. UDP-N-acetylmurmate was purified from the mixture by isocratic reverse phase HPLC in 50 mM ammonium formate buffer pH 3.7 on a 10×250 mm, 5 μm C-18 column from YMC (Japan).

[0686] Purified H. pylori MurC was assayed using a continuous assay by coupling ADP formation with NADH oxidation by the pyruvate kinase/lactate dehydrogenase enzyme couple. Assay conditions were as follows: 100 mM Tris·HCl pH 8.0, 2.5 mM 2-mercaptoethanol, 20 mM KCl, 10 mM DTT, 2 mM MgCl₂, 10 mM PEP, 0.15 mM NADH, 3.5 units of pyruvate kinase, 5.5 units of lactate dehydrogenase (Sigma), 500 μM UDP-N-acetylmuramate, 1 mM L-alanine, 1 mM ATP and 0.0018 mg/ml MurC at 37° C. Under these conditions H. pylori MurC exhibited a specific activity of 5900 nmol/min/mg. In this assay ADP production was shown to be dependent on UDP-N-acetylmuramate, L-alanine and enzyme. Previously boiled enzyme could not support ADP formation. Steady state analysis of the dependence of reaction velocity on substrate concentration was done by varying the concentration of a single substrate in concentrations ranging from 0.5 to 5 times Kₘ while holding the other two substrates constant at 5 times Kₘ concentrations. Apparent Kₘ's for L-alanine, ATP and UDP-N-acetylmuramate were 80, 100 and 201M, respectively.

[0687] Based on the above, high throughput drug screening assays which measure the UDP-N-acetylmuramyl-alanine synthetase activity can be performed. The assays for the measurement of the H. pylori MurC activity can be carried out in a 96-well plate amenable for HTS. Such an assay will result in hits that can then be developed into drugs by those skilled in the art.

[0688] X. Expression Partial Purification and Enzymatic Measurement of the H. Pylori 3-deoxy-D-manno-2-octulosonate-8-phosphate Synthase.

[0689] Background on 3-deoxy-D-manno-2-octulosonic Acid (KDO)

[0690] 3-deoxy-D-manno-2-octulosonic acid (KDO) is an unusual 8-carbon sugar found in the lipopolysaccharides of a wide variety of Gram-negative bacteria. It plays a crucial role in the assembly process of lipopolysaccharides providing a link between lipid A and the growing polysaccharide chain (Inouye, 1979). It has been shown that an interruption of the production and utilization of KDO leads to a buildup of lypopolysaccharide precursors and growth inhibition (Ghalambor et al., 1966; Mauson et al., 1978). Since KDO is-a molecule found only in Gram-negative organisms and is required for lipopolysacchirides synthesis and cell growth, the inhibition of one of the enzyme(s) responsible for the biosynthesis of KDO represent an attractive target for the discovery of a novel class of antibiotics directed against Helicobacter pylori infections.

[0691] There are at least four enzymes involved in the synthesis and utilization of KDO. The actual precursor is its 8-phosphate (KDO-8-P), which is formed by the unusual condensation of D-arabinose 5-phosphate (Ara5P) and phosphoenolpyruvate (PEP), catalyzed by the KDO-8-P synthase (EC 4.1.2.16). The available evidence supports the following overall reaction for KDO-8-P formation:

Ara5P+PEP KDO-8-P+Pi

[0692] KDO-8-P is then dephosphorylated by the next enzyme in the pathway to give KDO which is subsequently activated to cytidine-5-monophosphate-KDO and transferred to a lipopolysaccharide percursor.

[0693] Expression and Analysis of Soluble KDO-8-P Synthase (SEQ ID NO: 6945)

[0694] Recombinant H. pylori KDO-8-P synthase was expressed in Escherichia coli using the pET28b vector, that carries the strong T7 expression system, to express a histidine-tagged fusion protein. We have investigated the expression of soluble material at 25, 30 and 37° C. Cells were grown to an OD₆₀₀ of 0.6 in LB broth supplemented with 30 ug/ml kanamycin and 10 mM Potassium Phosphate pH 7.0, at which point, β-D-thiogalactopyranoside (IPTG) was added to a final concentration of mM. Cells were induced for 16 hours for 25′-C, 4 hours for 30° C., and 3 hours for 37° C. Cultures were harvested by centrifugation (20 min. at 3000×g, 4-C), washed with STE buffer (10 mM tris(hydroxymethyl)aminimethane (Tris)-HCl pH 8.0, 100 mM NaCl, 1 mM EDTA), and the cell pellets were stored at −70° C. A 1 litre culture of bacteria typically yielded 2 to 3 g (wet weight) of cells.

[0695] Analysis of Cell Fractionation

[0696] All steps were carried out at 4° C. Frozen cells were thawed, resuspended in five volumes of lysis buffer (50 mM Phosphate, pH 8, 0.5 M NaCl, 5 mM imidazole) with 10% glycerol, 10 mM PEP, 0.1% β-mercaptoethanol, 1 mM phenylmethylsulfonyl fluoride (PMSF), and 10 ug/ml each of leupeptin, aprotinin, pepstatin, L-1-chloro-3-[4-tosylamido]-7-amino-2-heptanone (TLCK), L-1-chloro-3-[4-tosylamido]-4-phenyl-2 butane (TPCK), and soybean trypsin inhibitor (Boehringer-Mannhein), and ruptured by several passages through a small volume microfluidizer (Model M-11OS, Microfluidics International Corporation, Newton, Mass.). Brij 35 was added to the resultant homogenate to a concentration of 0.1%, and the extract was centrifuged (100,000×g for 1 hour) to yield a clear supernatant (crude extract). The protein concentrations of both the soluble fraction and the cell pellet fraction were measured according to the method of Bradford (1976) and 15-g of soluble fractions and 4-g of cell pellets were analyzed by 12% sodium dodecyl sulfate polyacrylamide gel electrophoresis (SDS-PAGE) electrophoresis.

[0697] Expression of soluble recombinant KDO-8-P synthase was similar in all temperatures studied. Note that the insoluble fractions were overloaded relative to the soluble fraction (about 7-fold), therefore the amount of insoluble KDO-8-P synthase may be an overestimate relative to the soluble fractions.

[0698] Purification

[0699] Cell fractions containing recombinant H. pylori KDO-8-P synthase were filtered through a 0.45-m filter, the soluble fraction was loaded directly onto a 5-ml Ni²⁺ nitrolotriacetate-agarose (HiTrap Chelating, Pharmacia) (Hochuli et al. 1987) pre-equilibrated in lysis buffer containing 10% glycerol, 0.1% Brij 35 and 1 mM PMSF. The column was washed with 100 ml (20 bed volumes) of lysis buffer containing 10% glycerol, 0.1% Brij 35, and developed with a 60 ml linear gradient from 5 mM to 500 mM imidazole in lysis buffer containing 10% glycerol, 0.1% Brij 35 and 1 mM PMSF. Fractions were monitored by absorbance at OD280 nm, and peak fractions were analyzed by SDS-PAGE gel electrophoresis. Fractions containing the recombinant protein eluted at a concentration of 125 mM imidazole.

[0700] Assay 1

[0701] The enzyme reaction was performed in a final volume of 4001 containing 0.3 mM Ara5P, 0.3 mM PEP and 0.1 M Tris-acetate pH 7.5. Reactions were started with 10 g of purified enzyme and were followed spectrophotometrically at 232 nm for 15 minutes. As a control, the mixture minus enzyme was measured. No decrease in the absorbance at 232 nm was observed when no enzyme was added. Addition of 10 g KDO-8-P synthase resulted in a decrease of the absorbance at 232 nm, representing the utilization of PEP by the enzyme. An extinction coefficient of 2840 M cm⁻¹ of PEP, was used to estimate that at room temperature, the activity of the enzyme was 0.7-mole/min/mg protein.

[0702] Assay 2

[0703] Because of the potential interference of test compounds on the assay at 232 nm, a method was developed to measure the amount of Pi released in the reaction (Lanzatta et al. 1979).

[0704] This assay ws performed in a 96 well ELISA place, 50 ul assay mixtures containing 0,1 M Tris-acetate (pH 7.5), 0.3 mM Ara5P and 0.3 mM PEP, and 1.28 ug/ml of KDO-8-P synthase were incubated at 25° C. for different times. The reaction was then quenched with the addition of the molybdate-malachite green reagent. As shown in FIG. 8, the reaction proceeded linearly for 60 minutes. Under those conditions, the activity measured was 0.734-moles/min/mg protein, which was similar to the rate that was measured with the 232 nm assay.

[0705] Stimulation of the Reaction with Brij 35

[0706] When assayed in the presence of 0.02% Brij 35, the reaction proceeded faster. Under those conditions, the activity increased up to 1 mole/min mg protein.

[0707] Stability of the Enzyme

[0708] The long term storage stability of the enzyme was tested over several conditions. When the enzyme was present in a buffer containing 50 mM phosphate pH 8.0 and 1 mM PEP, the enzyme could be kept at −20° C. with no loss of activity for at least three weeks. Enzyme stored in 50% glycerol appeared to have less activity during extended storage at −20° C. (FIG. 9).

[0709] XI. Over-production and Purification of Enzymatically Active H. Pylori Asd.

[0710] The asd enzyme of H. pylori has been over-produced successfully in E. coli and purified in sufficient quantities to allow assay development for high through-put screening. The purified protein was determined to be Asd by monitoring its migration of SDS-PAGE gels to determine its molecular mass and by determining the enzymatic activity of the protein.

[0711] Cloning of the H. Pylori and E. Coli asd Genes.

[0712] The open reading frame encoding Asd (SEQ ID NO: 1783; SEQ ID NO: 6545) was identified from the genomic sequence of H. pylori by its coding sequence homology to the Asd enzyme of a number of other bacteria. Two oligonucleotide primers were designed to allow the amplification by PCR of the H. pylori asd gene from total H. pylori chromosomal DNA. The Hpasd1 primer 5′-AAACATATGAAGACTTATAATGTCGCTATTG-3′ (SEQ ID NO: 10023) was designed to contain an Nde 1 restriction site to facilitate cloning of the product into expression vectors. For the same reason, the Hpasd3 primer 5′-TTTGGATCCTTTAAGCAAGCTCAAGCGTTC-3′ (SEQ ID NO: 10024) contained a restriction site for Bam HI. The expression vectors chosen for expression were pET28b and pET30a. pET28b allows the addition of a His-tag to the N-terminus of Asd to facilitate purification.

[0713] The asd gene was amplified by PCR using the following conditions;

[0714] Initial denaturation at 94° C. for 5 min followed by 30 cycles of

[0715] Denaturation at 94° C. for 30 sec.

[0716] Annealing at 50° C. for 30 sec

[0717] Extension at 72° C. for 1 min

[0718] A final extension period of 7 min at 72° C. was also performed.

[0719] The product of the PCR was purified using the QIAEX II gel purification system (Qiagen, Chatsworth Calif.) and ligated overnight at 16° C. to the cloning vector pGEM-T (Promega, Madison Wis.) and transformed into E. coli DH5α. Resulting colonies were screened for the presence of the appropriate insert by restriction digest analysis. One clone containing the inserted asd gene was selected, digested with Nde I and Bam HI and run on an agarose gel. The band corresponding to the asd gene was cut from the gel, purified with the QIAEX II kit (Qiagen ibid.) and ligated overnight at 16° C. to either pET28b or pET30a. Clones containing the asd gene were identified by a white colony appearance on agar plates containing X-Gal. Appropriate constructs were confirmed by restriction digest analysis and by DNA sequencing of the entire insert.

[0720] The asd gene of E. coli was amplified using primers Ecasd35′-AAAGGTACCATGAAAAATG TTGGTTTTATCGGC-3′ (SEQ ID NO: 10025) and Ecasd25′-CCAGAATTCATGAATAAAGATTACGCCAG-3′ (SEQ ID NO: 10026) with total E. coli chromosomal DNA as a template. The PCR conditions were as described above for the H. pylori asd gene. The Ecasd1 primer was designed to contain a Kpn I restriction site to facilitate cloning of the product into expression vectors. For the same reason, the Ecasd2 primer contained the restriction site for EcoRI. The amplified band containing E. coli asd was isolated from the gel, purified with QIAEX (ibid.), ligated into pGEM-T and transformed into E. coli DH5α. Colonies were screened for the presence of the appropriate insert by restriction digest analysis. One clone containing the inserted asd gene was selected, digested with Kpn I and Eco RI and run on an agarose gel. The band corresponding to the E. coli asd gene was cut from the gel, purified with the QIAEX II kit (Qiagen, ibid.) and ligated overnight at 16° C. to pET28b.

[0721] Expression of E. Coli and H. Pylori Asd

[0722] The pET28b plasmid containing either E. coli or H. pylori asd (SEQ ID NO: 1783; SEQ ID NO: 6545) was transformed into E. coli HMS174 pLysS for expression of the protein. Cells were grown in LB medium supplemented with 50 mg/ml kanamycin (Fisher, Pittsburgh Pa.). Growth was monitored by optical density (OD) at 600 nm. When the OD reached 0.5 units, iso-propyl-thio-β-D-galactoside (IPTG)(Sigma, St. Louis Mo.) was added to a final concentration of 1 mM to induce expression of Asd. Induction was continued for 3 hr, followed by harvesting of the cells by centrifugation and storage of the cell pellet at −20° C.

[0723] The Asd enzyme was purified from the cell pellets using a nickel affinity column. Approximately 30 mg of His-tagged protein was purified to homogeneity from a pellet from a 330 ml culture according to the following procedure. The cell pellet was resuspended in 20 ml of PO₄ buffer (0.054 g Na₂HPO_{4.7}H₂O, 0.028 g NaH₂PO₄.H₂O, 0.59 g NaCL, pH 7.4) containing 0.1% (w/v) Triton X 100 and 100 ng/μl of lysozyme and incubated at 25° C. for 25 min. The mixture was sonicated twice for 20 sec on ice after which it was centrifuged at 10,000×g for 10 min at 4° C. The supernatant was then passed through a 45 μm filter and run through a 5 ml HiTrap chelating nickel-charged column (Pharmacia, Pascataway N.J.) and washed with 5 column volumes of 20 mM sodium phosphate, pH 7.5. The nickel column was then eluted with 300 mM imidazole in PO₄ buffer. The nickel column eluate was subsequently dialyzed overnight against 100 mM Tris.HCl, pH 7.5. Glycerol was added to a final concentration of 25% (w/v) was added to the purified protein which was then stored at −20° C.

[0724] Development of an Assay for High-throughput Screening of Asd Enzymatic Characterization of H. Pylori Aspartate Semialdehyde Dehydrogenase (Asd)

[0725] The enzymatic activity of purified His-tagged H. pylori Asd (SEQ ID NO: 6545) was characterized by assaying the reverse reaction of phosphorylation of L-aspartate-β-semialdehyde (ASA) to L-p-aspartyl phosphate, with concomitant reduction of NADP⁺ to NADPH. The formation of NADPH was detected by its absorbance, 340 nm, or by its fluorescence, excitation =340 nm, emission 455 nm.

[0726] ASA was synthesized enzymatically by the phosphorylation of L-aspartate to L-β-aspartyl phosphate by aspartokinase (LysC) coupled to the reduction of L-β-aspartyl phosphate to L-aspartate-α-semialdehyde by Asd. The procedure involved a 2 h preincubation of 0.3 mg of purified E. coli LysC and E. coli Asd with 2 mM aspartate, 1 mM NADPH, 10 mM DTT, 30 mM ATP, 30 mM MgSO₄, 3 mM NH₄OH and 100 mM Tris-HCl buffer, pH 8, followed by adsorption of the enzymatic product on a column of the cation exchange resin Dowex 50 (hydrogen form, 400 mesh). The resin was washed with 5× columns of water and the aldehyde eluted in 5 ml fractions (1 ml/min) with 4 N HCL. Presence of the aldehyde was confirmed using the Asd enzymatic assay in the reverse direction and absence of aspartyl phosphate by the Asd enzymatic assay in the forward direction (Black et al., 1955, J. Biol. Chem. 213,39-50., Karsten et al., 1991, Biochim. Biophys. Acta 1077, 209-219). The identity of the compound was also confirmed by ¹³C and H⁺ NMR.

[0727] ASA in 4 N HCl was prepared daily for use in Asd assays by partial neutralization with addition of 1.0 equivalent of Na₂HCO3²⁻, with a resulting pH=1-2. The amount of ASA was determined enzymatically by complete reaction in the presence of excess NADP⁺and phosphate. ASA was found to be stable for up to 48 hours at pH 1.4, but is somewhat unstable at pH 7.7 (under assay conditions) with a t½=5 hrs. These observations are consistent with previous reports on the stability of ASA (Karsten et al., 1991, Biochim. Biophys. Acta 1077, 209-219). Assays were performed in the following buffer: 200 mM HEPES, 0.3 mM NADP⁺, 30 mM NaH₂PO₄, 1.0 mM DTT, pH 7.5 or pH 8.0. ASA was used in the assay at concentrations of 5-165 μM by diluting the partially-neutralized ASA stock into the assay 10-200 fold, leading to a decrease in pH of 0.1 units or less. Reaction was initiated with the addition of enzyme to a final concentration of 3.5-70 nM.

[0728] Using E. coli Asd, the Kₘ for ASA and phosphate were found to be 104 μM and 1.3 mM, respectively, with a k_{cat}=26 sec⁻¹ at pH 7.5. These values are roughly consistent with those reported by Karsten and Viola (1991, Biochim. Biophys. Acta 1077, 209-219) for the E. coli enzyme, considering the pH dependence of enzyme activity that was reported. For H. pylori Asd, we determined the Kₘ for ASA and phosphate to be 54 μM and 2.1 mM, respectively, with a k_{cat}=5.4 sec⁻¹ at pH 8.0. Thus, the H. pylori enzyme is similar to the E. coli enzyme with the exception of a decreased k_{cat} by about 5-fold. The pH dependence of H. pylori Asd activity, as measured by initial velocity, was found to be quite similar to that reported for the E. coli enzyme (Karsten et al., 1991, Biochim. Biophys. Acta 1077, 209-219), with a pH optimum between 8.5 and 9.0. The activity of H. pylori Asd was found to be unaffected by ionic strength as high as 0.7 M.

[0729] Based on the above characterization, high throughput drug screening assays can be performed in a 96-well plate format using a fluorescence microplate reader, detecting NADPH formation by measuring an increase in fluorescence with excitation filter =355 nm, emission filter =460 nm. Using this format with 160 μM ASA and 20-50 nM H. pylori Asd in assay buffer at pH 8.0, a simple 30 to 60 minute assay can be utilized with excellent reproducibility and high signal to noise.

[0730] The above described assays (Examples X and XI) could be further developed for screening chemical compounds for activity and the subsequent identification of a drug active against the target and cause inhibition of a bacterium, preferably H. pylori.

[0731] XII. Truncated Gene Expression and Protein Production

[0732] Identification, Cloning and Expression of Recombinant Helicobacter Pylori Sequences.

[0733] To facilitate the cloning, expression and purification of membrane proteins from H. pylori, the pET gene expression system (Novagen), for cloning and expression of recombinant proteins in Escherichia coli was selected. Further, for proteins that have a signal sequence at their amino-terminal end, a DNA sequence encoding a peptide tag (His-tag) was fused to the 5′ end of the H. pylori DNA sequences of interest in order to facilitate purification of the recombinant protein products. In some cases, the DNA sequence was cloned in frame with the glutathione-S-transferase protein to produce a GST-fusion protein. The vectors used in this case were the pGEX series from Pharmacia LKB (Uppsala, Sweden).

[0734] PCR Amplification and Cloning of DNA Sequences Containing ORFs for Membrane and Secreted Proteins from the J99 Strain of Helicobacter pylori.

[0735] The sequences chosen (from the list of the DNA sequences of the invention) for cloning from H. pylori strain J99 were prepared for amplification cloning by the polymerase chain reaction (PCR). Synthetic oligonucleotide primers for the ORF of interest (Table 15) specific for the predicted mature 5′ end of the ORF and either downstream (3′) of the predicted translational termination codon or at specific points within the coding region were designed and purchased (GibcoBRL Life Technologies, Gaithersburg, Md., USA). All forward primers (specific for the 5′ terminus of the region of ORF of interest) were designed to include either a BamHI or a NdeI restriction site. These primers within the NdeI restriction site sequence were designed to permit the initiation of protein translation at a methionine residue (encoded within the NdeI restriction site sequence, in the case of producing a non His-tagged recombinant protein) or to fuse in frame with the DNA sequence encoding the His-tag (for producing His tagged recombinant protein), followed by the coding sequence for the remainder of the native H. pylori DNA. The primer with the BamHI restriction site was produced to fuse the H. pylori specific sequence in-frame with the C-terminus of the glutathione-S-transferase gene in the pGEX vectors (Pharmacia LKB, Uppsala, Sweden). All reverse oligonucleotide primers designed to include an EcoRI restriction site at the 5′ terminus. Several reverse oligonucleotide primers were selected that would cause a truncation of the polypeptide to remove certain portions of the C-terminus, and in these cases the EcoRI restriction site at the 5′ end was followed by a translational termination codon. This combination of primers would enable the ORF of interest (or parts of the ORF of interest) to be cloned into pET28b (to produce a His-tagged recombinant protein), pET30a (to produce a non His tagged or native recombinant protein) or the pGEX-4T or pGEX-5× series (to produce a GST fusion protein). The pET28b vector provides sequence encoding an additional 20 amino-terminal amino acids (plus the methionine in the NdeI restriction site) including a stretch of six histidine residues which makes up the His-tag, whereas the pGEX vectors fuse the H. pylori protein to a 26,000 Da glutathione-S-transferase protein.

[0736] Genomic DNA prepared from H. pylori strain J99 (ATCC 55679) was used as the source of template DNA for the PCR amplification reactions (Current Protocols in Molecular Biology, John Wiley and Sons, Inc., F. Ausubel et al., eds., 1994). To amplify a DNA sequence containing a specific H. pylori ORF, genomic DNA (50 nanograms) was introduced into a reaction tube containing 200 nanograms of both the forward and reverse synthetic oligonucleotide primer specific for the ORF of interest, and 45 microliters of PCR SuperMix purchased (GibcoBRL Life Technologies, Gaithersburg, Md., USA) in a total of 50 microliters. The PCR SuperMix is supplied in 1.1× concentrations and contains 22 mM Tris-HCl (pH 8.4), 55 mM KCl, 1.65 mM MgCl₂, 220 micromolar of each dATP, dCTP, dGTP and dTTP, 22 units recombinant Taq polymerase/ml and stabilizers. The following thermal cycling conditions were used to obtain amplified DNA products for each ORF using a Perkin Elmer Cetus/GeneAmp PCR System thermal cycler.

TABLE 16
Oligonucleotide primers

| Gene and location | Sequence |
|---|---|
| Vac38- BamHI post signal sequence | CGGGATCCGAAGGTGATGGTGTTTAT |
| (SEQ ID NO: 360; SEQ ID NO: 5122) | ATAGG (SEQ ID NO: 10027) |
| Vac38- NdeI post signal sequence | CGCATATGGAAGGTGATGGTGTTTAT |
| | ATAGGG (SEQ ID NO: 10028) |
| Vac38- EcoRI/stop codon (removes C- | GCGAATTCTCACTCTTTCCAATAGTTT |
| terminal third of protein) | GCTGCAGAGC (SEQ ID NO: 10029) |
| Vac38- EcoRI/stop codon (removes C- | CCGGAATTCTTAATCCCGTTTCAAATG |
| terminal 11 amino acids) | GTAATAAAGG (SEQ ID NO: 10030) |
| Vac38- EcoRI downstream of native stop | GCGAATTCCCTTTTATTTAAAAAGTGT |
| codon | AGTTATACC (SEQ ID NO: 10031) |

Sequences for Vac38 (full length or truncated)
Denaturation at 94° C. for 30 sec
35 cycles at 94° C. for 15 sec, 55° C. for 15 sec, and 72° C. for 1.5 min
Reactions were concluded at 72° C. for 8 minutes

[0737] Upon completion of the thermal cycling reactions, each sample of amplified DNA was subjected to electrophoresis on 1.0% agarose gels. The DNA was visualized by exposure to ethidium bromide and long wave UV irradiation, and cut out in gel slices. DNA was purified using the Wizard PCR Preps kit (Promega Corp., Madison Wis., USA), and then subjected to digestion with BamHI and EcoRI (Current Protocols in Molecular Biology, John Wiley and Sons, Inc., F. Ausubel et al., eds., 1994). The digested PCR amplicon was then re-electrophoresed and purified as before.

[0738] Ligation of H. Pylori DNA Sequences into Cloning Vectors

[0739] The pOK12 vector (J. Vieira and J. Messing, Gene 100:189-194, 1991) was prepared for cloning by digestion with BamHI and EcoRI or NdeI and EcoRI in the case of Vac41 (Current Protocols in Molecular Biology, John Wiley and Sons, Inc., F. Ausubel et al., eds., 1994). The vectors were subjected to electrophoresis on 1.0% agarose gels and purified using the Wizard PCR Preps kit (Promega Corp., Madison Wis., USA). Following ligation of the purified, digested vector and the purified, digested amplified H. pylori ORF, the products of the ligation reaction were transformed into E coli JM109 competent cells according to standard methods (Current Protocols in Molecular Biology, John Wiley and Sons, Inc., F. Ausubel et al., eds., 1994). Individual bacterial colonies were screened for those containing the correct recombinant plasmids by incubating in LB broth overnight (plus 25 ug/ml kanamycin sulfate) followed by plasmid DNA preparation using the Magic Minipreps system (Promega Corp., Madison Wis., USA), and then analyzed by restriction digestion (Current Protocols in Molecular Biology, John Wiley and Sons, Inc., F. Ausubel et al., eds., 1994).

[0740] Cloning of H. Pylori DNA Sequences into the pET28b, pET30a and pGEX4T-3 Prokaryotic Expression Vectors

[0741] Both the pET28b and pET30a expression vectors were prepared for cloning by digestion with NdeI and EcoRI, and the pGEX4T-3 vector was prepared for cloning by digestion with BamHI and EcoRI (Current Protocols in Molecular Biology, John Wiley and Sons, Inc., F. Ausubel et al., eds., 1994). The H. pylori DNA sequences were removed from pOK 12 plasmid backbones by digestion with NdeI and EcoRI or BamHI and EcoRI (Current Protocols in Molecular Biology, John Wiley and Sons, Inc., F. Ausubel et al., eds., 1994). The pET28b, pET30a, pGEX4T-3 and H. pylori DNA sequences were all electrophoresed on a 1% agarose gel and purified using the Wizard PCR Preps kit (Promega Corp., Madison Wis., USA). Following ligation of the purified, digested expression vector and the purified, digested H. pylori DNA sequences, the products of the ligation reaction were transformed into E. coli JM109 competent cells (Current Protocols in Molecular Biology, John Wiley and Sons, Inc., F. Ausubel et al., eds., 1994). Individual bacterial colonies were screened for those containing the correct recombinant plasmids by preparing plasmid DNA as described above followed by analysis by restriction digestion profiles and DNA sequencing (Current Protocols in Molecular Biology, John Wiley and Sons, Inc., F. Ausubel et al., eds., 1994). These recombinant plasmids were then used to transform specific E coli expression strains.

[0742] Transformation of Competent Bacteria with Recombinant Expression Plasmids

[0743] Competent bacterial strains BL21 (DE3), BL21 (DE3)pLysS, HMS174(DE3) and HMS174(DE3)pLysS were prepared and transformed with the recombinant pET28b expression plasmids carrying the cloned H. pylori sequences according to standard methods (Current Protocols in Molecular Biology, John Wiley and Sons, Inc., F. Ausubel et al., eds., 1994). These expression host strains contain a chromosomal copy of the gene for T7 RNA polymerase. These hosts are lysogens of bacteriophage DE3, a lambda derivative that carries the lacI gene, the lacUV5 promoter and the gene for T7 RNA polymerase. T7 RNA polymerase expression is induced by the addition of isopropyl-β-D-thiogalactoside (IPTG), and the T7 RNA polymerase then transcribes any target plasmid, such as pET28b, that carries a T7 promoter sequence and a gene of interest.

[0744] Competent bacterial strains JM109 and DH5α were prepared and transformed with the recombinant pGEX4T-3 expression plasmid carrying the cloned H. pylori sequences according to standard methods (Current Protocols in Molecular Biology, John Wiley and Sons, Inc., F. Ausubel et al., eds., 1994).

[0745] Expression of Recombinant H. Pylori Sequences in E. Coli

[0746] Transformants were collected from LB agar plates containing 25 ug/ml kanamycin sulfate (ensures maintenance of the pET28b-based recombinant plasmids) or 100 ug/ml ampicillin (ensures maintenance of the pGEX4T-3-based recombinant plasmids) and used to inoculate LB broth containing 25 ug/ml kanamycin sulfate or 100 ug/ml ampicillin and grown to an optical density at 600 nm of 0.5 to 1.0 OD units, at which point 1 mM IPTG was added to the culture for one to three hours to induce gene expression of the H. pylori recombinant DNA constructions. After induction of gene expression with IPTG, bacteria were pelleted by centrifugation and resuspended in SDS-PAGE solubilization buffer and subjected to SDS-PAGE (Current Protocols in Molecular Biology, John Wiley and Sons, Inc., F. Ausubel et al., eds., 1994). Proteins were visualized by staining with Coomassie Brilliant Blue or detected by western immunoblotting using the specific anti-His tag monoclonal antibody (Clontech, Palo Alto, Calif., USA) or the anti-GST tag antibody (Pharmacia LKB) using standard methods (Current Protocols in Molecular Biology, John Wiley and Sons, Inc., F. Ausubel et al., eds., 1994). The host strain that provided the highest level of recombinant protein production was then chosen for use in a large-scale induction in order to purify the recombinant protein. The strains used were HMS174(DE3) (pET28b-based constructs) and DH5α (pGEX4T-3-based constructs).

[0747] Removal of the C-terminal regions appeared in both systems to improve the level of expression, although this increase was far more prominent in the GST-fusion system. All recombinant proteins produced were of the predicted molecular weight based on the DNA sequence plus, if necessary, the size of the fusion tag. The truncated portion of the H. pylori protein contains some extremely hydrophobic stretches, and removal of these may be the reason for the increased expression.

[0748] Equivalents

[0749] Those skilled in the art will recognize, or be able to ascertain using no more than routine experimentation, many equivalents to the specific embodiments and methods described herein. Such equivalents are intended to be encompassed by the scope of the following claims.

1. An isolated nucleic acid comprising an H. pylori nucleotide sequence selected from the group consisting of SEQ ID NO: 1-SEQ ID NO: 4762 and SEQ ID NO: 9525-SEQ ID NO: 9636.

2. An isolated nucleic acid comprising a nucleotide sequence encoding an H. pylori polypeptide at least about 60% homologous to an amino acid sequence selected from the group consisting of SEQ ID NO: 4763-SEQ ID NO: 9524 and SEQ ID NO: 9637-SEQ ID NO: 9748.

3. An isolated nucleic acid comprising a nucleotide sequence encoding an H. pylori polypeptide selected from the group consisting of SEQ ID NO: 4763-SEQ ID NO:9524 and SEQ ID NO: 9637-SEQ ID NO: 9748.

4. An isolated nucleic acid which encodes an H. pylori polypeptide, comprising a nucleotide sequence at least about 60% homologous to a nucleotide sequence selected from the group consisting of SEQ ID NO: 1-SEQ ID NO: 4762 and SEQ ID NO: 9525-SEQ ID NO: 9636, or a complement thereof.

5. The isolated nucleic acid of claim 2, comprising a nucleotide sequence selected from the group consisting of SEQ ID NO: 1-SEQ ID NO: 4762 and SEQ ID NO: 9525-SEQ ID NO: 9636, or a complement thereof.

6. An isolated nucleic acid molecule encoding an H. pylori polypeptide, comprising a nucleotide sequence which hybridizes under stringent hybridization conditions to a nucleic acid molecule comprising the nucleotide sequence selected from the group consisting of SEQ ID NO: 1-SEQ ID NO: 4762 and SEQ ID NO: 9525-SEQ ID NO: 9636, or a complement thereof.

7. An isolated nucleic acid comprising a nucleotide sequence encoding an H. pylori cell envelope polypeptide or a fragment thereof, the nucleic acid selected from the group consisting of SEQ ID NO: 1-SEQ ID NO: 1575 and SEQ ID NO: 9525-SEQ ID NO: 9592 or a complement thereof.

8. The isolated nucleic acid of claim 7, wherein the H. pylori cell envelope polypeptide or a fragment thereof is an H. pylori flagella-associated polypeptide or a fragment thereof encoded by a nucleic acid having a nucleotide sequence selected from the group consisting of SEQ ID NO: 1-SEQ ID NO: 103 and SEQ ID NO: 9525-SEQ ID NO: 9527, or a complement thereof.

9. The isolated nucleic acid of claim 7, wherein, the H. pylori cell envelope polypeptide or a fragment thereof is an H. pylori outer membrane polypeptide or a fragment thereof encoded by a nucleic acid having a nucleotide sequence selected from the group consisting of SEQ ID NO: 104-SEQ ID NO: 510 and SEQ ID NO: 9528-SEQ ID NO: 9536, or a complement thereof.

10. The isolated nucleic acid of claim 9, wherein the H. pylori outer membrane polypeptide or a fragment thereof is an H. pylori polypeptide having a terminal phenylalanine residue or a fragment thereof encoded by a nucleic acid having a nucleotide sequence selected from the group consisting of SEQ ID NO: 104-SEQ ID NO: 333; SEQ ID NO: 342-SEQ ID NO: 362; SEQ ID NO: 369-SEQ ID NO: 397 and SEQ ID NO: 9528-SEQ ID NO: 9536, or a complement thereof.

11. The isolated nucleic acid of claim 9, wherein the H. pylori outer membrane polypeptide or a fragment thereof is an H. pylori polypeptide having a C-terminal tyrosine cluster motif or a fragment thereof encoded by a nucleic acid having a nucleotide sequence selected from the group consisting of SEQ ID NO: 326-SEQ ID NO: 416; SEQ ID NO: 424-SEQ ID NO: 425 and SEQ ID NO: 9536, or a complement thereof.

12. The isolated nucleic acid of claim 10 or 11, wherein the H. Pylori outer membrane polypeptide or a fragment thereof is an H. pylori polypeptide having a terminal phenylalanine residue and a C-terminal tyrosine cluster or a fragment thereof encoded by a nucleic acid having a nucleotide sequence selected from the group consisting of SEQ ID NO: 326-SEQ ID NO: 333; SEQ ID NO: 342-SEQ ID NO: 362: SEQ ID NO; 369-SEQ ID NO: 397 and SEQ ID NO: 9536, or a complement thereof.

13. The isolated nucleic acid of claim 7, wherein the H. pylori cell envelope polypeptide or a fragment thereof is an H. pylori inner membrane polypeptide or a fragment thereof encoded by a nucleic acid having a nucleotide sequence selected from the group consisting of SEQ ID NO: 511-SEQ ID NO: 1514 and SEQ ID NO: 9537-SEQ ID NO: 9591, or a complement thereof.

14. The isolated nucleic acid of claim 13, wherein the H. pylori cell envelope polypeptide or a fragment thereof is an H. pylori inner membrane polypeptide or a fragment thereof involved in transport encoded by a nucleic acid having a nucleotide sequence selected from the group consisting of SEQ ID NO: 511-SEQ ID NO: 802; and SEQ ID NO: 9537-SEQ ID NO: 9554 or a complement thereof.

15. The isolated nucleic acid of claim 14, wherein the H. pylori cell envelope polypeptide or a fragment thereof is an H. pylori inner membrane polypeptide or a fragment thereof involved in amino acid metabolism and transport encoded by a nucleic acid having a nucleotide sequence selected from the group consisting of SEQ ID NO: 683-SEQ ID NO: 720 and SEQ ID NO: 9547-SEQ ID NO: 9548, or a complement thereof.

16. The isolated nucleic acid of claim 14, wherein the H. pylori cell envelope polypeptide or a fragment thereof is an H. pylori inner membrane polypeptide or a fragment thereof involved in nucleotide, lipid, or cofactor metabolism and transport encoded by a nucleic acid having a nucleotide sequence selected from the group consisting of SEQ ID NO: 721-SEQ ID NO: 764 and SEQ ID NO: 9549, or a complement thereof.

17. The isolated nucleic acid of claim 14, wherein the H. pylori cell envelope polypeptide or a fragment thereof is an H. pylori inner membrane polypeptide or a fragment thereof involved in inorganic ion transport encoded by a nucleic acid having a nucleotide sequence selected from the group consisting of SEQ ID NO: 765-SEQ ID NO: 799 and SEQ ID NO: 9550-SEQ ID NO: 9554, or a complement thereof.

18. The isolated nucleic acid of claim 14, wherein the H. pylori cell envelope polypeptide or a fragment thereof is an H. pylori inner membrane polypeptide or a fragment thereof involved in carbohydrate metabolism and transport encoded by a nucleic acid having a nucleotide sequence selected from the group consisting of SEQ ID NO: 800-SEQ ID NO: 802, or a complement thereof.

19. The isolated nucleic acid of claim 13, wherein the H. pylori cell envelope polypeptide or a fragment thereof is an H. pylori inner membrane polypeptide or a fragment thereof involved in outer membrane and cell wall formation encoded by a nucleic acid having a nucleotide sequence selected from the group consisting of SEQ ID NO: 803-SEQ ID NO: 848 and SEQ ID NO: 9555-SEQ ID NO: 9560, or a complement thereof.

20. The isolated nucleic acid of claim 13, wherein the H. pylori cell envelope polypeptide or a fragment thereof is an H. pylori inner membrane polypeptide or a fragment thereof involved in energy conversion encoded by a nucleic acid having a nucleotide sequence selected from the group consisting of SEQ ID NO: 849-SEQ ID NO: 995 and SEQ ID NO: 9561-SEQ ID NO: 9565, or a complement thereof.

21. The isolated nucleic acid of claim 13, wherein the H. pylori cell envelope polypeptide or a fragment thereof is an H. pylori inner membrane polypeptide or a fragment thereof involved in secretion and adhesion encoded by a nucleic acid having a nucleotide sequence selected from the group consisting of SEQ ID NO: 996-SEQ ID NO: 1007 and SEQ ID NO: 9566, or a complement thereof.

22. The isolated nucleic acid of claim 13, wherein the H. pylori cell envelope polypeptide or a fragment thereof is an H. pylori inner membrane polypeptide or a fragment thereof involved in regulation encoded by a nucleic acid having a nucleotide sequence selected from the group consisting of SEQ ID NO: 1008-SEQ ID NO: 1027, or a complement thereof.

23. The isolated nucleic acid of claim 13, wherein the H. pylori cell envelope polypeptide or a fragment thereof is an H. pylori inner membrane chaperone polypeptide or a fragment thereof encoded by a nucleic acid having a nucleotide sequence selected from the group consisting of SEQ ID NO: 1028-SEQ ID NO: 1031, and SEQ ID NO: 9567 or a complement thereof.

24. The isolated nucleic acid of claim 13, wherein the H. pylori cell envelope polypeptide or a fragment thereof is an H. pylori inner membrane polypeptide or a fragment thereof involved in cell division encoded by a nucleic acid having a nucleotide sequence selected from the group consisting of SEQ ID NO: 1032-SEQ ID NO: 1052 and SEQ ID NO: 9568-SEQ ID NO: 9569, or a complement thereof.

25. The isolated nucleic acid of claim 13, wherein the H. pylori cell envelope polypeptide or a fragment thereof is an H. pylori inner membrane polypeptide or a fragment thereof involved in motility encoded by a nucleic acid having a nucleotide sequence selected from the group consisting of SEQ ID NO: 1053; SEQ ID NO: 1054, or a complement thereof.

26. An isolated nucleic acid comprising a nucleotide sequence encoding an H. pylori cytoplasmic polypeptide or a fragment thereof, the nucleic acid selected from the group consisting of SEQ ID NO: 1576-SEQ ID NO: 4015 and SEQ ID NO: 9593-SEQ ID NO: 9621, or a complement thereof.

27. The isolated nucleic acid of claim 26, wherein the H. pylori cytoplasmic polypeptide or a fragment thereof is an H. pylori cytoplasmic polypeptide or a fragment thereof involved in metabolism encoded by a nucleic acid having a nucleotide sequence selected from the group consisting of SEQ ID NO: 1576-SEQ ID NO: 2218 and SEQ ID NO:9593-SEQ ID NO:9602.

28. The isolated nucleic acid of claim 27, wherein the H. pylori cytoplasmic polypeptide or a fragment thereof is an H. pylori polypeptide or a fragment thereof involved in energy metabolism encoded by a nucleic acid comprising a nucleotide sequence selected from the group consisting of SEQ ID NO: 1576-SEQ ID NO: 1725 and SEQ ID NO: 9593-SEQ ID NO: 9594, or a complement thereof.

29. The isolated nucleic acid of claim 27, wherein the H. pylori cytoplasmic polypeptide or a fragment thereof is an H. pylori polypeptide or a fragment thereof involved in amino acid metabolism encoded by a nucleic acid having a nucleotide sequence selected from the group consisting of SEQ ID NO: 1726-SEQ ID NO: 1868 and SEQ ID NO: 9595-SEQ ID NO: 9596, or a complement thereof.

30. The isolated nucleic acid of claim 27, wherein the H. pylori cytoplasmic polypeptide or a fragment thereof is an H. pylori polypeptide or a fragment thereof involved in cofactor metabolism encoded by a nucleic acid having a nucleotide sequence selected from the group consisting of SEQ ID NO: 1869-SEQ ID NO: 2005 and SEQ ID NO: 9597, or a complement thereof.

31. The isolated nucleic acid of claim 27, wherein the H. pylori cytoplasmic polypeptide or a fragment thereof is an H. pylori polypeptide or a fragment thereof involved in carbohydrate metabolism encoded by a nucleic acid having a nucleotide sequence selected from the group consisting of SEQ ID NO: 2006-SEQ ID NO. 2076 and SEQ ID NO: 9598-SEQ ID NO: 9599, or a complement thereof.

32. The isolated nucleic acid of claim 27, wherein the H. pylori cytoplasmic polypeptide or a fragment thereof is an H. pylori polypeptide or a fragment thereof involved in nucleic acid metabolism encoded by a nucleic acid having a nucleotide sequence selected from the group consisting of SEQ ID NO: 2077-SEQ ID NO: 2182 and SEQ ID NO: 9600, or a complement thereof.

33. The isolated nucleic acid of claim 27, wherein the H. pylori cytoplasmic polypeptide or a fragment thereof is an H. pylori polypeptide or a fragment thereof involved in lipid metabolism encoded by a nucleic acid having a nucleotide sequence selected from the group consisting of SEQ ID NO: 2183-SEQ ID NO: 2218 and SEQ ID NO: 9601-SEQ ID NO: 9602, or a complement thereof.

34. The isolated nucleic acid of claim 26, wherein the H. pylori cytoplasmic polypeptide or a fragment thereof is an H. pylori polypeptide or a fragment thereof involved in mRNA translation and ribosome biogenesis encoded by a nucleic acid having a nucleotide sequence selected from the group consisting of SEQ ID NO: 2219-SEQ ID NO: 2438 and SEQ ID NO: 9603-SEQ ID NO: 9604, or a complement thereof.

35. The isolated nucleic acid of claim 26, wherein the H. pylori cytoplasmic polypeptide or a fragment thereof is an H. pylori polypeptide or a fragment thereof involved in genome replication, transcription, recombination and repair encoded by a nucleic acid having a nucleotide sequence selected from the group consisting of SEQ ID NO: 2439-SEQ ID NO: 2807 and SEQ ID NO: 9605-SEQ ID NO: 9608, or a complement thereof.

36. The isolated nucleic acid of claim 26, wherein the H. pylori cytoplasmic polypeptide or a fragment thereof is an H. pylori polypeptide or a fragment thereof involved in secretion and adhesion encoded by a nucleic acid having a nucleotide sequence selected from the group consisting of SEQ ID NO: 2808-SEQ ID NO: 2824, or a complement thereof.

37. The isolated nucleic acid of claim 26, wherein the H. pylori cytoplasmic polypeptide or a fragment thereof is an H. pylori polypeptide or a fragment thereof involved in outer membrane and cell wall biogenesis encoded by a nucleic acid having a nucleotide sequence selected from the group consisting of SEQ ID NO: 2825-SEQ ID NO: 2877 and SEQ ID NO: 9609-SEQ ID NO: 9610, or a complement thereof.

38. The isolated nucleic acid of claim 26, wherein the H. pylori cytoplasmic polypeptide or a fragment thereof is an H. pylori polypeptide or a fragment thereof involved in protein folding and stabilization encoded by a nucleic acid having a nucleotide sequence selected from the group consisting of SEQ ID NO: 2878-SEQ ID NO:2918 and SEQ ID NO:9611-SEQ ID NO: 9612, or a complement thereof.

39. An isolated nucleic acid comprising a nucleotide sequence encoding an H. pylori secreted polypeptide or a fragment thereof, the nucleic acid selected from the group consisting of SEQ ID NO: 4016-SEQ ID NO: 4388 and SEQ ID NO: 9622-SEQ ID NO: 9625, or a complement therof.

40. The isolated nucleic acid of claim 39, wherein the H. pylori secreted polypeptide or a fragment thereof is an H. pylori periplasmic polypeptide or a fragment thereof encoded by a nucleic acid having a nucleotide sequence selected from the group consisting of SEQ ID NO: 4016-SEQ ID NO: 4018, or a complement thereof.

41. The isolated nucleic acid of claim 39, wherein the H. pylori secreted polypeptide or a fragment thereof is an H. pylori polypeptide or a fragment thereof involved in secretion and adhesion encoded by a nucleic acid having a nucleotide sequence selected from the group consisting of SEQ ID NO: 4019-SEQ ID NO: 4026 and SEQ ID NO: 9622, or a complement thereof.

42. The isolated nucleic acid of claim 39, wherein the H. pylori secreted polypeptide or a fragment thereof is an H. pylori chaperone polypeptide or a fragment thereof encoded by a nucleic acid having a nucleotide sequence selected from the group consisting of SEQ ID NO: 4027; SEQ ID NO: 4028-SEQ ID NO: 4030, or a complement thereof.

43. An isolated nucleic acid comprising a nucleotide sequence encoding an H. pylori cellular polypeptide or a fragment thereof, the nucleic acid selected from the group consisting of SEQ ID NO: 4389-SEQ ID NO: 4705 and SEQ ID NO: 9626-SEQ ID NO: 9636, or a complement thereof.

44. An isolated nucleic acid comprising a nucleotide sequence encoding an H. pylori membrane associated polypeptide or a fragment thereof, the nucleic acid selected from the group consisting of SEQ ID NO: 4706-SEQ ID NO: 4762, or a complement thereof.

45. An isolated H. pylori polypeptide comprising an amino acid sequence at least about 60% homologous to an H. pylori polypeptide selected from the group consisting of SEQ ID NO: 4763-SEQ ID NO: 9524 and SEQ ID NO: 9637-SEQ ID NO: 9748.

46. An isolated H. pylori polypeptide which is encoded by a nucleic acid comprising a nucleotide sequence at least about 60% homologous to a nucleotide sequence selected from the group consisting of SEQ ID NO: 1-SEQ ID NO:4762 and SEQ ID NO: 9525-SEQ ID NO: 9636.

47. The isolated H. pylori polypeptide of claim 46, wherein said polypeptide is encoded by a nucleotide sequence selected from the group consisting of SEQ ID NO: 1-SEQ ID NO: 4762 and SEQ ID NO: 9525-SEQ ID NO: 9636.

48. An isolated H. pylori polypeptide which is encoded by a nucleic acid comprising a nucleotide sequence which hybridizes under stringent hybridization conditions to a nucleic acid selected from the group consisting of SEQ ID NO: 1-SEQ ID NO: 4762 and SEQ ID NO: 9525-SEQ ID NO: 9636, or a complement thereof.

49. An isolated H. pylori polypeptide comprising an amino acid sequence selected from the group consisting of SEQ ID NO: 4763-SEQ ID NO: 9524 and SEQ ID NO: 9637-SEQ ID NO: 9748.

50. An isolated H. pylori cell envelope polypeptide or a fragment thereof, comprising an amino acid sequence selected from the group consisting of SEQ ID NO: 4763-SEQ ID NO: 6337 and SEQ ID NO: 9637-SEQ ID NO: 9704.

51. The isolated polypeptide of claim 50, wherein the H. pylori cell envelope polypeptide or a fragment thereof is an H. pylori flagella-associated polypeptide or a fragment thereof comprising an amino acid sequence selected from the group consisting of SEQ ID NO: 4763-SEQ ID NO: 4865 and SEQ ID NO: 9637-SEQ ID NO: 9704.

52. The isolated polypeptide of claim 50, wherein the H. pylori cell envelope polypeptide or a fragment thereof is an H. pylori outer membrane polypeptide or a fragment thereof comprising an amino acid sequence selected from the group consisting of SEQ ID NO: 4866-SEQ ID NO: 5272 and SEQ ID NO: 9640-SEQ ID NO: 9648.

53. The isolated polypeptide of claim 52, wherein the H. pylori outer membrane polypeptide or a fragment thereof is an H. pylori polypeptide having a terminal phenylalanine residue or a fragment thereof comprising an amino acid sequence selected from the group consisting of SEQ ID NO: 4866-SEQ ID NO: 5095; SEQ ID NO: 5104-SEQ ID NO: 5124; SEQ ID NO: 5131-SEQ ID NO: 5159 and SEQ ID NO: 9640-SEQ ID NO: 9648.

54. The isolated polypeptide of claim 52, wherein the H. pylori outer membrane polypeptide or a fragment thereof is an H. pylori polypeptide comprising a C-terminal tyrosine cluster motif or a fragment thereof having an amino acid sequence selected from the group consisting of SEQ ID NO: 5088-SEQ ID NO: 5178; SEQ ID NO: 5186-SEQ ID NO: 5187 and SEQ ID NO: 9648.

55. The isolated polypeptide of claim 53 or 54, wherein the H. pylori outer membrane polypeptide or a fragment thereof is an H. pylori polypeptide comprising a terminal phenylalanine residue and a C-terminal tyrosine cluster or a fragment thereof having an amino acid sequence selected from the group consisting of SEQ ID NO: 5088-SEQ ID NO: 5095; SEQ ID NO: 5104-SEQ ID NO: 5124; SEQ ID NO: 5131-SEQ ID NO: 5159 and SEQ ID NO: 9648.

56. The isolated polypeptide of claim 50, wherein the H. pylori cell envelope polypeptide or a fragment thereof is an H. pylori inner membrane polypeptide or a fragment thereof comprising an amino acid sequence selected from the group consisting of SEQ ID NO: 5273-SEQ ID NO: 6276 and SEQ ID NO: 9649-SEQ ID NO: 9703.

57. The isolated polypeptide of claim 56, wherein the H. pylori cell envelope polypeptide or a fragment thereof is an H. pylori inner membrane polypeptide or a fragment thereof involved in transport comprising an amino acid sequence selected from the group consisting of SEQ ID NO: 5273-SEQ ID NO: 5564; and SEQ ID NO: 9649-SEQ ID NO: 9666.

58. The isolated polypeptide of claim 57, wherein the H. pylori cell envelope polypeptide or a fragment thereof is an H. pylori inner membrane polypeptide or a fragment thereof involved in amino acid metabolism and transport comprising an amino acid sequence selected from the group consisting of SEQ ID NO: 5445-SEQ ID NO: 5482 and SEQ ID NO: 9659-SEQ ID NO: 9660.

59. The isolated polypeptide of claim 57, wherein the H. pylori cell envelope polypeptide or a fragment thereof is an H. pylori inner membrane polypeptide or a fragment thereof involved in nucleotide, lipid, or cofactor metabolism and transport comprising an amino acid sequence selected from the group consisting of SEQ ID NO: 5483-SEQ ID NO: 5526 and SEQ ID NO: 9661.

60. The isolated polypeptide of claim 57, wherein the H. pylori cell envelope polypeptide or a fragment thereof is an H. pylori inner membrane polypeptide or a fragment thereof involved in inorganic ion transport comprising an amino acid sequence selected from the group consisting of SEQ ID NO: 5527-SEQ ID NO: 5561 and SEQ ID NO: 9662-SEQ ID NO: 9666.

61. The isolated polypeptide of claim 57, wherein the H. pylori cell envelope polypeptide or a fragment thereof is an H. pylori inner membrane polypeptide or a fragment thereof involved in carbohydrate metabolism and transport comprising an amino acid sequence selected from the group consisting of SEQ ID NO: 5562-SEQ ID NO: 5564.

62. The isolated polypeptide of claim 56, wherein the H. pylori cell envelope polypeptide or a fragment thereof is an H. pylori inner membrane polypeptide or a fragment thereof involved in outer membrane and cell wall formation comprising an amino acid sequence selected from the group consisting of SEQ ID NO: 5565-SEQ ID NO: 5610 and SEQ ID NO: 9667-SEQ ID NO: 9672.

63. The isolated polypeptide of claim 56, wherein the H. pylori cell envelope polypeptide or a fragment thereof is an H. pylori inner membrane polypeptide or a fragment thereof involved in energy conversion comprising an amino acid sequence selected from the group consisting of SEQ ID NO: 5611-SEQ ID NO: 5757 and SEQ ID ND 9673-SEQ ID NO: 9677.

64. The isolated polypeptide of claim 56, wherein the H. pylori cell envelope polypeptide or a fragment thereof is an H. pylori inner membrane polypeptide or a fragment thereof involved in secretion and adhesion comprising an amino acid sequence selected from the group consisting of SEQ ID NO: 5758-SEQ ID NO: 5769 and SEQ ID NO: 9678.

65. The isolated polypeptide of claim 56, wherein the H. pylori cell envelope polypeptide or a fragment thereof is an H. pylori inner membrane polypeptide or a fragment thereof involved in regulation comprising an amino acid sequence selected from the group consisting of SEQ ID NO: 5770-SEQ ID NO: 5789.

66. The isolated polypeptide of claim 56, wherein the H. pylori cell envelope polypeptide or a fragment thereof is an H. pylori inner membrane chaperone polypeptide or a fragment thereof comprising an amino acid sequence selected from the group consisting of SEQ ID NO: 5790-SEQ ID NO: 5793 and SEQ ID NO: 9679.

67. The isolated polypeptide of claim 56, wherein the H. pylori cell envelope polypeptide or a fragment thereof is an H. pylori inner membrane polypeptide or a fragment thereof involved in cell division comprising an amino acid sequence selected from the group consisting of SEQ ID NO: 5794-SEQ ID NO: 5814 and SEQ ID NO: 9680-SEQ ID NO: 9681.

68. The isolated polypeptide of claim 56, wherein the H. pylori cell envelope polypeptide or a fragment thereof is an H. pylori inner membrane polypeptide or a fragment thereof involved in motility comprising an amino acid sequence selected from the group consisting of SEQ ID NO: 5815; SEQ ID NO: 5816.

69. An isolated H. pylori cell envelope polypeptide or a fragment thereof, wherein the polypeptide is encoded by a nucleic acid sequence selected from the group consisting of SEQ ID NO: 1-SEQ ID NO: 1575 and SEQ ID NO: 9525-SEQ ID NO: 9592.

70. The isolated polypeptide of claim 69, wherein the H. pylori cell envelope polypeptide or a fragment thereof is an H. pylori flagella-associated polypeptide or a fragment thereof encoded by a nucleic acid comprising a nucleotide sequence selected from the group consisting of SEQ ID NO: 1-SEQ ID NO: 103 and SEQ ID NO: 9525-SEQ ID NO: 9527.

71. The isolated polypeptide of claim 69, wherein the H. pylori cell envelope polypeptide or a fragment thereof is an H. pylori outer membrane polypeptide or a fragment thereof encoded by a nucleic acid comprising a nucleotide sequence selected from the group consisting of SEQ ID NO: 104-SEQ ID NO: 510 and SEQ ID NO: 9528-SEQ ID NO: 9536.

72. The isolated polypeptide of claim 71, wherein the H. pylori outer membrane polypeptide or a fragment thereof is an H. pylori polypeptide having a terminal phenylalanine residue or a fragment thereof encoded by a nucleic acid comprising a nucleotide sequence selected from the group consisting of SEQ ID NO: 104-SEQ ID NO: 333; SEQ ID NO: 342-SEQ ID NO: 362; SEQ ID NO: 369-SEQ ID NO: 397 and SEQ ID NO: 9528-SEQ ID NO: 9536.

73. The isolated polypeptide of claim 71, wherein the H. pylori outer membrane polypeptide or a fragment thereof is an H. pylori polypeptide having a C-terminal tyrosine cluster motif or a fragment thereof encoded by a nucleic acid comprising a nucleotide sequence selected from the group consisting of SEQ ID NO: 326-SEQ ID NO: 416; SEQ ID NO: 424-SEQ ID NO: 425 and SEQ ID NO: 9536.

74. The isolated polypeptide of claim 72 or 73, wherein the H. pylori outer membrane polypeptide or a fragment thereof is an H. pylori polypeptide having a terminal phenylalanine residue and a C-terminal tyrosine cluster or a fragment thereof encoded by a nucleic acid comprising a nucleotide sequence selected from the group consisting of SEQ ID NO: 326-SEQ ID NO: 333; SEQ ID NO: 342-SEQ ID NO: 362; SEQ ID NO: 369-SEQ ID NO: 397 and SEQ ID NO: 9536.

75. The isolated polypeptide of claim 69, wherein the H. pylori cell envelope polypeptide or a fragment thereof is an H. pylori inner membrane polypeptide or a fragment thereof encoded by a nucleic acid comprising a nucleotide sequence selected from the group consisting of SEQ ID NO: 511-SEQ ID NO: 1514 and SEQ ID NO: 9537-SEQ ID NO: 9591.

76. The isolated polypeptide of claim 75, wherein the H. pylori cell envelope polypeptide or a fragment thereof is an H. pylori inner membrane polypeptide or a fragment thereof involved in transport encoded by a nucleic acid comprising a nucleotide sequence selected from the group consisting of SEQ ID NO: 511-SEQ ID NO: 802; and SEQ ID NO: 9537-SEQ ID NO: 9554.

77. The isolated polypeptide of claim 76, wherein the H. pylori cell envelope polypeptide or a fragment thereof is an H. pylori inner membrane polypeptide or a fragment thereof involved in amino acid metabolism and transport encoded by a nucleic acid comprising a nucleotide sequence selected from the group consisting of SEQ ID NO: 683-SEQ ID NO: 720 and SEQ ID NO: 9547-SEQ ID NO: 9548.

78. The isolated polypeptide of claim 76, wherein the H. pylori cell envelope polypeptide or a fragment thereof is an H. pylori inner membrane polypeptide or a fragment thereof involved in nucleotide, lipid, or cofactor metabolism and transport encoded by a nucleic acid comprising a nucleotide sequence selected from the group consisting of SEQ ID NO: 721-SEQ ID NO: 764 and SEQ ID NO: 9549.

79. The isolated polypeptide of claim 76, wherein the H. pylori cell envelope polypeptide or a fragment thereof is an H. pylori inner membrane polypeptide or a fragment thereof involved in inorganic ion transport encoded by a nucleic acid comprising a nucleotide sequence selected from the group consisting of SEQ ID NO: 765-SEQ ID NO: 799 and SEQ ID NO: 9550-SEQ ID NO: 9554.

80. The isolated polypeptide of claim 76, wherein the H. pylori cell envelope polypeptide or a fragment thereof is an H. pylori inner membrane polypeptide or a fragment thereof involved in carbohydrate metabolism and transport encoded by a nucleic acid comprising a nucleotide sequence selected from the group consisting of SEQ ID NO: 800-SEQ ID NO: 802.

81. The isolated polypeptide of claim 75, wherein the H. pylori cell envelope polypeptide or a fragment thereof is an H. pylori inner-membrane polypeptide or a fragment thereof involved in outer membrane and cell wall formation encoded by a nucleic acid comprising a nucleotide sequence selected from the group consisting of SEQ ID NO: 803-SEQ ID NO: 848 and SEQ ID NO: 9555-SEQ ID NO: 9560.

82. The isolated polypeptide of claim 75, wherein In another embodiment, the H. pylori cell envelope polypeptide or a fragment thereof is an H. pylori inner membrane polypeptide or a fragment thereof involved in energy conversion encoded by a nucleic acid comprising a nucleotide sequence selected from the group consisting of SEQ ID NO: 849-SEQ ID NO: 995 and SEQ ID NO: 9561-SEQ ID NO: 9565.

83. The isolated polypeptide of claim 75, wherein the H. pylori cell envelope polypeptide or a fragment thereof is an H. pylori inner membrane polypeptide or a fragment thereof involved in secretion and adhesion encoded by a nucleic acid comprising a nucleotide sequence selected from the group consisting of SEQ ID NO: 996-SEQ ID NO: 1007 and SEQ ID NO: 9566.

84. The isolated polypeptide of claim 75, wherein the H. pylori cell envelope polypeptide or a fragment thereof is an H. pylori inner membrane polypeptide or a fragment thereof involved in regulation encoded by a nucleic acid comprising a nucleotide sequence selected from the group consisting of SEQ ID NO: 1008-SEQ ID NO: 1027.

85. The isolated polypeptide of claim 75, wherein the H. pylori cell envelope polypeptide or a fragment thereof is an H. pylori inner membrane chaperone polypeptide or a fragment thereof encoded by a nucleic acid comprising a nucleotide sequence selected from the group consisting of SEQ ID NO: 1028-SEQ ID NO: 1031 and SEQ ID NO: 9567.

86. The isolated polypeptide of claim 75, wherein the H. pylori cell envelope polypeptide or a fragment thereof is an H. pylori inner membrane polypeptide or a fragment thereof involved in cell division encoded by a nucleic acid having a nucleotide sequence selected from the group consisting of SEQ ID NO: 1032-SEQ ID NO: 1052 and SEQ ID NO: 9568-SEQ ID NO: 9569.

87. The isolated polypeptide of claim 75, wherein the H. pylori cell envelope polypeptide or a fragment thereof is an H. pylori inner membrane polypeptide or a fragment thereof involved in motility encoded by a nucleic acid comprising a nucleotide sequence selected from the group consisting of SEQ ID NO: 1053; SEQ ID NO: 1054.

88. An isolated H. pylori cytoplasmic polypeptide or a fragment thereof, wherein the polypeptide comprises amino acid sequence selected from the group consisting of SEQ ID NO: 6338-SEQ ID NO: 8777 and SEQ ID NO: 9705-SEQ ID NO: 9733.

89. The isolated polypeptide of claim 88, wherein the H. pylori cytoplasmic polypeptide or a fragment thereof is an H. pylori cytoplasmic polypeptide or a fragment thereof involved in metabolism comprising an amino acid sequence selected from the group consisting of SEQ ID NO: 6338-SEQ ID NO: 6945 and SEQ ID NO: 9705-SEQ ID NO: 9714.

90. The isolated polypeptide of claim 89, wherein the H. pylori cytoplasmic polypeptide or a fragment thereof is an H. pylori polypeptide involved in energy metabolism or a fragment thereof comprising an amino acid sequence selected from the group consisting of SEQ ID NO: 6338-SEQ ID NO: 6487 and SEQ ID NO: 9705-SEQ ID NO: 9706.

91. The isolated polypeptide of claim 89, wherein the H. pylori cytoplasmic polypeptide or a fragment thereof is an H. pylori polypeptide involved in amino acid metabolism or a fragment thereof comprising an amino acid sequence selected from the group consisting of SEQ ID NO: 6488-SEQ ID NO: 6630 and SEQ ID NO: 9707-SEQ ID NO: 9708.

92. The isolated polypeptide of claim 89, wherein the H. pylori cytoplasmic polypeptide or a fragment thereof is an H. pylori polypeptide involved in cofactor metabolism or a fragment thereof comprising an amino acid sequence selected from the group consisting of SEQ ID NO: 6631-SEQ ID NO: 6767 and SEQ ID NO: 9709.

93. The isolated polypeptide of claim 89, wherein the H. pylori cytoplasmic polypeptide or a fragment thereof is an H. pylori polypeptide involved in carbohydrate metabolism or a fragment thereof comprising an amino acid sequence selected from the group consisting of SEQ ID NO: 6768-SEQ ID NO: 6838 and SEQ ID NO: 9710-SEQ ID NO: 9711.

94. The isolated polypeptide of claim 89, wherein the H. pylori cytoplasmic polypeptide or a fragment thereof is an H. pylori polypeptide involved in nucleic acid metabolism or a fragment thereof comprising an amino acid sequence selected from the group consisting of SEQ ID NO: 6839-SEQ ID NO: 6944 and SEQ ID NO: 9712.

95. The isolated polypeptide of claim 89, wherein the H. pylori cytoplasmic polypeptide or a fragment thereof is an H. pylori polypeptide involved in lipid metabolism or a fragment thereof comprising an amino acid sequence selected from the group consisting of SEQ ID NO: 6945-SEQ ID NO: 6980 and SEQ ID NO: 9713-9714.

96. The isolated polypeptide of claim 88, wherein In another embodiment, the H. pylori cytoplasmic polypeptide or a fragment thereof is an H. pylori polypeptide involved in mRNA translation and ribosome biogenesis or a fragment thereof comprising an amino acid sequence selected from the group consisting of SEQ ID NO: 6981-SEQ ID NO: 7200 and SEQ ID NO: 9715-SEQ ID NO: 9716.

97. The isolated polypeptide of claim 88, wherein the H. pylori cytoplasmic polypeptide or a fragment thereof is an H. pylori polypeptide involved in genome replication, transcription, recombination and repair or a fragment thereof comprising an amino acid sequence selected from the group consisting of SEQ ID NO: 7201-SEQ ID NO: 7569 and SEQ ID NO: 9717-SEQ ID NO: 9720.

98. The isolated polypeptide of claim 88, wherein the H. pylori cytoplasmic polypeptide or a fragment thereof is an H. pylori polypeptide involved in secretion and adhesion or a fragment thereof comprising an amino acid sequence selected from the group consisting of SEQ ID NO: 7570-SEQ ID NO: 7586.

99. The isolated polypeptide of claim 88, wherein the H. pylori cytoplasmic polypeptide or a fragment thereof is an H. pylori polypeptide involved in outer membrane and cell wall biogenesis or a fragment thereof comprising an amino acid sequence selected from the group consisting of SEQ ID NO: 7587-SEQ ID NO: 7639 and SEQ ID NO: 9721-SEQ ID NO: 9722.

100. The isolated polypeptide of claim 88, wherein the H. pylori cytoplasmic polypeptide or a fragment thereof is an H. pylori polypeptide involved in protein folding and stabilization or a fragment thereof comprising an amino acid sequence selected from the group consisting of SEQ ID NO: 7640-SEQ ID NO: 7680 and SEQ ID NO: 9523-SEQ ID NO: 9724.

101. An isolated H. pylori cytoplasmic polypeptide or a fragment thereof, wherein the polypeptide is encoded by a nucleic acid sequence selected from the group consisting of SEQ ID NO: 1576-SEQ ID NO: 4015 and SEQ ID NO: 9593-SEQ ID NO: 9621.

102. The isolated polypeptide of claim 101, wherein the H. pylori cytoplasmic polypeptide or a fragment thereof is an H. pylori cytoplasmic polypeptide or a fragment thereof involved in metabolism encoded by a nucleic acid comprising a nucleotide sequence selected from the group consisting of SEQ ID NO: 1576-SEQ ID NO: 2218 and SEQ ID NO: 9593-SEQ ID NO: 9602.

103. The isolated polypeptide of claim 102, wherein the H. pylori cytoplasmic polypeptide or a fragment thereof is an H. pylori polypeptide involved in energy metabolism or a fragment thereof encoded by a nucleic acid comprising a nucleotide sequence selected from the group consisting of SEQ ID NO: 1576-SEQ ID NO: 1725 and SEQ ID NO: 9593-SEQ ID NO: 9594.

104. The isolated polypeptide of claim 102, wherein the H. pylori cytoplasmic polypeptide or a fragment thereof is an H. pylori polypeptide involved in amino acid metabolism or a fragment thereof encoded by a nucleic acid comprising a sequence selected from the group consisting of SEQ ID NO: 1726-SEQ ID NO: 1868 and SEQ ID NO: 9595-SEQ ID NO: 956.

105. The isolated polypeptide of claim 102, wherein the H. pylori cytoplasmic polypeptide or a fragment thereof is an H. pylori polypeptide involved in cofactor metabolism or a fragment thereof encoded by a nucleic acid comprising a sequence selected from the group consisting of SEQ ID NO: 1869-SEQ ID NO: 2005 and SEQ ID NO: 9597.

106. The isolated polypeptide of claim 102, wherein the H. pylori cytoplasmic polypeptide or a fragment thereof is an H. pylori polypeptide involved in carbohydrate metabolism or a fragment thereof encoded by a nucleic acid comprising a sequence selected from the group consisting of SEQ ID NO: 2006-SEQ ID NO: 2076 and SEQ ID NO: 9598-SEQ ID NO: 9599.

107. The isolated polypeptide of claim 102, wherein the H. pylori cytoplasmic polypeptide or a fragment thereof is an H. pylori polypeptide involved in nucleic acid metabolism or a fragment thereof encoded by a nucleic acid comprising a nucleotide sequence selected from the group consisting of SEQ ID NO: 2077-SEQ ID NO: 2182 and SEQ ID NO: 9600.

108. The isolated polypeptide of claim 102, wherein the H. pylori cytoplasmic polypeptide or a fragment thereof is an H. pylori polypeptide involved in lipid metabolism or a fragment thereof encoded by a nucleic acid comprising a nucleotide sequence selected from the group consisting of SEQ ID NO: 2183-SEQ ID NO: 2218 and SEQ ID NO: 9601-SEQ ID NO: 9602.

109. The isolated polypeptide of claim 101, wherein the H. pylori cytoplasmic polypeptide or a fragment thereof is an H. pylori polypeptide involved in mRNA translation and ribosome biogenesis or a fragment thereof encoded by a nucleic acid comprising a sequence selected from the group consisting of SEQ ID NO: 2219-SEQ ID NO: 2438 and SEQ ID NO: 9603-SEQ ID NO: 9604.

110. The isolated polypeptide of claim 101, wherein the H. pylori cytoplasmic polypeptide or a fragment thereof is an H. pylori polypeptide involved in genome replication, transcription, recombination and repair or a fragment thereof encoded by a nucleic acid comprising a nucleotide sequence selected from the group consisting of SEQ ID NO: 2439-SEQ ID NO: 2807 and SEQ ID NO: 9605-SEQ ID NO: 9608.

111. The isolated polypeptide of claim 101, wherein the H. pylori cytoplasmic polypeptide or a fragment thereof is an H. pylori polypeptide involved in secretion and adhesion or a fragment thereof encoded by a nucleic acid comprising a sequence selected from the group consisting of SEQ ID NO: 2808-SEQ ID NO: 2824.

112. The isolated polypeptide of claim 101, wherein the H. pylori cytoplasmic polypeptide or a fragment thereof is an H. pylori polypeptide involved in outer membrane and cell wall biogenesis or a fragment thereof encoded by a nucleic acid comprising a sequence selected from the group consisting of SEQ ID NO: 2825-SEQ ID NO: 2877 and SEQ ID NO: 9609-SEQ ID NO: 9610.

113. The isolated polypeptide of claim 101, wherein the H. pylori cytoplasmic polypeptide or a fragment thereof is an H. pylori polypeptide involved in protein folding and stabilization of a fragment thereof encoded by a nucleic acid comprising a sequence selected from the group consisting of SEQ ID NO:2878-SEQ ID NO: 2918 and SEQ ID NO: 9611-SEQ ID NO: 9612.

114. An isolated H. pylori secreted polypeptide or a fragment thereof, wherein the polypeptide comprises an amino acid sequence selected from the group consisting of SEQ ID NO: 8778-SEQ ID NO: 9150 and SEQ ID NO: 9734-SEQ ID NO: 9737.

115. The polypeptide of claim 114, wherein H. pylori secreted polypeptide or a fragment thereof is a H. pylori periplasmic polypeptide or a fragment thereof comprises an amino acid sequence selected from the group consisting of SEQ ID NO: 8778-SEQ ID NO: 8780.

116. The polypeptide of claim 114, wherein the H. pylori secreted polypeptide or a fragment thereof is a H. pylori polypeptide or a fragment thereof involved in secretion and adhesion comprising an amino acid sequence selected from the group consisting of SEQ ID NO: 8781-SEQ ID NO: 8788 and SEQ ID NO: 9734.

117. The polypeptide of claim 114, wherein the H. pylori secreted polypeptide or a fragment thereof is a H. pylori chaperone polypeptide or a fragment thereof comprising an amino acid sequence selected from the group consisting of SEQ ID NO: 8789-SEQ ID NO: 8792.

118. An isolated H. pylori secreted polypeptide or a fragment thereof, wherein the polypeptide is encoded by a nucleic acid sequence selected from the group consisting of SEQ ID NO: 4016-SEQ ID NO: 4388 and SEQ ID NO: 9622-SEQ ID NO: 9625.

119. The polypeptide of claim 118, wherein the H. pylori secreted polypeptide or a fragment thereof is a H. pylori periplasmic polypeptide or a fragment thereof encoded by a nucleic acid comprising a nucleotide sequence selected from the group consisting of SEQ ID NO: 4016-SEQ ID NO: 4018.

120. The polypeptide of claim 118, wherein the H. pylori secreted polypeptide or a fragment thereof is a H. pylori polypeptide or a fragment thereof involved in secretion and adhesion encoded by a nucleic acid comprising a sequence selected from the group consisting of SEQ ID NO: 4019-SEQ ID NO: 4026 and SEQ ID NO: 9622.

121. The polypeptide of claim 118, wherein the H. pylori secreted polypeptide or a fragment thereof is a H. pylori chaperone polypeptide or a fragment thereof encoded by a nucleic acid comprising a nucleotide sequence selected from the group consisting of SEQ ID NO: 4027-SEQ ID NO: 4030.

122. An isolated H. pylori cellular polypeptide or a fragment thereof, wherein the polypeptide comprises an amino acid sequence selected from the group consisting of SEQ ID NO: 9151-SEQ ID NO: 9467 and SEQ ID NO: 9738-SEQ ID NO: 9748.

123. An isolated H. pylori cellular polypeptide or a fragment thereof, wherein the polypeptide is encoded by a nucleic acid comprising a nucleotide sequence selected from the group consisting of SEQ ID NO: 4389-SEQ ID NO: 4705 and SEQ ID NO: 9626-SEQ ID NO: 9636.

124. An isolated H. pylori membrane associated polypeptide or a fragment thereof, wherein the polypeptide comprises an amino acid sequence selected from the group consisting of SEQ ID NO: 9468-SEQ ID NO: 9524.

125. An isolated H. pylori cellular polypeptide or a fragment thereof, wherein the polypeptide is encoded by a nucleic acid comprising a nucleotide sequence selected from the group consisting of SEQ ID NO: 4706-SEQ ID NO: 4762.

126. An isolated H. pylori chaperone polypeptide or a fragment thereof, wherein the polypeptide is encoded by a nucleic acid comprising a nucleotide sequence selected from the group consisting of SEQ ID NO: 1028-1031; SEQ ID NO: 9567; and SEQ ID NO: 4027-SEQ ID NO: 4030.

127. An isolated H. pylori chaperone polypeptide or a fragment thereof, wherein the polypeptide comprises an amino acid sequence selected from the group consisting of SEQ ID NO: 5790-5793; SEQ ID NO: 9679; and SEQ ID NO: 8789-SEQ ID NO: 8792.

128. An isolated nucleic acid comprising a nucleotide sequence encoding an H. pylori chaperone polypeptide or a fragment thereof, the nucleic acid selected from the group consisting of SEQ ID NO: 1028-SEQ ID NO: 1031 and SEQ ID NO: 9567 and SEQ ID NO: 4027-SEQ ID NO: 4030.

129. A chimeric H. pylori polypeptide comprising at least two H. pylori polypeptides or fragments thereof, wherein each polypeptide is encoded by a nucleic acid sequence of any one of claims 1, 2, 3, 4, 5, or 6.

130. A chimeric H. pylori polypeptide comprising at least two H. pylori polypeptides or fragments thereof, wherein each polypeptide comprises an amino acid sequence of any one of claims 45, 46, 47, 48 or 49.

131. A fusion protein comprising an H. pylori polypeptide which comprises an amino acid sequence selected from the group consisting of SEQ ID NO: 4763-SEQ ID NO: 9524 and SEQ ID NO: 9637-SEQ ID NO: 9748 operatively linked to a non-H. pylori polypeptide.

132. An isolated nucleic acid comprising a nucleotide sequence of at least 8 nucleotides in length, wherein the sequence hybridizes under stringent hybridization conditions to a nucleic acid having a nucleotide sequence selected from the group consisting of SEQ ID NO: 1-SEQ ID NO: 4762 and SEQ ID NO: 9525-SEQ ID NO: 9636, or a complement thereof.

133. A probe comprising a nucleotide sequence consisting of at least 8 nucleotides of a nucleotide sequence selected from the group consisting of SEQ ID NO: 1-SEQ ID 0: 4762 and SEQ ID NO: 9525-SEQ ID NO: 9636, or a complement thereof.

134. A recombinant expression vector comprising the nucleic acid of any of claims 1, 2, 3, 4, 6, 7, 26, 39, 42, 43, 44 operably linked to a transcription regulatory element.

135. A cell comprising a recombinant expression vector of claim 134.

136. A method for producing an H. pylori polypeptide comprising culturing a cell of claim 135 under conditions that permit expression of the polypeptide.

137. The method of claim 136, further comprising purifying the polypeptide from the cell.

138. A method for detecting the presence of a Helicobacter nucleic acid in a sample comprising:
(a) contacting a sample with a nucleic acid of any of claims 132 or 133 so that a hybrid can form between the probe and a Helicobacter nucleic acid in the sample; and
(b) detecting the hybrid formed in step (a), wherein detection of a hybrid indicates the presence of a Helicobacter nucleic acid in the sample.

139. A vaccine formulation for prophylactic or therapeutic treatment of an H. pylori infection comprising an effective amount of at least one isolated nucleic acid of any of claims 1, 2, 3, 4, 6, 7, 26, 39, 43 or 44.

140. A vaccine formulation for prophylactic or therapeutic treatment of an H. pylori infection comprising an effective amount of at least one H. pylori polypeptide or a fragment thereof of any of claims 45, 46, 48, 49, 50, 88, 114, 120, 122, or 124.

141. A vaccine formulation of claim 139, further comprising a pharmaceutically acceptable carrier.

142. A vaccine formulation of claim 140, further comprising a pharmaceutically acceptable carrier.

143. A vaccine formulation of claim 141, wherein the pharmaceutically acceptable carrier comprises an adjuvant.

144. A vaccine formulation of claim 142, wherein the pharmaceutically acceptable carrier comprises an adjuvant.

145. A vaccine formulation of claim 141, wherein the pharmaceutically acceptable carrier comprises a delivery system.

146. A vaccine formulation of claim 142, wherein the pharmaceutically acceptable carrier comprises a delivery system.

147. A vaccine formulation of claim 145, wherein the delivery system comprises a live vector.

148. A vaccine formulation of claim 146, wherein the delivery system comprises a live vector.

149. A vaccine formulation of claim 147, wherein the live vector is a bacteria or a virus.

150. A vaccine formulation of claim 148, wherein the live vector is a bacteria or a virus.

151. A vaccine formulation of claim 145, wherein the pharmaceutically acceptable carrier further comprises an adjuvant.

152. A vaccine formulation of claim 146, wherein the pharmaceutically acceptable carrier further comprises an adjuvant.

153. A method of treating or reducing a risk of H. pylori infection in a subject comprising administering to a subject a vaccine formulation of claim 139, such that treatment or reduction of risk of H. pylori infection occurs.

154. A method of treating or reducing a risk of H. pylori infection in a subject comprising administering to a subject a vaccine formulation of claim 140, such that treatment or reduction of risk of H. pylori infection occurs.

155. A method of producing a vaccine formulation comprising: combining at least one isolated H. pylori polypeptide or a fragment thereof, wherein each polypeptide or fragment thereof is an amino acid of any one of claims 45, 46, 48, 49, 50, 88, 114, 122, or 124.

156. A method of producing a vaccine formulation comprising:
(a) providing at least one isolated H. pylori polypeptide or a fragment thereof, wherein each polypeptide or fragment thereof is an amino acid of any one of claims 45, 46, 48, 49; 50; 88, 114, 122, or 124 and
(b) combining at least one said isolated H. pylori polypeptide or a fragment thereof with a pharmaceutically acceptable carrier to thereby form a vaccine formulation.

157. A method of producing a vaccine formulation comprising:
(a) culturing a cell under conditions that permit expression of an H. pylori polypeptide or a fragment thereof, wherein each polypeptide or fragment thereof is an amino acid of any one of claims 45, 46, 48, 49, 50, 88, 114, 122 or 124;
(b) isolating said H. pylori polypeptide or a fragment thereof from said cell; and
(c) combining at least one said isolated H. pylori polypeptide or a fragment thereof with a pharmaceutically acceptable carrier to thereby form a vaccine formulation.

158. A composition comprising at least one isolated nucleic acid encoding an H. pylori polypeptide or a fragment thereof of any of claims 1, 2, 3, 4, 6, 7, 26, 39, 43 or 44 and a pharmaceutically acceptable carrier.

159. A composition comprising at least one isolated H. pylori polypeptide or a fragment thereof of any of claims 45, 46, 48, 49, 50, 88, 114, 122, or 124.

160. A method of evaluating a compound for the ability to bind an H. pylori nucleic acid comprising: contacting said compound with an H. pylori nucleic acid of any one of claims 1, 2, 3, 4, 6, 7, 26, 39, 43 or 44; and determining if said compound binds said H. pylori nucleic acid.

161. A method of claim 160, wherein said compound is an activator of the bacterial life cycle.

162. A method of claim 160, wherein said compound is an inhibitor of the bacterial life cycle.

163. A method of claim 160, wherein said method is performed in vitro.

164. A method of claim 160, wherein said method is performed in vivo.

165. A method of evaluating a compound for the ability to bind an H. pylori polypeptide comprising: contacting said compound with an H. pylori polypeptide wherein said H. pylori polypeptide comprises an amino acid sequence of any one of claims 45, 46, 47, 48, or 49; and determining if said compound binds said H. pylori polypeptide.

166. A method of claim 165, wherein said compound is an activator of the bacterial life cycle.

167. A method of claim 165, wherein said compound is an inhibitor of the bacterial life cycle.

168. A method of claim 165, wherein said method is performed in vitro.

169. A method of claim 165, wherein said method is performed in vivo.

170. An isolated nucleic acid comprising a nucleotide sequence encoding an H. pylori murI polypeptide or a fragment thereof, said nucleic acid comprising the nucleotide sequence of SEQ ID NO: 2873.

171. A method of evaluating a compound for the ability to bind an H. pylori nucleic acid comprising: contacting said compound with an H. pylori nucleic acid of claim 170 and determining if said compound binds said H. pylori nucleic acid.

172. A method of claim 171, wherein said compound is an activator of the bacterial life cycle.

173. A method of claim 171, wherein said compound is an inhibitor of the bacterial life cycle.

174. A method of claim 171, wherein said method is performed in vitro.

175. The method of claim 171, wherein said method is performed in vivo.

176. A purified H. pylori murI polypeptide or a fragment thereof, wherein said polypeptide comprises the amino acid sequence of SEQ ID NO: 7635.

177 A method of evaluating a compound for the ability to bind an H. pylori polypeptide comprising: contacting said compound with an H. pylori polypeptide of claim 176 and determining if said compound binds said H. pylori polypeptide.

178. A method of claim 177, wherein said compound is an activator of the bacterial life cycle.

179. A method of claim 177, wherein said compound is an inhibitor of the bacterial life cycle.

180. A method of claim 177, wherein said method is performed in vitro.

181. The method of claim 177, wherein said method is performed in vivo.

182. An isolated nucleic acid comprising a nucleotide sequence encoding an H. pylori murC polypeptide or a fragment thereof, said nucleic acid comprising the nucleotide sequence of SEQ ID NO: 2845.

183. A method of evaluating a compound for the ability to bind an H. pylori nucleic acid comprising: contacting said compound with an H. pylori nucleic acid of claim 182 and determining if said compound binds said H. pylori nucleic acid.

184. A method of claim 183, wherein said compound is an activator of the bacterial life cycle.

185. A method of claim 183, wherein said compound is an inhibitor of the bacterial life cycle.

186. A method of claim 183, wherein said method is performed in vitro.

187. The method of claim 183, wherein said method is performed in vivo.

188. A purified H. pylori murC polypeptide or a fragment thereof, wherein said polypeptide comprises the amino acid sequence of SEQ ID NO: 7607.

189. A method of evaluating a compound for the ability to bind an H. pylori polypeptide comprising: contacting said compound with an H. pylori polypeptide of claim 188 and determining if said compound binds said H. pylori polypeptide.

190. A method of claim 189, wherein said compound is an activator of the bacterial life cycle.

191. A method of claim 189, wherein said compound is an inhibitor of the bacterial life cycle.

192. A method of claim 189, wherein said method is performed in vitro.

193. The method of claim 189, wherein said method is performed in vivo.

194. A vaccine formulation for prophylactic or therapeutic treatment of an H. pylori infection comprising an effective amount of at least one isolated nucleic acid encoding an H. pylori outer membrane polypeptide or a fragment thereof, said nucleic acid selected from the group consisting of SEQ ID NO: 212, SEQ ID NO: 254, SEQ ID NO: 205, SEQ ID NO: 329, SEQ ID NO: 384, SEQ ID NO: 377 and SEQ ID NO: 289.

195. The vaccine formulation of claim 194, wherein said nucleic acid comprises a nucleotide sequence of SEQ ID NO: 384.

196. A vaccine formulation for prophylactic or therapeutic treatment of an H. pylori infection comprising an effective amount of at least one H. pylori outer membrane polypeptide or a fragment thereof, said polypeptide selected from the group consisting of SEQ ID NO: 4974, SEQ ID NO: 5016, SEQ ID NO: 4967, SEQ ID NO: 5091, SEQ ID NO: 5146, SEQ ID NO: 5139 and SEQ ID NO: 5051.

197. The vaccine formulation of claim 196, wherein said H. pylori outer membrane polypeptide or a fragment thereof comprises the amino acid sequence of SEQ ID NO: 5146.

198. A vaccine formulation of claims 194 or 196, further comprising a pharmaceutically acceptable carrier.

199. A vaccine formulation of claim 198, wherein the pharmaceutically acceptable carrier comprises an adjuvant.

200. A vaccine formulation of claim 198, wherein the pharmaceutically acceptable carrier comprises a delivery system.

201. A vaccine formulation of claim 200, wherein the delivery system comprises a live vector.

202. A vaccine formulation of claim 201, wherein the live vector is a bacteria or a virus.

203. A vaccine formulation of claim 200, wherein the pharmaceutically acceptable carrier further comprises an adjuvant.

204. A vaccine formulation for prophylactic or therapeutic treatment of an H. pylori infection comprising an effective amount of at least one isolated nucleic acid encoding an H. pylori cell envelope polypeptide or a fragment thereof, said nucleic acid selected from the group consisting of SEQ ID NO: 469, SEQ ID NO: 89, SEQ ID NO: 4286, SEQ ID NO: 419, SEQ ID NO: 9618, and SEQ ID NO: 3253.

205. A vaccine formulation for prophylactic or therapeutic treatment of an H. pylori infection comprising an effective amount of at least one H. pylori cell envelope polypeptide or a fragment thereof, said polypeptide selected from the group consisting of SEQ ID NO: 5231, SEQ ID NO: 4851, SEQ ID NO: 9048, SEQ ID NO: 5181, SEQ ID NO: 9730, and SEQ ID NO: 8015.

206. A vaccine formulation of claims 204 or 205, further comprising a pharmaceutically acceptable carrier.

207. A vaccine formulation of claim 206, wherein the pharmaceutically acceptable carrier comprises an adjuvant.

208. A vaccine formulation of claim 206, wherein the pharmaceutically acceptable carrier comprises a delivery system.

209. A vaccine formulation of claim 208, wherein the delivery system comprises a live vector.

210. A vaccine formulation of claim 209, wherein the live vector is a bacteria or a virus.

211. A vaccine formulation of claim 208, wherein the pharmaceutically acceptable carrier further comprises an adjuvant.

The application's sequence listing, which the Patent Office published only in electronic form, follows.

SEQUENCE LISTING (10031 sequences)

SEQ ID NO: 1 - DNA (genomic), 789 bp, Helicobacter pylori; double-stranded, circular
  misc_feature (B) LOCATION 1...789
  hypothetical: NO
  anti-sense: NO
atgctccgctctctctatagtgccacttcagggatgctcgcccaacaaacgcacattgacaccacttcaaacaacatcgccaatgtcaataccaccgggtttaaaaaatctcgcgcggattttaacgacttgttttaccaagcgatgcaatacgccggcaccaacacaagcaacacgactttatcgccagatggcatggaagtgggcttaggcgtacgccctagtgcgattaccaaaatgttttcgcaaggcagccctaaagaaacggagaataatttagatattgctattacaggtaaaggcttttttcaagtccagcttcctgatggcactaccgcttacacaaggagcgggaatttcaagctagacgagcagggcaatcttgtaacaagcgagggctatctcctcatccctcaaatcactttacccgaagacaccacgcaagtgaatatcggtgtggatggcacggtgagcgtgactcaaggcttgcaaacgacttctaacgtgatcgggcaaatcactttggctaattttgtcaatccggcggggcttcattctatgggggataatttgttttccatcaccaacgctagcggcgatgcgattgtgggcaacccggattctcaaggcttaggcaagttaaggcaaggctttttggagcttagtaacgtgagattggtagaagaaatgacagatctaatcaccgctcaaagggcttatgaagccaattctaaaagcattcaaaccgctgatgccatgctccaaacagtcaattccctcaaacgctaa

SEQ ID NO: 2 - DNA (genomic), 816 bp, Helicobacter pylori; double-stranded, circular
  misc_feature (B) LOCATION 1...816
  hypothetical: NO
  anti-sense: NO
ttgttaagtttagttaaagggaaaaccatgctccgctctctctatagtgccacttcagggatgctcgcccaacaaacgcacattgacaccacttcaaacaacatcgccaatgtcaataccaccgggtttaaaaaatctcgcgcggattttaacgacttgttttaccaagcgatgcaatacgccggcaccaacacaagcaacacgactttatcgccagatggcatggaagtgggccttggcgtacgccctagtgcgattaccaaaatgttttcgcaaggcagccctaaagaaacggagaataatttagatattgctattacaggtaaaggcttttttcaagtccagcttcctgatggcactaccgcttacacaaggagcgggaatttcaagctagacgagcagggcaatcttgtaacaagcgagggctatctcctcatccctcaaatcactttacccgaagacaccacgcaagtgaatatcggtgtggatggcacggtgagcgtgactcaaggcttgcaaacgacttctaacgtgatcgggcaaatcactttggctaattttgtcaatccggcggggcttcattctatgggggataatttgttttccatcaccaacgctagcggcgatgcgattgtgggcaacccggattctcaaggcttaggcaagttaaggcaaggctttttggagcttagtaacgtgagattggtagaagaaatgacagatctaatcaccgctcaaagggcttatgaagccaattctaaaagcattcaaaccgctgatgccatgctccaaacagtcaattccctcaaacgctaa

SEQ ID NO: 3 - DNA (genomic), 837 bp, Helicobacter pylori; double-stranded, circular
  misc_feature (B) LOCATION 1...837
  hypothetical: NO
  anti-sense: NO
tcttatttttgttataatcttaggttgttaagtttagttaaagggaaaaccatgctccgctctctctatagtgccacttcagggatgctcgcccaacaaacgcacattgacaccacttcaaacaacatcgccaatgtcaataccaccgggtttaaaaaatctcgcgcggattttaacgacttgttttaccaagcgatgcaatacgccggcaccaacacaagcaacacgactttatcgccagatggcatggaagtgggccttggcgtacgccctagtgcgattaccaaaatgttttcgcaaggcagccctaaagaaacggagaataatttagatattgctattacaggtaaaggcttttttcaagtccagcttcctgatggcactaccgcttacacaaggagcgggaatttcaagctagacgagcagggcaatcttgtaacaagcgagggctatctcctcatccctcaaatcactttacccgaagacaccacgcaagtgaatatcggtgtggatggcacggtgagcgtgactcaaggcttgcaaacgacttctaacgtgatcgggcaaatcactttggctaattttgtcaatccggcggggcttcattctatgggggataatttgttttccatcaccaacgctagcggcgatgcgattgtgggcaacccggattctcaaggcttaggcaagttaaggcaaggctttttggagcttagtaacgtgagattggtagaagaaatgacagatctaatcaccgctcaaagggcttatgaagccaattctaaaagcattcaaaccgctgatgccatgctccaaacagtcaattccctcaaacgc

SEQ ID NO: 4 - DNA (genomic), 315 bp, Helicobacter pylori; double-stranded, circular
  misc_feature (B) LOCATION 1...315
  hypothetical: NO
  anti-sense: NO
ttaagggaaagcatgtttttatcttcttttgatattagcggttatggtttgtccgcccaacgcttaagggctaatttgatttcttctaatatcgctaacgctaacaccacgcgcacgagcgaaggaggtccttataggagacaagaagcggtgtttagggcttttgatttcaatgagattttaaaccaaaaaatcgcccaaaacaatcaaatcatcccctatgaagaccctttagatgaaggcgatgacaaccccttaatccccattacaagcgtggtggtggataagattgcgcgcgatgatagtgatccgttg

SEQ ID NO: 5 - DNA (genomic), 486 bp, Helicobacter pylori; double-stranded, circular
  misc_feature (B) LOCATION 1...486
  hypothetical: NO
  anti-sense: NO
atgtttttatcttcttttgatattagcggttatggtttgtccgcccaacgcttaagggctaatttgatttcttctaatatcgctaacgctaacaccacgcgcacgagcgaaggaggtccttataggagacaagaagcggtgtttagggcttttgatttcaatgagattttaaaccaaaaaatcgcccaaaacaatcaaatcatcccctatgaagaccctttagatgaaggcgatgacaaccccttaatccccattacaagcgtggtggtggataagattgcgcgcgatgatagtgagccgttgatgaaatacgatcccagccaccctgacgctaacgctcaaggctatgtggcttaccccaatgtgaatgcggtggttgaaatggcggacttagtggaagcgactagagcttatcaggctaatgttgcagcctttcaaagcgctaaaaacatggcgcaaaatgcgattggcatgttacaaacatga

SEQ ID NO: 6 - DNA (genomic), 330 bp, Helicobacter pylori; double-stranded, circular
  misc_feature (B) LOCATION 1...330
  hypothetical: NO
  anti-sense: NO
atgcaagccatacacaatgataaaagcttattgagtcctttctctgagcttaacacggacaacaggactaaaagaggagaatcgggtagcacctttaaagaacaaaaaggtggggagttttctaaactcttgaaacaatctatcaacgagcttaacaacactcaagagcagtctgataaagccttagccgacatggcgacagggcagatcaaggacttgcaccaagcggctatcgccatagggaaggctgaaacgagcatgaaactcatgcttgaagtgcgtaacaaagcgatcagtgcttataaagagcttttaagaacgcagatctaa

SEQ ID NO: 7 - DNA (genomic), 336 bp, Helicobacter pylori; double-stranded, circular
  misc_feature (B) LOCATION 1...336
  hypothetical: NO
  anti-sense: NO
ggaggttctatgcatgccatacacaatgataaaagcttattgagtcctttctctgagcttaacacggacaacaggactaaaagagaagaatcgggtagcacctttaaagaacaaaaaggtggggagttttctaaactcttgaaacaatctatcaacgagcttaacaacactcaagagcagtctgataaagccttagccgacatggcgacagggcagatcaaggacttgcaccaagcggctatcgccatagggaaggctgaaacgagcatgaaactcatgcttgaagtgcgtaacaaagcgatcagtgcttataaagagcttttaagaacgcagatc

SEQ ID NO: 8 - DNA (genomic), 198 bp, Helicobacter pylori; double-stranded, circular
  misc_feature (B) LOCATION 1...198
  hypothetical: NO
  anti-sense: NO
ttgatggatttttctaaagcgtttggattggtttataaagcgctagattatagggctttaaggcaggatatgatcgcttctaacatcgctaaagtggatacccccttttacaggcccaaggatttggattttgaaagcgttttacggagaaaaaagcagaaatttttgaaaaccaatccggtaaagttttgcctttag

SEQ ID NO: 9 - DNA (genomic), 288 bp, Helicobacter pylori; double-stranded, circular
  misc_feature (B) LOCATION 1...288
  hypothetical: NO
  anti-sense: NO
aagcgttttacggagaaaaaagcagaaatttttgaaaaccaatccggtaaagttttgcctttagcccacactaaccccaggcatttagactttgaaaatagcactaaaaatggggcgagtcttttttttagagacgggcatttggctaaaaatgatggcaatagcgtggatttagacatagaaacgagcgaaatgggcaagaactctaccatgtatttagccttgagttcagccttaaaaaagtatcgaggcatgatcaattacgccattgactctagtaagaattta

SEQ ID NO: 10 - DNA (genomic), 423 bp, Helicobacter pylori; double-stranded, circular
  misc_feature (B) LOCATION 1...423
  hypothetical: NO
  anti-sense: NO
atggatttttctaaagcgtttggattggtttataaagcgctagattatagggctttaaggcaggatatgatcgcttctaacatcgctaatgtggatacccccttttacaggccaaaggatttggattttgaaagcgttttagcggagaaaaaagcagaaatttttgaaaaccaatccggtaaagttttgcctttagcccacactaaccccaggcatttagactttgaaaatagcactaaaaatggggcgagtcttttttttagagacgggcatttggctaaaaatgatggcaatagcgtggatttagacatagaaacgagcgaaatgggcaagaactctaccatgtatttagccttgagttcagccttaaaaaagtatcgaggcatgatcaattacgccattgactctagtaagaatttatag

SEQ ID NO: 11 - DNA (genomic), 351 bp, Helicobacter pylori; double-stranded, circular
  misc_feature (B) LOCATION 1...351
  hypothetical: NO
  anti-sense: NO
gtgaaaaaatacgctgaagattttatcaccaaagatgaagtgaaatcccttttagagcgcttggctaaagactatcctacgattgtagaagagagtaaaaaaatccccaccggtgcgatccgctcagtcttgcaagccttgttgcatgaaaaaatccccattaaggacatgctcactattttggaaacgattactgatattgctccattggttcaaaacgatgtgaatatcttaaccgaacaagtgagggcgaggctttcyagggtgatcaccaacgcttttaaatctgaagacgggcgtttgaaatttttaaccttttctaccgatrgcgaacaatttttkgctcaataa

SEQ ID NO: 12 - DNA (genomic), 702 bp, Helicobacter pylori; double-stranded, circular
  misc_feature (B) LOCATION 1...702
  hypothetical: NO
  anti-sense: NO
tggattgacgctaaaaataaagaagaagccatcattcaaggctacactatcattgatccaagcaccgttattgcgacgcacaccagcgaattagtgaaaaaatacgctgaagattttatcaccaaagatgaagtgaaatcccttttagagcgcttggctaaagactatcctacgattgtagaagagagtaaaaaaatccccaccggtgcgatccgctcagtcttgcaagccttgttgcatgaaaaaatccccattaaggacatgctcactattttggaaacgattactgatattgctccattggttcaaaacgatgtgaatatcttaaccgaacaagtgagggcgaggctttctagggtgatcaccaacgcttttaaatctgaagacgggcgtttgaaatttttaaccttttctaccgatagcgaacaatttttgctcaataaattgcgagaaaatggcacctctaagagcttattactcaatgtgggcgaattgcaaaaactcattgaaggggtttctgaagaggctatgaaagtcttgcaaaaagggatcgctccggtgattttgattgtagagcctaatttaagaaaagccctttctaatcaaatggagcaggctaggattgatgtggtcgtgctaagccatgcggaattagatcctaactctaattttgaagccttaggcacgatccacattaacttt

SEQ ID NO: 13 - DNA (genomic), 699 bp, Helicobacter pylori; double-stranded, circular
  misc_feature (B) LOCATION 1...699
  hypothetical: NO
  anti-sense: NO
attgacgctaaaaataaagaagaagccatcattcaaggctacactatcattgatccaagcaccgttattgcgacgcacaccagcgaattagtgaaaaaatacgctgaagattttatcaccaaagatgaagtgaaatcccttttagagcgcttggctaaagactatcctacgattgtagaagagagtaaaaaaatccccaccggtgcgatccgctcagtcttgcaagccttgttgcatgaaaaaatccccattaaggacatgctcactattttggaaacgattactgatattgctccattggttcaaaacgatgtgaatatcttaaccgaacaagtgagggcgaggctttctagggtgatcaccaacgcttttaaatctgaagacgggcgtttgaaatttttaaccttttctaccgatagcgaacaatttttgctcaataaattgcgagaaaatggcacctctaagagcttattactcaatgtgggcgaattgcaaaaactcattgaaggggtttctgaagaggctatgaaagtcttgcaaaaagggatcgctccggtgattttgattgtagagcctaatttaagaaaagccctttctaatcaaatggagcaggctaggattgatgtggtcgtgctaagccatgcggaattagatcctaactctaattttgaagccttaggcacgatccacattaacttt

SEQ ID NO: 14 - DNA (genomic), 780 bp, Helicobacter pylori; double-stranded, circular
  misc_feature (B) LOCATION 1...780
  hypothetical: NO
  anti-sense: NO
atgaataccggttttgtgaatagagaaattgagggcattcccactaaagagccagcttttggaatggacgctttatggattgacgctaaaaataaagaagaagccatcattcaaggctacactatcattgatccaagcaccgttattgcgacgcacaccagcgaattagtgaaaaaatacgctgaagattttatcaccaaagatgaagtgaaatcccttttagagcgcttggctaaagactatcctacgattgtagaagagagtaaaaaaatccccaccggtgcgatccgctcagtcttgcaagccttgttgcatgaaaaaatccccattaaggacatgctcactattttggaaacgattactgatattgctccattggttcaaaacgatgtgaatatcttaaccgaacaagtgagggcgaggctttctagggtgatcaccaacgcttttaaatctgaagacgggcgtttgaaatttttaaccttttctaccgatagcgaacaatttttgctcaataaattgcgagaaaatggcacctctaagagcttattactcaatgtgggcgaattgcaaaaactcattgaaggggtttctgaagaggctatgaaagtcttgcaaaaagggatcgctccggtgattttgattgtagagcctaatttaagaaaagccctttctaatcaaatggagcaggctaggattgatgtggtcgtgctaagccatgcggaattagatcctaactctaattttgaagccttaggcacgatccacattaacttttaa

SEQ ID NO: 15 - DNA (genomic), 1029 bp, Helicobacter pylori; double-stranded, circular
  misc_feature (B) LOCATION 1...1029
  hypothetical: NO
  anti-sense: NO
gtgttaaaaattgaatttttagaattggctttaggctatcagctcatcagcttagcggacatgaaacaagggggcgatttgttagaaaggattaggggtattagaaaaaagatagcgagcgattatggttttttgatgcctcaaatccggatcagggataatttacaactccccccaacgcattatgaaatcaagcttaagggcattgtgattggtgagggcatggtgatgccagataagtttttagccatgaataccggttttgtgaatagagaaattgagggcattcccactaaagagccagcttttggaatggacgctttatggattgacgctaaaaataaagaagaagccatcattcaaggctacactatcattgatccaagcaccgttattgcgacgcacaccagcgaattagtgaaaaaatacgctgaagattttatcaccaaagatgaagtgaaatcccttttagagcgcttggctaaagactatcctacgattgtagaagagagtaaaaaaatccccaccggtgcgatccgctcagtcttgcaagccttgttgcatgaaaaaatccccattaaggacatgctcactattttggaaacgattactgatattgctccattggttcaaaacgatgtgaatatcttaaccgaacaagtgagggcgaggctttctagggtgatcaccaacgcttttaaatctgaagacgggcgtttgaaatttttaaccttttctaccgatagcgaacaatttttgctcaataaattgcgagaaaatggcacctctaagagcttattactcaatgtgggcgaattgcaaaaactcattgaaggggtttctgaagaggctatgaaagtcttgcaaaaagggatcgctccggtgattttgattgtagagcctaatttaagaaaagccctttctaatcaaatggagcaggctaggattgatgtggtcgtgctaagccatgcggaattagatcctaactctaattttgaagccttaggcacgatccacattaacttttaa

SEQ ID NO: 16 - DNA (genomic), 273 bp, Helicobacter pylori; double-stranded, circular
  misc_feature (B) LOCATION 1...273
  hypothetical: NO
  anti-sense: NO
atgcaaaatgggtattatgcggccacaggggcaatggctacacaatttaaccgcttggatttaacctctaacaatttagccaacctaaacaccaacggctttaaaagagacgatgcgattacaggcgattttttaaggctttaccaagaataccgagagcaactgcccttagaagatcaaaccaaagcgagcgcgaagtatctcaaccgcamcctcaatcgtgtgcctattctatcaraaatctatackkataggragcttggcygcgtttga

SEQ ID NO: 17 - DNA (genomic), 810 bp, Helicobacter pylori; double-stranded, circular
  misc_feature (B) LOCATION 1...810
  hypothetical: NO
  anti-sense: NO
atgcaaaatgggtattatgcggccacaggggcaatggctacacaatttaaccgcttggatttaacctctaacaatttagccaacctaaacaccaacggctttaaaagagacgatgcgattacaggcgattttttaaggctttaccaagaataccgagagcaactgcccttagaagatcaaaccaaagcgagcgcgaagtatctcaaccgcaacctcaatcgtgtgcctattctatcagaaatctatacggataggagtcttggcgcgtttgaagggacgaataaccccctagattttgccctaacaagccctaacctctattttgcgatacagactaatgagggcgtcgcttataccagagacgggcatttcagcgttgataaagacggctttttggtaacccttaatggttttaaggtgctttcacgctccggtttgaacgaaaaaggagggatcatgctcatgcctaacgctgaaattgaagtggatcaaaatggtggaatcacttttagggataatgaagcccaaattcaagcgggcgcgttggctttagtgagttttagcgaacctaaaaatcttaaaaaaatagggcaaaacctttatacctatcagggcgaaggcgttcatcaagtctctgactctggtgcgttaaggcaatccatgctagaaaaaagcaatgtcaatgcggtgcgtgagatgagcactttgattgaaatcaaccgctttttggacatgtattctaaagtgctaaaaacccatcaagatgacatgaacgctgaagcgatcaacaaactcgctacaaaagcttaa

SEQ ID NO: 18 - DNA (genomic), 819 bp, Helicobacter pylori; double-stranded, circular
  misc_feature (B) LOCATION 1...819
  hypothetical: NO
  anti-sense: NO
aaggattattgcatgcaaaatgggtattatgcggccacaggggcaatggctacacaatttaaccgcttggatttaacctctaacaatttagccaacctaaacaccaacggctttaaaagagacgatgcgattacaggcgattttttaaggctttaccaagaataccgagagcaactgcccttagaagatcaaaccaaagcgagcgcgaagtatctcaaccgcaacctcaatcgtgtgcctattctatcagaaatctatacggataggagtcttggcgcgtttgaagggacgaataaccccctagattttgccctaacaagccctaacctctattttgcgatacagactaatgagggcgtcgcttataccaaagacgggcatttcagcgttgataaagacggctttttggtaacccttaatggttttaaggtgctttcacgctccggtttgaacgaaaaaggagggatcatgctcatgcctaacgctgaaattgaagtggatcaaaatggtggaatcacttttagggataatgaagcccaaattcaagcgggcgcgttggctttagtgagttttagcgaacctaaaaatcttaaaaaaatagggcaaaacctttatacctatcagggcgaaggcgttcatcaagtctctgactctggtgcgttaaggcaatccatgctagaaaaaagcaatgtcaatgcggtgcgtgagatgagcactttgattgaaatcaaccgctttttggacatgtattctaaagtgctaaaaacccatcaagatgacatgaacgctgaagcgattaacaaactcgctacaaaagct

SEQ ID NO: 19 - DNA (genomic), 492 bp, Helicobacter pylori; double-stranded, circular
  misc_feature (B) LOCATION 1...492
  hypothetical: NO
  anti-sense: NO
atgcgatcgctctatcattatcacgcttatcaatatcattggagggtttttagtgggcgtgtttcaagggatatgagcctaagctttagcgctagcaccttcactatcctaaccattggcgatgggtttgtggggcaaatccctgctttaatcattgcgacagcgaccggtattgtcgccactcgcaccacgcaaaacgaagaagaagacttcgcttctaaactcatcacacagcttacgaataaaagcaaaactttagtgattgtgggggcgaatttattgctttttgccaccattcctggactccctaccttttctttagcgtttgtagggactctctttttattcatcgcatggctgattagcagggagggaaaagacgggctgctcactaaattagaaaattatttgagtccaaaattcggcttggatttgagcgaaaaaccccacagttccaaaatcaaaccccacgcccccaccacaaaaacttaa

SEQ ID NO: 20 - DNA (genomic), 525 bp, Helicobacter pylori; double-stranded, circular
  misc_feature (B) LOCATION 1...525
  hypothetical: NO
  anti-sense: NO
atggatggtgcgtctaaattcgtcaaaggcgatgcgatcgcttctatcattatcacgcttatcaatatcattggagggtttttagtgggcgtgtttcaaagggatatgagcctaagctttagcgctagcaccttcactatcctaaccattggcgatgggcttgtggggcaaatccctgctttaatcattgcgacagcgaccggtattgtcgccactcgcaccacgcaaaacgaagaagaagacttcgcttctaaactcatcacacagcttacgaataaaagcaaaactttagtgattgtgggggcgaatttattgctttttgccaccattcctggactccctaccttttctttagcgtttgtagggactctctttttattcatcgcatggctgattagcagggagggaaaagacgggctgctcactaaattagaaaattatttgagtccaaaattcggcttggatttgagcgaaaaaccccacagttccaaaatcaaaccccacgcccccaccacaaaaacttaa

SEQ ID NO: 21 - DNA (genomic), 696 bp, Helicobacter pylori; double-stranded, circular
  misc_feature (B) LOCATION 1...696
  hypothetical: NO
  anti-sense: NO
atgagcgcggatagcgctttacctagcgtcaatctctctttaaacgctcctagtgatcctaaacaactcgtaaccacccttaatgtcatcgccttactcacgcttttggttttagccccatcgttgattttagtgatgacgagtttcacccgtttgatcgtggtgttttcttttttaaggaccgctttaggcacgcaacaaaccccacccactcaaattctagtctcgctctctttgatattgactttttttatcatggaacctagcttgaaaaaggcttatgatacagggattaagccttatatggataaaaagatttcttacaccgaagcgtttgaaaaaagcactctgcctttcaaggaattcatgcttaaaaacacacgagaaaaagatctagcccttttttttaggattaggaatttgcctaaccctaaaacccctgatgatgtgagcttgagcgttttaatcccggcatttatgataagcgagttgaaaacagcgtttcaaatcggctttttactctacttgccttttttggtgattgatatggttatcagctctattttaatggcgatgggtatgatgatgctcccgcctgtaatgatttctctgccttttaaaattttggtgtttattctggtggatgggtttaatttattgaccgaaaatttagtggcgagttttaaaatggtttaa

SEQ ID NO: 22 - DNA (genomic), 747 bp, Helicobacter pylori; double-stranded, circular
  misc_feature (B) LOCATION 1...747
  hypothetical: NO
  anti-sense: NO
gtgcgttttttcatttttttaattctcatttgccctttaatatgccccttaatgagcgcggatagcgctttacctagcgtcaatctctctttaaacgctcctagtgatcctaaacaactcgtaaccacccttaatgtcatcgccttactcacgcttttggttttagccccatcgttgattttagtgatgacgagtttcacccgtttgatcgtggtgttttcttttttaaggaccgctttaggcacgcaacaaaccccacccactcaaattctagtctcgctctctttgatattgactttttttatcatggaacctagcttgaaaaaggcttatgatacagggattaagccttatatggataaaaagatttcttacaccgaagcgtttgaaaaaagcactctgcctttcaaggaattcatgcttaaaaacacacgagaaaaagatctagcccttttttttaggattaggaatttgcctaaccctaaaacccctgatgatgtgagcttgagcgttttaatcccggcatttatgataagcgagttgaaaacagcgtttcaaatcggctttttactctacttgccttttttggtgattgatatggttatcagctctattttaatggcgatgggtatgatgatgctcccgcctgtaatgatttctctgccttttaaaattttggtgtttattctggtggatgggtttaatttattgaccgaaaatttagtggcgagttttaaaatggtttaa

SEQ ID NO: 23 - DNA (genomic), 762 bp, Helicobacter pylori; double-stranded, circular
  misc_feature (B) LOCATION 1...762
  hypothetical: NO
  anti-sense: NO
agatttaaggctagaattgtgcgttttttcatttttttaattctcatttgccctttaatatgccccttaatgagcgcggatagcgctttacctagcgtcaatctctctttaaacgctcctagtgatcctaaacaactcgtaaccacccttaatgtcatcgccttactcacgcttttggttttagccccatcgttgattttagtgatgacgagtttcacccgtttgatcgtggtgttttcttttttaaggaccgctttaggcacgcaacaaaccccacccactcaaattctagtctcgctctctttgatattgactttttttatcatggaacctagcttgaaaaaggcttatgatacagggattaagccttatatggataaaaagatttcttacaccgaagcgtttgaaaaaagcactctgcctttcaaggaattcatgcttaaaaacacacgagaaaaagatctagcccttttttttaggattaggaatttgcctaaccctaaaacccctgatgatgtgagcttgagcgttttaatcccggcatttatgataagcgagttgaaaacagcgtttcaaatcggctttttactctacttgccttttttggtgattgatatggttatcagctctattttaatggcgatgggtatgatgatgctcccgcctgtaatgatttctctgccttttaaaattttggtgtttattctggtggatgggtttaatttattgaccgaaaatttagtggcgagttttaaaatggtt

SEQ ID NO: 24 - DNA (genomic), 204 bp, Helicobacter pylori; double-stranded, circular
  misc_feature (B) LOCATION 1...204
  hypothetical: NO
  anti-sense: NO
atgcaggatttagacaataacatgtccttagacaccgctcacaacacgctgagttctaacgggaaaaacatcaccattgccggggtggtaaaagccttacaaaaaattggcgtgagcgctaaggggatggtttcaatcttgcaagccctaaaaaaaagcggcgcgattagcgcgaaatggagatactatgataaacaacaataa

SEQ ID NO: 25 - DNA (genomic), 207 bp, Helicobacter pylori; double-stranded, circular
  misc_feature (B) LOCATION 1...207
  hypothetical: NO
  anti-sense: NO
ttgaaacgggtgtttttatggcttatttttgtattagccttccacaagcttttggccgggaaaataggcgatatagcgagcgtggtaggcgtaagggataaccaactgattggttatgggcttgtgattggtttgaatggcacaggggataaatcctgctcaaaatttcacatgcaatccatttctaacatgctagagagcttgaac

SEQ ID NO: 26 - DNA (genomic), 849 bp, Helicobacter pylori; double-stranded, circular
  misc_feature (B) LOCATION 1...849
  hypothetical: NO
  anti-sense: NO
atgctagagagcgtgaacgttaaaatttctgcagacgatattaaatctaaaaatgtcgctgccgtgatgattacagcctccttgcccccctttgcaagacagggcgataaaattgatattcacatttcttctattggcgatgcgaaatccattcaaggagggactttagtgatgacccctttaaatgcggtagatgggaatatttacgccctcgctcaaggggctatcatttcgggtaattctagtaacttgctctcagccaatatcatcaacggggcgactattgaaagggaagtttcgtatgatttgttccataaaaacgccatgactttaagcctgaaaaaccccaattttaaaaacgctatccaagtgcaaaacactttaaataaggtatttggtaataaagtagccatagcgctagatcccaaaaccattcaaatcacccgcccagagcgtctttctatggtggagtttttagctttagtgcaagaaatccccatttactaccgcgcgaaaaataagatcattgtagatgaaaaatcaggcacgatcgtttcaggagtggatataatcgtgcatcctatagtggttacaagccaagacatcacgcttaaaatcactaaagagcctttaaatgattctaaaaacatgcaggatttagacaataacatgtccttagacaccgctcacaacacgctgagttctaacgggaaaaacatcaccattgccggggtggtaaaagccttacaaaaaattggcgtgagcgctaaggggatggtttcaatcttgcaagccctaaaaaaaagcggcgcgattagcgcgaaatggagatactatgataaacaacaa

SEQ ID NO: 27 - DNA (genomic), 846 bp, Helicobacter pylori; double-stranded, circular
  misc_feature (B) LOCATION 1...846
  hypothetical: NO
  anti-sense: NO
ctagagagcgtgaacgttaaaatttctgcagacgatattaaatctaaaaatgtcgctgccgtgatgattacagcctccttgcccccctttgcaagacagggcgataaaattgatattcacatttcttctattggcgatgcgaaatccattcaaggagggactttagtgatgacccctttaaatgcggtagatgggaatatttacgccctcgctcaaggggctatcatttcgggtaattctagtaacttgctctcagccaatatcatcaacggggcgactattgaaagggaagtttcgtatgatttgttccataaaaacgccatgactttaagcctgaaaaaccccaattttaaaaacgctatccaagtgcaaaacactttaaataaggtatttggtaataaagtagccatagcgctagatcccaaaaccattcaaatcacccgcccagagcgtctttctatggtggagtttttagctttagtgcaagaaatccccatttactaccgcgcgaaaaataagatcattgtagatgaaaaatcaggcacgatcgtttcaggagtggatataatcgtgcatcctatagtggttacaagccaagacatcacgcttaaaatcactaaagagcctttaaatgattctaaaaacatgcaggatttagacaataacatgtccttagacaccgctcacaacacgctgagttctaacgggaaaaacatcaccattgccggggtggtaaaagccttacaaaaaattggcgtgagcgctaaggggatggtttcaatcttgcaagccctaaaaaaaagcggcgcgattagcgcgaaatggagatactatgataaacaacaa

SEQ ID NO: 28 - DNA (genomic), 1029 bp, Helicobacter pylori; double-stranded, circular
  misc_feature (B) LOCATION 1...1029
  hypothetical: NO
  anti-sense: NO
ttgaaacgggtgtttttatggcttatttttgtattagccttccacaagcttttggccgaaaaaataggcgatatagcgagcgtggtaggcgtaagggataaccagctgattggttatgggcttgtgattggtttgaatggcacagggaataaatccggctcaaaattcaccatgcaatccatttctaacatgctagagagcgtgaacgttaaaatttctgcagacgatattaaatctaaaaatgtcgctgccgtgatgattacagcctccttgcccccctttgcaagacagggcgataaaattgatattcacatttcttctattggcgatgcgaaatccattcaaggagggactttagtgatgacccctttaaatgcggtagatgggaatatttacgccctcgctcaaggggctatcatttcgggtaattctagtaacttgctctcagccaatatcatcaacggggcgactattgaaagggaagtttcgtatgatttgttccataaaaacgccatgactttaagcctgaaaaaccccaattttaaaaacgctatccaagtgcaaaacactttaaataaggtatttggtaataaagtagccatagcgctagatcccaaaaccattcaaatcacccgcccagagcgtctttctatggtggagtttttagctttagtgcaagaaatccccattaactacagcgcgaaaaataagatcattgtagatgaaaaatcaggcacgatcgtttcaggagtggatataatcgtgcatcctatagtggttacaagccaagacatcacgcttaaaatcactaaagagcctttaaatgattctaaaaacatgcaggatttagacaataacatgtccttagacaccgctcacaacacgctgagttctaacgggaaaaacatcaccattgccggggtggtaaaagccttacaaaaaattggcgtgagcgctaaggggatggtttcaatcttgcaagccctaaaaaaaagcggcgcgattagcgctgaaatggagatactatga

SEQ ID NO: 29 - DNA (genomic), 465 bp, Helicobacter pylori; double-stranded, circular
  misc_feature (B) LOCATION 1...465
  hypothetical: NO
  anti-sense: NO
attgatgggcgcgcgatttctgtgcatgcagcgagcgagagcggtcaggtttttgggggagggaattttgcaggaatttctgggacacagcatgcggttattgggcgcttaaccttgactaggaccgacgctagagacattatcgtgagcggtgtgaattttagccatgtgggctttcattccgctcaaggggtggcagaatacaccgtgaatttgagagcggttaggggcatttttgatgcgaatgtggcttcagcggccggagcgaacgctaatggcgcgcaagcggagaccaattctcaaggtataggagccggagtaacaagccttaaaggggcgatgattgtgatggatatggcagattcagcgcgcacgcaattagacaagattcgctcggatatgggttcggtgcaaatggaattggttaccaccattaacaatatttctgtaacccaagtgaatgtt

SEQ ID NO: 30 - DNA (genomic), 462 bp, Helicobacter pylori; double-stranded, circular
  misc_feature (B) LOCATION 1...462
  hypothetical: NO
  anti-sense: NO
gatgggcgcgcgatttctgtgcatgcagcgagcgagagcggtcaggtttttgggggagggaattttgcaggaatttctgggacacagcatgcggttattgggcgcttaaccttgactaggaccgacgctagagacattatcgtgagcggtgtgaattttagccatgtgggctttcattccgctcaaggggtggcagaatacaccgtgaatttgagagcggttaggggcatttttgatgcgaatgtggcttcagcggccggagcgaacgctaatggcgcgcaagcggagaccaattctcaaggtataggagccggagtaacaagccttaaaggggcgatgattgtgatggatatggcagattcagcgcgcacgcaattagacaagattcgctcggatatgggttcggtgcaaatggaattggttaccaccattaacaatatttctgtaacccaagtgaatgtt

SEQ ID NO: 31 - DNA (genomic), 1032 bp, Helicobacter pylori; double-stranded, circular
  misc_feature (B) LOCATION 1...1032
  hypothetical: NO
  anti-sense: NO
gtgcgcatggaaacttcaacttttagcggtgaaggcatgctcgctagcgcggcggcgcaaaacttgactgaagtgggattgaatttcaaacaagtcaatggcgtgaatgattataagattgaaaccgtgcgcatttctacgagcgccggcactgggattggggcgttaagcgaaatcatcaatcgcttttctaacactctaggcgttagagcatcttataatgtcatggctaccggcggcactcctgtgcaatcaggaaccgtgagagagcttaccattaatggcgtagaaattggaaccgtgaatgatgtgcataaaaacgacgctgacgggaggttgactaatgcgatcaactccgtcaaagatcgcaccggtgtggaagcgagcttggatattcaagggcgcattaatttgcactccattgatgggcgcgcgatttctgtgcatgcagcgagcgcgagcggtcaggtttttgggggagggaattttgcaggaatttctgggacacagcatgcggttattgggcgcttaaccttgactaggaccgacgctagagacattatcgtgagcggtgtgaattttagccatgtgggctttcattccgctcaaggggtggcagaatacaccgtgaatttgagagcggttaggggcatttttgatgcgaatgtggcttcagcggccggagcgaacgctaatggcgcgcaagcggagaccaattctcaaggtataggagccggagtaacaagccttaaaggggcgatgattgtgatggatatggcagattcagcgcgcacgcaattagacaagatccgctcggatatgggttcggtgcaaatggaattggttaccaccattaacaatatttctgtaactcaagtgaatgttaaagcggctgagtctcaaatcagagacgtggattttgctgaagagagcgcgaacttttctaaatacaatattttggcgcaaagcgggagttttgctatggcgcaagcgaatgcggtgcaacaaaatgtcttaagacttttacaataa

SEQ ID NO: 32 - DNA (genomic), 1155 bp, Helicobacter pylori; double-stranded, circular
  misc_feature (B) LOCATION 1...1155
  hypothetical: NO
  anti-sense: NO
ttgcagtacactgtccacccgtgtgaactttcaggagtttttacaagatttcaaattggcgcgtattctaacaccacggttaaagcgtctattggctcaacgagttcggataaaattgggcatgtgcgcatggaaacttcatcttttagcggtgaaggcatgctcgctagcgcggcggcgcaaaacttgactgaagtgggattgaatttcaaacaagtcaatggcgtgaatgattataagattgaaaccgtgcgcatttctacgagcgccggcactgggattggggcgttaagcgaaatcatcaatcgcttttctaacactctaggcgttagagcatcttataatgtcatggctaccggcggcactcctgtgcaatcaggaaccgtgagagagcttaccattaatggcgtagaaattggaaccgtgaatgatgtgcataaaaacgacgctgacgggaggttgactaatgcgatcaactccgtcaaagatcgcaccggtgtggaagcgagcttggatattcaagggcgcattaatttgcactccattgatgggcgcgcgatttctgtgcatgcagcgagcgcgagcggtcaggtttttgggggagggaattttgcaggaatttctgggacacagcatgcggttattgggcgcttaaccttgactaggaccgacgctagagacattatcgtgagcggtgtgaattttagccatgtgggctttcattccgctcaaggggtggcagaatacaccgtgaatttgagagcggttaggggcatttttgatgcgaatgtggcttcagcggccggagcgaacgctaatggcgcgcaagcggagaccaattctcaaggtataggagccggagtaacaagccttaaaggggcgatgattgtgatggatatggcagattcagcgcgcacgcaattagacaagatccgctcggatatgggttcggtgcaaatggaattggttaccaccattaacaatatttctgtaactcaagtgaatgttaaagcggctgagtctcaaatcagagacgtggattttgctgaagagagcgcgaacttttctaaatacaatattttggcgcaaagcgggagttttgctatggcgcaagcgaatgcggtgcaacaaaatgtcttaagacttttacaataa

SEQ ID NO: 33 - DNA (genomic), 1053 bp, Helicobacter pylori; double-stranded, circular
  misc_feature (B) LOCATION 1...1053
  hypothetical: NO
  anti-sense: NO
atggctgatattttaagccaagaagaaattgatgcgcttttagaagtcgttgatgagaatgtggatattcaaaatgtccaaaaaaaagatattatcccccaacgcagcgtaaccctctatgatttcaagcgccctaatcgtgtgagtaaggagcaattgcgctcttttaggagcatccatgataaaatggctaggaatctttccagtcaagtctcttctatcatgcgttctattgtagaaatccagcttcatagcgtggatcaaatgacttatggcgaatttttgatgagtttgcctagccctacgagttttaatgtcttttccatgaagcctatggggggaacgggggttttagagattaatcctagcatcgctttccctatgattgacagactattagggggtaaggggagcgcgtatgatcaaaacagggagtttagcgatattgaattgaatttattggatacgattttacgccaggtgatgcaaattttaaaagaagtgtggtcgcctgtggtggagatgtatcctaccattgacgctaaagaatccagcgcgaatgtggtccaaatcgtcgctcaaaatgaaatttctatcatggtggttttagagattatcattgggcatagccgtgggatgatgaatatttgttacccggtgatttccattgagagcattctttctaaaatggggagtagggatttcatgctttcagaaacgaactccaaaaagagccgtaataaggaattgcaagcactattgagcggggtgagcgtggatatgatggtgtttttgggcgcggtggaattgagtttgaaagaaatgttggatttagatgtgggggatactatccggttgaataaagtcgctaacgatgaagtgagcgtgtatgtacataagaaaaagcgttatttagcgagcgtggggtttcaagggtataggaaaaccattcaaattaaagaagtggtttatagcgaaaaagaacgcactaaagaaattttagaawtgctwgaagaacagcgcaggaggcaaagttgggcgrtgttatggagc

SEQ ID NO: 34 - DNA (genomic), 1065 bp, Helicobacter pylori; double-stranded, circular
  misc_feature (B) LOCATION 1...1065
  hypothetical: NO
  anti-sense: NO
atggctgatattttaagccaagaagaaattgatgcgcttttagaagtcgttgatgagaatgtggatattcaaaatgtccaaaaaaaagatattatcccccaacgcagcgtaaccctctatgatttcaagcgccctaatcgtgtgagtaaggagcaattgcgctcttttaggagcatccatgataaaatggctaggaatctttccagtcaagtctcttctatcatgcgttctattgtagaaatccagcttcatagcgtggatcaaatgacttatggcgaatttttgatgagtttgcctagccctacgagttttaatgtcttttccatgaagcctatggggggaacgggggttttagagattaatcctagcatcgctttccctatgattgacagactattagggggtaaggggagcgcgtatgatcaaaacagggagtttagcgatattgaattgaatttattggatacgattttacgccaggtgatgcaaattttaaaagaagtgtggtcgcctgtggtggagatgtatcctaccattgacgctaaagaatccagcgcgaatgtggtccaaatcgtcgctcaaaatgaaatttctatcatggtggttttagagattatcattgggcatagccgtgggatgatgaatatttgttacccggtgatttccattgagagcattctttctaaaatggggagtagggatttcatgctttcagaaacgaactccaaaaagagccgtaataaggaattgcaagcactattgagcggggtgagcgtggatatgatggtgtttttgggcgcggtggaattgagtttgaaagaaatgttggatttagatgtgggggatactatccggttgaataaagtcgctaacgatgaagtgagcgtgtatgtacataagaaaaagcgttatttagcgagcgtggggtttcaagggtataggaaaaccattcaaattaaagaagtggtttatagcgaaaaagaacgcactaaagaaattttagaaatgctagaagaacagcgcagaggcaaagtgggcgatattatgaagatagaagaagagtga

SEQ ID NO: 35 - DNA (genomic), 1065 bp, Helicobacter pylori; double-stranded, circular
  misc_feature (B) LOCATION 1...1065
  hypothetical: NO
  anti-sense: NO
atcatggctgatattttaagccaagaagaaattgatgcgcttttagaagtcgttgatgagaatgtggatattcaaaatgtccaaaaaaaagatattatcccccaacgcagcgtaaccctctatgatttcaagcgccctaatcgtgtgagtaaggagcaattgcgctcttttaggagcatccatgataaaatggctaggaatctttccagtcaagtctcttctatcatgcgttctattgtagaaatccagcttcatagcgtggatcaaatgacttatggcgaatttttgatgagtttgcctagccctacgagttttaatgtcttttccatgaagcctatggggggaacgggggttttagagattaatcctagcatcgctttccctatgattgacagactattagggggtaaggggagcgcgtatgatcaaaacagggagtttagcgatattgaattgaatttattggatacgattttacgccaggtgatgcaaattttaaaagaagtgtggtcgcctgtggtggagatgtatcctaccattgacgctaaagaatccagcgcgaatgtggtccaaatcgtcgctcaaaatgaaatttctatcatggtggttttagagattatcattgggcatagccgtgggatgatgaatatttgttacccggtgatttccattgagagcattctttctaaaatggggagtagggatttcatgctttcagaaacgaactccaaaaagagccgtaataaggaattgcaagcactattgagcggggtgagcgtggatatgatggtgtttttgggcgcggtggaattgagtttgaaagaaatgttggatttagatgtgggggatactatccggttgaataaagtcgctaacgatgaagtgagcgtgtatgtacataagaaaaagcgttatttagcgagcgtggggtttcaagggtataggaaaaccattcaaattaaagaagtggtttatagcgaaaaagaacgcactaaagaaattttagaaatgctagaagaacagcgcagaggcaaagtgggcgatattatgaagatagaagaagag

SEQ ID NO: 36 - DNA (genomic), 600 bp, Helicobacter pylori; double-stranded, circular
  misc_feature (B) LOCATION 1...600
  hypothetical: NO
  anti-sense: NO
atgcttgtagggccaacaggcgtggggaaaacgacgactttggctaaattagccgcacgctattctagaatgctggctaaaaaatacaaggtgggcattatcactttagacaattatcgcattggggctttggagcaattgagttggtatgctaataaaatgaaaatgagtatagaagcggtgattgacgctaaggattttgctaaagaaattgaagctttggaatactgcgattttattttagtggatacgacagggcattcgcaatacgataaggaaaaaattgccggtttgaaagagtttatagatgggggttataatattgatgtatccttagtgctttcggttaccactaagtatgaagacatgaaagatatttatgattcttttggggtgttagggattgacactttaatctttacgaaattagatgagagtagggggttagggaatttgttttctttagtgcatgaaagccaaaagcctatcagttatctttctgtcggccaagaagtgcctatggatttgaaagtggctactaatgagtatttagtggattgcatgctagatggctttagtaaccctaataaggaacaagca

SEQ ID NO: 37 - DNA (genomic), 1368 bp, Helicobacter pylori; double-stranded, circular
  misc_feature (B) LOCATION 1...1368
  hypothetical: NO
  anti-sense: NO
gtgaaattctatacttatagtggggaaacggccgctgaagctttaaagatcgctcaaagccaccatggggtggatacgctggtgtttaaaacccaagaaatccgtaaaaaaacgctcacttcttctgggctttatgaaatcgttgtggcggttgaagaagaagaaaacaaaaaagcccccctcattccagagagtttgtatgatgaagaattgaatgaagaagacgtggtcatgcagctttcaagcaccgtagaagaaatgcgcaaactcgccggggtttcatctaaccagcgcaactatactttttcaaaaaataagactcttttagaaaaagacgctccattagaggatacgcctttagaggctaataagcaagacgccttgttgcaagccttaaaagatgaagccaaccataaaaaagaaagagaaaaaagagaagtcaaacaagaagaagaaattaaagatattaatgcgcaactaagtaaaatcagagacagcttaaaactcattcaaaacatgttttgggatgagaaaaaccctaattctgtcaatatccctcaagaatttgccgaaatttacaaactagccaaacaaagcggcatgaaatccagtcatttagatgaaatcatgcaattaagcctggaattgatgcctttacgcatgcgggaaaattccgtaacgatcaagcgctattttagagaagtgttgcgtaaaataatcctgtgtcgccctgaagatttgaatttgaggcaaaaacgcattttaatgcttgtagggccaacaggcgtggggaaaacgacgactttggctaaattagccgcacgctattctagaatgctggctaaaaaatacaaggtgggcattatcactttagacaattatcgcattggggctttggagcaattgagttggtatgctaataaaatgaaaatgagtatagaagcggtgattgacgctaaggattttgctaaagaaattgaagctttggaatactgcgattttattttagtggatacgacagggcattcgcaatacgataaggaaaaaattgccggtttgaaagagtttatagatgggggttataatattgatgtatccttagtgctttcggttaccactaagtatgaagacatgaaagatatttatgattcttttggggtgttagggattgacactttaatctttacgaaattagatgagagtagggggttagggaatttgttttctttagtgcatgaaagccaaaagcctatcagttatctttctgtcggccaagaagtgcctatggatttgaaagtggctactaatgagtatttagtggattgcatgctagatggctttagtaaccctaataaggaacaagcatga

SEQ ID NO: 38 - DNA (genomic), 1377 bp, Helicobacter pylori; double-stranded, circular
  misc_feature (B) LOCATION 1...1377
  hypothetical: NO
  anti-sense: NO
aagagaagagtggtgaaattctatacttatagtggggaaacggccgctgaagctttaaagatcgctcaaagccaccatggggtggatacgctggtgtttaaaacccaagaaatccgtaaaaaaacgctcacttcttctgggctttatgaaatcgttgtggcggttgaagaagaagaaaacaaaaaagcccccctcattccagagagtttgtatgatgaagaattgaatgaagaagacgtggtcatgcagctttcaagcaccgtagaagaaatgcgcaaactcgccggggtttcatctaaccagcgcaactatactttttcaaaaaataagactcttttagaaaaagacgctccattagaggatacgcctttagaggctaataagcaagacgccttgttgcaagccttaaaagatgaagccaaccataaaaaagaaagagaaaaaagagaagtcaaacaagaagaagaaattaaagatattaatgcgcaactaagtaaaatcagagacagcttaaaactcattcaaaacatgttttgggatgagaaaaaccctaattctgtcaatatccctcaagaatttgccgaaatttacaaactagccaaacaaagcggcatgaaatccagtcatttagatgaaatcatgcaattaagcctggaattgatgcctttacgcatgcgggaaaattccgtaacgatcaagcgctattttagagaagtgttgcgtaaaataatcctgtgtcgccctgaagatttgaatttgaggcaaaaacgcattttaatgcttgtagggccaacaggcgtggggaaaacgacgactttggctaaattagccgcacgctattctagaatgctggctaaaaaatacaaggtgggcattatcactttagacaattatcgcattggggctttggagcaattgagttggtatgctaataaaatgaaaatgagtatagaagcggtgattgacgctaaggattttgctaaagaaattgaagctttggaatactgcgattttattttagtggatacgacagggcattcgcaatacgataaggaaaaaattgccggtttgaaagagtttatagatgggggttataatattgatgtatccttagtgctttcggttaccactaagtatgaagacatgaaagatatttatgattcttttggggtgttagggattgacactttaatctttacgaaattagatgagagtagggggttagggaatttgttttctttagtgcatgaaagccaaaagcctatcagttatctttctgtcggccaagaagtgcctatggatttgaaagtggctactaatgagtatttagtggattgcatgctagatggctttagtaaccctaataaggaacaagca

SEQ ID NO: 39 - DNA (genomic), 834 bp, Helicobacter pylori; double-stranded, circular
  misc_feature (B) LOCATION 1...834
  hypothetical: NO
  anti-sense: NO
atgtatcgccatgtgttgaaagatttctccctagattttagcaaagaaagcgttcaagagctgtttaaccagctggctaaagacacttttttattgcttttgcctgttttaatcattttaatggtggtggcgtttttgtctaatgtcttgcaatttggctggctctttgcccctaaagtcattgagcctaaattttctaaaatcaaccctatcaatggcgtcaaaaaccttttttctttaaaaaagatccttgatgggagtttgatcactttaaaagtttttttagctttttttctggggtttttcatcttttccttatttttaggggaattaaaccatgcggctcttttgaatttgcaaggccagttgttgtggtttaaaagcaaggcgttatggctcatttcttcgcttttatttttattttttgtcttggcttttgtggatttaatcatcaaacgccgccaatacactaactctttaaaaatgactaaacaagaagttaaggacgaatacaaacagcaagaaggaaacccagaaatcaaagccaaaatccgccagatgatggtaaaaaacgccacgaataaaatgatgcaagaaatccccaaatccaatgtcgtggtgactaaccctacccattatgccgtcgctctcaaatttgatgaagaacaccctgtgcctgtggtagtggctaaaggcacggattatttagccattaggattaagggtatcgccagagagcatgacatagaaattatagaaaataaaacgctcgctagagagctttatagagacgtgaaattgaacgccaccataccagaagaattgtttgagcgg

SEQ ID NO: 40 - DNA (genomic), 1077 bp, Helicobacter pylori; double-stranded, circular
  misc_feature (B) LOCATION 1...1077
  hypothetical: NO
  anti-sense: NO
atggccgaagaagaaaagaccgaactccctagcgcgaaaaaaatccaaaaagccagagaagaaggcaatgtgcctaaaagcatggaagtggtggggtttttagggttattggctgggctaatgagtatttttgttttttttatatggtgggtggatggctttagcgagatgtatcgccatgtgttgaaagatttctccctagattttagcaaagaaagcgttcaagagctgtttaaccagctggctaaagacacttttttattgcttttgcctgttttaatcattttaatggtggtggcgtttttgtctaatgtcttgcaatttggctggctctttgcccctaaagtcattgagcctaaattttctaaaatcaaccctatcaatggcgtcaaaaaccttttttctttaaaaaagatccttgatgggagtttgatcactttaaaagtttttttagctttttttctggggtttttcatcttttccttatttttaggggaattaaaccatgcggctcttttgaatttgcaaggccagttgttgtggtttaaaagcaaggcgttatggctcatttcttcgcttttatttttattttttgtcttggcttttgtggatttaatcatcaaacgccgccaatacactaactctttaaaaatgactaaacaagaagttaaggacgaatacaaacagcaagaaggaaacccagaaatcaaagccaaaatccgccagatgatggtaaaaaacgccacgaataaaatgatgcaagaaatccccaaatccaatgtcgtggtgactaaccctacccattatgccgtcgctctcaaatttgatgaagaacaccctgtgcctgtggtagtggctaaaggcacggattatttagccattaggattaagggtatcgccagagagcatgacatagaaattatagaaaataaaacgctcgctagagagctttatagagacgtgaaattgaacgccaccataccagaagaattgtttgaagcggtagcgattgtcttcgctcaagtggctaaattagagcaagaacgccaaaaacaaaagatcattaaacctctttaa

SEQ ID NO: 41 - DNA (genomic), 1086 bp, Helicobacter pylori; double-stranded, circular
  misc_feature (B) LOCATION 1...1086
  hypothetical: NO
  anti-sense: NO
aagagggatcaaatggccgaagaagaaaagaccgaactccctagcgcgaaaaaaatccaaaaagccagagaagaaggcaatgtgcctaaaagcatggaagtggtggggtttttagggttattggctgggctaatgagtatttttgttttttttatatggtgggtggatggctttagcgagatgtatcgccatgtgttgaaagatttctccctagattttagcaaagaaagcgttcaagagctgtttaaccagctggctaaagacacttttttattgcttttgcctgttttaatcattttaatggtggtggcgtttttgtctaatgtcttgcaatttggctggctctttgcccctaaagtcattgagcctaaattttctaaaatcaaccctatcaatggcgtcaaaaaccttttttctttaaaaaagatccttgatgggagtttgatcactttaaaagtttttttagctttttttctggggtttttcatcttttccttatttttaggggaattaaaccatgcggctcttttgaatttgcaaggccagttgttgtggtttaaaagcaaggcgttatggctcatttcttcgcttttatttttattttttgtcttggcttttgtggatttaatcatcaaacgccgccaatacactaactctttaaaaatgactaaacaagaagttaaggacgaatacaaacagcaagaaggaaacccagaaatcaaagccaaaatccgccagatgatggtaaaaaacgccacgaataaaatgatgcaagaaatccccaaatccaatgtcgtggtgactaaccctacccattatgccgtcgctctcaaatttgatgaagaacaccctgtgcctgtggtagtggctaaaggcacggattatttagccattaggattaagggtatcgccagagagcatgacatagaaattatagaaaataaaacgctcgctagagagctttatagagacgtgaaattgaacgccaccataccagaagaattgtttgaagcggtagcgattgtcttcgctcaagtggctaaattagagcaagaacgccaaaaacaaaagatcattaaacctctt

SEQ ID NO: 42 - DNA (genomic), 168 bp, Helicobacter pylori; double-stranded, circular
  misc_feature (B) LOCATION 1...168
  hypothetical: NO
  anti-sense: NO
gcatggaaaaatttggaggtttttatggtcaatgaagttcaagggattgggattcccacatctcatgcaagcgttcaaacaacccctacaaaagagatcagtcgcacaaacactataaacactgttgatgaatctaagaccacgaggaaacctgagtctaagctacct

SEQ ID NO: 43 - DNA (genomic), 360 bp, Helicobacter pylori; double-stranded, circular
  misc_feature (B) LOCATION 1...360
  hypothetical: NO
  anti-sense: NO
atggtcaatgaagttcaagggattgggattcccacatctcatgcaagcgttcaaacaacccctacaaaagagatcagtcgcacaaacactataaacactgttgatgaatctaagacaacgatagaccctgatcaatacaaacccaagctagaattattgagcgagcgtttgaatgaagaaatgaaacgcattggcacggatattaatttcagttataacgatacgattaaagggttagtggtttcagtcaaagacgctaatggggataaggtgataagagaaataccctctaaagaagctgtggagcttatgcaaagaatgcgcgatgtgataggcattatctttgataaaagaggctaa

SEQ ID NO: 44 - DNA (genomic), 378 bp, Helicobacter pylori; double-stranded, circular
  misc_feature (B) LOCATION 1...378
  hypothetical: NO
  anti-sense: NO
atgcaatacgctaacgcttatcaagcctaccagcataaccgagtgagtgtggaatccccggcaaaactcattgaaatgctttatgaagggattttaagattttcttcgcaagccaaacgctgtattgagaatgaagacattgaaaagaagatctattatattaatagggttacggatattttcacggagttgttgaatattttagactatgaaaaaggggggraagtggcggtgtatcttacaggcttatacacccatcaaatcaaagttttaacgcaagccaatgtggaaaatgacgcgagtaagattgatttggtgttgaatgtggctagggggttgttagaggcatggagggaaatccattcagatgaactcgcc

SEQ ID NO: 45 - DNA (genomic), 381 bp, Helicobacter pylori; double-stranded, circular
  misc_feature (B) LOCATION 1...381
  hypothetical: NO
  anti-sense: NO
atgcaatacgctaacgcttatcaagcctaccagcataaccgagtgagtgtggaatccccggcaaaactcattgaaatgctttatgaagggattttaagattttcttcgcaagccaaacgctgtattgagaatgaagacattgaaaagaagatctattatattaatagggttacggatattttcacggagttgttgaatattttagactatgaaaaaggggggaaagtggcggtgtatcttacaggcttatacacccatcaaatcaaagttttaacgcaagccaatgtggaaaatgacgcgagtaagattgatttggtgttgaatgtggctagggggttgttagaggcatggagggaaatccattcagatgaactcgcctga

SEQ ID NO: 46 - DNA (genomic), 387 bp, Helicobacter pylori; double-stranded, circular
  misc_feature (B) LOCATION 1...387
  hypothetical: NO
  anti-sense: NO
aggaacattatgcaatacgctaacgcttatcaagcctaccagcataaccgagtgagtgtggaatccccggcaaaactcattgaaatgctttatgaagggattttaagattttcttcgcaagccaaacgctgtattgagaatgaagacattgaaaagaagatctattatattaatagggttacggatattttcacggagttgttgaatattttagactatgaaaaaggggggaaagtggcggtgtatcttacaggcttatacacccatcaaatcaaagttttaacgcaagccaatgtggaaaatgacgcgagtaagattgatttggtgttgaatgtggctagggggttgttagaggcatggagggaaatccattcagatgaactcgcc

SEQ ID NO: 47 - DNA (genomic), 258 bp, Helicobacter pylori; double-stranded, circular
  misc_feature (B) LOCATION 1...258
  hypothetical: NO
  anti-sense: NO
aacatggcaataggttcattaagctcattagggcttggcagtaaggttttgaattacgatgtgattgacaagcttaaggacgctgatgaaaaagctttaatcgccccactagacaaggaaatggagcaagatgttgaaacacaaaaagcccttttggaaattaaaacgctcctttcatctctaaaaggcccggttaaaacgctctcagattattcccacttatatcagcccgaaaaagcaatgttacaggcgatgcgt

SEQ ID NO: 48 - DNA (genomic), 441 bp, Helicobacter pylori; double-stranded, circular
  misc_feature (B) LOCATION 1...441
  hypothetical: NO
  anti-sense: NO
aacgctctcagattattcccacttatatcagcccgaaaaagcaatgttacaggcgatgcgttgagcgcgagcgtgggggctggcgtgcctataaaagatattaaggtggatgtgcaaaatttagcgcaaggcgatattaacgaattaggggcgaaattttcttcaagagatgatatttttagccaagtggataccacactcaagttttacacgcaaaacaaggattacgccgttgatattaaagcaggaatgactttaggcgatgtggctcaaagcatcacggacgctaccaatggcgaagtgatgggcattgtgatgaaaacaggagggaatgacccctaccaattaatggtgaataccaaaaacaccggcgaagacaaccgggtctattttggctcacacctccaatccacgctcactaacaaaaacgccctttcttta

SEQ ID NO: 49 - DNA (genomic), 438 bp, Helicobacter pylori; double-stranded, circular
  misc_feature (B) LOCATION 1...438
  hypothetical: NO
  anti-sense: NO
aacgctctcagattattcccacttatatcagcccgaaaaagcaatgttacaggcgatgcgttgagcgcgagcgtgggggctggcgtgcctataaaagatattaaggtggatgtgcaaaatttagcgcaaggcgatattaacgaattaggggcgaaattttcttcaagagatgatatttttagccaagtggataccacactcaagttttacacgcaaaacaaggattacgccgttgatattaaagcaggaatgactttaggcgatgtggctcaaagcatcacggacgctaccaatggcgaagtgatgggcattgtgatgaaaacaggagggaatgacccctaccaattaatggtgaataccaaaaacaccggcgaagacaaccgggtctattttggctcacacctccaatccacgctcactaacaaaaacgccctttct

SEQ ID NO: 50 - DNA (genomic), 912 bp, Helicobacter pylori; double-stranded, circular
  misc_feature (B) LOCATION 1...912
  hypothetical: NO
  anti-sense: NO
cttgtgatcaattctaaaaccggactgctcaccattaagggcgaggacgctttaggcaaggctagtttgaaggatttgggtttgagcgctggcatggtgcaatcttatgaagcttcgcaagacacgctttttatgtctaagaatttgcaaaaagcgagcgattcgcaattcacttacaatggggtgagcatcacgcgccccactaatgaggtcaatgatgtgatcagcggggttaatatcactttagagcaaaccacagagcctaataagcctgccattatcagcgtgagcagagacaatcaagccattatagacagccttaaagaatttgtcaaagcctataatgagcttatccctaaactagacgaagacacgcgctatgacgctgacactaaaatcgccgggatttttaacggcgtgggcgatattcgtgccattagatcctctcttaataatgtgttttcttatagcgtgcatacggataatggggtagaaagcttgatgaaatacgggcttagtttagacgataagggcgtgatgagtttggatgaagctaaattatcaagtgcattaaattctaaccctaaagcgactcaagattttttctatgggagcgatagcaaggatatggggggcagagaaatccaccaagagggcattttttctaaattcaatcaagtcatcgctaacctcatagatggagggaacgctaaattaaagatttatgaagattccctagacagagacgctaaaagcctgaccaaagacaaagaaaacgctcaagagcttttaaaaacccgctataacatcatggcggagcgctttgccgcttatgatagtcaaatctctaaagccaatcaaaaattcaattccgtgcaaatgatgatcgatcaagcagcggctaaaaagaat

SEQ ID NO: 51 - DNA (genomic), 2058 bp, Helicobacter pylori; double-stranded, circular
  misc_feature (B) LOCATION 1...2058
  hypothetical: NO
  anti-sense: NO
atggcaataggttcattaagctcattagggcttggcagtaaggttttgaattacgatgtgattgacaagcttaaggacgctgatgaaaaagctttaatcgccccactagacaagaaaatggagcaaaatgttgaaaaacaaaaagcccttgtggaaattaaaacgctcctttcatctctaaaaggcccggttaaaacgctctcagattattccacttatatcagccgaaaaagcaatgttacaggcgatgcgttgagcgcgagcgtgggggctggcgtgcctatccaagatattaaggtggatgtgcaaaatttagcgcaaggcgatattaacgaattaggggcgaaattttcttcaagagatgatatttttagccaagtggataccacactcaagttttacacgcaaaacaaggattacgccgttgatattaaagcaggaatgactttaggcgatgtggctcaaagcatcacggacgctaccaatggcgaagtgatgggcattgtgatgaaaacaggagggaatgacccctaccaattaatggtgaataccaaaaacaccggcgaagacaaccgggtctattttggctcacacctccaatccacgctcactaacaaaaacgccctttctttaggacttgatggagccgggaaaagcgaattgagtttgaatttaaagggggctgatgggagcatgcatgaagtccctatcatgctagagctccctgaaagcgcttctatcaaacaaaaaaacgcagcgatccaaaaggctatggagcaggctttagaaaacgaccctaattttaaagacttgatcgctaatggggatatttccatagacactcttcatgggggggaatctttaatcattaatgacaggcgtggaggaaacattgaagttaaagggagtaaggctaaagagcttgggttttcgcaaaccaccacccaagaaagcgatttgttaaaaagcgctcgcacgataaaagagggtaaattagaaggggtggttagtttgaatggccaaaaattggatttgagcgccttaaccaaagagagcaacaccagcgaagaaaacacagacgctatcattcaagcgatcaacgctaaagaaggcttgaatgcgtttaagaacgccgaaggcaagcttgtgatcaattctaaaaccggaatgctcaccattaagggcgaggacgctttaggcaaggctagtttgaaggatttgggtttgagcgctggcatggtgcaatcttatgaagcttcgcaagacacgctttttatgtctaagaatttgcaaaaagcgagcgattcgcaattcacttacaatggggtgagcatcacgcgccccactaatgaggtcaatgatgtgatcagcggggttaatatcactttagagcaaaccacagagcctaataagcctgccattatcagcgtgagcagagacaatcaagccattatagacagccttaaagaatttgtcaaagcctataatgagcttatccctaaactagacgaagacacgcgctatgacgctgacactaaaatcgccgggatttttaacggcgtgggcgatattcgtgccattagatcctctcttaataatgtgttttcttatagcgtgcatacggataatggggtagaaagcttgatgaaatacgggcttagtttagacgataagggcgtgatgagtttggatgaagctaaattatcaagtgcattaaattctaaccctaaagcgactcaagattttttctatgggagcgatagcaaggatatggggggcagagaaatccaccaagagggcattttttctaaattcaatcaagtcatcgctaacctcatagatggagggaacgctaaattaaagatttatgaagattccctagacagagacgctaaaagcctgaccaaagacaaagaaaacgctcaagagcttttaaaaacccgctataacatcatggcggagcgctttgccgcttatgatagtcaaatctctaaagccaatcaaaaattcaattccgtgcaaatgatgatcgatcaagcagcggctaaaaagaattaa

SEQ ID NO: 52 - DNA (genomic), 267 bp, Helicobacter pylori; double-stranded, circular
  misc_feature (B) LOCATION 1...267
  hypothetical: NO
  anti-sense: NO
atggaatcacaactcatgaaactcgccattgaaacttataaaatcactttgatgatttctttaccggtattattagcgggcttagtggtggggctgttagtcagtatttttcaagcgaccacccaaatcaatgaaatgactttgtcttttgtgcctaagattttagccgtgattggggtgctgattttaaccatgccgtggatgacgaacatgcttttagattacaccaaaaccttaatcaagctcattcctaaaatcataggctag

SEQ ID NO: 53 - DNA (genomic), 264 bp, Helicobacter pylori; double-stranded, circular
  misc_feature (B) LOCATION 1...264
  hypothetical: NO
  anti-sense: NO
atggaatcacaactcatgaaactcgccattgaaacttataaaatcactttgatgatttctttaccggtattattagcgggcttagtggtggggctgttagtcagtatttttcaagcgaccacccaaatcaatgaaatgactttgtcttttgtgcctaagattttagccgtgattggggtgctgattttaaccatgccgtggatgacgaacatgcttttagattacaccaaaaccttaatcaagctcattcctaaaatcataggc

SEQ ID NO: 54 - DNA (genomic), 279 bp, Helicobacter pylori; double-stranded, circular
  misc_feature (B) LOCATION 1...279
  hypothetical: NO
  anti-sense: NO
gataaaaggaatatcatggaatcacaactcatgaaactcgccattgaaacttataaaatcactttgatgatttctttaccggtattattagcgggcttagtggtggggctgttagtcagtatttttcaagcgaccacccaaatcaatgaaatgactttgtcttttgtgcctaagattttagccgtgattggggtgctgattttaaccatgccgtggatgacgaacatgcttttagattacaccaaaaccttaatcaagctcattcctaaaatcataggc

SEQ ID NO: 55 - DNA (genomic), 273 bp, Helicobacter pylori; double-stranded, circular
  misc_feature (B) LOCATION 1...273
  hypothetical: NO
  anti-sense: NO
tggggtgctttaggggcgttcagtaatggcaggactttagcgctcgctcaagtggctttagcgaatttcgctaacgatgcgggcttacaggctttgggggacaatgtcttttctcaaaccggaaactctgggcaagccttaatcggtgcggctaatacggggcgtaggggttcaatttcaggatccaaactagagtctagtaatgtggatttgagccggagtttaacgaatttgattgtggttcaaagggggtttaagcgaactctaaagcgg

SEQ ID NO: 56 - DNA (genomic), 666 bp, Helicobacter pylori; double-stranded, circular
  misc_feature (B) LOCATION 1...666
  hypothetical: NO
  anti-sense: NO
atgcgcatagagtcctataggagtgagggggcggaatggaattttagagtgatcgtgcctgagcctggggaattagtaggggggtcagcggctaggcctaatgtgtttgaagggggccgtttgcattttaataacgacggatcgcttgcgggcatgaacccgcctcttttgcaatttgaccctaaaaatggcgctgatgccccccaacgcatcaatttagcttttggttcctcagggagctttgacggattgacaagcgtggataagatttctgaaacttatgcgattgagcaaaacggctatcaagcgggcgatttgatggatgtccgctttgattctgatggggtgcttttaggggcgttcagtaatggcaggactttagcgctcgctcaagtggctttagcgaatttcgctaacgatgcgggcttacaggctttgggaggcaatgtcttttctcaaaccggaaactctgggcaagccttaatcggtgcggctaatacggggcgtaggggttcaatttcaggatccaaactagagtctagtaatgtggatttgagccggagtttaacgaatttgattgtggttcaaagggggtttcaagcgaactctaaagcggtaaccacatccgatcaaatccttaacaccctattgaatctcaagcaataa

SEQ ID NO: 57 - DNA (genomic), 1029 bp, Helicobacter pylori; double-stranded, circular
  misc_feature (B) LOCATION 1...1029
  hypothetical: NO
  anti-sense: NO
ataccactgggctttaagtattctagggcttcttttgtggatatgctctctcaagtcaaactcatcgctaccgacccctataaaaacgggttggcggggcagaatgacttttctgtggggcttggggtaggcgtggatgcgacgactaaaatcttttcgcaaggcaatatccaaaacacggatgtcaaaaccgatctagcgattcaaggcgatggcttttttatcattagccctgatagggggatcacgcgcaatttcaccagagcatggggagtttcttttggactcgcaagggagtttggttaccaccggtgggcttgtggtgcaaggtcggtgagaaacaggagcgataccggtaataaagggagcgatacggacgctttaaaagtggataataccggccctttagaaaacattaggattgatccaggaatggtgatgcctgctaaaacgagtaaccgcatttctatgagggcgaatataaacgctggaaagcatgcggatcagacagcggcggtattcgctttagattcttcagccaaaaccccttcagatggcattaatccagtgtatgattcaggcacgaatctagctcacgtccccgaaaacatgggatctttatacaatgaagatggcgacgctcttttattgattgaaaaccatgggatttgggtgagctataagagtgcgaaaatggttaaagacatcctcccttctgcagaaaacagcacgcttgagttgaatggggttaagatttctttcacgaacgattcagcggtgagcaggacttcaagcttagtggcggctaaaaatgcgatcaatgcggttaaaagccaaacaggcattgaagcttatttggacggcaagcaattgcgtttggaaaacaccaacgaattagacggcgatgaaaagcttaaaaacattgtggtcactcaagccgggaccggagcgttcgctaactttttagacggcgataaagatgtaacggctttcaaatacagttatacgcattctattagccctaatgcg

SEQ ID NO: 58 - DNA (genomic), 2157 bp, Helicobacter pylori; double-stranded, circular
  misc_feature (B) LOCATION 1...2157
  hypothetical: NO
  anti-sense: NO
atgcttaggtctttatggtctggtgtcaatgggatgcaagcccaccaaatcgctttggatattgagagtaacaatattgcgaacgtgaataccactgggtttaagtattctagggcttcttttgtggatatgctctctcaagtcaaactcatcgctaccgcaccctataaaaacgggttggcggggcagaatgacttttctgtggggcttggggtaggcgtggatgcgacgactaaaatcttttcgcaaggcaatatccaaaacacggatgtcaaaaccgatctagcgattcaaggcgatggcttttttatcattagccctgatagggggatcacgcgcaatttcaccagagatggggagtttctttttgactcgcaagggagtttggttaccaccggtgggcttgtggtgcaagggtgggtgagaaacgggagcgataccggtaataaagggagcgatacggacgctttaaaagtggataataccggccctttagaaaacattaggattgatccaggaatggtgatgcctgctagagcgagtaaccgcatttctatgagggcgaatttaaacgctggaaggcatgcggatcaaacagcggcggtattcgctttagattcttcagccaaaaccccttcagatggcattaatccagtgtatgattcaggcacgaatctagctcaagtcgccgaagacatgggatctttatacaatgaagatggcgacgctcttttattgaatgaaaaccaagggatttgggtgagctataagagtgcgaaaatggttaaagacatcctcccttctgcagaaaacagcacgcttgagttgaatggggttaagatttctttcacgaacgattcagcggtgagcaggacttcaagcttagtggcggctaaaaatgcgatcaatgcggttaaaagccaaacaggcattgaagcttatttggacggcaagcaattgcgtttggaaaacaccaacgaattagacggcgatgaaaagcttaaaaacattgtggtcactcaagccgggaccggagcgttcgctaactttttagacggcgataaagatgtaacggctttcaaatacagttatacgcattctattagccctaatgcggatattgggcagtttaggaccactgaagacttgcgcgccttaatccagcatgacgctaatatcgttaaagatcctagtttagcggacaattatcaagattcagccgcttctataggggttacaatcaaccaatacggcatgtttgaaatcaacaataaagataataaaaatgtcattaaagaaaatctcaatatctttgtgagtgggtattcttcagacagcgtaacgaacaatgttttgtttaaaaacgccatgaaaggtcttaataccgcttctttaattgaagggggagcgtcagctagcagttctaaattcacccacgctacccatgcgacaagcattgatgtgatagacagtttaggcactaaacacgccatgcgcattgagttttataggagtgggggggcggaatggaattttagagtgatcgtgcctgagcctggggaattagtaggggggtcagcggctaggcctaatgtgtttgaagggggccgtttgcattttaataacgacggatcgcttgcgggcatgaacccgcctcttttgcaatttgaccctaaaaatggcgctgatgccccccaacgcatcaatttagcttttggttcctcagggagctttgacggattgacaagcgtggataagatttctgaaacttatgcgattgagcaaaacggctatcaagcgggcgatttgatggatgtccgctttgattctgatggggtgcttttaggggcgttcagtaatggcaggactttagcgctcgctcaagtggctttagcgaatttcgctaacgatgcgggcttacaggctttgggaggcaatgtcttttctcaaaccggaaactctgggcaagccttaatcggtgcggctaatacggggcgtaggggttcaatttcaggatccaaactagagtctagtaatgtggatttgagccggagtttaacgaatttgattgtggttcaaagggggtttcaagcgaactctaaagcggtaaccacatccgatcaaatccttaacaccctattgaatctcaagcaataa

SEQ ID NO: 59 - DNA (genomic), 1185 bp, Helicobacter pylori; double-stranded, circular
  misc_feature (B) LOCATION 1...1185
  hypothetical: NO
  anti-sense: NO
ttgatgtggctcaaaacgcttacacttcaaacgctcaataccgacaaagccttgcaagaattttctaaaacgatggaggcgtttaaaaccaaactcatccaatccgctaacgatgtgcattcagagacttctcgcgccgctatcgctaacgatttagaacgcttaaaagagcatatgataaatgtcgctaatacctccatagggggggaatttttatttggaggcagtaaggtggatagaccccccattgatagtaatgggaaataccatggcaatggcgaagatttaaacgcgcttattagctctgataaccttgtgccttataatatcagcgggcaagatttgtttttaggcaccgataaagacaaacacaaactcattaccaccaacattaaattactcaatcaaaacaagctccamcctgatgtgatggacgctttagagcattcttcattgcctgaagaagttttcattaaacccagcgataccttgcgagaactcatcggcgataacgataaaaaccccaccaatgaccctaaagagtttttttatttgcaaggcattaggcctgatggctctagttttaaagaaaaattcgcgttggataaagcctatcaaaaccaagaaagcgcgactaaagtgagcgatttgttggataaaatcgggcatgcttacgggaacacttcgcaaaataaagtcgtggatgtgagtttgaacaattgggggcaaattgagattaaaaacctaacccccggcagtgaaaatttggattttcatttgatttctagcgatggggattttgacgatttagacgccttgcgttcgagcggtaaaagggttactgaatatgtcaaaagcgcgtttgtaacggataggagtttgagccaagttaaagcggtgcctaacatgtataaccctaaagtgcttgaaatccctagcgtgtttgtgactaaagacaatgttttagctaacaaaaacaccaagttgagcgagatttttggmgataaggtggaaactttaaaaatcaacgccagccgtttgggcgatgaaagcgctattaaaatcccaaacctccctattaatttggatattcccattcttttagatgtgaaaaactctacgattaaagatttgaaagacgcgattaaagaacgcttcaataatgaaggtggatgtggaaattga

SEQ ID NO: 60 - DNA (genomic), 2487 bp, Helicobacter pylori; double-stranded, circular
  misc_feature (B) LOCATION 1...2487
  hypothetical: NO
  anti-sense: NO
atgcgcgttacctttggctccaaatacaaccaaatgaatcactaccaaaacgctttacaaaataaaatcaacgacgctaacacgcagatcgcttcagggctaaaaatccgttatggttatcaaaacagcgacattaacaaccagaatttaaaattccaatacgaagaaaacaccttagatcaaggcattgatgtggctcaaaacgcttacacttcaacgctcaataccgacaaagccttgcaagaattttctaaaacgatggaggcgtttaaaaccaaactcatccaatccgctaacgatgtgcattcagagacttctcgcgccgctatcgctaacgatttagaacgcttaaaagagcatatgataaatgtcgctaatacctccatagggggggaatttttatttggaggcagtaaggtggatagaccccccattgatagtaatgggaaataccatggcaatggcgaagatttaaacgcgcttattagctctgataaccttgtgccttataatatcagcgggcaagatttgtttttaggcaccgataaagacaaacacaaactcattaccaccaacattaaattactcaatcaaaacaagctccaccctgatgtgatggacgctttagagcattcttcattgcctgaagaagttttcattaaacccagcgataccttgcgagaactcatcggcgataacgataaaaaccccaccaatgaccctaaagagtttttttatttgcaaggcattaggcctgatggctctagttttaaagaaaaattcgcgttggataaagcctatcaaaaccaagaaagcgcgactaaagtgagcgatttgttggataaaatcgggcatgcttacgggaacacttcgcaaaataaagtcgtggatgtgagtttgaacaattgggggcaaattgagattaaaaacctaacccccggcagtgaaaatttggattttcatttgatttctagcgatggggattttgacgatttagacgccttgcgttcgagcggtaaaagggttactgaatatgtcaaaagcgcgtttgtaacggataggagtttgagccaagttaaagcggtgcctaacatgtataaccctaaagtgcttgaaatccctagcgtgtttgtgactaaagacaatgttttagctaacaaaaacaccaagttgagcgagatttttggcgataaggtggaaactttaaaaatcaacgccagccgtttgggcgatgaaagcgctattaaaatcccaaacctccctattaatttggatattcccattcttttagatgtgaaaaactctacgattaaagatttgaaagacgcgattaaagaacgcttcaataatgaagtggatgtggaaattgaaacgaacgggcgtttgaggatcattgacaattcttctaaagaatcgcctatttcttttgccttaagcaccctggatcaaaaagggctagaagtggccggtatccccactaataacgcgagcgaataccaaaaaacctatttcaataaagaaggggccaaattagaaagcaatgttgcccaaaccgctcaaaatgatgcggctaatggctctactaaactgagtgaagtctctaaggggagtttggaaaatagcgtttttaacatgaaattaaacgatgtgaatggttcgtttttagaagcgcaaataaacttggataataatggggcttttttgagtttgcctaatggcgttaaaatcccgctttatgaccccacaaccgctgatattcaagcgtctaaacccaatgaagtcacttacaggcagctcatggatgcgatgagtatcgcgctcaattacagcaacactgatcctgcaatctaccaacaaatcagcgataaccctacttcaaaagaaagcaaggagcgattcattgaattgttaaaacaagctaaagacaacctttctattaatttgaatgaagagggtaaagtcattatccaagacaacatgcattcaaacaccaaaatgcagttcatgctttttgataaagacgcgaatgatttttctcaaaacgccttacacagcgacaaaccaagccttaaattaaacgctaataacgccctaattattgacaagccaagcgtgaatttttttgatcaattagaaaatattatcacttctgtaagaaaagggatttatcgcccagacgctttaggggatacttattctagcgacatgcgtaatttaggcattcaaaacggcatcacccttatagatcacttgagcgatcacatagaaaaaatgatcgctaaaaacggcgctcatggtaaggcatttgaaaacatcatcaggcgtaatgaagttttaaaaacacaagttcaaagcattcgtggggaaacgaccggcacggatatggcagaaacttataacaagttttccaatctcactaacaactataacgccgttttggcttccacgaacaaaatcaataatctgtctttaacgaagtatttatag

SEQ ID NO: 61 - DNA (genomic), 2637 bp, Helicobacter pylori; double-stranded, circular
  misc_feature (B) LOCATION 1...2637
  hypothetical: NO
  anti-sense: NO
attcatattaaacgaatttttttacttaaaaacaccccatttaacccgccattattcctccacattgccccactcaaaccattcatgattattattaacttgttttggaatacttttagcttgtttgttaaaaaaaccaataaggatttgatcatgcgcgttacctttggctccaaatacaaccaaatgaatcactaccaaaacgctttacaaaataaaatcaacgacgctaacacgcagatcgcttcagggctaaaaatccgttatggttatcaaaacagcgacattaacaaccagaatttaaaattccaatacgaagaaaacaccttagatcaaggcattgatgtggctcaaaacgcttacacttcaacgctcaataccgacaaagccttgcaagaattttctaaaacgatggaggcgtttaaaaccaaactcatccaatccgctaacgatgtgcattcagagacttctcgcgccgctatcgctaacgatttagaacgcttaaaagagcatatgataaatgtcgctaatacctccatagggggggaatttttatttggaggcagtaaggtggatagaccccccattgatagtaatgggaaataccatggcaatggcgaagatttaaacgcgcttattagctctgataaccttgtgccttataatatcagcgggcaagatttgtttttaggcaccgataaagacaaacacaaactcattaccaccaacattaaattactcaatcaaaacaagctccaccctgatgtgatggacgctttagagcattcttcattgcctgaagaagttttcattaaacccagcgataccttgcgagaactcatcggcgataacgataaaaaccccaccaatgaccctaaagagtttttttatttgcaaggcattaggcctgatggctctagttttaaagaaaaattcgcgttggataaagcctatcaaaaccaagaaagcgcgactaaagtgagcgatttgttggataaaatcgggcatgcttacgggaacacttcgcaaaataaagtcgtggatgtgagtttgaacaattgggggcaaattgagattaaaaacctaacccccggcagtgaaaatttggattttcatttgatttctagcgatggggattttgacgatttagacgccttgcgttcgagcggtaaaagggttactgaatatgtcaaaagcgcgtttgtaacggataggagtttgagccaagttaaagcggtgcctaacatgtataaccctaaagtgcttgaaatccctagcgtgtttgtgactaaagacaatgttttagctaacaaaaacaccaagttgagcgagatttttggcgataaggtggaaactttaaaaatcaacgccagccgtttgggcgatgaaagcgctattaaaatcccaaacctccctattaatttggatattcccattcttttagatgtgaaaaactctacgattaaagatttgaaagacgcgattaaagaacgcttcaataatgaagtggatgtggaaattgaaacgaacgggcgtttgaggatcattgacaattcttctaaagaatcgcctatttcttttgccttaagcaccctggatcaaaaagggctagaagtggccggtatccccactaataacgcgagcgaataccaaaaaacctatttcaataaagaaggggccaaattagaaagcaatgttgcccaaaccgctcaaaatgatgcggctaatggctctactaaactgagtgaagtctctaaggggagtttggaaaatagcgtttttaacatgaaattaaacgatgtgaatggttcgtttttagaagcgcaaataaacttggataataatggggcttttttgagtttgcctaatggcgttaaaatcccgctttatgaccccacaaccgctgatattcaagcgtctaaacccaatgaagtcacttacaggcagctcatggatgcgatgagtatcgcgctcaattacagcaacactgatcctgcaatctaccaacaaatcagcgataaccctacttcaaaagaaagcaaggagcgattcattgaattgttaaaacaagctaaagacaacctttctattaatttgaatgaagagggtaaagtcattatccaagacaacatgcattcaaacaccaaaatgcagttcatgctttttgataaagacgcgaatgatttttctcaaaacgccttacacagcgacaaaccaagccttaaattaaacgctaataacgccctaattattgacaagccaagcgtgaatttttttgatcaattagaaaatattatcacttctgtaagaaaagggatttatcgcccagacgctttaggggatacttattctagcgacatgcgtaatttaggcattcaaaacggcatcacccttatagatcacttgagcgatcacatagaaaaaatgatcgctaaaaacggcgctcatggtaaggcatttgaaaacatcatcaggcgtaatgaagttttaaaaacacaagttcaaagcattcgtggggaaacgaccggcacggatatggcagaaacttataacaagttttccaatctcactaacaactataacgccgttttggcttccacgaacaaaatcaataatctgtctttaacgaagtattta

SEQ ID NO: 62 - DNA (genomic), 2412 bp, Helicobacter pylori; double-stranded, circular
  misc_feature (B) LOCATION 1...2412
  hypothetical: NO
  anti-sense: NO
ttgtggcttaagtcaaaattctttcttttaatgggcgtgggtttgctctcccattcactcaacgctttaagcctcacgctcacgcaaggcaaagaagaaggagaagatttttcggttttaaccttacgaaacgataaggcgttttcttgctcttatgctaatgaaaaaccgccgagcgggattgaagcgtctttatctattatacacgctaaacgccccatagaatgcgtgatagattctattcctaaagagggctttacccctttagaaaacgcttttttcaatatcacctattccatgcgccagcaacaattcattttacacatcaaacccaaagtgatgcgaaggctcacccttttttcttttgatagggattataaaaaagcgatccccctttttgtggaaaacgacgctaaagccaagatgtggcaaatcataggctatgatcaaaaaatcccttttttgagcgaaaaagacaacgctcaaaaaggcttgaatttccccattatcattaaagacgctcaaacccctatcattcaagagctggatgtgaataacaaacccctactcaccacaaagggctatgatttaaacgcctatttagaagctaaaaaacaaatggattcgcaagcctattttgacgccttacgcacgatcagccgcgcgtttaaaaattaccctcaaacgatttttaaaaaagatctgtatttattagaaattatcgcattaggtaaattaggcattaaaaaatccttactcatagatattggcacccaatggattaaaaattacccgactgatcctaatatccctgaagcgctatactatgtcgccaaagctttagatgaaaacaacaattacaaacaagccgtgcgctattacaaacgaatccttttagaatacaaaaactcccgctacgctcccttagcccaaatgcgtttagccattgaagcggctgaaggctctgatttgagcaacgctaatatgctttttaaagaagctttttctaacgccaaagacaaagagagcgcgagtgaaatcgcgcttaattgggctgaagcagagataaactatcaaaactttaataacgctaaatatctcattgataaggtggttcaatccaaccctgattatctttctatgcacagcgaattagccctagaattgctcaagttattgaaaaaaaaccaaatgaatgaaagtgcgattgagatcgctcacttgctcctcaatcaagatgatgacttgaaagctaaagagcaagcgctctatgatttaggggcgttgtatgcaaggatcaaggattttaaaaacgcccacctttacaatctgcaatatttgcaagaccatgcggaattggagcgggcttctgtcgttagagcacgcgatgaaaaagcccttttttcaatggaagggaacacgcaagaaaaaatcgcccactacgataaaatcattcaaaatttccctaattctaatgaagcccaaaaggctttagagttgaaagcccaactcttgtttgacaataagcactatgctgaagttttaggcatgcaaaaaaatttgcccaaagattctcccttgatccaaaaaacgctcaatatccttgctaaaaccccattagaggatcatcgttgcaaagaagctttaaaatacttatcccagatcaccgcctttgcattcaacccccaagaagaaatccaagcctttgattgcttgtatttcgcatcgctcaaggaaaaagcgcaaattattgccctaaacgctttaaaagcggctaaaacccctagcgagaaattaacatggctttatcgtttggggcgcaattactaccgcttaggggattttaaaaattccactctggcttctaaagacgccttaatcctcgctcaaagcttaaataaaaaagagttttatgacattgcttttgtgttattttcagattacatgcaaaacaatgaaaaaggattggccctcaatttgtatgcgtttttagaaaagcatttcaaagacgataaacgcatggcgttggtttattttaaattattagagaatgaaaaagaccctaaaagcgttaaaatttatgccacaagcttactcaaactccaagacgcttataaggattattcttacacgccctttggcgaatttgcccttattgacgcttacagaaccaccaaagattattcaaaagcgttagaaacgctagacaaactcttaaaccgcaggctttctttagaagatcaccaaaaagccttatacttgcaatccagcttattggatttaaccaatcaaaaagcaaaatctaaagccagtttagaaaaatgcgttcaattaaagcaaaaagatcaaacaaacgcatggcaaaatttatgcgaacagggtttaaatttattcaaaaacaaggagtcatga

SEQ ID NO: 63 - DNA (genomic), 2412 bp, Helicobacter pylori; double-stranded, circular
  misc_feature (B) LOCATION 1...2412
  hypothetical: NO
  anti-sense: NO
agtttgtggcttaagtcaaaattctttcttttaatgggcgtgggtttgctctcccattcactcaacgctttaagcctcacgctcacgcaaggcaaagaagaaggagaagatttttcggttttaaccttacgaaacgataaggcgttttcttgctcttatgctaatgaaaaaccgccgagcgggattgaagcgtctttatctattatacacgctaaacgccccatagaatgcgtgatagattctattcctaaagagggctttacccctttagaaaacgcttttttcaatatcacctattccatgcgccagcaacaattcattttacacatcaaacccaaagtgatgcgaaggctcacccttttttcttttgatagggattataaaaaagcgatccccctttttgtggaaaacgacgctaaagccaagatgtggcaaatcataggctatgatcaaaaaatcccttttttgagcgaaaaagacaacgctcaaaaaggcttgaatttccccattatcattaaagacgctcaaacccctatcattcaagagctggatgtgaataacaaacccctactcaccacaaagggctatgatttaaacgcctatttagaagctaaaaaacaaatggattcgcaagcctattttgacgccttacgcacgatcagccgcgcgtttaaaaattaccctcaaacgatttttaaaaaagatctgtatttattagaaattatcgcattaggtaaattaggcattaaaaaatccttactcatagatattggcacccaatggattaaaaattacccgactgatcctaatatccctgaagcgctatactatgtcgccaaagctttagatgaaaacaacaattacaaacaagccgtgcgctattacaaacgaatccttttagaatacaaaaactcccgctacgctcccttagcccaaatgcgtttagccattgaagcggctgaaggctctgatttgagcaacgctaatatgctttttaaagaagctttttctaacgccaaagacaaagagagcgcgagtgaaatcgcgcttaattgggctgaagcagagataaactatcaaaactttaataacgctaaatatctcattgataaggtggttcaatccaaccctgattatctttctatgcacagcgaattagccctagaattgctcaagttattgaaaaaaaaccaaatgaatgaaagtgcgattgagatcgctcacttgctcctcaatcaagatgatgacttgaaagctaaagagcaagcgctctatgatttaggggcgttgtatgcaaggatcaaggattttaaaaacgcccacctttacaatctgcaatatttgcaagaccatgcggaattggagcgggcttctgtcgttagagcacgcgatgaaaaagcccttttttcaatggaagggaacacgcaagaaaaaatcgcccactacgataaaatcattcaaaatttccctaattctaatgaagcccaaaaggctttagagttgaaagcccaactcttgtttgacaataagcactatgctgaagttttaggcatgcaaaaaaatttgcccaaagattctcccttgatccaaaaaacgctcaatatccttgctaaaaccccattagaggatcatcgttgcaaagaagctttaaaatacttatcccagatcaccgcctttgcattcaacccccaagaagaaatccaagcctttgattgcttgtatttcgcatcgctcaaggaaaaagcgcaaattattgccctaaacgctttaaaagcggctaaaacccctagcgagaaattaacatggctttatcgtttggggcgcaattactaccgcttaggggattttaaaaattccactctggcttctaaagacgccttaatcctcgctcaaagcttaaataaaaaagagttttatgacattgcttttgtgttattttcagattacatgcaaaacaatgaaaaaggattggccctcaatttgtatgcgtttttagaaaagcatttcaaagacgataaacgcatggcgttggtttattttaaattattagagaatgaaaaagaccctaaaagcgttaaaatttatgccacaagcttactcaaactccaagacgcttataaggattattcttacacgccctttggcgaatttgcccttattgacgcttacagaaccaccaaagattattcaaaagcgttagaaacgctagacaaactcttaaaccgcaggctttctttagaagatcaccaaaaagccttatacttgcaatccagcttattggatttaaccaatcaaaaagcaaaatctaaagccagtttagaaaaatgcgttcaattaaagcaaaaagatcaaacaaacgcatggcaaaatttatgcgaacagggtttaaatttattcaaaaacaaggagtca

SEQ ID NO: 64 - DNA (genomic), 141 bp, Helicobacter pylori; double-stranded, circular
  misc_feature (B) LOCATION 1...141
  hypothetical: NO
  anti-sense: NO
agcttccaaacgcctaaagattacacgctcaccaaactccatgaaaaaggccaaaaagtcgcccctgattttgaatacagcagccatactaataaccaatgggtagagactgattatttgtttaaattattattaattttt

SEQ ID NO: 65 - DNA (genomic), 168 bp, Helicobacter pylori; double-stranded, circular
  misc_feature (B) LOCATION 1...168
  hypothetical: NO
  anti-sense: NO
gcgcgaacaactttaaggcccttctcaacgcaatttggcgtggtgcgttatggtaatgtggtggggagtcgtgggagcgtggtgccgttttttaaaaaattagtccaaaacaaagcgagtgaaattcccttaccgatattcgcatacacgattttggatcaccttaga

SEQ ID NO: 66 - DNA (genomic), 171 bp, Helicobacter pylori; double-stranded, circular
  misc_feature (B) LOCATION 1...171
  hypothetical: NO
  anti-sense: NO
attaacgcatgcttaaaaaatgaaatcagccaggttattgccctaagcaccgataaagccgctaaccccattaacctctacggcgcaaccaaattgtgcagcgacaagctctttgtgagcgcgaacaactttaaggcccttctcaacgcaatttggcgtggtgcgttatgg

SEQ ID NO: 67 - DNA (genomic), 225 bp, Helicobacter pylori; double-stranded, circular
  misc_feature (B) LOCATION 1...225
  hypothetical: NO
  anti-sense: NO
tccaaaacaaagcgagtgaaattcccttaccgatattcgcatacacgattttggatcaccttagatgagggggtttcttttgtgcttaaaagcttgaaaagaatgcatgggggggaaatttttgtgcctaaaatccccagcatgaaaatgattgatctcgccaaagccctagcccccaatatccctactaaaatcatagggattcggcccgggcgaaaaactcca

SEQ ID NO: 68 - DNA (genomic), 864 bp, Helicobacter pylori; double-stranded, circular
  misc_feature (B) LOCATION 1...864
  hypothetical: NO
  anti-sense: NO
ttgaaacaaagcgaaatggccatggaatttaatgatcctaggatgcgtttttttattggcgatgtcagggatttagaacgcttgaattacgctttagagggcgtggatatttgtatccatgcggccgcgctcaagcatgtgcctatcgctgaatacaaccccctagaatgcattaaaactaacatcatgggagcgagcaatgtgattaacgcatgcttaaaaaatgaaatcagccaggttattgccctaagcaccgataaagccgctaaccccattaacctctacggcgcaaccaaattgtgcagcgacaagctctttgtgagcgcgaacaactttaaaggcccttctcaaacgcaatttggcgtggtgcgttatggtaatgtggtggggagtcgtgggagcgtggtgccgttttttaaaaaattagtccaaaacaaagcgagtgaaatccccattaccgatattcgcatgacacgattttggatcaccttagatgagggggtttcttttgtgcttaaaagcttgaaaagaatgcatgggggggaaatttttgtgcctaaaatccccagcatgaaaatgattgatctcgccaaagccctagcccccaatatccctactaaaatcatagggattcgcccgggcgaaaaactccatgaagtgatgatccctaaagatgaaagccatttagccctagaatttgaagacttttttattattcagcccactataagcttccaaacgcctaaagattacacgctcaccaaactccatgaaaaaggccaaaaagtcgcccctgattttgaatacagcagccatactaataaccaatggctagagcctgatgatttgttaaaattattatga

SEQ ID NO: 69 - DNA (genomic), 345 bp, Helicobacter pylori; double-stranded, circular
  misc_feature (B) LOCATION 1...345
  hypothetical: NO
  anti-sense: NO
gccttcacggcaattggttttggggaatctcaactgtcagaaaccacggttttttttttttttttttttgggaatcccaacgccaatgtccgatcgacccttggcgcgaactataacgccgtgttcgctagcggtaaccaaagcttgggatctggggttacaaccttaagaggcgcgatggtggtgattgacattgccgaatcagcgatgaaaatgttggataaagtccgctctgacttaggttctgtgcaaaatcaaatgattagcactgtggataacatcagcatcactcaagtgaatgttaaagcggctgaatctcaaaaatcagggatgtgggaatttcgc

SEQ ID NO: 70 - DNA (genomic), 444 bp, Helicobacter pylori; double-stranded, circular
  misc_feature (B) LOCATION 1...444
  hypothetical: NO
  anti-sense: NO
caaggagttacaacaatggcttttcaggtcaatacaaatatcaatgcgatgaatgcgcatgtgcaatccgcactcactcaaaacgcacttaaaacttcattggagcgattgagttcaggtttaaggatcaataaagcggctgatgacgcatcaggcatgacggtggcggattctttgcgttcgcaagcgagcagtttgggtcaagcgattcccaacacgaatgacggcatggggattatccaggttgcggataaggctatggatgagcaattaaaaatcttagacaccgttaaggttaaagcgactcaagcggctcaagatgggcaaactacggaatctcgtaaagcgattcaatctgacatcgttcgtttgattcaaggtttggataatatcggtaacacaacgacttataacgggccaagcgttattgtctggtcaattcac

SEQ ID NO: 71 - DNA (genomic), 744 bp, Helicobacter pylori; double-stranded, circular
  misc_feature (B) LOCATION 1...744
  hypothetical: NO
  anti-sense: NO
ttcaaggtttggataatatcggtaacacaacgacttataacgggccaagcgttattgtctggtcaattcactaacaaagaattccaagtaggggcttattctaaccaaagcattaaggcttctatcggctctaccacttccgataaaatcggtcaggttcgtatcgctacaggcgcgttaatcacggcttctggggatattagcttgacttttaaacaagtggatggcgtgaatgatgtaactttagagagcgtaaaagtttctagttcagcaggcacagggatcggcgtgttagcagaagtgatcaataaaaactctaaccgaacaggggttaaagcttatgcgagcgttatcaccacgagcgatgtggcggtccagtcaggaagtttgagtaatttaaccttaaatgggattcatttgggtaatatcgcagatattaagaaaaacgactcagacggaaggttagtcacagcgatcaatgcggtcacttcagaaaccggtgtggaagcttatacggatcaaaaagggcgcttgaatttgcgcagtatagatggtcgtgggattgaaatcaaaattgacagcgtcagtaacgggcctagtgctttaactaaacgatggtcaaagagcggtcaagatgaaacgaagggatctactaactacggaaggtattctcggacacgcctagacgtaagagcatcaatgtcgattcggtatttaaatcacgcttgcttgcttcagagctat

SEQ ID NO: 72 - DNA (genomic), 909 bp, Helicobacter pylori; double-stranded, circular
  misc_feature (B) LOCATION 1...909
  hypothetical: NO
  anti-sense: NO
atggcttttcaggtcaatacaaatatcaatgcgatgaatgcgcatgtgcaatccgcactcactcaaaacgcacttaaaacttcattggagcgattgagttcaggtttaaggatcaataaagcggctgatgacgcatcaggcatgacggtggcggattctttgcgttcgcaagcgagcagtttgggtcaagcgattgccaacacgaatgacggcatggggattatccaggttgcggataaggctatggatgagcaattaaaaatcttagacaccgttaaggttaaagcgactcaagcggctcaagatgggcaaactacggaatctcgtaaagcgattcaatctgacatcgttcgtttgattcaaggtttggataatatcggtaacacaacgacttataacgggcaagcgttattgtctggtcaattcactaacaaagaattccaagtaggggcttattctaaccaaagcattaaggcttctatcggctctaccacttccgataaaatcggtcaggttcgtatcgctacaggcgcgttaatcacggcttctggggatattagcttgacttttaaacaagtggatggcgtgaatgatgtaactttagagagcgtaaaagtttctagttcagcaggcacagggatcggcgtgttagcagaagtgatcaataaaaactctaaccgaacaggggttaaagcttatgcgagcgttatcaccacgagcgatgtggcggtccagtcaggaagtttgagtaatttaaccttaaatgggattcatttgggtaatatcgcagatattaagmraaacgactcagacggaaggttagtcacagcratcaatgcggtcacttcagaaaccggtgtggwagcttatacggatcaaaaaggacgcttgaatttgcgcagtataggt

SEQ ID NO: 73 - DNA (genomic), 1533 bp, Helicobacter pylori; double-stranded, circular
  misc_feature (B) LOCATION 1...1533
  hypothetical: NO
  anti-sense: NO
atggcttttcaggtcaatacaaatatcaatgcgatgaatgcgcatgtgcaatccgcactcactcaaaacgcacttaaaacttcattggagcgattgagttcaggtttaaggatcaataaagcggctgatgacgcatcaggcatgacggtggcggattctttgcgttcgcaagcgagcagtttgggtcaagcgattgccaacacgaatgacggcatggggattatccaggttgcggataaggctatggatgagcaattaaaaatcttagacaccgttaaggttaaagcgactcaagcggctcaagatgggcaaactacggaatctcgtaaagcgattcaatctgacatcgttcgtttgattcaaggtttggataatatcggtaacacaacgacttataacgggcaagcgttattgtctggtcaattcactaacaaagaattccaagtaggggcttattctaaccaaagcattaaggcttctatcggctctaccacttccgataaaatcggtcaggttcgtatcgctacaggcgcgttaatcacggcttctggggatattagcttgacttttaaacaagtggatggcgtgaatgatgtaactttagagagcgtaaaagtttctagttcagcaggcacagggatcggcgtgttagcagaagtgatcaataaaaactctaaccgaacaggggttaaagcttatgcgagcgttatcaccacgagcgatgtggcggtccagtcaggaagtttgagtaatttaaccttaaatgggattcatttgggtaatatcgcagatattaagaaaaacgactcagacggaaggttagtcgcagcgatcaatgcggtcacttcagaaaccggtgtggaagcttatacggatcaaaaagggcgcttgaatttgcgcagtatagatggtcgtgggattgaaatcaaaaccgacagcgtcagtaacgggcctagcgctttaacgatggtcaatggcggtcaggatttaacaaaaggctctactaactacggaaggctttctctcacacgattagacgctaagagcatcaatgtcgtttcggcttctgactcacagcatttaggcttcacggcgattggttttggggaatctcaagtggcagaaaccacggtgaatttgcgcgatgttactgggaattttaacgctaatgtcaaatcagccagtggcgcgaactataacgccgtgatcgctagcggtaaccaaagcttgggatctggggttacaaccttaagaggcgcgatggtggtgattgacattgccgaatcagcgatgaaaatgttggataaagtccgctctgacttaggttctgtgcaaaatcaaatgattagcactgtgaataacatcagcatcactcaagtgaatgttaaagcggctgaatctcaaatcagggatgtggatttcgctgaagagagcgcgaatttcaacaaaaacaacattttggcgcaatcaggcagctatgcgatgagtcaagccaataccgttcaacaaaatatcttaaggcttttaacttag

SEQ ID NO: 74 - DNA (genomic), 588 bp, Helicobacter pylori; double-stranded, circular
  misc_feature (B) LOCATION 1...588
  hypothetical: NO
  anti-sense: NO
gttatcaaacggtatttacacgccagaggtattatcagcggttgtttagacgagctgtttgtaggaacctgcgcgtctgtgagttcacaaatcaaaataacaagaggggtgattgtcaacgtcagcagtagcttttctatggggcttaccatggcgagtgcttatgatcccatttcaggatcgcaaaaacccattgtggggcaagcccttttattgttagcgattttaattttattggatttatcgttccaccatcaaatcattttatttgtggatcacagcttaaaagccgtccctttagggcgatttgtctttgagccagaattagctaaaaacattgtcaaagccttttcacacttgtttgtcatagggttttctatggcgttccctattttatgcttggtgttattgagcgatattatttttggcatgatcatgaaaacccaccctcaattcaacctgctcgctatcgggtttccggttaaaattgcgatcgggtttgtgggcattattttaatcgcttcggctatcatggggcgttttaaagaagaaatcagcctggcctttagcgttattagtaaaatcttt

SEQ ID NO: 75 - DNA (genomic), 768 bp, Helicobacter pylori; double-stranded, circular
  misc_feature (B) LOCATION 1...768
  hypothetical: NO
  anti-sense: NO
atgctagattttattcaagagcttagcaccccccatgtcagggattttttcttgttgtttttaagggttagtggcgtgctgtcttttttccctttttttgaaaaccatttagtgcctttgtcggtgcgtggggctttgagcttgtatgtgagcgcgattttttaccccactttagagttttcaaacgctatttacacgccagagggttttatcattgcttgtttatgcgagctgtttttaggggtgtgcgcgtctgtctttttacaaatcgtttttgcgagcttagtgtttgccactgacagcattagcttttctatggggcttaccatggcgagtgcttatgatcccatttcaggatcgcaaaaacccattgtggggcaagcccttttattgttagcgattttaattttattggatttatcgttccaccatcaaatcattttatttgtggatcacagcttaaaagccgtccctttagggcgatttgtctttgagccagaattagctaaaaacattgtcaaagccttttcacacttgtttgtcatagggttttctatggcgttccctattttatgcttggtgttattgagcgatattatttttggcatgatcatgaaaacccaccctcaattcaacctgctcgctatcgggtttccggttaaaattgcgatcgggtttgtgggcattattttaatcgcttcggctatcatggggcgttttaaagaagaaatcagcctggcctttagcgttattagtaaaatcttttaa

SEQ ID NO: 76 - DNA (genomic), 201 bp, Helicobacter pylori; double-stranded, circular
  misc_feature (B) LOCATION 1...201
  hypothetical: NO
  anti-sense: NO
gcggtaaccgccattttagggtgggacgaagagggcaagctcaagtttgggaaaatcaggcacaaatatttagaaacgagcaacgtgaatgccgggaacgccctaaccaatctcattttaatgcaaagaggctattctatgaacgctagagcctttggcgcgggcgatgacatgatcaaagaagccattagcttgaaaaaa

SEQ ID NO: 77 - DNA (genomic), 372 bp, Helicobacter pylori; double-stranded, circular
  misc_feature (B) LOCATION 1...372
  hypothetical: NO
  anti-sense: NO
atgcgcattgaagaaaatggcgtgatttctctagcctttagtaacggggtggtagagccggtcgctcgcatcggtatttwagctttcactaacgatcaaggcttaaggaaaatcggcggtaacctctatgaaatgcaagaaggcaccattaatggcgaaaacagacccctaagsggtaaccccattttagggtgggacgaagagggcaagctcaagtttgggaaaatcaggcacaaatatttagaaacgagcaacgtgaatgccgggaacgccctaaccaatctcattttaatgcaaagaggctattctatgaacgctagagcctttggcgcgggcgatgacatgatcaaagaagccattagcttgaaaaaa

SEQ ID NO: 78 - DNA (genomic), 459 bp, Helicobacter pylori; double-stranded, circular
  misc_feature (B) LOCATION 1...459
  hypothetical: NO
  anti-sense: NO
atgattctagcgatttgttcttaccaagactctaaactcttagaagcgagtcaagacggcaagcctaggggcatttttagagacatgcgcattgaagaaaatggcgtgatttctctagcctttagtaacggggtggtagagccggtcgctcgcatcggtattttagctttcactaacgatcaaggcttaaggaaaatcggcggtaacctctatgaaatgcaagaaggcaccattaatggcgaaaacagacccctaagcggtaaccccattttagggtgggacgaagagggcaagctcaagtttgggaaaatcaggcacaaatatttagaaacgagcaacgtgaatgccgggaacgccctaaccaatctcattttaatgcaaagaggctattctatgaacgctagagcctttggcgcgggcgatgacatgatcaaagaagccattagcttgaaaaaataa

SEQ ID NO: 79 - DNA (genomic), 558 bp, Helicobacter pylori; double-stranded, circular
  misc_feature (B) LOCATION 1...558
  hypothetical: NO
  anti-sense: NO
aagctacatcgtggatcccaaaaacaaaaccctatcaatgatcctacttgggaaattgtcggctttgattcagccacgcacaaaatgaaatccgcccccatgactttggattttaagggcaataaactcacctattctttggataagagcgaaaacatgattctaaccaaattgttctaccaagactctaaactcttaaaaacgagtcaagaacgcaagcctaggggcatttttagagacatgcgcattgaagaaaatggcgtgatttctctagcctttagtaacggggtggtagagccggtcgctcgcatcggtattttagctttcactaacgatcaaggcttaaggaaaatcggcggtaacctctatgaaatgcaagaaggcaccattaatggcgaaaacagacccctaagcggtaaccgccattttagggtgggacgaagagggcaagctcaagtttgggaaaatcaggcacaaatatttagaaacgagcaacgtgaatgccgggaacgccctaaccaatctcattttaatgcaaagaggctattctatgaacgc

SEQ ID NO: 80 - DNA (genomic), 864 bp, Helicobacter pylori; double-stranded, circular
  misc_feature (B) LOCATION 1...864
  hypothetical: NO
  anti-sense: NO
atccgccaaatgtcatatttaggctatcgctccaatgatccggagtttaagaccttgttttcttcgcatttagacgctttgaacgccaaatccgttgtggctaacgaccgaaattacggcgttacaggatcaggcaatgtcctttctaataaagacggcgaatacatgccaagtgaaggggaattccacatggcgtatcagggcaagggttggtttgtgatagggcccaataaaaacggggaaatgaccattaataaagatggctttagcaaaaaacaggataatttcttaacccgtgccggcaatttcgcgcgagacgccgatggctatttagtaacccctgagggctattatgtctatggtattgatctgaaaaaaatcaaagacggcacgctcaattccaccgctagagatgaagacattgaaaaattgcatggaaacaccctttcgcccttacaaatcccccaggatttgacttaccagccggtgcttagcacgaaagtgaatatcagcgtgaatctaaaccctaaagaccatttaaagggcgtgcaagattttttcttaaacgataagggcgaaatcattaaagagcgttttttaaaccaagatattaacgctttagcgaatgacgataacgagccaatagacgcgatcaccaatcgcaaattgaatgtgagtatccaaaaagaaaatggcaaaaaagaggattttgttttcacttatggggacgctgaaaaaggcgaaaaccaattcaaaaccttaggcgatttgcaaaaactccttaaagaaaaaaccgggctagatttgaacctcatcaaaagcgaaaaagacggccaaaagccccccccttttattagagatcgc

SEQ ID NO: 81 - DNA (genomic), 861 bp, Helicobacter pylori; double-stranded, circular
  misc_feature (B) LOCATION 1...861
  hypothetical: NO
  anti-sense: NO
cgccaaatgtcatatttaggctatcgctccaatgatccggagtttaagaccttgttttcttcgcatttagacgctttgaacgccaaatccgttgtggctaacgaccgaaattacggcgttacaggatcaggcaatgtcctttctaataaagacggcgaatacatgccaagtgaaggggaattccacatggcgtatcagggcaagggttggtttgtgatagggcccaataaaaacggggaaatgaccattaataaagatggctttagcaaaaaacaggataatttcttaacccgtgccggcaatttcgcgcgagacgccgatggctatttagtaacccctgagggctattatgtctatggtattgatctgaaaaaaatcaaagacggcacgctcaattccaccgctagagatgaagacattgaaaaattgcatggaaacaccctttcgcccttacaaatcccccaggatttgacttaccagccggtgcttagcacgaaagtgaatatcagcgtgaatctaaaccctaaagaccatttaaagggcgtgcaagattttttcttaaacgataagggcgaaatcattaaagagcgttttttaaaccaagatattaacgctttagcgaatgacgataacgagccaatagacgcgatcaccaatcgcaaattgaatgtgagtatccaaaaagaaaatggcaaaaaagaggattttgttttcacttatggggacgctgaaaaaggcgaaaaccaattcaaaaccttaggcgatttgcaaaaactccttaaagaaaaaaccgggctagatttgaacctcatcaaaagcgaaaaagacggccaaaagccccccccttttattagagatcgc

SEQ ID NO: 82 - DNA (genomic), 1395 bp, Helicobacter pylori; double-stranded, circular
  misc_feature (B) LOCATION 1...1395
  hypothetical: NO
  anti-sense: NO
atgaacgacaccttattaaacgcttatagcgggatcaagacccaccagtttggtattgacagcctttccaataatatcgccaatgtcaatactttaggctatcgctccaatgatccggagtttaagaccttgttttcttcgcatttagacgctttgaacgccaaatccgttgtggctaacgaccgaaattacggcgttacaggatcaggcaatgtcctttctaataaagacggcgaatacatgccaagtgaaggggaattccacatggcgtatcagggcaagggttggtttgtgatagggcccaataaaaacggggaaatgaccattaataaagatggctttagcaaaaaacaggataatttcttaacccgtgccggcaatttcgcgcgagacgccgatggctatttagtaacccctgagggctattatgtctatggtattgatttgaaaaaaatcaaagacggcacgctcaattccaccgctagagatgaagacattgaaaaattgcatggaaacaccctttcgcccttacaaatcccccaggatttgacttaccagccggtgcttagcacgaaagtgaatatcagcgtgaatctaaaccctaaagaccatttaaagggcgtgcaagattttttcttaaacgataagggcgaaatcattaaagagcgttttttaaaccaagatattaacgctttagcgaatgacgataacgagccaatagacgcgatcaccaatcgcaaattgaatgtgagtatccaaaaagaaaatggcaaaaaagaggattttgttttcacttatggggacgctgaaaaaggcgaaaaccaattcaaaaccttaggcgatttgcaaaaactccttaaagaaaaaaccgggctagatttgaacctcatcaaaagcgaaaaagacgccaaaagccccccccttttattagagatcgctaatcctagcgaaacgcctatcgcatttagcttgagtgggggcattgcggataaattgggcttgaacgcgaatcaaatggaattgaaaaagggcatcagcagggattcagtggcgattaaaatcccttattacagcacagaagtggatatttatgacaaggccggggataaatacttgctccaaagcgaatactacatgactaattccaacgatcccacatcaagccccacgagtaaaaggaaaaaccaaacttgggaagtgaaaagctacatcgtggatcccaaaaacaaaacccctatcaatgatcctacttgggaaattgtcggctttgattcagccacgcacaaaatgaaatccgcccccatgactttggattttaagggcaataaactcacctattctttggataagagcgaaaaccatgattctagcgatttgttcttaccaagactctaa

SEQ ID NO: 83 - DNA (genomic), 714 bp, Helicobacter pylori; double-stranded, circular
  misc_feature (B) LOCATION 1...714
  hypothetical: NO
  anti-sense: NO
atgaaaaaagcgctttatttaggggctgttgcgtttggcgttgtattcagcatggcatcagccaatgagccaaacattgattttaaccctcctaattatgtagaagaaaccccctctaaagaatttatccctgaattgaacaagttagggagtttgtttgggcagggtgagcgccctttatttgcggacaggagggcgatgaagcctaacgatttgatcacaatcgttgtctctgaaaaagcgagcgcgaattattctagctctaaagattataaaagcgcttcagggggtaactccacgcccccaaggctcacttataatgggttagatgaaagaaagaaaaaagaagcggagtatttagacgataagaataattacaatttcaccaaatccagcaataacacgaattttaaaggcggtggctcgcaaaaaaagagcgaagatttagagatcgtgttgagcgctcgtatcattaaggtgctagaaaacgggaattatttcatctatgggaataaggaagtgctagtggatggggaaaagcaaatccttaaggtgagcggggtgatccgcccttatgatattgaaaggaataacactatccaatccaaatttttagccgacgctaagattgaatacacgaatttagggcatttgagcgattccaataaaaagaaattcgccgctgatgcgatggaaacccaaatgccttattaa

SEQ ID NO: 84 - DNA (genomic), 714 bp, Helicobacter pylori; double-stranded, circular
  misc_feature (B) LOCATION 1...714
  hypothetical: NO
  anti-sense: NO
tggatgaaaaaagcgctttatttaggggctgttgcgtttggcgttgtattcagcatggcatcagccaatgagccaaacattgattttaaccctcctaattatgtagaagaaaccccctctaaagaatttatccctgaattgaacaagttagggagtttgtttgggcagggtgagcgccctttatttgcggacaggagggcgatgaagcctaacgatttgatcacaatcgttgtctctgaaaaagcgagcgcgaattattctagctctaaagattataaaagcgcttcagggggtaactccacgcccccaaggctcacttataatgggttagatgaaagaaagaaaaaagaagcggagtatttagacgataagaataattacaatttcaccaaatccagcaataacacgaattttaaaggcggtggctcgcaaaaaaagagcgaagatttagagatcgtgttgagcgctcgtatcattaaggtgctagaaaacgggaattatttcatctatgggaataaggaagtgctagtggatggggaaaagcaaatccttaaggtgagcggggtgatccgcccttatgatattgaaaggaataacactatccaatccaaatttttagccgacgctaagattgaatacacgaatttagggcatttgagcgattccaataaaaagaaattcgccgctgatgcgatggaaacccaaatgccttat

SEQ ID NO: 85 - DNA (genomic), 639 bp, Helicobacter pylori; double-stranded, circular
  misc_feature (B) LOCATION 1...639
  hypothetical: NO
  anti-sense: NO
gtgtatgaagaaaggatcactctggcttctcaagggatccctaaaacgagtaaagtgggctttgaaatctttgacactaaagactttggggcgactgattttgatcaaaacatcaaactcattcgcgccattgagggggaattgtcgcgcacgattgaaagtttaaaccccattcttaaagccaatgtgcatattgcaatccctaaagacagcgtgtttgtggctaaagaagtccctcctagcgcttcagtgatgctcaagcttaagcctgacatgaagctttcacccactcaaattttagggattaaaaatttaatcgctgcagctgtgcctaaactcacgatagaaaacgtgaaaatcgtgaatgaaaatggcgaatcaataggcgagggcgatatactagaaaactccaaagaattagccttagagcaattgcgctacaaacaaaattttgaaaacattttagaaaataagatcgtcaatatcttagcccctattgtggggrgtaaaaacaargtrgtcrcaarrgtcaatrcggagtttratttcarccaaaagaaaagcaccaaagagacttttgatcccaataatgtcggtaaggagcgagcaaaatttagaagaaaaaaaagaaggcgctcc

SEQ ID NO: 86 - DNA (genomic), 1704 bp, Helicobacter pylori; double-stranded, circular
  misc_feature (B) LOCATION 1...1704
  hypothetical: NO
  anti-sense: NO
ttggatttaaaggtattattgcaacggattgttgattttttcatcaagctcaataaaaagcaaaaaatcgccctgatcgcagcgggggttttgatcaccgctttactcgtgtttttattgctctatccttttaaagaaaaagactacgcgcaagggggttatggggttttatttgaaagattggattctagcgataacgccttaatcttacaacacctccagcaaaaccaaatcccttataaagtcttaaaagacgacaccattcttgtccctaaagataaagtgtatgaagaaaggatcactctggcttctcaagggatccctaaaacgagtaaagtgggctttgaaatctttgacactaaagactttggggcgactgattttgatcaaaacatcaaactcattcgcgccattgagggggaattgtcgcgcacgattgaaagtttaaaccccattcttaaagccaatgtgcatattgcaatccctaaagacagcgtgtttgtggctaaagaagtccctcctagcgcttcagtgatgctcaagcttaagcctgacatgaagctttcacccactcaaattttagggattaaaaatttaatcgctgcagctgtgcctaaactcacgatagaaaacgtgaaaatcgtgaatgaaaatggcgaatcaataggcgagggcgatatactagaaaactccaaagaattagccttagagcaattgcgctacaaacaaaattttgaaaacattttagaaaataagatcgtcaatatcttagcccctattgtggggggtaaaaacaaggtggtcgcaagggtcaatgcggagtttgatttcagccaaaagaaaagcaccaaagagacttttgatcccaataatgtcgtaaggagcgagcaaaatttagaagaaaaaaaagaaggcgctcctaaaaaacaagttggcggtgtgccgggagttgtgagcaatattgggcctgtgcaaggattgaaggacaataaagagccagaaaaatacgaaaagtctcaaaacacgaccaattatgaagtgggtaaaaccattagcgagatcaagggcgagtttggcaccttagtgcgtttgaatgcggcggttgtggtggatggcaagtataaaatcgcgctcgaagacggggcaaacgctttagaatacgagcctttaagcgatgaatcgcttaaaaaaatcaacgccctagtcaaacaagccattggttataatcaaaatagaggcgatgatgtggcggtgagtaattttgagtttaaccctatggcgcctatgattgacaacgccactttgagcgaaaaaatcatgcataaaactcaaaaaatcttaggctcattcacgcctttaatcaagtatattttggtgtttatagtgttattcattttctataaaaaagtgatcgtgcctttcagcgaacgcatgctggaagtggtgcctgatgaagataaggaagtgaaatccatgtttgaagaaatggacgaagaagaagatgagttgaacaaactcggcgatttgaggaaaaaagtagaagatcaattagggcttaatgcaagctttagcgaagaagaagtaagatatgaaattattttagaaaagattagaggaacccttaaagagcgtcctgatgaaatcgccacgctctttaaactcttaatcaaagatgaaatctcttcagacagcgcgaaaggttaa

SEQ ID NO: 87 - DNA (genomic), 1731 bp, Helicobacter pylori; double-stranded, circular
  misc_feature (B) LOCATION 1...1731
  hypothetical: NO
  anti-sense: NO
aagaatgaaaattttatcaaggttttaatattggatttaaaggtattattgcaacggattgttgattttttcatcaagctcaataaaaagcaaaaaatcgccctgatcgcagcgggggttttgatcaccgctttactcgtgtttttattgctctatccttttaaagaaaaagactacgcgcaagggggttatggggttttatttgaaagattggattctagcgataacgccttaatcttacaacacctccagcaaaaccaaatcccttataaagtcttaaaagacgacaccattcttgtccctaaagataaagtgtatgaagaaaggatcactctggcttctcaagggatccctaaaacgagtaaagtgggctttgaaatctttgacactaaagactttggggcgactgattttgatcaaaacatcaaactcattcgcgccattgagggggaattgtcgcgcacgattgaaagtttaaaccccattcttaaagccaatgtgcatattgcaatccctaaagacagcgtgtttgtggctaaagaagtccctcctagcgcttcagtgatgctcaagcttaagcctgacatgaagctttcacccactcaaattttagggattaaaaatttaatcgctgcagctgtgcctaaactcacgatagaaaacgtgaaaatcgtgaatgaaaatggcgaatcaataggcgagggcgatatactagaaaactccaaagaattagccttagagcaattgcgctacaaacaaaattttgaaaacattttagaaaataagatcgtcaatatcttagcccctattgtggggggtaaaaacaaggtggtcgcaagggtcaatgcggagtttgatttcagccaaaagaaaagcaccaaagagacttttgatcccaataatgtcgtaaggagcgagcaaaatttagaagaaaaaaaagaaggcgctcctaaaaaacaagttggcggtgtgccgggagttgtgagcaatattgggcctgtgcaaggattgaaggacaataaagagccagaaaaatacgaaaagtctcaaaacacgaccaattatgaagtgggtaaaaccattatcgagatcaagggcgagtttggcaccttaatgcgtttgaatgcggcggttgtggtggatggcaagtataaaatcgcgctcgaagacggggcaaacgctttagaatacgagcctttaagcgatgaatcgcttaaaaaaatcaacgccctagtcaaacaagccattggtgataatcaaaatagaggcgatgatgtggcggtgagtaattttgagtttaaccctatggcgcctatgattgacaacgccactttgagcgaaaaaatcatgcataaaactcaaaaaatcttaggctcatttacgcctttaatcaagtatattttggtgtttatagtgttattcattttctataaaaaagtgatcgtgcctttcagcgaacgcatgctggaagtggtgcctgatgaagataaggaagtgaaatccatgtttgaagaaatggacgaagaagaagatgagttgaacaaactcggcgatttgaggaaaaaagtagaagatcaattagggcttaatgcaagctttagcgaagaagaagtaagatatgaaattattttagaaaagattagaggaacccttaaagagcgtcctgatgaaatcgccacgctctttaaactcttaatcaaagatgaaatctcttcagacagcgcgaaaggt

SEQ ID NO: 88 - DNA (genomic), 213 bp, Helicobacter pylori; double-stranded, circular
  misc_feature (B) LOCATION 1...213
  hypothetical: NO
  anti-sense: NO
aagtgggggattaaaaaagactggtctttagccttaccttctacccaagatttaaccgataaattcttaaacaacatgagcagtagggccgcagagcaatttgtagaagaaatgcagtatttaggagcggttaaaatcaaagacgtggatgtggcccaaaggaaaatcattgaatcgtgcagagcttcaagaaaaaggcgtgatccaaaccgg

SEQ ID NO: 89 - DNA (genomic), 240 bp, Helicobacter pylori; double-stranded, circular
  misc_feature (B) LOCATION 1...240
  hypothetical: NO
  anti-sense: NO
gtgatggacaaactcactaaaagcttgcaaacgcaaaaaaacttcgcttatttaggcaaaatcaagccccaacaactcgctgatttcatcattaacgaacaccctcaaaccatcgccttgattttggcccacatggaarcccctaatgcggctgaaactttgagctatttccctgatgaaatgaaagccgagatttccattagaatggcgaattttaggcgaaatatcgccccaagtggt

SEQ ID NO: 90 - DNA (genomic), 828 bp, Helicobacter pylori; double-stranded, circular
  misc_feature (B) LOCATION 1...828
  hypothetical: NO
  anti-sense: NO
aggttaaaaatggcaaccaagcttacccccaaacaaaaggctcaattagacgaactttccatgagtgaaaaaatcgccattttactcattcaagtgggcgaagacaccacaggcgagattttaaggcatttagacattgactctattacagagatttctaagcaaatcgtgcaattaaacggcacggacaagcaaatcggcgcggcggttttagaggaattttttgcgatctttcagtctaaccaatacatcaataccggcggtttagaatacgctagggagcttttaaccaggactttagggagcgaagaagccaggaaagtgatggacaaactcactaaaagcttgcaaacgcaaaaaaacttcgcttatttaggcaaaatcaagccccaacaactcgctgatttcatcattaacgaacaccctcaaaccatcgccttgattttggcccacatggaagcccctaatgcggctgaaactttgagctatttccctgatgaaatgaaagccgagatttccattagaatggcgaatttaggcgaaatatcgccccaagtggttaaaagggtttccacggtgttagaaaacaaactagaatcgctcactagctataaaattgaagtgggcggcttgagagcggtggctgaaatctttaaccgcttgggccaaaagagtgccaaaaccacgctcgctcgcattgaaagcgtggataacaaactcgccggcgcgattaaagaaatgatgttcacttttgaagatatagccaaactagacaattttgctatcatgagagattttaaaagtgggggattaaaaaagactggtctt

SEQ ID NO: 91 - DNA (genomic), 1032 bp, Helicobacter pylori; double-stranded, circular
  misc_feature (B) LOCATION 1...1032
  hypothetical: NO
  anti-sense: NO
atggcaaccaagcttacccccaaacaaaaggctcaattagacgaactttccatgagtgaaaaaatcgccattttactcattcaagtgggcgaagacaccacaggcgagattttaaggcatttagacattgactctattacagagatttctaagcaaatcgtgcaattaaacggcacggacaagcaaatcggcgcggcggttttagaggaattttttgcgatctttcagtctaaccaatacatcaataccggcggtttagaatacgctagggagcttttaaccaggactttagggagcgaagaagccaggaaagtgatggacaaactcactaaaagcttgcaaacgcaaaaaaacttcgcttatttaggcaaaatcaagccccaacaactcgctgatttcatcattaacgaacaccctcaaaccatcgccttgattttggcccacatggaagcccctaatgcggctgaaactttgagctatttccctgatgaaatgaaagccgagatttccattagaatggcgaatttaggcgaaatatcgccccaagtggttaaaagggtttccacggtgttagaaaacaaactagaatcgctcactagctataaaattgaagtgggcggcttgagagcggtggctgaaatctttaaccgcttgggccaaaagagtgccaaaaccacgctcgctcgcattgaaagcgtggataacaaactcgccggcgcgattaaagaaatgatgttcacttttgaagatatagccaaactagacaattttgctatcagagagattttaaaagtggcggataaaaaagacttgtctttagccttaaaaacttctacccaagatttaaccgataaattcttaaacaacatgagcagtagggccgcagagcaatttgtagaagaaatgcagtatttaggagcggttaaaatcaaagacgtggatgtggcccaaaggaaaatcattgaaatcgtgcagagcttgcaagaaaaaggcgtgatccaaaccggtgaagaggaagatgtcattgaatag

SEQ ID NO: 92 - DNA (genomic), 237 bp, Helicobacter pylori; double-stranded, circular
  misc_feature (B) LOCATION 1...237
  hypothetical: NO
  anti-sense: NO
acgacattatccaagtcattaacgctaacaccgatgacaatcaagacaacaacaccgaaaacgattttgatgaattatttcacagcgagctttaacaatgagactaaaaagtttgttatccagcctaaaaacgcttcgcaagggttgtttgtctccatgaaagataacggcacgaattttatgggggcgttaaaactcaaccctttttttcaaggcgatgacgcttccaatatcagc

SEQ ID NO: 93 - DNA (genomic), 249 bp, Helicobacter pylori; double-stranded, circular
  misc_feature (B) LOCATION 1...249
  hypothetical: NO
  anti-sense: NO
tcacggtctgagtatctttaccccaataatccccctgacttcgaaagggtccagcatgtgggatcattttcagagtcggccgcccgggggatcttatcttcactcaacacttcttacaccggcttgcaagcccatcagagcatggtggatgttaccgggaataatatttctaacgctagcgatgaattttatagccgtcagcgcgtgattgcaagccccaagcagcctatatgtatggcactaaaaacg

SEQ ID NO: 94 - DNA (genomic), 246 bp, Helicobacter pylori; double-stranded, circular
  misc_feature (B) LOCATION 1...246
  hypothetical: NO
  anti-sense: NO
cggtctgagtatctttaccccaataatccccctgacttcgaaagggtccagcatgtgggatcattttcagagtcggccgcccgggggatcttatcttcactcaacacttcttacaccggcttgcaagcccatcagagcatggtggatgttaccgggaataatatttctaacgctagcgatgaattttatagccgtcagcgcgtgattgcaagccccaagcagcctatatgtatggcactaaaaacg

SEQ ID NO: 95 - DNA (genomic), 408 bp, Helicobacter pylori; double-stranded, circular
  misc_feature (B) LOCATION 1...408
  hypothetical: NO
  anti-sense: NO
cgcttccaatatcagctgaataaagaatacaaaaaagagcctaccgctatccgcccatggcttgcccccattaatgggaattttgatgtggcgaacatgatgcaacaattgcaatacgatagcgtggatttctataacgacaagtttgatattaaaccaatgaagatcagcgagttttatcaatttttaaccggtaaaatcaacacggacgctgaaaaatcagggcgtattttggacaccaaacaaagcatgctagagaccattaaaaaagagcaactctctatttcgcaagtgagcgtggatgaagagatggtgaatttgatcaaatttcaaagcggttatgccgctaacgctaaggtcattacggctattgatcggatgatagacactttgttggggattaaacaa

SEQ ID NO: 96 - DNA (genomic), 1107 bp, Helicobacter pylori; double-stranded, circular
  misc_feature (B) LOCATION 1...1107
  hypothetical: NO
  anti-sense: NO
atatggcgtggatgtggaagccatgacagggtgcatgatgagtttgtttttgctcgttacacgaaggctaattacgaaaacacttattacgatacagagttttcgcatttaaaagaagcgagcgcgtattttccggacattgatgaagcgagcctttttacggatttgcaagattattttaactcatggaaagaattgtctaaaaacgccaaagactccgctcaaaaacaggctctcgctcaaaaaacagaagctttaacgcacaacattaaagacaccagagagaggttaacgaccttacagcataaagcgagcgaagaattaaaaagcgtcattaaagaagtcaatagcctgggttctcaaatcgctgagatcaacaaacgcattaaagaagtggaaaacaacaagagtttaaagcatgcgaatgagttaagggataagcgagatgaattagagtttcatttgcgagagcttttaggggggaatgtttttaaaagcagcattaaaacccattcgctcacagataaagactcagcggactttgatgagagctataaccttaatatcgggcatgggttcaatatcattgatggctctattttccatcccttagtggttaaagaatccgaaaataaagggggtttgaaccaggtttattttcaaagcgatgattttaagctcactaatattaccgacaagctcaatcaagggaaagtgggggcgttattgaatgtgtataatgacggctctaacgggactttaaagggcaagttgcaagattatattgatttgttggattcttttgctaggggcttgatagaatccacgaatgcgatttacgctcaaagcgcgagccatcatattgagggcgagcctgtggagtttaatagcgatgaagcctttaaagacacgaattacaatatcaaaaacggctcgtttgatttaatcgcttacaacaccgatggtaaagaaatcgccaggaaaaccattgctatcacgcccattacaaccatgaacgacattatccaagtcattaacgctaacaccgatgacaatcaagacaacaacaccgaaaacgattttgatgaattatttcacagcgagctt

SEQ ID NO: 97 - DNA (genomic), 1821 bp, Helicobacter pylori; double-stranded, circular
  misc_feature (B) LOCATION 1...1821
  hypothetical: NO
  anti-sense: NO
atgggcggaatcttatcttcactcaacacttcttacaccggcttgcaagcccatcagagcatggtggatgttaccgggaataatatttctaacgctagcgatgaattttatagccgtcagcgcgtgattgcaaagccccaagcagcctatatgtatggcactaaaaacgtgaatatgggcgtggatgtggaagccattgaaagggtgcatgatgagtttgtttttgctcgttacacgaaggctaattacgaaaacacttattacgatacagagttttcgcatttaaaagaagcgagcgcgtattttccggacattgatgaagcgagcctttttacggatttgcaagattattttaactcatggaaagaattgtctaaaaacgccaaagactccgctcaaaaacaggctctcgctcaaaaaacagaagctttaacgcacaacattaaagacaccagagagaggttaacgaccttacagcataaagcgagcgaagaattaaaaagcgtcattaaagaagtcaatagcctgggttctcaaatcgctgagatcaacaaacgcattaaagaagtggaaaacaacaagagtttaaagcatgcgaatgagttaagggataagcgagatgaattagagtttcatttgcgagagcttttaggggggaatgtttttaaaagcagcattaaaacccattcgctcacagataaagactcagcggactttgatgagagctataaccttaatatcgggcatgggttcaatatcattgatggctctattttccatcccttagtggttaaagaatccgaaaataaagggggtttgaaccaggtttattttcaaagcgatgattttaagctcactaatattaccgacaagctcaatcaagggaaagtgggggcgttattgaatgtgtataatgacggctctaacgggactttaaagggcaagttgcaagattatattgatttgttggattcttttgctaggggcttgatagaatccacgaatgcgatttacgctcaaagcgcgagccatcatattgagggcgagcctgtggagtttaatagcgatgaagcctttaaagacacgaattacaatatcaaaaacggctcgtttgatttaatcgcttacaacaccgatggtaaagaaatcgccaggaaaaccattgctatcacgcccattacaaccatgaacgacattatccaagccattaacgctaacaccgatgacaatcaagacaacaacaccgaaaacgattttgatgattatttcacagcgagctttaacaatgagactaaaaagtttgttatccagcctaaaaacgcttcgcaagggttgtttgtctccatgaaagataacggcacgaattttatgggggcgttaaaactcaaccctttttttcaaggcgatgacgcttccaatatcagcttgaataaagaatacaaaaaagagcctaccgctatccgcccatggcttgcccccattaatgggaattttgatgtggcgaacatgatgcaacaattgcaatacgatagcgtggatttctataacgacaagtttgatattaaaccaatgaagatcagcgagttttatcaatttttaaccggtaaaatcaacacggacgctgaaaaatcagggcgtattttggacaccaaacaaagcatgctagagaccattaaaaaagagcaactctctatttcgcaagtgagcgtggatgaagagatggtgaatttgatcaaatttcaaagcggttatgccgctaacgctaaggtcattacggctattgatcggatgatagacactttgttggggattaaacaataa

SEQ ID NO: 98 - DNA (genomic), 312 bp, Helicobacter pylori; double-stranded, circular
  misc_feature (B) LOCATION 1...312
  hypothetical: NO
  anti-sense: NO
gttttggatctatcaaccatactaggcttggtattggcggtcgcttctatttcgttaggcgatattttagaagatggcaacccgttgcacattatccatttgagttcagttattatcatcgtgcccacttcgctttttgccgccatgacaggcacgcatgctcgttacgtgaaagccgcttacaaagagataaaaattgtttttttaaaccctataatcaatttaaaccaaaccattaaaaatttagtggaattagccactttaactaaaaaaacatcgggtgtttattatacaagggcgactggcccaaat

SEQ ID NO: 99 - DNA (genomic), 774 bp, Helicobacter pylori; double-stranded, circular
  misc_feature (B) LOCATION 1...774
  hypothetical: NO
  anti-sense: NO
ttggatctatcaaccatactaggcttggtattggcggtcgcttctatttcgttaggcgatattttagaagatggcaacccgttgcacattatccatttgagttcagtcattatcatcgtgcccacttcgctttttgccgccatgacaggcacgcatgctcgttacgtgaaagccgcttacaaagagataaaaattgtttttttaaaccctaaaatcaatttaaacgaaaccattaaaaatttagtggaattagccactttagctagaaaagatggggtgttgagtttagaggggcgagtggcgcaaattgaagacgatttcacccgtaacggcttgtctatgatcatagatggcaagaatctcaaatccgttaaggaaagcttagaaatcagcattgaagaaatggaagagtattaccacggtgccgctcattactgggagactgccggtgaaaccgctcctactatggggttagtgggggcggttatggggcttatgttggccttgcaaaaactagacaacccggctgaaatggcagcagggatcgctggggcttttacggctactgttacagggattatgtgttcttatgcgatttttggcccttttgggcataagctcaaggctaaatctaaagacattattaaagaaaaaaccgttcttttagaggggattttaggcatcgctaatggggagaatccaagggatttagaaaacaaactcttaaattacatcgctcccggtgagcctaaaaaatctcaatttgaaggttaa

SEQ ID NO: 100 - DNA (genomic), 693 bp, Helicobacter pylori; double-stranded, circular
  misc_feature (B) LOCATION 1...693
  hypothetical: NO
  anti-sense: NO
gttgctcgcgcttttatcgctctttatgccatttcagcggtcaataaatccaaagtggaagccttaaaaaccgaatttattaagatttttaattacgccccaaagccagaggcgatgcagccggttgtagtgatcccccctgattcagggaaagaagaagagcaaatggcgagcgaaagctccaagccggcttcgcaaaataccgaaacaaaagccactatcgctcgcaagggcgaaggcagtgttttagagcaaattgatcaaggctctgttttaaagctcccctctagtttgctgtttgaaaacgccacttcagacgctatcaatcaagacatgatgctttatattgaacggatcgctaaaatcattcaaaaactccctaaaagggtgcatattaatgtgagaggttttacggataacacgcctttaaataaaacccgttttaaaagccactatgaattagccgccaatcgcgcttatagggtgatgaaagtccttatacaatacggcgtggatcctaaccaattgtctttttcttcttacggctctaccaaccctattgcgcccaatgattccctagaaaacagaatgaaaaacaatcgtgtggaaatctttttttcaaccgatgcgaacgatttgagcaagatccattctattttagatgaagaattcaatccccataaacagcaagaa

SEQ ID NO: 101 - DNA (genomic), 690 bp, Helicobacter pylori; double-stranded, circular
  misc_feature (B) LOCATION 1...690
  hypothetical: NO
  anti-sense: NO
gctcgcgcttttatcgctctttatgccatttcagcggtcaataaatccaaagtggaagccttaaaaaccgaatttattaagatttttaattacgccccaaagccagaggcgatgcagccggttgtagtgatcccccctgattcagggaaagaagaagagcaaatggcgagcgaaagctccaagccggcttcgcaaaataccgaaacaaaagccactatcgctcgcaagggcgaaggcagtgttttagagcaaattgatcaaggctctgttttaaagctcccctctagtttgctgtttgaaaacgccacttcagacgctatcaatcaagacatgatgctttatattgaacggatcgctaaaatcattcaaaaactccctaaaagggtgcatattaatgtgagaggttttacggataacacgcctttaaataaaacccgttttaaaagccactatgaattagccgccaatcgcgcttatagggtgatgaaagtccttatacaatacggcgtggatcctaaccaattgtctttttcttcttacggctctaccaaccctattgcgcccaatgattccctagaaaacagaatgaaaaacaatcgtgtggaaatctttttttcaaccgatgcgaacgatttgagcaagatccattctattttagatgaagaattcaatccccataaacagcaagaa

SEQ ID NO: 102 - DNA (genomic), 774 bp, Helicobacter pylori; double-stranded, circular
  misc_feature (B) LOCATION 1...774
  hypothetical: NO
  anti-sense: NO
atggctaagaaaaacaaacccaccgaatgccccgccggcgaaaaatgggcggttccttatgcggactttttgtcgttgttgctcgcgctttttatcgctctttatgccatttcagcggtcaataaatccaaagtggaagccttaaaaaccgaatttattaagatttttaattacgccccaaagccagaggcgatgcagccggttgtagtgatcccccctgattcagggaaagaagaagagcaaatggcgagcgaaagctccaagccggcttcgcaaaataccgaaacaaaagccactatcgctcgcaagggcgaaggcagtgttttagagcaaattgatcaaggctctgttttaaagctcccctctagtttgctgtttgaaaacgccacttcagacgctatcaatcaagacatgatgctttatattgaacggatcgctaaaatcattcaaaaactccctaaaagggtgcatattaatgtgagaggttttacggataacacgcctttaaataaaacccgttttaaaagccactatgaattagccgccaatcgcgcttatagggtgatgaaagtccttatacaatacggcgtggatcctaaccaattgtctttttcttcttacggctctaccaaccctattgcgcccaatgattccctagaaaacagaatgaaaaacaatcgtgtggaaatctttttttcaaccgatgcgaacgatttgagcaagatccattctattttagatgaagaattcaatccccataaacagcaagaatga

SEQ ID NO: 103 - DNA (genomic), 237 bp, Helicobacter pylori; double-stranded, circular
  misc_feature (B) LOCATION 1...237
  hypothetical: NO
  anti-sense: NO
ttgcctttagcccacactaaccccaggcatttagactttgaaaatagcactaaaaatggggcgagtcttttttttagagacgggcatttggctaaaaatgatggcaatagcgtggatttagacatagaaacgagcgaaatgggcaagaactctaccatgtatttagccttgagttcagccttaaaaaagtatcgaggcatgatcaattacgccattgactctagtaagaatttatag

SEQ ID NO: 104 - DNA (genomic), 162 bp, Helicobacter pylori; double-stranded, circular
  misc_feature (B) LOCATION 1...162
  hypothetical: NO
  anti-sense: NO
gtggtcttgcctaaagaaaccttatcttctatcgctaaacgctatcaagtcagcatttccagtatccaattagccaataacctcaaagattctaatatctttatccaccagcgcttaatcatccccactaacaaaaaattactcgctacaagggaattttaa

SEQ ID NO: 105 - DNA (genomic), 180 bp, Helicobacter pylori; double-stranded, circular
  misc_feature (B) LOCATION 1...180
  hypothetical: NO
  anti-sense: NO
agaaacacgagagtatatccgctccattctaagcctggcgttgaaattcaacagcctagacaatctcaagataaagagtatttgctcaatcgtggggcgagggtgagtttagtgggcgtcccgtttaaaagacacacttctttagtccaggtggccaaaaatttgaatttgagtttagaa

SEQ ID NO: 106 - DNA (genomic), 240 bp, Helicobacter pylori; double-stranded, circular
  misc_feature (B) LOCATION 1...240
  hypothetical: NO
  anti-sense: NO
aaactcgcccttttcaaacaacgccaactcaaacaaaataaaaacgctcaagctaatcctaaaagccctttcatcacccatgtggtcttgcctaaagaaaccttatcttctatcgctaaacgctatcaagtcagcatttccagtatccaattagccaataacctcaaagattctaatatctttatccaccagcgcttaatcatccccactaacaaaaaattactcgctacaagggaattt

SEQ ID NO: 107 - DNA (genomic), 594 bp, Helicobacter pylori; double-stranded, circular
  misc_feature (B) LOCATION 1...594
  hypothetical: NO
  anti-sense: NO
gatatgatgccaaaaagaatgaagtgttttagtcaaaaatggttggttttttttgttacccattggcttttgttggcttctttaagtcatgcgaagatggcttttgaatccaatattgacaccaaagcgttagaggcttttggggtcaatgcgagctttttatcccaaatgccaggcgctttaaaaaaggtgaataaggaagaggaatggaaaaagttagtcaaaagatttgacgtgaattaccaattcatccctatcattaaaaacatgctcataggagcgagcgtgccgcaagaatttttgtttttagccatggccgagtctaagttttcatcaagggcttatagcaggaaaaaagcggtagggatttggcaattcatgccaagcacggccaaagagttagggcttaaggtcaatcattacattgatgaaagaagagatcccattaaaagcactcaagcggcgatcgcttatttgaaacggctctacaagcaaaccggtgagtggtatttggtcgctatggcgtataattacggcttacgcaaggttcaaaacgctattaagccgccggcacttcagacattaaagtcttgc

SEQ ID NO: 108 - DNA (genomic), 882 bp, Helicobacter pylori; double-stranded, circular
  misc_feature (B) LOCATION 1...882
  hypothetical: NO
  anti-sense: NO
atgccaaaaagaatgaagtgttttagtcaaaaatggttggttttttttgttacccattggcttttgttggcttctttaagtcatgcgaagatggcttttgaatccaatattgacaccaaagcgttagaggcttttggggtcaatgcgagctttttatcccaaatgccaggcgctttaaaaaaggtgaataaggaagaggaatggaaaaagttagtcaaaagatttgacgtgaattaccaattcatccctatcattaaaaacatgctcataggagcgagcgtgccgcaagaatttttgtttttagccatggccgagtctaagttttcatcaagggcttatagcaggaaaaaagcggtagggatttggcaattcatgccaagcacggccaaagagttagggcttaaggtcaatcattacattgatgaaagaagagatcccattaaaagcactcaagcggcgatcgcttatttgaaacggctctacaagcaaaccggtgagtggtatttggtcgctatggcgtataattacggcttacgcaaggttcaaaacgctattaaagccgccggcacttcagacattaaagtcttgctagatgaagataaaaaatacctccctaaagaaacacgagagtatatccgctccattctaagcctggcgttgaaattcaacagcctagacaatctcaaagataaagagtatttgctcaatcgtggggcgagggtgagtttagtgggcgtcccgtttaaaagacacacttctttagtccaggtggccaaaaatttgaatttgagtttagaaaccttaaaatcttacaaccaccaattccgctataacattctgccctctaaagaccccacctacaccactttatatcccttatga

SEQ ID NO: 109 - DNA (genomic), 1125 bp, Helicobacter pylori; double-stranded, circular
  misc_feature (B) LOCATION 1...1125
  hypothetical: NO
  anti-sense: NO
atgccaaaaagaatgaagtgttttagtcaaaaatggttggttttttttgttacccattggcttttgttggcttctttaagtcatgcgaagatggcttttgaatccaatattgacaccaaagcgttagaggcttttggggtcaatgcgagctttttatcccaaatgccaggcgctttaaaaaaggtgaataaggaagaggaatggaaaaagttagtcaaaagatttgacgtgaattaccaattcatccctatcattaaaaacatgctcataggagcgagcgtgccgcaagaatttttgtttttagccatggccgagtctaagttttcatcaagggcttatagcaggaaaaaagcggtagggatttggcaattcatgccaagcacggccaaagagttagggcttaaggtcaatcattacattgatgaaagaagagatcccattaaaagcactcaagcggcgatcgcttatttgaaacggctctacaagcaaaccggtgagtggtatttggtcgctatggcgtataattacggcttacgcaaggttcaaaacgctattaaagccgccggcacttcagacattaaagtcttgctagatgaagataaaaaatacctccctaaagaaacacgagagtatatccgctccattctaagcctggcgttgaaattcaacagcctagacaatctcaaagataaagagtatttgctcaatcgtggggcgagggtgagtttagtgggcgtcccgtttaaaagacacacttctttagtccaggtggccaaaaatttgaatttgagtttagaaaccttaaaatcttacaaccaccaattccgctataacattctgccctctaaagaccccacctacaccatttatatcccttatgaaaaactcgcccttttcaaacaacgccaactcaaacaaaataaaaacgctcaagctaatcctaaaagccctttcatcacccatgtggtcttgcctaaagaaaccttatcttctatcgctaaacgctatcaagtcagcatttccagtatccaattagccaataacctcaaagattctaatatctttatccaccagcgcttaatcatccccactaacaaaaaattactcgctacaagggaattttaa

SEQ ID NO: 110 - DNA (genomic), 252 bp, Helicobacter pylori; double-stranded, circular
  misc_feature (B) LOCATION 1...252
  hypothetical: NO
  anti-sense: NO
cttataaaagaagcgatgattccagtttttgggagtgaaacagggatttataaccataaggagcaaaattttaaaggcaagggccgtttcattctcacttcaaaggacagcaaggttgaagggcttgacatttcttattcgcatgcattagctattattgaagctcaaagcattcaagccaatttgtttttagatgaaatcaaacaaagccagaaagaaaagaaaaaattccccactttcaaaggagggttt

SEQ ID NO: 111 - DNA (genomic), 348 bp, Helicobacter pylori; double-stranded, circular
  misc_feature (B) LOCATION 1...348
  hypothetical: NO
  anti-sense: NO
aaggcttgcaagatgaagtgctcaagctttacctctaatagcgtcttaaacttttttgtagttttgtctttcatcacgatagggctagtgtttttctttttgcgttcccaaccaactagcgtagtttctaaagaaaatatccctaaaattgaattagaaaattttaaagcgtttcaaatcaacgataaaatccttgatctgtccatagagggcaaaaaagccctacaatacgatgatcatgaaatcttttttgattctaaaatcaagcgctatgatgaagacaccattgaaagcgttgagtcccctgaagccaaacggcagcaggatttgtatttcttccctaacggg

SEQ ID NO: 112 - DNA (genomic), 594 bp, Helicobacter pylori; double-stranded, circular
  misc_feature (B) LOCATION 1...594
  hypothetical: NO
  anti-sense: NO
atgaagtgctcaagctttacctctaatagcgtcttaaacttttttgtagttttgtctttcatcacgatagggctagtgtttttctttttgcgttcccaaccaactagcgtagtttctaaagaaaatatccctaaaattgaattagaaaattttaaagcgtttcaaatcaacgataaaatccttgatctgtccatagagggcaaaaaagccctacaatacgatgatcatgaaatcttttttgattctaaaatcaagcgctatgatgaagacaccattgaaagcgttgagtcccctgaagccaaacggcagcaggatttgtatttcttccctaacggggtaacttataaaagaagcgatgattccagtttttggagtgaaacagggatttataaccataaggagcaaaattttaaaggcaagggccgtttcattctcacttcaaaggacagcaaggttgaagggcttgacatttcttattcgcatgcattagctattattgaagctcaaagcattcaagccaatttgtttttagatgaaatcaaacaaagccagaaagaaaagaaaaaattccccactttcaaaggagggttttaa

SEQ ID NO: 113 - DNA (genomic), 159 bp, Helicobacter pylori; double-stranded, circular
  misc_feature (B) LOCATION 1...159
  hypothetical: NO
  anti-sense: NO
ttgggtttggtgwrcggratttctctcttgcatttgagtttggagcaaaaaatcagcgtgtttcttggrcycaatttaatgctttayccggtcayagaggtgctttttagtatccttaggcgcaaaataaaacgccagaaagccacccatgccggataa

SEQ ID NO: 114 - DNA (genomic), 426 bp, Helicobacter pylori; double-stranded, circular
  misc_feature (B) LOCATION 1...426
  hypothetical: NO
  anti-sense: NO
gtgttgtgggtgctatattttttaaccagtttatttatttgctctttgattgttttgtggtctaaaaaatccatgctctttgtggataacgctaataaaatccaaggcttccatcatgcaagaaccccacgagccggggggcttgggatctttctttcttttgcgttggcttgttatcttgaaccttttgagatgccttttaaggggccttttgttttcttagggctatcgctagtgtttttgagcggttttttagaagacattaacctttcattaagccccaaaatacgccttattttgcaagctgtaggggtcgtttgcatcatttcatcaacgcctttagtggtgagcgatttttcgcccctttttagcttgccttatttcatcgcttttttattcgctattttttatgctggtgggtatcag

SEQ ID NO: 115 - DNA (genomic), 489 bp, Helicobacter pylori; double-stranded, circular
  misc_feature (B) LOCATION 1...489
  hypothetical: NO
  anti-sense: NO
cagtttgtcttgtttgctcgcttacatggtgcttgggtttatggtgttaaatttcccttcaggaaagattttttaggcgatgggggggcgtattttttgggtttggtgtgcgggatttctctcttgcatttgagtttggagcaaaaaatcagcgtgttttttgggctcaatttaatgctttatccggtcatagaggtgctttttagtatccttaggcgcaaaataaaacgccagaaagccaccatgccggataatttgcatttgcacacccttttatttaaattcttgcaacaacgctctttcaattaccctaaccctttatgcgcgtttatccttattctatgcaacctgccttttattttaataagcgttttgtttcgcttggacgcttatgcgctcattgtgattagcctagtctttatcgcatgctatttaataggctatgcttatttgaataggcaagtttgcgctttagaaaagcgggcgttt

SEQ ID NO: 116 - DNA (genomic), 591 bp, Helicobacter pylori; double-stranded, circular
  misc_feature (B) LOCATION 1...591
  hypothetical: NO
  anti-sense: NO
aaagtgttgtgggtgctatattttttaaccagtttatttatttgctctttgattgttttgtggtctaaaaaatccatgctctttgtggataacgctaataaaatccaaggcttccatcatgcaagaaccccacgagccggggggcttgggatctttctttcttttgcgttggcttgttatcttgaaccttttgagatgccttttaaggggccttttgttttcttagggctatcgctagtgtttttgagcggttttttagaagacattaacctttcattaagccccaaaatacgccttattttgcaagctgtaggggtcgtttgcatcatttcatcaacgcctttagtggtgagcgatttttcgcccctttttagcttgccttatttcatcgcttttttattcgctatttttatgctggtgggtatcagtaacgctattaatatcattgacgggtttaacgggcttgcatctgggatttgcgcgatcgcgcttttagtcattcattatatagaccctagcagtttgtcttgtttgctcgcttacatggtgcttgggtttatggtgttaaatttcccttcaggaaagattttt

SEQ ID NO: 117 - DNA (genomic), 999 bp, Helicobacter pylori; double-stranded, circular
  misc_feature (B) LOCATION 1...999
  hypothetical: NO
  anti-sense: NO
gtgctatattttttaaccagtttatttatttgctctttgattgttttgtggtctaaaaaatccatgctctttgtggataacgctaataaaatccaaggcttccatcatgcaagaaccccacgagccggggggcttgggatctttctttcttttgcgttggcttgttatcttgaaccttttgagatgccttttaaggggccttttgttttcttagggctatcgctagtgtttttgagcggttttttagaagacattaacctttcattaagccccaaaatacgccttattttgcaagctgtaggggtcgtttgcatcatttcatcaacgcctttagtggtgagcgatttttcgcccctttttagcttgccttatttcatcgcttttttattcgctatttttatgctggtgggtatcagtaacgctattaatatcattgacgggtttaacgggcttgcatctgggatttgcgcgatcgcgcttttagtcattcattatatagaccctagcagtttgtcttgtttgctcgcttacatggtgcttgggtttatggtgttaaatttcccttcaggaaagatttttttaggcgatgggggggcgtattttttgggtttggtgtgcgggatttctctcttgcatttgagtttggagcaaaaaatcagcgtgttttttgggctcaatttaatgctttatccggtcatagaggtgctttttagtatccttaggcgcaaaataaaacgccagaaagccaccatgccggataatttgcatttgcacacccttttatttaaattcttgcaacaacgctctttcaattaccctaaccctttatgcgcgtttatccttattctatgcaacctgccttttattttaataagcgttttgtttcgcttggacgcttatgcgctcattgtgattagcctagtctttatcgcatgctatttaataggctatgcttatttgaataggcaagtttgcgctttagaaaagcgggcgttttaa

SEQ ID NO: 118 - DNA (genomic), 1008 bp, Helicobacter pylori; double-stranded, circular
  misc_feature (B) LOCATION 1...1008
  hypothetical: NO
  anti-sense: NO
gtgttgtgggtgctatattttttaaccagtttatttatttgctctttgattgttttgtggtctaaaaaatccatgctctttgtggataacgctaataaaatccaaggcttccatcatgcaagaaccccacgagccggggggcttgggatctttctttcttttgcgttggcttgttatcttgaaccttttgagatgccttttaaggggccttttgttttcttagggctatcgctagtgtttttgagcggttttttagaagacattaacctttcattaagccccaaaatacgccttattttgcaagctgtaggggtcgtttgcatcatttcatcaacgcctttagtggtgagcgatttttcgcccctttttagcttgccttatttcatcgcttttttattcgctatttttatgctggtgggtatcagtaacgctattaatatcattgacgggtttaacgggcttgcatctgggatttgcgcgatcgcgcttttagtcattcattatatagaccctagcagtttgtcttgtttgctcgcttacatggtgcttgggtttatggtgttaaatttcccttcaggaaagatttttttaggcgatgggggggcgtattttttgggtttggtgtgcgggatttctctcttgcatttgagtttggagcaaaaaatcagcgtgttttttgggctcaatttaatgctttatccggtcatagaggtgctttttagtatccttaggcgcaaaataaaacgccagaaagccaccatgccggataatttgcatttgcacacccttttatttaaattcttgcaacaacgctctttcaattaccctaaccctttatgcgcgtttatccttattctatgcaacctgccttttattttaataagcgttttgtttcgcttggacgcttatgcgctcattgtgattagcctagtctttatcgcatgctatttaataggctatgcttatttgaataggcaagtttgcgctttagaaaagcgggcgttttaa

SEQ ID NO: 119 - DNA (genomic), 219 bp, Helicobacter pylori; double-stranded, circular
  misc_feature (B) LOCATION 1...219
  hypothetical: NO
  anti-sense: NO
gtggatggggctatcataacagggaattatgccttgcaagcaaaactcaccggagccttattttcagaagataaggactcgccttatgctaatcttgtagcctctcgtgaggataatgcgcaagatgaagcgataaaagcgttgattgaagccttacagagcgaaaagaccaggaaattcattttggatacctataagggggcgattatcccggctttt

SEQ ID NO: 120 - DNA (genomic), 816 bp, Helicobacter pylori; double-stranded, circular
  misc_feature (B) LOCATION 1...816
  hypothetical: NO
  anti-sense: NO
atgaacatattcaagcgtattatttgcgtaaccgctattgttttaggtttttttaaccttttagacgccaaacaccacaaagaaaaaaaagaagaccacaaaatcactcgtgagcttaaagtgggcgctaaccctgtgccgcatgcgcaaatcttgcaatcagttgtggatgatttgaaagagaaagggatcaaattagtgatcgtgtcttttacggattatgtgttgcctaatttagcgctcaatgacggctctttagacgcgaattacttccagcaccgcccttatttggatcggtttaatttggacagaaaaatgcaccttgttggtttggccaatatccatgtggagcctttaagattttattctcaaaaaatcacagacattaaaaaccttaaaaaaggctcagtgattgctgtgccaaatgatccggccaatcaaggcagggcgttgattttactccataaacaaggccttatcgctctcaaagacccaagcaatctatacgctacggagtttgatattgtcaaaaatccttacaacatcaaaatcaaacccctagaagctgcgttattgcctaaggttttaggggatgtggatggggctatcataacagggaattatgccttgcaagcaaaactcaccggagccttattttcagaagataaggactcgccttatgctaatcttgtagcctctcgtgaggataatgcgcaagatgaagcgataaaagcgttgattgaagccttacagagcgaaaagaccaggaaattcattttggatacctataagggggcgattatcccggctttttaa

SEQ ID NO: 121 - DNA (genomic), 816 bp, Helicobacter pylori; double-stranded, circular; identical to SEQ ID NO: 120
  misc_feature (B) LOCATION 1...816
  hypothetical: NO
  anti-sense: NO

SEQ ID NO: 122 - DNA (genomic), 840 bp, Helicobacter pylori; double-stranded, circular
  misc_feature (B) LOCATION 1...840
  hypothetical: NO
  anti-sense: NO
attaattttgttaataaaggggtttttatgaacatattcaagcgtattatttgcgtaaccgctattgttttaggtttttttaaccttttagacgccaaacaccacaaagaaaaaaaagaagaccacaaaatcactcgtgagcttaaagtgggcgctaaccctgtgccgcatgcgcaaatcttgcaatcagttgtggatgatttgaaagagaaagggatcaaattagtgatcgtgtcttttacggattatgtgttgcctaatttagcgctcaatgacggctctttagacgcgaattacttccagcaccgcccttatttggatcggtttaatttggacagaaaaatgcaccttgttggtttggccaatatccatgtggagcctttaagattttattctcaaaaaatcacagacattaaaaaccttaaaaaaggctcagtgattgctgtgccaaatgatccggccaatcaaggcagggcgttgattttactccataaacaaggccttatcgctctcaaagacccaagcaatctatacgctacggagtttgatattgtcaaaaatccttacaacatcaaaatcaaacccctagaagctgcgttattgcctaaggttttaggggatgtggatggggctatcataacagggaattatgccttgcaagcaaaactcaccggagccttattttcagaagataaggactcgccttatgctaatcttgtagcctctcgtgaggataatgcgcaagatgaagcgataaaagcgttgattgaagccttacagagcgaaaagaccaggaaattcattttggatacctataagggggcgattatcccggctttt

SEQ ID NO: 123 - DNA (genomic), 192 bp, Helicobacter pylori; double-stranded, circular
  misc_feature (B) LOCATION 1...192
  hypothetical: NO
  anti-sense: NO
ccaaatgaagcgagcgcggctgttaatgtgggctataagatcagtaagagtttgacagcgagcgtgaaattagaatatttgggcgtgatgacgcattcaggctttacggtagggagttacagacccacgcccggctctaaagcactttattcagacaggagccatctaatgacaacccttagcgccaaagtc

SEQ ID NO: 124 - DNA (genomic), 438 bp, Helicobacter pylori; double-stranded, circular
  misc_feature (B) LOCATION 1...438
  hypothetical: NO
  anti-sense: NO
gtgcaagcgtttgattataaaattgaagttttggcagagtccttttctaaagttggctttaataaaaaaaagattgacatagctagggggatttatcctacagagacttttgtaaccgctgtgggtcagggcaatatttatgcggattttttatccaaaagccttaaagatcaagggcatgttttagagggaaaagtcggcggcacaatcggtgggattgcttatgacagcacgaaattcaatcaaggcggatcggttatttataattatatcggttattgggatggctatttagggggtaaaagggccttgcttgatggcacgagtatccatgagtgcgcgcttggctctgatggcaaggtgattgattctatagcgtgcgggaacgctagagccaataaaatccgccgtaattacttgatgaatacccccttctca

SEQ ID NO: 125 - DNA (genomic), 435 bp, Helicobacter pylori; double-stranded, circular
  misc_feature (B) LOCATION 1...435
  hypothetical: NO
  anti-sense: NO
caagcgtttgattataaaattgaagttttggcagagtccttttctaaagttggctttaataaaaaaaagattgacatagctagggggatttatcctacagagacttttgtaaccgctgtgggtcagggcaatatttatgcggattttttatccaaaagccttaaagatcaagggcatgttttagagggaaaagtcggcggcacaatcggtgggattgcttatgacagcacgaaattcaatcaaggcggatcggttatttataattatatcggttattgggatggctatttagggggtaaaagggccttgcttgatggcacgagtatccatgagtgcgcgcttggctctgatggcaaggtgattgattctatagcgtgcgggaacgctagagccaataaaatccgccgtaattacttgatgaatacccccttctca

SEQ ID NO: 126 - DNA (genomic), 741 bp, Helicobacter pylori; double-stranded, circular
  misc_feature (B) LOCATION 1...741
  hypothetical: NO
  anti-sense: NO
ttccgctataaggatatatttgcggctaaaggggggcgttatcaatccaatgctccttatatgagctcttatacgcaaggctttgaaatcagcgctaaaatcaaggataaaaatgaggggagccataaattatggtggtttagctcatggggtagggcgttcgcttatggggagtggatttatgatttttactctccaagaaccgtgattaaaaacgggcgcactctaaattatggtatccatttagtggattacacttacgaaaggaaaggggttagcgtcagcccctttttccagttttcgcccgggacttattatagccctggggtggctgtaggctatgatagtaaccctaattttaatggcgtgggctttagatccgaaacgaaggcttatattttgctccctgtccatgccccccttaaaagggatacttatcgttacgctgtgaaagctggcaccgctgggcaaagcctgctcattaggcaacgatttgattacaatgaatttaactttgggggagcgttttataaagtatggaaaaacgcaaacgcttacataggcacgacaggaaaccctctaggcattgatttttggaccaatagcgtttatgatatagggcaagccttaagccatgtggtaaccgctgatgccgtctctggttgggtttttggtggaggcgtgcataaaaaatggctgtgggggactttgtggcgttggactagcggcgctttagccaaa

SEQ ID NO: 127 - DNA (genomic), 810 bp, Helicobacter pylori; double-stranded, circular
  misc_feature (B) LOCATION 1...810
  hypothetical: NO
  anti-sense: NO
gtgctaaacaccacccaaaaaagcctattggttttcatgggggtttttttccttatctttggcgtggatcaagcgattaaacacgctattttagaggggtttcactatgaaagtttggttatagatattgttttagtgttcaataaaggcgtggcgttttccttactcagttttttagaggggggtttgaaatacttgcaaatccttttaattttagggctttttatctttttaatgcgccaaaaggagctttttaaaagccatgcgatagagtttggcatggtgtttggcgctggggtttctaatgttttaaatcggttagtatcattggggcaattgtatattctttatgatgtattggctattagaagggaaaaaatgaaaaatagcgcgcctttaaagaataaagttttttgtgggttatacgttttaagtttaagcgcttctgtgcaagcgtttgattataaaattgaagttttggcagagtccttttctaaagttggctttaataaaaaaaagattgacatagctagggggatttatcctacagagacttttgtaaccgctgtgggtcagggcaatatttatgcggattttttatccaaaagccttaaagatcaagggcatgttttagagggaaaagtcggcggcacaatcggtgggattgcttatgacagcacgaaattcaatcaaggcggatcggttatatataattatatcggttattgggatggctatttagggggtacaaaggcctgcttgatggcacaagtatccatgactgcgcgcttggctctgatggcaaggtga

SEQ ID NO: 128 - DNA (genomic), 1440 bp, Helicobacter pylori; double-stranded, circular
  misc_feature (B) LOCATION 1...1440
  hypothetical: NO
  anti-sense: NO
atgaaaaatagcgcgcctttaaagaataaagttttttgtgggttatacgttttaagtttaagcgcttctgtgcaagcgtttgattataaaattgaagttttggcagagtccttttctaaagttggctttaataaaaaaaagattgacatagctagggggatttatcctacagagacttttgtaaccgctgtgggtcagggcaatatttatgcggattttttatccaaaagccttaaagatcaagggcatgttttagagggaaaagtcggcggcacaatcggtgggattgcttatgacagcacgaaattcaatcaaggcggatcggttatttataattatatcggttattgggatggctatttagggggtaaaagggccttgcttgatggcacgagtatccatgagtgcgcgcttggctctgatggcaaggtgattgattctatagcgtgcgggaacgctagagccaataaaatccgccgtaattacttgatgaataacgcttttttagaataccgctataaggatatatttgcggctaaaggggggcgttatcaatccaatgctccttatatgagctcttatacgcaaggctttgaaatcagcgctaaaatcaaggataaaaatgaggggagccataaattatggtggtttagctcatggggtagggcgttcgcttatggggagtggatttatgatttttactctccaagaaccgtgattaaaaacgggcgcactctaaattatggtatccatttagtggattacacttacgaaaggaaaggggttagcgtcagcccctttttccagttttcgcccgggacttattatagccctggggtggctgtaggctatgatagtaaccctaattttaatggcgtgggctttagatccgaaacgaaggcttatattttgctccctgtccatgccccccttaaaagggatacttatcgttacgctgtgaaagctggcaccgctgggcaaagcctgctcattaggcaacgatttgattacaatgaatttaactttgggggagcgttttataaagtatggaaaaacgcaaacgcttacataggcacgacaggaaaccctctaggcattgatttttggaccaatagcgtttatgatatagggcaagccttaagccatgtggtaaccgctgatgccgtctctggttgggtttttggtggaggcgtgcataaaaaatggctgtgggggactttgtggcgttggactagcggcgctttagccaatgaagcgagcgcggctgttaatgtgggctataagatcagtaagagtttgacagcgagcgtgaaattagaatatttgggcgtgatgacgcattcaggctttacggtagggagttacagacccacgcccggctctaaagcactttattcagacaggagccatctaatgacaacccttagcgccaaattctaa

SEQ ID NO: 129 - DNA (genomic), 1461 bp, Helicobacter pylori; double-stranded, circular
  misc_feature (B) LOCATION 1...1461
  hypothetical: NO
  anti-sense: NO
ttggctattaaaagggaaaaaatgaaaaatagcgcgcctttaaagaataaagttttttgtgggttatacgttttaagtttaagcgcttctgtgcaagcgtttgattataaaattgaagttttggcagagtccttttctaaagttggctttaataaaaaaaagattgacatagctagggggatttatcctacagagacttttgtaaccgctgtgggtcagggcaatatttatgcggattttttatccaaaagccttaaagatcaagggcatgttttagagggaaaagtcggcggcacaatcggtgggattgcttatgacagcacgaaattcaatcaaggcggatcggttatttataattatatcggttattgggatggctatttagggggtaaaagggccttgcttgatggcacgagtatccatgagtgcgcgcttggctctgatggcaaggtgattgattctatagcgtgcgggaacgctagagccaataaaatccgccgtaattacttgatgaataacgcttttttagaataccgctataaggatatatttgcggctaaaggggggcgttatcaatccaatgctccttatatgagctcttatacgcaaggctttgaaatcagcgctaaaatcaaggataaaaatgaggggagccataaattatggtggtttagctcatggggtagggcgttcgcttatggggagtggatttatgatttttactctccaagaaccgtgattaaaaacgggcgcactctaaattatggtatccatttagtggattacacttacgaaaggaaaggggttagcgtcagcccctttttccagttttcgcccgggacttattatagccctggggtggctgtaggctatgatagtaaccctaattttaatggcgtgggctttagatccgaaacgaaggcttatattttgctccctgtccatgccccccttaaaagggatacttatcgttacgctgtgaaagctggcaccgctgggcaaagcctgctcattaggcaacgatttgattacaatgaatttaactttgggggagcgttttataaagtatggaaaaacgcaaacgcttacataggcacgacaggaaaccctctaggcattgatttttggaccaatagcgtttatgatatagggcaagccttaagccatgtggtaaccgctgatgccgtctctggttgggtttttggtggaggcgtgcataaaaaatggctgtgggggactttgtggcgttggactagcggcgctttagccaatgaagcgagcgcggctgttaatgtgggctataagatcagtaagagtttgacagcgagcgtgaaattagaatatttgggcgtgatgacgcattcaggctttacggtagggagttacagacccacgcccggctctaaagcactttattcagacaggagccatctaatgacaacccttagcgccaaattctaa

SEQ ID NO: 130 - DNA (genomic), 255 bp, Helicobacter pylori; double-stranded, circular
  misc_feature (B) LOCATION 1...255
  hypothetical: NO
  anti-sense: NO
tccatagtatacggtaaaaataaattattctcagatgaattttatgaaaaaatcgaggatattttaacaaataacaacccaagatacaaacaagtgtgcattatttttgatgcagacataaaaaaagagaaccaagaaagcgatgcaggttttgataacaagcttaagcatattcgtgaaaaattcaaagaaaaagggactgattttcccaaagaacaaatcttttattccctaacaatcaagatgatggcgatt

SEQ ID NO: 131 - DNA (genomic), 390 bp, Helicobacter pylori; double-stranded, circular
  misc_feature (B) LOCATION 1...390
  hypothetical: NO
  anti-sense: NO
ttttcccaaagaacaaatcttttattccctaacaatcaagatgatggcgatttagaaaccctattattagaaattgctaaacacgatgaatttcttaaatgctttgaaggatacttagaatgtattaaaagtaaagaacattataaaccgattaaaaacataagaaaaaatatgctgtatgcctatttagaagcgcttggattagagaatttgaccaagaccaatatagatgtttttgatagtaaaggtaaaataaagagtagatatgaagaaaactacaaaaaattaacagaagaagttattgatttcagctcgaattctctcattccccttaaaaattttctagggcaattcgcagaaaataaacaaaaaacaaatcctaaaattttc

SEQ ID NO: 132 - DNA (genomic), 504 bp, Helicobacter pylori; double-stranded, circular
  misc_feature (B) LOCATION 1...504
  hypothetical: NO
  anti-sense: NO
gtgtgcattatttttgatgcagacataaaaaaagagaaccaagaaagcgatgcaggttttgataacaagcttaagcatattcgtgaaaaattcaaagaaaaagggactgattttcccaaagaacaaatctttttattccctaacaatcaagatgatggcgatttagaaaccctattattagaaattgctaaacacgatgaatttcttaaatgctttgaaggatacttagaatgtattaaaagtaaagaacattataaaccgattaaaaacataagaaaaaatatgctgtatgcctatttagaagcgcttggattagagaatttgaccaagaccaatatagatgtttttgatagtaaaggtaaaataaagagtagatatgaagaaaactacaaaaaattaacagaagaagttattgatttcagctcgaattctctcattccccttaaaaattttctagggcaattcgcagaaaataaacaaaaaacaaatcctaaaattttctaa

SEQ ID NO: 133 - DNA (genomic), 474 bp, Helicobacter pylori; double-stranded, circular
  misc_feature (B) LOCATION 1...474
  hypothetical: NO
  anti-sense: NO
ctccagtatcaccgggaatattttaaattatttgttcgcctatggctgcgttttggctatcaaactttcaggccgtcgttttttgcgcgcttggttaagcccaatatcattggcaggcgcatctatattcaatattatggaggagctcctaagaaagcgggctttgggagcgtggggtttcaatcggtcatgttgaatggggattttttattagactttcctttgccctttgtggggaaatacctttatatgggggggtatatgggtttaggcttgggggttgtggcgcatggggtgaattatacggcggaatgggggatgtcttttaacgcaggattggctctaacggtattagaaaaaaaccgcattgaatttgaatttaaaattttgaataatttcccttttttgcaatctaattcttcaaaagagacttggtggggagctatagcaagcattgggtatcaatatgtgttc

SEQ ID NO: 134 - DNA (genomic), 723 bp, Helicobacter pylori; double-stranded, circular
  misc_feature (B) LOCATION 1...723
  hypothetical: NO
  anti-sense: NO
ttgggtcttaaaaaacgagctattttatggtctttaatgggattttgtgcaggattgagcgcgcttgattatgacaccctagacccaaaatattacaaatatatcaagtattataaggcttatgaagataaagaagttgaagaattgatcagagacttgaaaagggcgaacgctaaaagcgggcttattttagggatcaataccggttttttttataaccatgaaatcatggtcaaaaccaatagctccagtatcaccgggaatattttaaattatttgttcgcctatggcttgcgttttggctatcaaactttcaggccgtcgttttttgcgcgcttggttaagcccaatatcattggcaggcgcatctatattcaatattatggaggagctcctaagaaagcgggctttgggagcgtggggtttcaatcggtcatgttgaatggggattttttattagactttcctttgccctttgtggggaaatacctttatatgggggggtatatgggtttaggcttgggggttgtggcgcatggggtgaattatacggcggaatgggggatgtcttttaacgcaggattggctctaacggtattagaaaaaaaccgcattgaatttgaatttaaaattttgaataatttcccttttttgcaatctaattcttcaaaagagacttggtggggagctatagcaagcattgggtatcaatatgtgttctaa

SEQ ID NO: 135 - DNA (genomic), 645 bp, Helicobacter pylori; double-stranded, circular
  misc_feature (B) LOCATION 1...645
  hypothetical: NO
  anti-sense: NO
ttggatggtttgaaaaaagaaagacaaggattttacaagcaagtgcattatttaagaattttaatactgagtatgagttttttaaatattttaaatgctgaaaatttgagttacatgtcttcttcttatcaaataggcacggtgtttatgcgccccttaaacaccaacaaacttttacaaggggcttcaatccttcaaggctatgaagtgaatcctaaaaacgactgggcttattctaggtattatttctttatagattatggtaatgtgcttttcaataacgattccactttgcaagcgaacatgttcacttatggggtgggaggagattttatggtcgcttacgctaaaaaccctatcaaccgctgggcttttttctttggtttgcaactagcggctaacacatggatactcaataataaagtcaaagatttggtggtgaatacttgggattcattgaaagatttcaattttcataacacttattttagggctatcgggaaatttggggtgcagtttcgcacgatcgttttgtatcataaggtggatgtggaaattggcatgaaaatctttttaacgcctgaaaggcgcagcttgtttgaaaggagttttttgttttttgtttcgcactcgtggcatttttaa

SEQ ID NO: 136 - DNA (genomic), 690 bp, Helicobacter pylori; double-stranded, circular
  misc_feature (B) LOCATION 1...690
  hypothetical: NO
  anti-sense: NO
ttcaaaaataataagacacccctaacttttgagcgtgataaagggtcattggatggtttgaaaaaagaaagacaaggattttacaagcaagtgcattatttaagaattttaatactgagtatgagttttttaaatattttaaatgctgaaaatttgagttacatgtcttcttcttatcaaataggcacggtgtttatgcgccccttaaacaccaacaaacttttacaaggggcttcaatccttcaaggctatgaagtgaatcctaaaaacgactgggcttattctaggtattatttctttatagattatggtaatgtgcttttcaataacgattccactttgcaagcgaacatgttcacttatggggtgggaggagattttatggtcgcttacgctaaaaaccctatcaaccgctgggcttttttctttggtttgcaactagcggctaacacatggatactcaataataaagtcaaagatttggtggtgaatacttgggattcattgaaagatttcaattttcataacacttattttagggctatcgggaaatttggggtgcagtttcgcacgatcgttttgtatcataaggtggatgtggaaattggcatgaaaatctttttaacgcctgaaaggcgcagcttgtttgaaaggagttttttgttttttgtttcgcactcgtggcatttt

SEQ ID NO: 137 - DNA (genomic), 510 bp, Helicobacter pylori; double-stranded, circular
  misc_feature (B) LOCATION 1...510
  hypothetical: NO
  anti-sense: NO
ttgaaaaatctctcaacacttctggtgtttttattcttttgtttggggtgtgtgagcaattttaatgaagacacttacacgctagacttagttttagaaaaaaagatccaagccagtaggaaaggcgaaatcacccaagataatgtgcctatcatcacggctatcgctacgcatttaaacgatgtggatagcggcacttactacgatcatgagtattttttagtggagattttcacgcaaaataacgactggatagatgatggctatatttcttatgaactttttggcacaaaacctacaggatcagaacctttatgggtgcgagagattacaagagatgaatttgatggcattttagaaaccacgaaccggtggagccgagcctttttgatcgcttttgacaaattggattatttagcggtgcaagaagccaaactagagcttgatgcctatagtttaggcaaaattgtttttaatttcgcttaccaagtccccttacctcaattttaa

SEQ ID NO: 138 - DNA (genomic), 516 bp, Helicobacter pylori; double-stranded, circular
  misc_feature (B) LOCATION 1...516
  hypothetical: NO
  anti-sense: NO
atgggcttgaaaaatctctcaacacttctggtgtttttattcttttgtttggggtgtgtgagcaattttaatgaagacacttacacgctagacttagttttagaaaaaaagatccaagccagtaggaaaggcgaaatcacccaagataatgtgcctatcatcacggctatcgctacgcatttaaacgatgtggatagcggcacttactacgatcatgagtattttttagtggagattttcacgcaaaataacgactggatagatgatggctatatttcttatgaactttttggcacaaaacctacaggatcagaacctttatgggtgcgagagattacaagagatgaatttgatggcattttagaaaccacgaaccggtggagccgagcctttttgatcgcttttgacaaattggattatttagcggtgcaagaagccaaactagagcttgatgcctatagtttaggcaaaattgtttttaatttcgcttaccaagtccccttacctcaattttaa

SEQ ID NO: 139 - DNA (genomic), 519 bp, Helicobacter pylori; double-stranded, circular
  misc_feature (B) LOCATION 1...519
  hypothetical: NO
  anti-sense: NO
caaggaatgggcttgaaaaatctctcaacacttctggtgtttttattcttttgtttggggtgtgtgagcaattttaatgaagacacttacacgctagacttagttttagaaaaaaagatccaagccagtaggaaaggcgaaatcacccaagataatgtgcctatcatcacggctatcgctacgcatttaaacgatgtggatagcggcacttactacgatcatgagtattttttagtggagattttcacgcaaaataacgactggatagatgatggctatatttcttatgaactttttggcacaaaacctacaggatcagaacctttatgggtgcgagagattacaagagatgaatttgatggcattttagaaaccacgaaccggtggagccgagcctttttgatcgcttttgacaaattggattatttagcggtgcaagaagccaaactagagcttgatgcctatagtttaggcaaaattgtttttaatttcgcttaccaagtccccttacctcaattt

SEQ ID NO: 140 - DNA (genomic), 942 bp, Helicobacter pylori; double-stranded, circular
  misc_feature (B) LOCATION 1...942
  hypothetical: NO
  anti-sense: NO
ttgaaactcaaatactggttagtttatctggcgttcattataggacttcaagcgacagattatgacaatttagaagaagaaaaccaacaattagacgaaaaaataaacaatttaaagcgacagctcaccgaaaaaggggtttcacccaaagagatggataaggataagtttgaagaagaatatttagagcgaacttacccaaagatttcttcaaagaaaagaaaaaaattgctcaaatctttttccatagccgatgataagagtggggtgtttttagggggcgggtatgcttatggggaacttaacttgtcttatcaaggggagatgttagacaggtatggcgcaaatgcccctagcgcgtttaaaaacaatatcaatattaacgctcctgtttctatgattagcgttaaatttgggtatcaaaaatacttcgtgccttattttgggacacgattttatggggatttgttgcttgggggaggggcgttaaaagagaacgcgctcaagcagcctgtaggctcgtttttttatgttttaggggctatgaataccgatttattgtttgacatgcctttagattttaagactaaaaagcattttttaggcgtttatgcgggttttgggatagggcttatgctttatcaagacaagcctaatcaaaacgggaggaatttgatagtagggggttattcaagccctaattttttatggaaatctttgattgaagtggattacacttttaatgtgggcgtgagtttaacgctttataggaaacaccgcttagagattggcacaaaattaccgattagctatttgaggatgggagtagaagagggagcgatttatcacaataaagaaaatgatgaacgattgttgatttcggctaacaaccagttcaaacgatccagttttttattagtgaattatgcgttcattttttga

SEQ ID NO: 141 - DNA (genomic), 969 bp, Helicobacter pylori; double-stranded, circular
  misc_feature (B) LOCATION 1...969
  hypothetical: NO
  anti-sense: NO
ttacaactatttattgtaaaggctcaagggttgaaactcaaatactggttagtttatctggcgttcattataggacttcaagcgacagattatgacaatttagaagaagaaaaccaacaattagacgaaaaaataaacaatttaaagcgacagctcaccgaaaaaggggtttcacccaaagagatggataaggataagtttgaagaagaatatttagagcgaacttacccaaagatttcttcaaagaaaagaaaaaaattgctcaaatctttttccatagccgatgataagagtggggtgtttttagggggcgggtatgcttatggggaacttaacttgtcttatcaaggggagatgttagacaggtatggcgcaaatgcccctagcgcgtttaaaaacaatatcaatattaacgctcctgtttctatgattagcgttaaatttgggtatcaaaaatacttcgtgccttattttgggacacgattttatggggatttgttgcttgggggaggggcgttaaaagagaacgcgctcaagcagcctgtaggctcgtttttttatgttttaggggctatgaataccgatttattgtttgacatgcctttagattttaagactaaaaagcattttttaggcgtttatgcgggttttgggatagggcttatgctttatcaagacaagcctaatcaaaacgggaggaatttgatagtagggggttattcaagccctaattttttatggaaatctttgattgaagtggattacacttttaatgtgggcgtgagtttaacgctttataggaaacaccgcttagagattggcacaaaattaccgattagctatttgaggatgggagtagaagagggagcgatttatcacaataaagaaaatgatgaacgattgttgatttcggctaacaaccagttcaaacgatccagttttttattagtgaattatgcgttcattttt

SEQ ID NO: 142 - DNA (genomic), 1182 bp, Helicobacter pylori; double-stranded, circular
  misc_feature (B) LOCATION 1...1182
  hypothetical: NO
  anti-sense: NO
atgacttcagcttcaagccattcttttaaagaacaagattttcatattcctatcgctttcgcttttgataagaattatctcattcctgcgggcgcatgcatttattccttgctagaaagcatcgctaaagccaataaaaaaatccgttacaccttacacgctttagtggtaggcttgaatgaagaagataaaacaaaacttaaccaaatcacagagccttttaaagaatttgctgttttagaagtaaaagatattgaaccttttttagacactatccctaacccttttgatgaggatttcaccaagcgtttttctaaaatggtgttagtgaagtattttctagcggatttattccccaaatattctaaaatggtgtggagcgatgtggatgttatcttttgtaatgaatttagcgctgatttcttaaacattaaagaagatgatgagaattatttttatggggtttatgacaaaatatacccgtatgaaggctttttttattgcaacttaacttaccagcgaaaaaatcaattttgtaaaaaaatattagaaatcatacgcgcacaaaaaatagataaagaaccgcaattgacagaattttgtcgttcaaagatcgcgccattaaaaatagagtattgtattttcccacactattatagcctttctgaagagcatttaaagggcgtggccaatgcaatttatcataacaccattaaacaagccctaagagaacctatcgttatacaatatgactctcatccttattttcaaatcaagccttggacatatccttttggtttgaaagcggatttatggctgaacgctttggctaaaaccccatttatgagcgattggtcttatttgatcacagggggtggggggataggtggagaaaaatggcattactaccatggcattgccgcttatcattactactttcctttatggaaagcagaagaacagattgcccatgacgctcttaagacatttttaaaacattattttttgcacattcatgagattccccaaaacgcaaggcgaagactattcaaatactgcatttcaataccgcttaagagctttattagtaaaacccttaaatttctaaaactccatgcattggtgaaaaaaatcctaatccaactcaagctcttaaaaaagaaccagagccaaaacttttaa

SEQ ID NO: 143 - DNA (genomic), 1185 bp, Helicobacter pylori; double-stranded, circular
  misc_feature (B) LOCATION 1...1185
  hypothetical: NO
  anti-sense: NO
ttttttatgacttcagcttcaagccattcttttaaagaacaagattttcatattcctatcgctttcgcttttgataagaattatctcattcctgcgggcgcatgcatttattccttgctagaaagcatcgctaaagccaataaaaaaatccgttacaccttacacgctttagtggtaggcttgaatgaagaagataaaacaaaacttaaccaaatcacagagccttttaaagaatttgctgttttagaagtaaaagatattgaaccttttttagacactatccctaacccttttgatgaggatttcaccaagcgtttttctaaaatggtgttagtgaagtattttctagcggatttattccccaaatattctaaaatggtgtggagcgatgtggatgttatcttttgtaatgaatttagcgctgatttcttaaacattaaagaagatgatgagaattatttttatggggtttatgacaaaatatacccgtatgaaggctttttttattgcaacttaacttaccagcgaaaaaatcaattttgtaaaaaaatattagaaatcatacgcgcacaaaaaatagataaagaaccgcaattgacagaattttgtcgttcaaagatcgcgccattaaaaatagagtattgtattttcccacactattatagcctttctgaagagcatttaaagggcgtggccaatgcaatttatcataacaccattaaacaagccctaagagaacctatcgttatacaatatgactctcatccttattttcaaatcaagccttggacatatccttttggtttgaaagcggatttatggctgaacgctttggctaaaaccccatttatgagcgattggtcttatttgatcacagggggtggggggataggtggagaaaaatggcattactaccatggcattgccgcttatcattactactttcctttatggaaagcagaagaacagattgcccatgacgctcttaagacatttttaaaacattattttttgcacattcatgagattccccaaaacgcaaggcgaagactattcaaatactgcatttcaataccgcttaagagctttattagtaaaacccttaaatttctaaaactccatgcattggtgaaaaaaatcctaatccaactcaagctcttaaaaaagaaccagagccaaaacttt

SEQ ID NO: 144 - DNA (genomic), 1536 bp, Helicobacter pylori; double-stranded, circular
  misc_feature (B) LOCATION 1...1536
  hypothetical: NO
  anti-sense: NO
atgaaaaaacttctttataccatgctcgcgcttcttttaatcggccttttaacggcctatcttatcctttttacagaatgggggaataagatcatcgcttcgtatatagagaaaaaaatcaatccgaacgagcgttatttgagcgttaaaacctttaaattgagattcaactctttggatttcaaagctcaagccaacgatgattccacgctcattcttaagggggatttctcgcttttaacgcaaagcgtaaatttggattaccacatagacattaaaaatttacgctcttttaaggatttgataccctaccccttaagaggggctattgttacttctgggaatatcaaagggcatagaaaagcccttgtagttcaaggcgtctccaatgtcgctcaatcccacactgcctacaacgcccttttagatgatttcaagctttctcacttaagtttgaacgcaaaagacgccaatttagaagatttgctttatttaatcaaccgccccgcttatgcgaacgcaaaagtgtccttacaagcggattttaactctctaaagcccttagaagggcatttgatcctaacagctaataacgctttaatcaataacgccctaatcaatcaaatctttcatttaaaccttaaagacacgctcgttttcaacctctcgcactcaagcgattttaaaggaaacaaagccatcagcgataccaccctaactagccctttagttaatttcacagccctaaaaagcgaatattctttccctgctttaaaactcaacgccccctacactttagaaataccccatctagccaaactccaaaacattaccaaccaccccttaaaagggagcttgactttaaaaggcgatatagagcaaagccctaaactcttaaaagtcagtggccattcaaatttactagacggcgcgctagacttcacgcttttaaataaagatttgaaagcccgtttttccaatatttccacttcaaaagccttagatttattccattaccctaaatttttccaatccattgcagacgctaacttggattatgaccttatctctaagcaaggcgtgttgaaagccaatctcaagaacgcaagattcctcaaaaatgcattcagcgatttcctctattccatttctcgttttgatattactaaagaaatttatcacgatgccaatctagtaagccaaatcaaccagcaacgcctgctctctgatttgagtttaaaaagccccaaaacccaattgaaaatccataacggcttgttggatttaaacaccaagcaaatggacatactcatggatgcggaaatcttaaaattcatctttaaaatgaaacttcaaggcagcatgcaccagccaaaattttccctcattttaaacgaaaaagccattcagcaaaacctgcaacaaggcttgaaagaaatccttaaaaacgacacccttaaaaaaggtttagatcatttgcttaaagatgataaactcaaagaaaagcttgaaaaagggcttaaggggcttttttaa

SEQ ID NO: 145 - DNA (genomic), 1569 bp, Helicobacter pylori; double-stranded, circular
  misc_feature (B) LOCATION 1...1569
  hypothetical: NO
  anti-sense: NO
tatattccattcaatttatttcaaggacaaacaaacatgaaaaaacttctttataccatgctcgcgcttcttttaatcggccttttaacggcctatcttatcctttttacagaatgggggaataagatcatcgcttcgtatatagagaaaaaaatcaatccgaacgagcgttatttgagcgttaaaacctttaaattgagattcaactctttggatttcaaagctcaagccaacgatgattccacgctcattcttaagggggatttctcgcttttaacgcaaagcgtaaatttggattaccacatagacattaaaaatttacgctcttttaaggatttgataccctaccccttaagaggggctattgttacttctgggaatatcaaagggcatagaaaagcccttgtagttcaaggcgtctccaatgtcgctcaatcccacactgcctacaacgcccttttagatgatttcaagctttctcacttaagtttgaacgcaaaagacgccaatttagaagatttgctttatttaatcaaccgccccgcttatgcgaacgcaaaagtgtccttacaagcggattttaactctctaaagcccttagaagggcatttgatcctaacagctaataacgctttaatcaataacgccctaatcaatcaaatctttcatttaaaccttaaagacacgctcgttttcaacctctcgcactcaagcgattttaaaggaaacaaagccatcagcgataccaccctaactagccctttagttaatttcacagccctaaaaagcgaatattctttccctgctttaaaactcaacgccccctacactttagaaataccccatctagccaaactccaaaacattaccaaccaccccttaaaagggagcttgactttaaaaggcgatatagagcaaagccctaaactcttaaaagtcagtggccattcaaatttactagacggcgcgctagacttcacgcttttaaataaagatttgaaagcccgtttttccaatatttccacttcaaaagccttagatttattccattaccctaaatttttccaatccattgcagacgctaacttggattatgaccttatctctaagcaaggcgtgttgaaagccaatctcaagaacgcaagattcctcaaaaatgcattcagcgatttcctctattccatttctcgttttgatattactaaagaaatttatcacgatgccaatctagtaagccaaatcaaccagcaacgcctgctctctgatttgagtttaaaaagccccaaaacccaattgaaaatccataacggcttgttggatttaaacaccaagcaaatggacatactcatggatgcggaaatcttaaaattcatctttaaaatgaaacttcaaggcagcatgcaccagccaaaattttccctcattttaaacgaaaaagccattcagcaaaacctgcaacaaggcttgaaagaaatccttaaaaacgacacccttaaaaaaggtttagatcatttgcttaaagatgataaactcaaagaaaagcttgaaaaagggcttaaggggcttttt

SEQ ID NO: 146 - DNA (genomic), 291 bp, Helicobacter pylori; double-stranded, circular
  misc_feature (B) LOCATION 1...291
  hypothetical: NO
  anti-sense: NO
acgaaattggatacaatcagcttaaaaaggatacaaatggaaaaattacctaaaaaacgagtttctaaaaccaaatcacaaaaacttatccatagcctaaccacccaaaaaaacagagcctttctcaaaaaaatcagcgctaatgaaatgcttttagagttagaaaaaggggcgtttaaaaaaaatgaagcctattttatttctgatgaagaagataaaaattacgttttagtgccggacaatgtgatctctcttttggcagaaaacgccagaaaggcttttgaagccagg

SEQ ID NO: 147 - DNA (genomic), 294 bp, Helicobacter pylori; double-stranded, circular
  misc_feature (B) LOCATION 1...294
  hypothetical: NO
  anti-sense: NO
acgaaattggatacaatcagcttaaaaaggatacaaatggaaaaattacctaaaaaacgagtttctaaaaccaaatcacaaaaacttatccatagcctaaccacccaaaaaaacagagcctttctcaaaaaaatcagcgctaatgaaatgcttttagagttagaaaaaggggcgtttaaaaaaaatgaagcctattttatttctgatgaagaagataaaaattacgttttagtgccggacaatgtgatctctcttttggcagaaaacgccagaaaggcttttgaagccaggctt

SEQ ID NO: 148 - DNA (genomic), 516 bp, Helicobacter pylori; double-stranded, circular
  misc_feature (B) LOCATION 1...516
  hypothetical: NO
  anti-sense: NO
atggaaaaattacctaaaaaacgagtttctaaaaccaaatcacaaaaacttatccatagcctaaccacccaaaaaaacagagcctttctccaaaaaaccagcgccaatgaaatgcttttagagttagaaaaaggggcgtttaaaaaaaatgaagcctattttatttctgatgaagaagataaaaattacgttttagtgccggacaatgtgatctctcttttggcagaaaacgccagaaaggcttttgaagccaggcttagggcggaattagaaagggatattatcacccaagcgccgattgattttgaagacgtgcgcgaagtttctttgcaattgttagaaaatttacgccaaaaagacgggaatttgcccaatatcaacaccttaaattttgtcaaacaaatcaaaaaagaacaccctaatttattctttaattttgacaacatgttcaaacaacccccttttaatgagaataattttgaaaattttgacaatagcgatgaggaaaatttttaa

SEQ ID NO: 149 - DNA (genomic), 297 bp, Helicobacter pylori; double-stranded, circular
  misc_feature (B) LOCATION 1...297
  hypothetical: NO
  anti-sense: NO
taccaatacatccaacaaggcgggggctttggggtgaatgtcgggcgcacgctgggtaatagaacccatgtgagcttagggtataacctgaatgttaccaaactccttggtttcagcagccccttatacaaccgctactattcctctgttaatgaagtggcctctccaaggcaatgttccacacccgcatcggtgattatcaaccgcttatcaggcggtagaactccattggttcctgaaagctgttctagtcctggagcgatcaccatcttcaccagaaataaaaggtatttggga

SEQ ID NO: 150 - DNA (genomic), 294 bp, Helicobacter pylori; double-stranded, circular
  misc_feature (B) LOCATION 1...294
  hypothetical: NO
  anti-sense: NO
caatacatccaacaaggcgggggctttggggtgaatgtcgggcgcacgctgggtaatagaacccatgtgagcttagggtataacctgaatgttaccaaactccttggtttcagcagccccttatacaaccgctactattcctctgttaatgaagtggcctctccaaggcaatgttccacacccgcatcggtgattatcaaccgcttatcaggcggtagaactccattggttcctgaaagctgttctagtcctggagcgatcaccatcttcaccagaaataaaaggtatttggga

SEQ ID NO: 151 - DNA (genomic), 348 bp, Helicobacter pylori; double-stranded, circular
  misc_feature (B) LOCATION 1...348
  hypothetical: NO
  anti-sense: NO
gcatttaaggcggatgcgcaaattttaaaaaccgaaatcgccgataagggctatgcgtttgcggtggtgaagccagacttggataaagacgaaaaaaacgggcttgtgaaagtcatttatcgtattgaagtgggcgatatggtgcatatcaatgatgtcatcatttcagggaaccagcgcacgagcgataggatcattaggagggaattgttactagggcctaaagataaatacaacttgaccaaactgagaaattccgaaaattctttgaggcgtttagggtttttctctaaagtcaagattgaagaaaaaagggtcaatagctcattgatggatttgttagtgtac

SEQ ID NO: 152 - DNA (genomic), 561 bp, Helicobacter pylori; double-stranded, circular
  misc_feature (B) LOCATION 1...561
  hypothetical: NO
  anti-sense: NO
atgacaacaccgatgattattatttccctagaaatggggttatctttagttcctatgcgacaatgtctggtttgccaagctctggcacgctcaatttcttggaacgggttaggcgggaatgtccgtaacaccaaagtttatggtaaattcgccgcttaccaccatttgcaaaaatatttattgatagatttgatcgctcgttttaaaacgcaagggggctatatctttaggtataacaccgatgattacttgcccttaaactccactttctacatggggggsgtaaccacggtgagaggctttaggaacggctcaatcacacctaaagatgagtttggcttgtggcttggaggcgatgggatttttaccrcttctactgaattgagctatggggtgttaaaagcggctaaaatgcgtttagcgtggttttttgactttggtttcttaacctttaamaccccaactagggggagtttcttctataacgctyccaccacgacggcgaattttaaagattatgrcgttgtagggrctgrgtttgarrgggcgacttggagggct

SEQ ID NO: 153 - DNA (genomic), 747 bp, Helicobacter pylori; double-stranded, circular
  misc_feature (B) LOCATION 1...747
  hypothetical: NO
  anti-sense: NO
gtgagctatgacaacaccgatgattattatttccctagaaatggggttatctttagttcctatgcgacaatgtctggtttgccaagctctggcacgctcaattcttggaacgggttaggcgggaatgtccgtaacaccaaagtttatggtaaattcgccgcttaccaccatttgcaaaaatatttattgatagatttgatcgctcgttttaaaacgcaagggggctatatctttaggtataacaccgatgattacttgcccttaaactccactttctacatggggggcgtaaccacggtgagaggctttaggaacggctcaatcacacctaaagatgagtttggcttgtggcttggaggcgatgggatttttaccgcttctactgaattgagctatggggtgttaaaagcggctaaaatgcgtttagcgtggttttttgactttggtttcttaacctttaaaaccccaactagggggagtttcttctataacgctcccaccacgacggcgaattttaaagattatggcgttgtaggggctgggtttgaaagggcgacttggagggcttctacaggcttacagattgaatggatttcgcccatggggcctttggtgttgattttccctatagcgtttttcaaccaatggggcgatggcaatggcaaaaaatgtaaagggctgtgctttaaccctaacatgaacgattacacgcaacattttgaattttctatgggaacaaggttttaa

SEQ ID NO: 154 - DNA (genomic), 759 bp, Helicobacter pylori; double-stranded, circular
  misc_feature (B) LOCATION 1...759
  hypothetical: NO
  anti-sense: NO
ttatcaaccgcttatcaggcggtagaactccattggttcctgaaagctgttctagtcctggagcgatcaccatcttcaccagaaataaaaggtatttgggatagggattaccacacgcctatcaccagttctttcacccttgatgtgagctatgacaacaccgatgattattatttccctagaaatggggttatctttagttcctatgcgacaatgtctggtttgccaagctctggcacgctcaattcttggaacgggttaggcgggaatgtccgtaacaccaaagtttatggtaaattcgccgcttaccaccatttgcaaaaatatttattgatagatttgatcgctcgttttaaaacgcaagggggctatatctttaggtataacaccgatgattacttgcccttaaactccactttctacatggggggcgtaaccacggtgagaggctttaggaacggctcaatcacacctaaagatgagtttggcttgtggcttggaggcgatgggatttttaccgcttctactgaattgagctatggggtgttaaaagcggctaaaatgcgtttagcgtggttttttgactttggtttcttaacctttaaaaccccaactagggggagtttcttctataacgctcccaccacgacggcgaattttaaagattatggcgttgtaggggctgggtttgaaagggcgacttggagggcttctacaggcttacagattgaatggatttcgcccatggggccttggtgt

SEQ ID NO: 155 - DNA (genomic), 897 bp, Helicobacter pylori; double-stranded, circular
  misc_feature (B) LOCATION 1...897
  hypothetical: NO
  anti-sense: NO
ttagttataatatcgctactaacaacactcaagctaaaatccattaaggaaatcagtattaaaaaatttattctatcttctcttgttttcgcatgtatcaataccggcgttgaagctttagaaaatgacggctctaaaccaaacgatttggcttctccaaaagaaaccccaaaagaggctcaaaaaaatgaagctcaaaacgaaacctctcaatccaatcaaacgcctaaagaaatgaaagtcaagtccatttcttatgtcgggctttcttacatgtctgacatgctcgctaatgaaattgcaaagattcgcgtgggcgatatggtggattctaaaaaaatagacaccgctgttttagctttgttcaaccaagggtattttaaagacgtttatgccacttttgaaaacggcattttagagtttcattttgatgaaaaagccaggattgccggggtagaaatcaagggttatgggactgaaaaggaaaaagacggcttaaaatcccaaatggggatcaaaaagggcgacacctttgatgagcaaaaattagagcatgctaaaacggctttaaaaacggctttagaggggcagggctattatgggagcgtggtggaggtgcgcacagaaaaggtcagtgagggagcgttattgatcgtgtttgatgtgaataggggggacagtatttatatcaaacaatccatttatgagggaagcgataaattaaaacgccgtgtgattgaatctttgagcgcgaacaagcagcgcgatttcatgggctggatgtggggcttgaatgacgggaaattgcgcttagatcaattagaatacgattctttgcgtatccaagatgtgtatatgcgtaggggttacttagacgctcatatttcttcgcctttt

SEQ ID NO: 156 - DNA (genomic), 1845 bp, Helicobacter pylori; double-stranded, circular
  misc_feature (B) LOCATION 1...1845
  hypothetical: NO
  anti-sense: NO
ttggcttctccaaaagaaaccccaaaagaggctcaaaaaaatgaagctcaaaacgaaacctctcaatccaatcaaacgcctaaagaaatgaaagtcaagtccatttcttatgtcgggctttcttacatgtctgacatgctcgctaatgaaattgcaaagattcgcgtgggcgatatggtggattctaaaaaaatagacaccgctgttttagctttgttcaaccaagggtattttaaagacgtttatgccacttttgaaaacggcattttagagtttcattttgatgaaaaagccaggattgccggggtagaaatcaagggttatgggactgaaaaggaaaaagacggcttaaaatcccaaatggggatcaaaaagggcgacacctttgatgagcaaaaattagagcatgctaaaacggctttaaaaacggctttagaggggcagggctattatgggagcgtggtggaggtgcgcacagaaaaggtcagtgagggagcgttattgatcgtgtttgatgtgaataggggggacagtatttatatcaaacaatccatttatgagggaagcgataaattaaaacgccgtgtgattgaatctttgagcgcgaacaagcagcgcgatttcatgggctggatgtggggcttgaatgacgggaaattgcgcttagatcaattagaatacgattctttgcgtatccaagatgtgtatatgcgtaggggttacttagacgctcatatttcttcgccttttttgaaaacggatttttccacccatgacgctaagctccattataaggtcaaagaggggatccaatacaggatttcagatattttaatagagattgacaacccggtagtccccttaaaaaccttagaaaaagcgcttaaagttaaaaggaaagatgtctttaatattgagcatttaagagcggatgcgcaaattttaaaaaccgaaatcgccgataagggctatgcgtttgcggtggtgaagccagacttggataaagacgaaaaaaacgggcttgtgaaagtcatttatcgtattgaagtgggcgatatggtgcatatcaatgatgtcatcatttcagggaaccagcgcacgagcgataggatcattaggagggaattgttactagggcctaaagataaatacaacttgaccaaactgagaaattccgaaaattctttgaggcgtttagggtttttctctaaagtcaagattgaagaaaaaagggtcaatagctcattgatggatttgttagtgagcgtagaagaggggcgcaccgggcagttgcaattcgggttgggctatggctcttatggagggctcatgcttaatgggagcgtgagcgaaaggaatctttttggcacagggcaaagcatgagcttgtatgctaacattgccacaggggggggtagatcttatccgggcatgccaaaaggggcggggcgtatgtttgccgggaatttgagcttgactaatccaaggatttttgacagctggtatagctctacgatcaatctttatgcggattacaggataagctaccaatacatccaacaaggcgggggctttggggtgaatgtcgggcgcatgctgggtaatagaacccatgtgagcttagggtataacttgaatgttaccaaactccttggtttcagcagccccttatacaaccgctactattcctctgttaatgaagtggcctctccaaggcaatgttccacacccgcatcggtgattatcaaccgcttatcaggcggtagaactccattggttcctgaaagctgttctagtcctggagcgatcaccatcttcaccagaaataaaaggtatttgggatag

SEQ ID NO: 157 - DNA (genomic), 2778 bp, Helicobacter pylori; double-stranded, circular
  misc_feature (B) LOCATION 1...2778
  hypothetical: NO
  anti-sense: NO
ttagttataatatcgctactaacaacactcaagctaaaatccattaaggaaatcagtattaaaaaatttattctatcttctcttgttttcgcatgtatcaataccggcgttgaagctttagaaaatgacggctctaaaccaaacgatttggcttctccaaaagaaaccccaaaagaggctcaaaaaaatgaagctcaaaacgaaacctctcaatccaatcaaacgcctaaagaaatgaaagtcaagtccatttcttatgtcgggctttcttacatgtctgacatgctcgctaatgaaattgcaaagattcgcgtgggcgatatggtggattctaaaaaaatagacaccgctgttttagctttgttcaaccaagggtattttaaagacgtttatgccacttttgaaaacggcattttagagtttcattttgatgaaaaagccaggattgccggggtagaaatcaagggttatgggactgaaaaggaaaaagacggcttaaaatcccaaatggggatcaaaaagggcgacacctttgatgagcaaaaattagagcatgctaaaacggctttaaaaacggctttagaggggcagggctattatgggagcgtggtggaggtgcgcacagaaaaggtcagtgagggagcgttattgatcgtgtttgatgtgaataggggggacagtatttatatcaaacaatccatttatgagggaagcgataaattaaaacgccgtgtgattgaatctttgagcgcgaacaagcagcgcgatttcatgggctggatgtggggcttgaatgacgggaaattgcgcttagatcaattagaatacgattctttgcgtatccaagatgtgtatatgcgtaggggttacttagacgctcatatttcttcgccttttttgaaaacggatttttccacccatgacgctaagctccattataaggtcaaagaggggatccaatacaggatttcagatattttaatagagattgacaacccggtagtccccttaaaaaccttagaaaaagcgcttaaagttaaaaggaaagatgtctttaatattgagcatttaagagcggatgcgcaaattttaaaaaccgaaatcgccgataagggctatgcgtttgcggtggtgaagccagacttggataaagacgaaaaaaacgggcttgtgaaagtcatttatcgtattgaagtgggcgatatggtgcatatcaatgatgtcatcatttcagggaaccagcgcacgagcgataggatcattaggagggaattgttactagggcctaaagataaatacaacttgaccaaactgagaaattccgaaaattctttgaggcgtttagggtttttctctaaagtcaagattgaagaaaaaagggtcaatagctcattgatggatttgttagtgagcgtagaagaggggcgcaccgggcagttgcaattcgggttgggctatggctcttatggagggctcatgcttaatgggagcgtgagcgaaaggaatctttttggcacagggcaaagcatgagcttgtatgctaacattgccacaggggggggtagatcttatccgggcatgccaaaaggggcggggcgtatgtttgccgggaatttgagcttgactaatccaaggatttttgacagctggtatagctctacgatcaatctttatgcggattacaggataagctaccaatacatccaacaaggcgggggctttggggtgaatgtcgggcgcatgctgggtaatagaacccatgtgagcttagggtataacttgaatgttaccaaactccttggtttcagcagccccttatacaaccgctactattcctctgttaatgaagtggcctctccaaggcaatgttccacacccgcatcggtgattatcaaccgcttatcaggcggtagaactccattggttcctgaaagctgttctagtcctggagcgatcaccacttcaccagaaataaaaggtatttgggatagggattaccacacgcctatcaccagttctttcacccttgatgtgagctatgacaacaccgatgattattatttccctagaaatggggttatctttagttcctatgcgacaatgtctggtttgccaagctctggcacgctcaattcttggaacgggttaggcgggaatgtccgtaacaccaaagtttatggtaaattcgccgcttaccaccatttgcaaaaatatttattgatagatttgatcgctcgttttaaaacgcaagggggctatatctttaggtataacaccgatgattacttgcccttaaactccactttctacatggggggcgtaaccacggtgagaggctttaggaacggctcaatcacacctaaagatgagtttggcttgtggcttggaggcgatgggatttttaccgcttctactgaattgagctatggggtgttaaaagcggctaaaatgcgtttagcgtggttttttgactttggtttcttaacctttaaaaccccaactagggggagtttcttctataacgctcccaccacgacggcgaattttaaagattatggcgttgtaggggctgggtttgaaagggcgacttggagggcttctacaggcttacagattgaatggatttcgcccatggggcctttggtgttgattttccctatagcgtttttcaaccaatggggcgatggcaatggcaaaaaatgtaaagggctgtgctttaaccctaacatgaacgattacacgcaacattttgaattttctatgggaacaaggttttaa

SEQ ID NO: 158 - DNA (genomic), 978 bp, Helicobacter pylori; double-stranded, circular
  misc_feature (B) LOCATION 1...978
  hypothetical: NO
  anti-sense: NO
atgaaaagaattttagtttctttggctgttttgagtcatagcgcgcatgctgtcaaaactcataatttggaaagggtggaagcttcaggggtggctaacgataaagaagcgcctttaagctggaggagcaaggaagttagaaattatatgggttctcgcacggtgatttctaacaagcaactcactaaaagcgccaatcaaagcattgaagaagctttgcaaaatgtgccaggcgtgcatattagaaactctaccggtattggagctgtgcctagcatttccattagggggtttggtgctggaggcccagggcattctaatacgggaatgattctagtcaatgggattcctatttatgtcgcgccctatgttgaaattggcacggttatttttcctgtaacctttcagtctgtggatagaatcagcgtaactaagggtggggagagcgtgcgttatggccctaacgcttttggcggtgtgatcaacatcatcaccaaaggcattcctaccaattgggaaagtcaggtgagcgagaggaccactttttggggcaagtctgaaaacgggggctttttcaatcaaaattctaaaaacattgataaaagcttagttaataacatgctttttaacacctatttaagaacggggggtatgatgaataagcattttggaatccaagctcaagtcaattggctcaaagggcaagggtttagatacaacagccctacggatattcaaaattacatgttagattcattgtatcaaatcaatgatagcaataaaatcaccgctttttttcaatattatagttatttcttgacagaccctggatctttaggcatagccgcttacaatcaaaatcgttttcaaaacaaccgccccaataacgataaaagcgggagagcgaagcgatggggagctgtgtatcaaaacttttttggggacacggatagggtaggggggggatttcacttttag

SEQ ID NO: 159 - DNA (genomic), 978 bp, Helicobacter pylori; double-stranded, circular; identical to SEQ ID NO: 158
  misc_feature (B) LOCATION 1...978
  hypothetical: NO
  anti-sense: NO

SEQ ID NO: 160 - DNA (genomic), 975 bp, Helicobacter pylori; double-stranded, circular
  misc_feature (B) LOCATION 1...975
  hypothetical: NO
  anti-sense: NO
atgaaaagaattttagtttctttggctgttttgagtcatagcgcgcatgctgtcaaaactcataatttggaaagggtggaagcttcaggggtggctaacgataaagaagcgcctttaagctggaggagcaaggaagttagaaattatatgggttctcgcacggtgatttctaacaagcaactcactaaaagcgccaatcaaagcattgaagaagctttgcaaaatgtgccaggcgtgcatattagaaactctaccggtattggagctgtgcctagcatttccattagggggtttggtgctggaggcccagggcattctaatacgggaatgattctagtcaatgggattcctatttatgtcgcgccctatgttgaaattggcacggttatttttcctgtaacctttcagtctgtggatagaatcagcgtaactaagggtggggagagcgtgcgttatggccctaacgcttttggcggtgtgatcaacatcatcaccaaaggcattcctaccaattgggaaagtcaggtgagcgagaggaccactttttggggcaagtctgaaaacgggggctttttcaatcaaaattctaaaaacattgataaaagcttagttaataacatgctttttaacacctatttaagaacggggggtatgatgaataagcattttggaatccaagctcaagtcaattggctcaaagggcaagggtttagatacaacagccctacggatattcaaaattacatgttagattcattgtatcaaatcaatgatagcaataaaatcaccgctttttttcaatattatagttatttcttgacagaccctggatctttaggcatagccgcttacaatcaaaatcgttttcaaaacaaccgccccaataacgataaaagcgggagagcgaagcgatggggagctgtgtatcaaaacttttttggggacacggatagggtaggggggggatttcacttt

SEQ ID NO: 161 - DNA (genomic), 1311 bp, Helicobacter pylori; double-stranded, circular
  misc_feature (B) LOCATION 1...1311
  hypothetical: NO
  anti-sense: NO
atgtcaagggattttaaatttgattctaactatttaaatgtcaataccaatcctaaattaggccccgtttataccaatcaaaattatccaggattttttatctttgatcatttaaggcgttatgtgatgaacgcttttgagcctaatttgaacttagttgtcaataccaataaagttaagcaaacttttaatgtgggcatgcgttttatgacaatggatatgttcattagatccgatcaaagcacatgcgaaaaaacagatattatcaatggggtgtgccacatgcctccttatgtcctttctaaaacgcctaacaataatcaagaaatgtttaataactatacagcggtatggttgagcgataaaatagagttttttgattctaaattggtgataactccagggcttagatacacttttttgaactataacaacaaagagccagaaaagcatgatttttccgtatggaccagtaaaaaacagcgtcaaaacgaatggagtcctgcccttaatattggctataaacctatggaaaattggatatggtatgcgaactaccgccgcagttttatccccccacaacacacaatggtaggcattactaggactaattacaaccaaatttttaatgaaattgaagtggggcagcgctatagttataaaaatctattgagttttaacaccaattattttgtgatttttgccaagcgttactatgcgggaggctatagcccacagcctgtggatgccagaagtcaaggggtggaattggaattgtattacgcgccgattaggggtttgcaattccatgtggcttacacttatattgatgcgcgcatcacttctaacgctgatgatattgcttattattttacaggcattgtcaataaaccctttgacattaaagggaagcgcttgccctatgtgagtcctaaccaattcatatttgacatgatgtatacttacaagcacacgacttttggtatcagcagctatttttatagccgcgcttatagttccatgctcaatcaagccaaagatcaaaccgtatgcctgcccttaaacccagaatacacaggggggttaaagtatggttgtaattcagtggggttattgcccttgtattttgtgttgaatgtccaagtaagctcaatcttatggcaaagcggtaggcataaaatcacagggagtttgcaaatcaataacctttttaacatgaagtattattttagggggattggcacaagccctacagggagagaacccgcgccagggagatccattacagcgtatttgaattatgagttttaa

SEQ ID NO: 162 - DNA (genomic), 1344 bp, Helicobacter pylori; double-stranded, circular
  misc_feature (B) LOCATION 1...1344
  hypothetical: NO
  anti-sense: NO
gggggggatttcacttttagctactatgggcatgacatgtcaagggattttaaatttgattctaactatttaaatgtcaataccaatcctaaattaggccccgtttataccaatcaaaattatccaggattttttatctttgatcatttaaggcgttatgtgatgaacgcttttgagcctaatttgaacttagttgtcaataccaataaagttaagcaaacttttaatgtgggcatgcgttttatgacaatggatatgttcattagatccgatcaaagcacatgcgaaaaaacagatattatcaatggggtgtgccacatgcctccttatgtcctttctaaaacgcctaacaataatcaagaaatgtttaataactatacagcggtatggttgagcgataaaatagagttttttgattctaaattggtgataactccagggcttagatacacttttttgaactataacaacaaagggccagaaaagcatgatttttccgtatggaccagtaaaaacagcgtcaaaacgaatggagtcctgcccttaatattggctataaacctatggaaaattggatatgggtatgcgaactaccgccgcagttttatccccccacaacacacaatggtaggcattactaggactaattacaaccaaatttttaatgaaattgaagtggggcagcgctatagttataaaaatctattgagttttaacaccaattattttgtgatttttgccaagcgttactatgcgggaggctatagcccacagcctgtggatgccagaagtcaaggggtggaattggaattgtattacgcgccgattaggggtttgcaattccatgtggcttacacttatattgatgcgcgcatcacttctaacgctgatgatattgcttattattttacaggcattgtcaataaaccctttgacattaaagggaagcgcttgccctatgtgagtcctaaccaattcatatttgacatgatgtatacttacaagcacacgacttttggtatcagcagctatttttatagccgcgcttatagttccatgctcaatcaagccaaagatcaaaccgtatgcctgcccttaaacccagaatacacaggggggttaaagtatggttgtaattcagtggggttattgcccttgtattttgtgttgaatgtccaagtaagctcaatcttatggcaaagcggtaggcataaaatcacagggagtttgcaaatcaataacctttttaacatgaagtattattttagggggattggcacaagccctacagggagagaacccgcgccagggagatccattacagcgtatttgaattatgagttt

SEQ ID NO: 163 - DNA (genomic), 2304 bp, Helicobacter pylori; double-stranded, circular
  misc_feature (B) LOCATION 1...2304
  hypothetical: NO
  anti-sense: NO
atgaaaagaattttagtttctttggctgttttgagtcatagcgcgcatgctgtcaaaactcataatttggaaagggtggaagcttcaggggtggctaacgataaagaagcgcctttaagctggaggagcaaggaagttagaaattatatgggttctcgcacggtgatttctaacaagcaactcactaaaagcgccaatcaaagcattgaagaagctttgcaaaatgtgccaggcgtgcatattagaaactctaccggtattggagctgtgcctagcatttccattagggggtttggtgctggaggcccagggcattctaatacgggaatgattctagtcaatgggattcctatttatgtcgcgccctatgttgaaattggcacggttatttttcctgtaacctttcagtctgtggatagaatcagcgtaactaagggtggggagagcgtgcgttatggccctaacgcttttggcggtgtgatcaacatcatcaccaaaggcattcctaccaattgggaaagtcaggtgagcgagaggaccactttttggggcaagtctgaaaacgggggctttttcaatcaaaattctaaaaacattgataaaagcttagttaataacatgctttttaacacctatttaagaacggggggtatgatgaataagcattttggaatccaagctcaagtcaattggctcaaagggcaagggtttagatacaacagccctacggatattcaaaattacatgttagattcattgtatcaaatcaatgatagcaataaaatcaccgctttttttcaatattatagttatttcttgacagaccctggatctttaggcatagccgcttacaatcaaaatcgttttcaaaacaaccgccccaataacgataaaagcgggagagcgaagcgatggggagctgtgtatcaaaacttttttggggacacggatagggtagggggggatttcacttttagctactatgggcatgacatgtcaagggattttaaatttgattctaactatttaaatgtcaataccaatcctaaattaggccccgtttataccaatcaaaattatccaggattttttatctttgatcatttaaggcgttatgtgatgaacgcttttgagcctaatttgaacttagttgtcaataccaataaagttaagcaaacttttaatgtgggcatgcgttttatgacaatggatatgttcattagatccgatcaaagcacatgcgaaaaaacagatattatcaatggggtgtgccacatgcctccttatgtcctttctaaaacgcctaacaataatcaagaaatgtttaataactatacagcggtatggttgagcgataaaatagagttttttgattctaaattggtgataactccagggcttagatacacttttttgaactataacaacaaagagccagaaaagcatgatttttccgtatggaccagtaaaaaacagcgtcaaaacgaatggagtcctgcccttaatattggctataaacctatggaaaattggatatggtatgcgaactaccgccgcagttttatccccccacaacacacaatggtaggcattactaggactaattacaaccaaatttttaatgaaattgaagtggggcagcgctatagttataaaaatctattgagttttaacaccaattattttgtgatttttgccaagcgttactatgcgggaggctatagcccacagcctgtggatgccagaagtcaaggggtggaattggaattgtattacgcgccgattaggggtttgcaattccatgtggcttacacttatattgatgcgcgcatcacttctaacgctgatgatattgcttattattttacaggcattgtcaataaaccctttgacattaaagggaagcgcttgccctatgtgagtcctaaccaattcatatttgacatgatgtatacttacaagcacacgacttttggtatcagcagctatttttatagccgcgcttatagttccatgctcaatcaagccaaagatcaaaccgtatgcctgcccttaaacccagaatacacaggggggttaaagtatggttgtaattcagtggggttattgcccttgtattttgtgttgaatgtccaagtaagctcaatcttatggcaaagcggtaggcataaaatcacagggagtttgcaaatcaataacctttttaacatgaagtattattttagggggattggcacaagccctacagggagagaacccgcgccagggagatccattacagcgtatttgaattatgagttttaa

SEQ ID NO: 164 - DNA (genomic), 147 bp, Helicobacter pylori; double-stranded, circular
  misc_feature (B) LOCATION 1...147
  hypothetical: NO
  anti-sense: NO
atgctaatggttaatggctatcaaatcacgatgcataagggttataaggtagggttttttacaagcggttacaaccctgatttcgctcaaaccattcaaaatagaagctatttgatgagctcttatgagttatcgtttttaagaaat

SEQ ID NO: 165 - DNA (genomic), 1323 bp, Helicobacter pylori; double-stranded, circular
  misc_feature (B) LOCATION 1...1323
  hypothetical: NO
  anti-sense: NO
ttggctttgcatgggttttttctcagcgcttttgagtatcaagtgagcgctagagtgggatcgttttcgcgtatcgctttcaaccaatcgatcatcaattccaaaaaagggatttaccctacagggagttatgtaaccactaccggggctttacaagttgattctagtttgctccctaaagggattgaaaaccacaaattgggttttggggtggggggcgaaataggagcgttagcttatgattccacgaaatttttgattgatgaagccaaccctaaggcagggtttcagccagcgaactggtattacatggggcgatgggagggctatttgatgcaacacagccaaaattggaccagagagcaaaaggctcaaaacgccaggccttatgtgttatacaatttgtatttagattatcaatataaggacatttttgggattaaactagggcgttacccttctaaggctttgtttttgagcgggtttaatcaagggtttgagattttttaccggtggaaaaagtttaagatagtgtggtttagcacctttggaagggctttagccaatgagcaatacattagggatttttacgctcctgtcaattacaagcaaaaaatcaactacggcatgcacaatttcaacctcgtttacgaaaataaatacattaggatcgcgccttttatttggttttaccctaagaattttaacgctcctggatttgaaatcacccatgacacaaaatcttattggaaatctctttggcgcatccaaacgactttttacgcatggtttcctctctatagcgactatttgtctaaagattattatagggccgctttagtgggtaaaaaaagcgcggctttgtttgtgtttcaaagagtgaatttccgctcttatcgttttggctggagcgtgtataagaattttgggaacgcgagcgttcagttaggttggaatggctcacccattgatcctttttacgacacgaaagatgataccccttatgaagacgcttattccaatttttacaacgctaattccataacgattaacgcttttatagggaagagcattaagaatcttttggtgcaattgtatgggaaattaacctattccccaagggctgatgcgcaaagcttaggggttacttttaaatataaccttaaaaaacatatctatttcatgctaatggttaatggctatcaaatcacgatgcataagggttataaggtagggttttttacaagcggttacaaccctgatttcgctcaaaccattcaaaatagaagctatttgatgagctctatgagttatcgtttttaa

SEQ ID NO: 166 - DNA (genomic), 1329 bp, Helicobacter pylori; double-stranded, circular
  misc_feature (B) LOCATION 1...1329
  hypothetical: NO
  anti-sense: NO
ctagggtttttggctttgcatgggttttttctcagcgcttttgagtatcaagtgagcgctagagtgggatcgttttcgcgtatcgctttcaaccaatcgatcatcaattccaaaaaagggatttaccctacagggagttatgtaaccactaccggggctttacaagttgattctagtttgctccctaaagggattgaaaaccacaaattgggttttggggtggggggcgaaataggagcgttagcttatgattccacgaaatttttgattgatgaagccaaccctaaggcagggtttcagccagcgaactggtattacatggggcgatgggagggctatttgatgcaacacagccaaaattggaccagagagcaaaaggctcaaaacgccaggccttatgtgttatacaatttgtatttagattatcaatataaggacatttttgggattaaactagggcgttacccttctaaggctttgtttttgagcgggtttaatcaagggtttgagattttttaccggtggaaaaagtttaagatagtgtggtttagcacctttggaagggctttagccaatgagcaatacattagggatttttacgctcctgtcaattacaagcaaaaaatcaactacggcatgcacaatttcaacctcgtttacgaaaataaatacattaggatcgcgccttttatttggttttaccctaagaattttaacgctcctggatttgaaatcacccatgacacaaaatcttattggaaatctctttggcgcatccaaacgactttttacgcatggtttcctctctatagcgactatttgtctaaagattattatagggccgctttagtgggtaaaaaaagcgcggctttgtttgtgtttcaaagagtgaatttccgctcttatcgttttggctggagcgtgtataagaattttgggaacgcgagcgttcagttaggttggaatggctcacccattgatcctttttacgacacgaaagatgataccccttatgaagacgcttattccaatttttacaacgctaattccataacgattaacgcttttatagggaagagcattaagaatcttttggtgcaattgtatgggaaattaacctattccccaagggctgatgcgcaaagcttaggggttacttttaaatataaccttaaaaaacatatctatttcatgctaatggttaatggctatcaaatcacgatgcataagggttataaggtagggttttttacaagcggttacaaccctgatttcgctcaaaccattcaaaatagaagctatttgatgagctctatgagttatcgtttt

SEQ ID NO: 167 - DNA (genomic), 231 bp, Helicobacter pylori; double-stranded, circular
  misc_feature (B) LOCATION 1...231
  hypothetical: NO
  anti-sense: NO
actataaggaataaaacgactttctatgtgttgtatgactatcgttggaataacgctgaatacggccgttacgcacccgctcgttataacacttgggatccgttcttggataatggtaagtggcgtggcttgcaaggtcctggtggtgcgacgctctatttgcaccaccacatatacattaacaactactttgtggttggtggtgcttacctcaaatcggtaaccctaaca

SEQ ID NO: 168 - DNA (genomic), 273 bp, Helicobacter pylori; double-stranded, circular
  misc_feature (B) LOCATION 1...273
  hypothetical: NO
  anti-sense: NO
ggaagaggaatgaaattaaaaaaacgaaaagttgcggctacattgctaaagcgtttgaccttgccactattgttcactacgggttcattaggggcggttacttatgaagtgcatggggattttatcaacttctccaaagtgggttttaaccgttcgcctattaaccctgttaaaggtatctatcctacagaaacttttgttaaccttacgggtaagctagaggggtctgtgcatttaggtaggggatggaccgtgaatgtaggcggtgttttg

SEQ ID NO: 169 - DNA (genomic), 270 bp, Helicobacter pylori; double-stranded, circular
  misc_feature (B) LOCATION 1...270
  hypothetical: NO
  anti-sense: NO
ggaagaggaatgaaattaaaaaaacgaaaagttgcggctacattgctaaagcgtttgaccttgccactattgttcactacgggttcattaggggcggttacttatgaagtgcatggggattttatcaacttctccaaagtgggttttaaccgttcgcctattaaccctgttaaaggtatctatcctacagaaacttttgttaaccttacgggtaagctagaggggtctgtgcatttaggtaggggatggaccgtgaatgtaggcggtgtt

SEQ ID NO: 170 - DNA (genomic), 1497 bp, Helicobacter pylori; double-stranded, circular
  misc_feature (B) LOCATION 1...1497
  hypothetical: NO
  anti-sense: NO
atgaaattaaaaaaacgaaaagttgcggctacattgctaaagcgtttgaccttgccactattgttcactacgggttcattaggggcggttacttatgaagtgcatggggattttatcaacttctccaaagtgggttttaaccgttcgcctattaaccctgttaaaggtatctatcctacagaaacttttgttaaccttacgggtaagctagaggggtctgtgcatttaggtaggggatggaccgtgaatgtaggcggtgttttgggcggacaagtttatgataacactaggtatgataggtgggcaaaggattttacccccccaagctattgggataaaacttcttgcggcactgattctttgagcctttgtatgaatgcgactaaaatgtggcaacagcaagggccaggtggtatcattgaccctaggggtattggctatatgtatatgggtgagtggaacggcttgttccctaattactatccggctaacgcctacttgcccgggcattcaaggcgctatgaagtttataaagcgaatcttacctatgacagcgacagagtccatatggtaatggggcgctttgatgttaccgagcaggagcaaatggattggatttaccaattgttccaaggtttttatgggactttcaagcttactaagaacatgaaattcttgctctttagctcttggggtcgtggtatcgctgatggtcaatggttgttccctatctatcgtgaaaagccttggggtattcataaggcgggtattatttatcgccctacaaagaatctaatgatccacccttatgtgtatctcatcccaatggtaggtacattgcccggtgctaaaatagaatacgataccaatcctgagtttagcggtagaggtataaggaataaaacgactttctatgtgttgtatgactatcgttggaataacgctgaatacggccgttacgcacccgctcgttataacacttgggatccgttcttggataatggtaagtggcgtggcttgcaaggtcctggtggtgcgacgctctatttgcaccaccacatagacattaacaactactttgtggttggtggtgcttacctcaacatcggtaaccctaacatgaacttaggtacttggggtaaccctgtggctcttgatggtatcgaacaatgggtcggtggcatctacagcttaggctttgcggggattgacaacattaccgatgctgatgcgttcactgagtatgttaaaggtggaggtaagcatggtaagttcagttggagcgtttatcagcgcttcactaccgcaccaagggctttggaatatggtattggtatgtatctagactatcagttcagcaagcatgttaaagcgggtctcaaactcgtgtggttagagttccaaatccgtgcgggttacaaccctggaaccggtttccttgggccaaacggtcagccgctcaacttgaataatggtttgtttgaatcttcggcgttc

SEQ ID NO: 171 - DNA (genomic), 1587 bp, Helicobacter pylori; double-stranded, circular
  misc_feature (B) LOCATION 1...1587
  hypothetical: NO
  anti-sense: NO
atgaaattaaaaaaacgaaaagttgcggctacattgctaaagcgtttgaccttgccactattgttcactacgggttcattaggggcggttacttatgaagtgcatggggattttatcaacttctccaaagtgggttttaaccgttcgcctattaaccctgttaaaggtatctatcctacagaaacttttgttaaccttacgggtaagctagaggggtctgtgcatttaggtaggggatggaccgtgaatgtaggcggtgttttgggcggacaagtttatgataacactaggtatgataggtgggcaaaggattttacccccccaagctattgggataaaacttcttgcggcactgattctttgagcctttgtatgaatgcgactaaaatgtggcaacagcaagggccaggtggtatcattgaccctaggggtattggctatatgtatatgggtgagtggaacggcttgttccctaattactatccggctaacgcctacttgcccgggcattcaaggcgctatgaagtttataaagcgaatcttacctatgacagcgacagagtccatatggtaatggggcgctttgatgttaccgagcaggagcaaatggattggatttaccaattgttccaaggtttttatgggactttcaagcttactaagaacatgaaattcttgctctttagctcttggggtcgtggtatcgctgatggtcaatggttgttccctatctatcgtgaaaagccttggggtattcataaggcgggtattatttatcgccctacaaagaatctaatgatccacccttatgtgtatctcatcccaatggtaggtacattgcccggtgctaaaatagaatacgataccaatcctgagtttagcggtagaggtataaggaataaaacgactttctatgtgttgtatgactatcgttggaataacgctgaatacggccgttacgcacccgctcgttataacacttgggatccgttcttggataatggtaagtggcgtggcttgcaaggtcctggtggtgcgacgctctatttgcaccaccacatagacattaacaactactttgtggttggtggtgcttacctcaacatcggtaaccctaacatgaacttaggtacttggggtaaccctgtggctcttgatggtatcgaacaatgggtcggtggcatctacagcttaggctttgcggggattgacaacattaccgatgctgatgcgttcactgagtatgttaaaggtggaggtaagcatggtaagttcagttggagcgtttatcagcgcttcactaccgcaccaagggctttggaatatggtattggtatgtatctagactatcagttcagcaagcatgttaaagcgggtctcaaactcgtgtggttagagttccaaatccgtgcgggttacaaccctggaaccggtttccttgggccaaacggtcagccgctcaacttgaataatggtttgtttgaatcttcggcgttcgcgcaaggccctcaaaacatgggtggtatcgcaaaaagcattactcaagacagaagccatttgatgacacacatcagttatagtttctaa

SEQ ID NO: 172 - DNA (genomic), 309 bp, Helicobacter pylori; double-stranded, circular
  misc_feature (B) LOCATION 1...309
  hypothetical: NO
  anti-sense: NO
ttgaaggcattaaacgactgcatggtattttttcataagaaaattattttaaattttatctattctttaatggttgcttttttattccatttatcctatggggttcttttaaaagccgatggaatggctaaaaagcaaactcttttagtgggtgaaaggcttgtgtgggataagctcacgctgttagggtttttagaaaaaaaccatatcccccaaaaactctactacaatttgagctctcaagataaagaattgagtgctgaaatccaaagcaatgttacctactacmactttaagagatgcaaataa

SEQ ID NO: 173 - DNA (genomic), 1221 bp, Helicobacter pylori; double-stranded, circular
  misc_feature (B) LOCATION 1...1221
  hypothetical: NO
  anti-sense: NO
atggtattttttcataagaaaattattttaaattttatctattctttaatggttgcttttttattccatttatcctatggggttcttttaaaagccgatggaatggctaaaaagcaaactcttttagtgggtgaaaggcttgtgtgggataagctcacgctgttagggtttttagaaaaaaaccatatcccccaaaaactctactacaatttgagctctcaagataaagaattgagtgctgaaatccaaagcaatgttacctactacactttaagagatgcaaataacacgctcattcaagcccttatccctattagccaggatttgcaaatccatatttacaaaaaaggagaggattattttttagactttatccccattgttttcactcgtaaagaaagaaccctccttctttccttacaaacttcgccctatcaagatattgtcaaagccaccaatgacccccttttagccaaccaattgatgaacgcgtataaaaaaagcgtgccttttaaacgcctagtgaaaaacgataaaatcgctatcgtttatacaagggattatcgtgtggggcaagcgtttggccagccgaccatcaaaatggcgatggttagctctcgtttgcaccaatactatcttttttcccattcaaacgggcgttattacgattcaaaagcgcaagaagtggcagggtttttactagaaaccccggtgaaatacacccgcatttcttcgcctttttcgtatgggaggttccatcctgttttaaaagttaaacggcctcattacggcgtggattatgcggctaaacatggcagtttgatccattctgcttcagacggccgtgtgggttttataggggttaaggcgggttatgggaaggtggttgaaatccatttgaatgaattgcgcttggtgtatgctcacatgagcgcgttcgctaacggattaaaaaaaggctcgttcgttaaaaaagggcaaatcataggaagagtgggaagcacgggtttaagcaccgggccgcatttgcattttggcgtgtataaaaactcccgccccattaatcctttaggctatatccgcaccgctaaaagcaagctgcatggcaaacaaagagaggtttttttagaaaaagctcagtattctaagcaaaaattagaagaactttttaaaacccattcttttgaaaaaaattcattttatcttttagagggtttttaa

SEQ ID NO: 174 - DNA (genomic), 1239 bp, Helicobacter pylori; double-stranded, circular
  misc_feature (B) LOCATION 1...1239
  hypothetical: NO
  anti-sense: NO
ttgaaggcattaaacgactgcatggtattttttcataagaaaattattttaaattttatctattctttaatggttgcttttttattccatttatcctatggggttcttttaaaagccgatggaatggctaaaaagcaaactcttttagtgggtgaaaggcttgtgtgggataagctcacgctgttagggtttttagaaaaaaaccatatcccccaaaaactctactacaatttgagctctcaagataaagaattgagtgctgaaatccaaagcaatgttacctactacactttaagagatgcaaataacacgctcattcaagcccttatccctattagccaggatttgcaaatccatatttacaaaaaaggagaggattattttttagactttatccccattgttttcactcgtaaagaaagaaccctccttctttccttacaaacttcgccctatcaagatattgtcaaagccaccaatgacccccttttagccaaccaattgatgaacgcgtataaaaaaagcgtgccttttaaacgcctagtgaaaaacgataaaatcgctatcgtttatacaagggattatcgtgtggggcaagcgtttggccagccgaccatcaaaatggcgatggttagctctcgtttgcaccaatactatcttttttcccattcaaacgggcgttattacgattcaaaagcgcaagaagtggcagggtttttactagaaaccccggtgaaatacacccgcatttcttcgcctttttcgtatgggaggttccatcctgttttaaaagttaaacggcctcattacggcgtggattatgcggctaaacatggcagtttgatccattctgcttcagacggccgtgtgggttttataggggttaaggcgggttatgggaaggtggttgaaatccatttgaatgaattgcgcttggtgtatgctcacatgagcgcgttcgctaacggattaaaaaaaggctcgttcgttaaaaaagggcaaatcataggaagagtgggaagcacgggtttaagcaccgggccgcatttgcattttggcgtgtataaaaactcccgccccattaatcctttaggctatatccgcaccgctaaaagcaagctgcatggcaaacaaagagaggtttttttagaaaaagctcagtattctaagcaaaaattagaagaactttttaaaacccattcttttgaaaaaaattcattttatcttttagagggtttt

SEQ ID NO: 175 - DNA (genomic), 1242 bp, Helicobacter pylori; double-stranded, circular
  misc_feature (B) LOCATION 1...1242
  hypothetical: NO
  anti-sense: NO
ttgaaggcattaaacgactgcatggtattttttcataagaaaattattttaaattttatctattctttaatggttgcttttttattccatttatcctatggggttcttttaaaagccgatggaatggctaaaaagcaaactcttttagtgggtgaaaggcttgtgtgggataagctcacgctgttagggtttttagaaaaaaaccatatcccccaaaaactctactacaatttgagctctcaagataaagaattgagtgctgaaatccaaagcaatgttacctactacactttaagagatgcaaataacacgctcattcaagcccttatccctattagccaggatttgcaaatccatatttacaaaaaaggagaggattattttttagactttatccccattgttttcactcgtaaagaaagaaccctccttctttccttacaaacttcgccctatcaagatattgtcaaagccaccaatgacccccttttagccaaccaattgatgaacgcgtataaaaaaagcgtgccttttaaacgcctagtgaaaaacgataaaatcgctatcgtttatacaagggattatcgtgtggggcaagcgtttggccagccgaccatcaaaatggcgatggttagctctcgtttgcaccaatactatcttttttcccattcaaacgggcgttattacgattcaaaagcgcaagaagtggcagggtttttactagaaaccccggtgaaatacacccgcatttcttcgcctttttcgtatgggaggttccatcctgttttaaaagttaaacggcctcattacggcgtggattatgcggctaaacatggcagtttgatccattctgcttcagacggccgtgtgggttttataggggttaaggcgggttatgggaaggtggttgaaatccatttgaatgaattgcgcttggtgtatgctcacatgagcgcgttcgctaacggattaaaaaaaggctcgttcgttaaaaaagggcaaatcataggaagagtgggaagcacgggtttaagcaccgggccgcatttgcattttggcgtgtataaaaactcccgccccattaatcctttaggctatatccgcaccgctaaaagcaagctgcatggcaaacaaagagaggtttttttagaaaaagctcagtattctaagcaaaaattagaagaactttttaaaacccattcttttgaaaaaaattcattttatcttttagagggtttttaa

SEQ ID NO: 176 - DNA (genomic), 105 bp, Helicobacter pylori; double-stranded, circular
  misc_feature (B) LOCATION 1...105
  hypothetical: NO
  anti-sense: NO
ttgagccatttatttctcgtaaaacgcccttacagtcgcctttatttacataatcagagcaaccataaaatgagacaccattcaatcctctttgtatcattttag

SEQ ID NO: 177 - DNA (genomic), 207 bp, Helicobacter pylori; double-stranded, circular
  misc_feature (B) LOCATION 1...207
  hypothetical: NO
  anti-sense: NO
agtaaaacttcctattgcaattcttacaagcgtaagctcctcccctaccactttctactttttccattatgggcgtgttttcacaatgtaagcagaccattttcattgagccatttatttctcgtaaaacgcccttacagtcgcctttatttacataatcagagcaaccataaaatgagacaccattcaatcctctttgtatcattt

SEQ ID NO: 178 - DNA (genomic), 762 bp, Helicobacter pylori; double-stranded, circular
  misc_feature (B) LOCATION 1...762
  hypothetical: NO
  anti-sense: NO
ttgaaaactctatttagtgtttatctctttttgtcgttgaatccactctttttagaagctaaagaaatcacttggtctcaattcttggaaaattttaaaaacaagaatgaagacgacaaacctaaacccctaaccattgacaaaaacaatgaaaaacagcaaatcctagacaaaaaccagcaaatcttaaaaagggctttagaaaaaagccttaaatttttctttatttttggatacaactattcgcaagccgcttattcaaccactaatcaaaacttgactcttacggcgaatagcatagggtttaacaccgctacaggcttggagcattttttaagaaaccaccctaaagtcggttttagaatctttagcgtctataactatttccattccgtttcgctctcccagcctcaaatcctaatggtgcaaaattacggaggcgcgttagatttttcttggatttttgtggataaaaaaacctatcgctttaggagttatttaggaatcgctttagagcaaggggtgttgttagtggatacgattaaaaccggctctttcacaaccatcatcccaagaaccaagaaaaccttttttcaagcccctttgcgttttggttttatcgtggattttatcggctatttgtctttgcaattagggattgaaatgcccttagtgaggaatgttttttacacctacaataaccatcaagaaagattcaaaccacgatttaacgctaatctttctttaatcgtttcgttttag

SEQ ID NO: 179 - DNA (genomic), 795 bp, Helicobacter pylori; double-stranded, circular
  misc_feature (B) LOCATION 1...795
  hypothetical: NO
  anti-sense: NO
ttaggcacaatagccgtaaaaagtttaaggctgtatttgaaaactctatttagtgtttatctctttttgtcgttgaatccactctttttagaagctaaagaaatcacttggtctcaattcttggaaaattttaaaaacaagaatgaagacgacaaacctaaacccctaaccattgacaaaaacaatgaaaaacagcaaatcctagacaaaaaccagcaaatcttaaaaagggctttagaaaaaagccttaaatttttctttatttttggatacaactattcgcaagccgcttattcaaccactaatcaaaacttgactcttacggcgaatagcatagggtttaacaccgctacaggcttggagcattttttaagaaaccaccctaaagtcggttttagaatctttagcgtctataactatttccattccgtttcgctctcccagcctcaaatcctaatggtgcaaaattacggaggcgcgttagatttttcttggatttttgtggataaaaaaacctatcgctttaggagttatttaggaatcgctttagagcaaggggtgttgttagtggatacgattaaaaccggctctttcacaaccatcatcccaagaaccaagaaaaccttttttcaagcccctttgcgttttggttttatcgtggattttatcggctatttgtctttgcaattagggattgaaatgcccttagtgaggaatgttttttacacctacaataaccatcaagaaagattcaaaccacgatttaacgctaatctttctttaatcgtttcgttt

SEQ ID NO: 180 - DNA (genomic), 879 bp, Helicobacter pylori; double-stranded, circular
  misc_feature (B) LOCATION 1...879
  hypothetical: NO
  anti-sense: NO
atgcaagaagactggcaagccgtccaagacaccattaaagtggtttcagatgtgaaagcggggaattttgcggtgcgcatcacggctgaacccgcaagccctgatttgaaagaattgagagacgcgctaaatgggatcatgsaytatttgcaagaaagcgtagggactcacatgccaagcattttcaaaatctttgaaagctattctggcttggattttagagggcggatccaaaacgcttcgggtagggtggaattggttactaacgctttagggcaagaaatccaaaaaatgctagaaacttcgtctaattttgccaaagatctagcgaacgatagcgcgaatttaaaagaatgcgtgcaaaatttagaaaaggcttcaaactcccaacacaaaagcctgatggaaacttccaaaacgatagaaaatatcaccacttccattcaaggcgtgagctctcaaagtgaagccatgattgaacaagggaaagacattaaaagcattgtagaaatcattagagatattgccgatcaaacgaatctattagccctaaacgctgctattgaagccgcacgagccggcgagcatggcagaggctttgcggtggtggctgatgaggtgaggaagctcgctgaaaggacgcaaaaatccctcagtgagattgaagccaatattaatattctcgttcaaagcatttcagacacgagcgaaagcattaaaaaccaggttaaagaagtagaagagatcaacgcttctattgaagccttaagatcggttactgagggcaatctaaaaatcgctagcgattctttagaaatcagtcaagaaattgacaaagtctctaacgatattttagaagatgtgaataaaaagcagttt

SEQ ID NO: 181 - DNA (genomic), 1992 bp, Helicobacter pylori; double-stranded, circular
  misc_feature (B) LOCATION 1...1992
  hypothetical: NO
  anti-sense: NO
aatcatattgtgcgtggcgttgattgtgatcgtggcgtgagcattttaggggtgtccttaaacagcagggtgaaagagattttaaaagaaagcgctctgcattcaatgcaagatagtttgcatttcaaggttaaggaagtgcaaagtgttttggaaaacacttatacgagcatgggcattgtcaaagaaatgctccctgaagacaccaaaagagaaatcaaaatccagttgttaaaaaacttcattttagccaattcgcatgtcgctggggtgagcatgttttttaaagacagagaggatttgagattgacgcttttacgagataacgatacgatcaagttgatggaaaacccgtcattagggagtaaccctttagtgcaaaaagcgatgaaaaataaagaaatttctaaaagcttgccttattacaggaaaatgcctaacggggcggaagtttatggcgtggatattcttttaccactattcaaggaaaacacgcaagaagtggtgggggttctgatgattttcttttccattgacagcttcagtaatgaaatcactaaaaacaggagcgatttatttttaattggcgttaaaggtaaagtgcttttgagcgcgaataaaagcttgcaagacaaatccatcaccgaaatttataaaagcgtgcctaaagccactaatgaagtgatggctattttagaaaatggctctaaagcgactttagaatacttggatccctttagccataaggagaattttttagccgttgaaacctttaaaatgctaggcaaaacagaaagtaaagacaatcttaattggatgatcgctttgatcattgaaaaagacaaggtctatgagcaagtgggatcggtgcgttttgtggtggttgcagcgagtgctatcatggtgttagccttaatcatagcgatcactcttttaatgcgagcgatcgtgagcaatcgtttggaagtcgtttctagcaccttgtctcatttctttaaattattgaacaatcaagcccattctagcgacattaaattggttgaagcgcgatctaatgacgaattagggcgcatgcaaacagcgatcaataaaaatatcttgcaaacccaaaaaaccatgcaagaagactggcaagccgtccaagacaccattaaagtggtttcagatgtgaaagcggggaattttgcggtgcgcatcacggctgaacccgcaagccctgatttgaaagaattgagagacgcgctaatggatcatgcactatttgcaagaaagcgtgggactcacatgccaagcattttcaaaatctttgaaagctattctggcttggattttagagggcggatccaaaacgcttcgggtagggtggaattggttactaacgctttagggcaagaaatccaaaaaatgctagaaacttcgtctaattttgccaaagatctagcgaacgatagcgcgaatttaaaagaatgcgtgcaaaatttagaaaaggcttcaaactcccaacacaaaagcctgatggaaacttccaaaacgatagaaaatatcaccacttccattcaaggcgtgagctctcaaagtgaagccatgattgaacaagggaaagacattaaaagcattgtagaaatcattagagatattgccgatcaaacgaatctattagccctaaacgctgctattgaagccgcacgagccggcgagcatggcagaggctttgcggtggtggctgatgaggtgaggaagctcgctgaaaggacgcaaaaatccctcagtgagattgaagccaatattaatattctcgttcaaagcatttcagacacgagcgaaagcattaaaaaccaggttaaagaagtagaagagatcaacgcttctattgaagccttaagatcggttactgagggcaatctaaaaatcgctagcgattctttagaaatcagtcaagaaattgacaaagtctctaacgatattttagaagatgtgaataaaaagcagttt

SEQ ID NO: 182 - DNA (genomic), 2028 bp, Helicobacter pylori; double-stranded, circular
  misc_feature (B) LOCATION 1...2028
  hypothetical: NO
  anti-sense: NO
ttgtctaaaggtttgagtatcggtaataaaatcatattgtgcgtggcgttgattgtgatcgtgtgcgtgagcattttaggggtgtccttaaacagcagggtgaaagagattttaaaagaaagcgctctgcattcaatgcaagatagtttgcatttcaaggttaaggaagtgcaaagtgttttggaaaacacttatacgagcatgggcattgtcaaagaaatgctccctgaagacaccaaaagagaaatcaaaatccagttgttaaaaaacttcattttagccaattcgcatgtcgctggggtgagcatgttttttaaagacagagaggatttgagattgacgcttttacgagataacgatacgatcaagttgatggaaaacccgtcattagggagtaaccctttagcgcaaaaagcgatgaaaaataaagaaatttctaaaagcttgccttattacaggaaaatgcctaacggggcggaagtttatggcgtggatattcttttaccactattcaaggaaaacacgcaagaagtggtgggggttctgatgattttcttttccattgacagcttcagtaatgaaatcactaaaaacaggagcgatttatttttaattggcgttaaaggtaaagtgcttttgagcgcgaataaaagcttgcaagacaaatccatcaccgaaatttataaaagcgtgcctaaagccactaatgaagtgatggctattttagaaaatggctctaaagcgactttagaatacttggatccctttagccataaggagaattttttagccgttgaaacctttaaaatgctaggcaaaacagaaagtaaagacaatcttaattggatgatcgctttgatcattgaaaaagacaaggtctatgagcaagtgggatcggtgcgttttgtggtggttgcagcgagtgctatcatggtgttagccttaatcatagcgatcactcttttaatgcgagcgatcgtgagcaatcgtttggaagtcgtttctagcaccttgtctcatttctttaaattattgaacaatcaagcccattctagcgacattaaattggttgaagcgcgatctaatgacgaattagggcgcatgcaaacagcgatcaataaaaatatcttgcaaacccaaaaaaccatgcaagaagacaggcaagccgtccaagacaccattaaagtggtttcagacgtgaaagcggggaattttgcggtgcgcatcacggctgaacccgcaagccctgatttgaaagaattgagagacgcgctaaatgggatcatggattatttgcaagaaagcgtagggactcacatgccaagcattttcaaaatctttgaaagctattctggcttggattttagagggcggatccaaaacgcttcgggtagggtggaattggttactaacgctttagggcaagaaatccaaaaaatgctagaaacttcgtctaattttgccaaagatctagcgaacgatagcgcgaatttaaaagaatgcgtgcaaaatttagaaaaggcttcaaactcccaacacaaaagcctgatggaaacttccaaaacgatagaaaatatcaccacttccattcaaggcgtgagctctcaaagtgaagccatgattgaacaagggaaagacattaaaagcattgtagaaatcattagagatattgccgatcaaacgaatctattagccctaaacgctgctattgaagccgcacgagccggcgagcatggcagaggctttgcggtggtggctgatgaggtgaggaagctcgctgaaaggacgcaaaaatccctcagtgagattgaagccaatattaatattctcgttcaaagcatttcagacacgagcgaaagcattaaaaaccaggttaaagaagtagaagagatcaacgcttctattgaagccttaagatcggttactgagggcaatctaaaaatcgctagcgattctttagaaatcagtcaagaaattgacaaagtctctaacgatattttagaagatgtgaataaaaagcagttttaa

SEQ ID NO: 183 - DNA (genomic), 198 bp, Helicobacter pylori; double-stranded, circular
  misc_feature (B) LOCATION 1...198
  hypothetical: NO
  anti-sense: NO
aaaatgcacacgagttttttccaaatccctttgaattttggggttcgtgtgaatgtggataggcacaatggctttgaaatgggcttaaagatccctttagcggtcaattccttttatgaaacgcatggcaaggggttaaacgcttccctctttttcaaacgccttgtcatgtttaacgtgagttatgtttatagtttt

SEQ ID NO: 184 - DNA (genomic), 195 bp, Helicobacter pylori; double-stranded, circular
  misc_feature (B) LOCATION 1...195
  hypothetical: NO
  anti-sense: NO
atgcacacgagttttttccaaatccctttgaattttggggttcgtgtgaatgtggataggcacaatggctttgaaatgggcttaaagatccctttagcggtcaattccttttatgaaacgcatggcaaggggttaaacgcttccctctttttcaaacgccttgtcatgtttaacgtgagttatgtttatagtttt

SEQ ID NO: 185 - DNA (genomic), 357 bp, Helicobacter pylori; double-stranded, circular
  misc_feature (B) LOCATION 1...357
  hypothetical: NO
  anti-sense: NO
atgcaaaacacctttaactacaccaacaacgctttgaaaaacaatgctaaattaacccccactgaaatgcaagccgaacaatactacctccaatccacccttcaaaacattgaaaaaatagtcatgcttagcggtggcgttgcgtctaaccctaaactagtccaagcgttagaaaaaatgcaagaacccattactaaccctttagaattggtagaaaacttaaaaaatttagaattacaattcagccaatctcaaaacagcatgctttcttctttgtcttctcagatcgctcaaatttcaaattctttgaacgcgcttgatcccagctcttattctaaaaacgtttcaagcatgtat

SEQ ID NO: 186 - DNA (genomic), 585 bp, Helicobacter pylori; double-stranded, circular
  misc_feature (B) LOCATION 1...585
  hypothetical: NO
  anti-sense: NO
ttaggatcacccatgcaatttcaaaaaaccttatcttccttatctttatttttatctttatctttattcttatcttttagtatcgctgaagaaaatggggcgtatgcgagcgtgggttttgaatattccattagtcatgccgttgagcacaataatccctttttaaatcaagaacgcatccaaacgatttctaacgctcaaaaccaaatctataaactcaatcaaattgaaaatgaaatcacaaacatgcaaaacacctttaactacaccaacaacgctttgaaaaacaatgctaaattaacccccactgaaatgcaagccgaacaatactacctccaatccacccttcaaaacattgaaaaaatagtcatgcttagcggtggcgttgcgtctaaccctaaactagtccaagcgttagaaaaaatgcaagaacccattactaaccctttagaattggtagaaaacttaaaaaatttagaattacaattcagccaatctcaaaacagcatgctttcttctttgtcttctcagatcgctcaaatttcaaattctttgaacgcgcttgatcccagctcttattctaaa

SEQ ID NO: 187 - DNA (genomic), 588 bp, Helicobacter pylori; double-stranded, circular
  misc_feature (B) LOCATION 1...588
  hypothetical: NO
  anti-sense: NO
ttaggatcacccatgcaatttcaaaaaaccttatcttccttatctttatttttatctttatctttattcttatcttttagtatcgctgaagaaaatggggcgtatgcgagcgtgggttttgaatattccattagtcatgccgttgagcacaataatccctttttaaatcaagaacgcatccaaacgatttctaacgctcaaaaccaaatctataaactcaatcaaattgaaaatgaaatcacaaacatgcaaaacacctttaactacaccaacaacgctttgaaaaacaatgctaaattaacccccactgaaatgcaagccgaacaatactacctccaatccacccttcaaaacattgaaaaaatagtcatgcttagcggtggcgttgcgtctaaccctaaactagtccaagcgttagaaaaaatgcaagaacccattactaaccctttagaattggtagaaaacttaaaaaatttagaattacaattcagccaatctcaaaacagcatgctttcttctttgtcttctcagatcgctcaaatttcaaattctttgaacgcgcttgatcccagctcttattctaaaaac

SEQ ID NO: 188 - DNA (genomic), 735 bp, Helicobacter pylori; double-stranded, circular
  misc_feature (B) LOCATION 1...735
  hypothetical: NO
  anti-sense: NO
atgcaatttcaaaaaaccttatcttccttatctttatttttatctttatctttattcttatcttttagtatcgctgaagaaaatggggcgtatgcgagcgtgggttttgaatattccattagtcatgccgttgagcacaataatccctttttaaatcaagaacgcatccaaacgatttctaacgctcaaaaccaaatctataaactcaatcaaattgaaaatgaaatcacaaacatgcaaaacacctttaactacaccaacaacgctttgaaaaacaatgctaaattaacccccactgaaatgcaagccgaacaatactacctccaatccacccttcaaaacattgaaaaaatagtcatgcttagcggtggcgttgcgtctaaccctaaactagtccaagcgttagaaaaaatgcaagaacccattactaaccctttagaattggtagaaaacttaaaaaatttagaattacaattcagccaatctcaaaacagcatgctttcttctttgtcttctcagatcgctcaaatttcaaattctttgaacgcgcttgatcccagctcttattctaaaaacgtttcaagcatgtatggggtaggtttgagcgtagggtataagcatttctttaccaagaaaaaaaatcaagggtttcgttattacttattctatgactatggttacactaattttggttttgtgggtaatggctttgatggtttaggcaaaatgaataac

SEQ ID NO: 189 - DNA (genomic), 1017 bp, Helicobacter pylori; double-stranded, circular
  misc_feature (B) LOCATION 1...1017
  hypothetical: NO
  anti-sense: NO
gtgggttttgaatattccatcagtcatgccgttgaacacaataacccttttttggatcaagaacgcatccaagcgatttctaacgctcgaggcgaagtctgtggactcgatcgagtcaaaaatgaaatcacagacatgcccaacacctttaactacatcaacaacgctttaaaaaacaatgctaaattaacccctactgaaaagcaagccgaaacctactacctgcaatctacccttcaaaacattgaaaaaatagtcatgcttagcgggggcgttgcgtctaaccctaaattagcccaagcgttagaaaaaatgcaagaacccattactaaccctttagaattggtagaaaacttaaaaaatttagaattacaattcagccaatctcaaaacagcatgctttcttctttgtcttctcagatcgctcaaatttcaaattctttgaacgcgcttgatcccagctcttattctaaaaacgtttcaagcatgtatggggtaggtttgagcgtagggtataagcatttctttaccaagaaaaaaaatcaagggtttcgttattacttattctatgactatggttacactaattttggttttgtgggtaatggctttgatggtttaggcaaaatgaataaccacctctatgggcttggcatagattatcttttcaatttcattgataatgcgcaaaaacattcgagcgtggggttttatgtaggctttgctttagcggggagttcgtgggtagggagtggtttaggcatgtgggtgagtcaaatggatttcatcaacaactatttgacggattatcgggctaaaatgcacacgagttttttccaaatccctttgaattttggggttcgtgtgaatgtggataggcacaatggttttgaaatgggcttaaagatccctttagcggtcaattccttttatgaaacgcatggcaaggggttaaacgcttccctctttttcaaacgccttgtcatgtttaacgtgagttatgtttatagtttttag

SEQ ID NO: 190 - DNA (genomic), 1101 bp, Helicobacter pylori; double-stranded, circular
  misc_feature (B) LOCATION 1...1101
  hypothetical: NO
  anti-sense: NO
atgcaatttcaaaaaaccttactttctttatctttattatttttatcttattgtatcgctgaagaaaatggggcgtatgcgagcgtgggttttgaatattccatcagtcatgccgttgaacacaataacccttttttgaatcaagaacgcatccaaacgatttctaacgctcaaaacaaaatctataaactcaatcaagtcaaaaatgaaatcacaaacatgcccaacacctttaactacatcaacaacgctttaaaaaacaatgctaaattaacccctactgaaaagcaagccgaaacctactacctgcaatctacccttcaaaacattgaaaaaatagtcatgcttagcgggggcgttgcgtctaaccctaaattagcccaagcgttagaaaaaatgcaagaacccattactaaccctttagaattggtagaaaacttaaaaaatttagaattacaattcagccaatctcaaaacagcatgctttcttctttgtcttctcagatcgctcaaatttcaaattctttgaacgcgcttgatcccagctcttattctaaaaacgtttcaagcatgtatggggtaggtttgagcgtagggtataagcatttctttaccaagaaaaaaaatcaagggtttcgttattacttattctatgactatggttacactaattttggttttgtgggtaatggctttgatggtttaggcaaaatgaataaccacctctatgggcttggcatagattatcttttcaatttcattgataatgcgcaaaaacattcgagcgtggggttttatgtaggctttgctttagcggggagttcgtgggtagggagtggtttaggcatgtgggtgagtcaaatggatttcatcaacaactatttgacggattatcgggctaaaatgcacacgagttttttccaaatccctttgaattttggggttcgtgtgaatgtggataggcacaatggctttgaaatgggcttaaagatccctttagcggtcaattccttttatgaaacgcatggcaaagggttaaacgcttccctctttttcaaacgccttgtcatgtttaacgtgagttatgtttatagtttttag

SEQ ID NO: 191 - DNA (genomic), 1110 bp, Helicobacter pylori; double-stranded, circular
  misc_feature (B) LOCATION 1...1110
  hypothetical: NO
  anti-sense: NO
caggatcaacccatgcaatttcaaaaaaccttactttctttatctttattatttttatcttattgtatcgctgaagaaaatggggcgtatgcgagcgtgggttttgaatattccatcagtcatgccgttgaacacaataacccttttttgaatcaagaacgcatccaaacgatttctaacgctcaaaacaaaatctataaactcaatcaagtcaaaaatgaaatcacaaacatgcccaacacctttaactacatcaacaacgctttaaaaaacaatgctaaattaacccctactgaaaagcaagccgaaacctactacctgcaatctacccttcaaaacattgaaaaaatagtcatgcttagcgggggcgttgcgtctaaccctaaattagcccaagcgttagaaaaaatgcaagaacccattactaaccctttagaattggtagaaaacttaaaaaatttagaattacaattcagccaatctcaaaacagcatgctttcttctttgtcttctcagatcgctcaaatttcaaattctttgaacgcgcttgatcccagctcttattctaaaaacgtttcaagcatgtatggggtaggtttgagcgtagggtataagcatttctttaccaagaaaaaaaatcaagggtttcgttattacttattctatgactatggttacactaattttggttttgtgggtaatggctttgatggtttaggcaaaatgaataaccacctctatgggcttggcatagattatcttttcaatttcattgataatgcgcaaaaacattcgagcgtggggttttatgtaggctttgctttagcggggagttcgtgggtagggagtggtttaggcatgtgggtgagtcaaatggatttcatcaacaactatttgacggattatcgggctaaaatgcacacgagttttttccaaatccctttgaattttggggttcgtgtgaatgtggataggcacaatggttttgaaatgggcttaaagatccctttagcggtcaattccttttatgaaacgcatggcaaggggttaaacgcttccctctttttcaaacgccttgtcatgtttaacgtgagttatgtttatagtttt

SEQ ID NO: 192 - DNA (genomic), 1116 bp, Helicobacter pylori; double-stranded, circular
  misc_feature (B) LOCATION 1...1116
  hypothetical: NO
  anti-sense: NO
atgcaatttcaaaaaaccttatcttccttatctttatttttatctttatctttattcttatcttttagtatcgctgaagaaaatggggcgtatgcgagcgtgggttttgaatattccatcagtcatgccgttgaacacaataacccttttttgaatcaagaacgcatccaaacgatttctaacgctcaaaacaaaatctataaactcaatcaagtcaaaaatgaaatcacaaacatgcccaacacctttaactacatcaacaacgctttaaaaaacaatgctaaattaacccctactgaaaagcaagccgaaacctactacctgcaatctacccttcaaaacattgaaaaaatagtcatgcttagcgggggcgttgcgtctaaccctaaattagcccaagcgttagaaaaaatgcaagaacccattactaaccctttagaattggtagaaaacttaaaaaatttagaattacaattcagccaatctcaaaacagcatgctttcttctttgtcttctcagatcgctcaaatttcaaattctttgaacgcgcttgatcccagctcttattctaaaaacgtttcaagcatgtatggggtaggtttgagcgtagggtataagcatttctttaccaagaaaaaaaatcaagggtttcgttattacttattctatgactatggttacactaattttggttttgtgggtaatggctttgatggtttaggcaaaatgaataaccacctctatgggcttggcatagattatcttttcaatttcattgataatgcgcaaaaacattcgagcgtggggttttatgtaggctttgctttagcggggagttcgtgggtagggagtggtttaggcatgtgggtgagtcaaatggatttcatcaacaactatttgacggattatcgggctaaaatgcacacgagttttttccaaatccctttgaattttggggttcgtgtgaatgtggataggcacaatggctttgaaatgggcttaaagatccctttagcggtcaattccttttatgaaacgcatggcaaagggttaaacgcttccctctttttcaaacgccttgtcatgtttaacgtgagttatgtttatagtttttag

SEQ ID NO: 193 - DNA (genomic), 351 bp, Helicobacter pylori; double-stranded, circular
  misc_feature (B) LOCATION 1...351
  hypothetical: NO
  anti-sense: NO
atggagttaattaagaaattggaaaaagaaagcgaagttttaaagaaagatttacaacaacattcaaacgagctttttaaaatgttgattattgataatgaagatttgtttaaagagcaatttgagattatgtttaaagcatgggttgaaatcgtaaaaatgatgtttgaattaaccaaaaaaaccaaatttgatggcgaaatgattggctacacagaagaacttttaacctttttagttagagatttttttaatgggatttttaaatccaaagtaatacctaaaatgcctattttttgcggtgatgttaaatgcgaagattttaatgccctaagaagtttagtttatctt

SEQ ID NO: 194 - DNA (genomic), 402 bp, Helicobacter pylori; double-stranded, circular
  misc_feature (B) LOCATION 1...402
  hypothetical: NO
  anti-sense: NO
atggagttaattaagaaattggaaaaagaaagcgaagttttaaagaaagatttacaacaacattcaaacgagctttttaaaatgttgattattgataatgaagatttgtttaaagagcaatttgagattatgtttaaagcatgggttgaaatcgtaaaaatgatgtttgaattaaccaaaaaaaccaaatttgatggcgaaatgattggctacacagaagaacttttaacctttttagttagagatttttttaatgggatttttaaatccaaagtaatacctaaaatgcctattttttgcggtgatgttaaatgcgaagattttaatgccctaagaagtttagtttatctttctgtgcttgagttggaagaaacgataaatcctaataaaatcccattttaa

SEQ ID NO: 195 - DNA (genomic), 402 bp, Helicobacter pylori; double-stranded, circular; identical to SEQ ID NO: 194
  misc_feature (B) LOCATION 1...402
  hypothetical: NO
  anti-sense: NO

SEQ ID NO: 196 - DNA (genomic), 411 bp, Helicobacter pylori; double-stranded, circular
  misc_feature (B) LOCATION 1...411
  hypothetical: NO
  anti-sense: NO
gctaacgaaaaaatggagttaattaagaaattggaaaaagaaagcgaagttttaaagaaagatttacaacaacattcaaacgagctttttaaaatgttgattattgataatgaagatttgtttaaagagcaatttgagattatgtttaaagcatgggttgaaatcgtaaaaatgatgtttgaattaaccaaaaaaaccaaatttgatggcgaaatgattggctacacagaagaacttttaacctttttagttagagatttttttaatgggatttttaaatccaaagtaatacctaaaatgcctattttttgcggtgatgttaaatgcgaagattttaatgccctaagaagtttagtttatctttctgtgcttgagttggaagaaacgataaatcctaataaaatcccattt

SEQ ID NO: 197 - DNA (genomic), 432 bp, Helicobacter pylori; double-stranded, circular
  misc_feature (B) LOCATION 1...432
  hypothetical: NO
  anti-sense: NO
atgaaaatccaaacaatttcaacacttgtccttacaataataatggtaatacaaaaaatgattgttggcaaaatttcaccccacaaaaccgcagaagaattcacyaatttaatgttgaacatgatcgctgttttagactcccaatcttggggcgatgcgatcttaaacgctccttttgagttcactaacagcccaacagattgcgataatgatccttcaaaatgcgtaaatcctgggacaaacgggcttgtcaattctaaagtcgatcaaaaatatgtgttaaacaaacaagacattgtcaataaatttaaaaacaaagcrgatcttgatgtaattgttttaaaggattcaggggttgtagggttrgscaatggatatggcaatgatggtgaatatggcacattaggggtagwagcctatgctttaggatcc

SEQ ID NO: 198 - DNA (genomic), 1131 bp, Helicobacter pylori; double-stranded, circular
  misc_feature (B) LOCATION 1...1131
  hypothetical: NO
  anti-sense: NO
aaagagataaccatgagaaaactattcatcccacttttattattcagcgctttagaagcgaacgagaaaaacggctttttcatagaagccggctttgaaactgggctattagaaggcacacaaacgcaagaaaaaagacacaccaccacaaaaaacacttacgcaacttacaattatttacccacagacacgattttaaaaagagcggctaatttattcaccaatgccgaagcgatttcaaaattaaaattctcatctttatcccctgttagagtgttgtatatgtataatggtcaattaactatagaaaacttcttgccttataatttaaataatgttaagcttagttttacagacgctcaaggcaatgtgattgatctaggcgtgatagagactatccccaaacactctaagattgttttgcccggagaggcatttgatagtctaaaaattgacccatatactttatttcttccaaaaattgaagccactagcacttctatttctgacgctaacacgcagagggtgtttgaaacgctcaataagattaagacaaatttggtcgtaaattataggaatgaaaacaaatttaaagatcacgaaaatcattgggaagcctttaccccacaaaccgcagaagaattcaccaatttaatgttgaacatgatcgctgttttagactcccaatcttggggcgatgcgatcttaaacgctccttttgagttcactaacagcccaacagattgcgataatgatccttcaaaatgcgtaaatcctgggacaaacgggcttgtcaattctaaagtcgatcaaaaatatgtgttaaacaaacaagacattgtcaataaatttaaaaacaaagcggatcttgatgtaattgttttaaaggattcaggggttgtagggcttgggagtgatattacccctagcaacaatgatgatggcaagcattatggccagttaggggtagtagcttctgctttagatcctaaaaaactctttggcaacgaccttaagactatcaatttagaggatttaagaaccatcttgcatgaattcagccacactaaaggctatgggcataacgggaatatgacctatcaaagagtgccggtaacgaaagatgtcaag

SEQ ID NO: 199 - DNA (genomic), 1179 bp, Helicobacter pylori; double-stranded, circular
  misc_feature (B) LOCATION 1...1179
  hypothetical: NO
  anti-sense: NO
atgagaaaactattcatcccacttttattattcagcgctttagaagcgaacgagaaaaacggctttttcatagaagccggctttgaaactgggctattagaaggcacacaaacgcaagaaaaaagacacaccaccacaaaaaacacttacgcaacttacaattatttacccacagacacgattttaaaaagagcggctaatttattcaccaatgccgaagcgatttcaaaattaaaattctcatctttatcccctgttagagtgttgtatatgtataatggtcaattaactatagaaaacttcttgccttataatttaaataatgttaagcttagttttacagacgctcaaggcaatgtgatcgatctaggcgtgatagagactatccccaaacactctaagattgttttgcccggagaggcatttgatagtctaaaaattgacccctatactttatttcttccaaaaattgaagccactagcacttctatttctgacgctaacacgcagagggtgtttgaaacgctcaataagattaagacaaatttggtcgtaaattataggaatgaaaacaaatttaaagatcacgaaaatcattgggaagcctttaccccacaaaccgcagaagaattcactaatttaatgttgaacatgatcgctgttttagactcccaatcttggggcgatgcgatcttaaacgctccttttgagttcactaacagcccaacagattgcgataatgatccttcaaaatgcgtaaatcctgggacaaacgggcttgtcaattctaaagtcgatcaaaaatatgtgttaaacaaacaagacattgtcaataaatttaaaaacaaagcggatcttgatgtaattgttttaaaggattcaggggttgtagggcttgggagtgatattacccctagcaacaatgatgatggcaagcattatggccagttaggggtagtagcttctgctttagatcctaaaaaactctttggcgataaccttaagactatcaatttagaggatttaagaaccatcttgcatgaattcagccacactaaaggctatgggcataacgggaatatgacctatcaaagagtgccggtaacgaaagatggtcaagtggaaaaggatagtaatggcaagccaaaagattctgatggcctcccctataatgtgtgt

SEQ ID NO: 200 - DNA (genomic), 1974 bp, Helicobacter pylori; double-stranded, circular
  misc_feature (B) LOCATION 1...1974
  hypothetical: NO
  anti-sense: NO
atgagaaaactattcatcccacttttattattcagcgctttagaagcgaacgagaaaaacggctttttcatagaagccggctttgaaactgggctattagaaggcacacaaacgcaagaaaaaagacacaccaccacaaaaaacacttacgcaacttacaattatttacccacagacacgattttaaaaagagcggctaatttattcaccaatgccgaagcgatttcaaaattaaaattctcatctttatcccctgttagagtgttgtatatgtataatggtcaattaactatagaaaacttcttgccttataatttaaataatgttaagcttagttttacagacgctcaaggcaatgtgatcgatctaggcgtgatagagactatccccaaacactctaagattgttttgcccggagaggcatttgatagtctaaaaattgacccctatactttatttcttccaaaaattgaagccactagcacttctatttctgacgctaacacgcagagggtgtttgaaacgctcaataagattaagacaaatttggtcgtaaattataggaatgaaaacaaatttaaagatcacgaaaatcattgggaagcctttaccccacaaaccgcagaagaattcactaatttaatgttgaacatgatcgctgttttagactcccaatcttggggcgatgcgatcttaaacgctccttttgagttcactaacagcccaacagattgcgataatgatccttcaaaatgcgtaaatcctgggacaaacgggcttgtcaattctaaagtcgatcaaaaatatgtgttaaacaaacaagacattgtcaataaatttaaaaacaaagcggatcttgatgtaattgttttaaaggattcaggggttgtagggcttgggagtgatattacccctagcaacaatgatgatggcaagcattatggccagttaggggtagtagcttctgctttagatcctaaaaaactctttggcgataaccttaagactatcaatttagaggatttaagaaccatcttgcatgaattcagccacactaaaggctatgggcataacgggaatatgacctatcaaagagtgccggtaacgaaagatggtcaagtggaaaaggatagtaatggcaagccaaaagattctgatggcctcccctataatgtgtgttcgctttatgggggatccaatcagcccgctttccctagcaactaccctaattccatctatcacaattgtgcggatgtcccggctggctttttaggggtaacagcagcggtttggcagcagctcatcaatcaaaacgccttgccgatcaactacgctaacttggggagtcaaacaaactacaacctaaacgctagtttaaacacgcaagatttagccaattccatgctcagcaccatccaaaaaacctttgtaacttctagcgttaccaaccaccatttttcaaacgcatcgcaaagttttagaagccctattttaggggttaacgctaaaataggctatcaaaactactttaatgatttcatagggttggcttattatggcatcatcaaatacaattacgctaaagctgttaatcaaaaagtccagcaattgagctatggtggggggatagatttgttattggatttcatcaccacttactccaataaaaatagccctacaggcattcaaaccaaaaggaatttttcttcatcttttggtatctttggggggttaaggggcttgtataacagctattatgtgttgaacaaagtcaaaggaagcggcaatttagatgtggctaccgggttgaactaccgctataagcattctaaatattctgtagggattagcatccctttaatccaaagaaaagctagcgtcgtttctagcggtggcgattatacgaactcttttgttttcaatgaaggggctagccactttaaggtgtttttcaattacgggtgggtgttttag

SEQ ID NO: 201 - DNA (genomic), 345 bp, Helicobacter pylori; double-stranded, circular
  misc_feature (B) LOCATION 1...345
  hypothetical: NO
  anti-sense: NO
atgaatatcaaaacccattcttcaaatgaaaaagaacgctttgtacgcatagaagaggacgaaaagaaagaattattcgccgaagctacaaatgaaaatccgcacggcctttctttaatggctttaataggggtgttggtttttgggggtgcgtttttagccttattagtgcctaaaatctatttaagcaataatatctattatattagccgtaaaattaataccctagaagatcaaaaacgcctgcttttagaagaacagcaaatcctaaaaaacgaattagaaaaagagcgttttaaatactacatagagaatagtgaaaatattggcgatattgcgttttaa

SEQ ID NO: 202 - DNA (genomic), 345 bp, Helicobacter pylori; double-stranded, circular
  misc_feature (B) LOCATION 1...345
  hypothetical: NO
  anti-sense: NO
gccatgaatatcaaaacccattcttcaaatgaaaaagaacgctttgtacgcatagaagaggacgaaaagaaagaattattcgccgaagctacaaatgaaaatccgcacggcctttctttaatggctttaataggggtgttggtttttgggggtgcgtttttagccttattagtgcctaaaatctatttaagcaataatatctattatattagccgtaaaattaataccctagaagatcaaaaacgcctgcttttagaagaacagcaaatcctaaaaaacgaattagaaaaagagcgttttaaatactacatagagaatagtgaaaatattggcgatattgcgttt

SEQ ID NO: 203 - DNA (genomic), 189 bp, Helicobacter pylori; double-stranded, circular
  misc_feature (B) LOCATION 1...189
  hypothetical: NO
  anti-sense: NO
gaatatttgccaggggcaaaagaggtcattcccaccccttcaaccccattaacgccctctaaacgctattctatcaatttgatgactgaaaatgatggttatatcaatccttacattgatgagtattacacggcaggcaatcaaataggcttttctactaaagagtttgattttctaaaaataaagcga

SEQ ID NO: 204 - DNA (genomic), 453 bp, Helicobacter pylori; double-stranded, circular
  misc_feature (B) LOCATION 1...453
  hypothetical: NO
  anti-sense: NO
ggttactcgttggggcatttctctcgcccaagacatgtataccccctcacttgcaaacagaaaactggtgcatttgatgacaaccacccttatggggggtatttgagggtgaatttgaacgtgtataaccgccatcaaactttcatggagttattcacgatttctttaggcacgacagggcaagattctttggccgctcaaacgcagcgtctcattcataaatggggtcatgatccccaattttatggctggaacacgcagctcaaaaacgaatttatctttgaactgcactaccaattgcttaaaaaagtcccccttttaaagactcgttttttttctatggagttgatgcctgggtttaatgtggaactgggtaatgcgagggattatttccaactcggctcgctctttagggctgggtataacttggacgctgattatggggtcaataag

SEQ ID NO: 205 - DNA (genomic), 1011 bp, Helicobacter pylori; double-stranded, circular
  misc_feature (B) LOCATION 1...1011
  hypothetical: NO
  anti-sense: NO
ttgtttttcaaatttattttatgtttatcattaggaatatttgcatgggcaaaagaggtcattcccaccccttcaaccccattaacgccctctaaacgctattctatcaatttgatgactgaaaatgatggttatatcaatccttacattgatgagtattacacggcaggcaatcaaataggcttttctactaaagagtttgatttttctaaaaataaagcgatgaaatggtcttcgtatttagggtttttcaataaaagccctagggttactcgttttggcatttctctcgcccaagacatgtataccccctcacttgcaaacagaaaactggtgcatttgcatgacaaccacccttatggggggtatttgagggtgaatttgaacgtgtataaccgccatcaaactttcatggagttattcacgatttctttaggcacgacagggcaagattctttggccgctcaaacgcagcgtctcattcataaatggggtcatgatccccaattttatggctggaacacgcagctcaaaaacgaatttatctttgaactgcactaccaattgcttaaaaaagtcccccttttaaagactcgttttttttctatggagttgatgcctgggtttaatgtggaactgggtaatgcgagggattatttccaactcggctcgctctttagggctgggtataacttggacgctgattatggggtcaataaggtcaataccgcttttgatgggggcatgccttatagcgataagttttccatctatttttttgcaggggcttttgggcgcttccaaccccttaacatcttcattcaaggcaatagccctgaaactaggggcattgccaatttggaatactttgtttatgccagtgaaataggagcggctatgatgtggcgtagcctcagggtggcttttacaatcactgatattagtaaaacctttcagtcccagcctaagcaccatcagatcggcaccttagaattgaatttcgccttttga

SEQ ID NO: 206 - DNA (genomic), 216 bp, Helicobacter pylori; double-stranded, circular
  misc_feature (B) LOCATION 1...216
  hypothetical: NO
  anti-sense: NO
gtgttaaaatttcaaaaattacccttattgtttgtttccattctttataatcaaagccctttattggcttttgattataagtttagtggggtagcggaatctgtttctaaagtggggtttaaccattccaaactcaattccaaagaagggattttccctacagccacctttgtaaccgccacgatcaagcttcaagtgrattycaaatctgctccc

SEQ ID NO: 207 - DNA (genomic), 1368 bp, Helicobacter pylori; double-stranded, circular
  misc_feature (B) LOCATION 1...1368
  hypothetical: NO
  anti-sense: NO
gtgttaaaatttcaaaaattacccttattgtttgtttccattctttataatcaaagccctttattggcttttgattataagtttagtggggtagcggaatctgtttctaaagtggggtttaaccattccaaactcaattccaaagaagggattttccctacagccacctttgtaaccgccacgatcaagcttcaagtggattccaatctgctccctaaaaacattgaaaaacacagcttaaaaataggcgttggggggattttaggagcgctcgcttacgattccaccaaaacgctcatagaccaagccacgcatcaaatctatggctcagaacttttttacctcatagggcgttggtgggggtttttaggcaacgctccttggaaagactccctcatagaatctgacgctcacacccgtaattatgtgctgtataattcctatctgttttattcttatggcgataaattccacctaaaattagggcgttatctctctaacatggattttatgagttcctacacacagggttttgaactggattataaaatcaattctaaaatagcgttaaaatggtttagctcttttgggagggcgttggcttttgggcaatggatacgggattggtatgcccctattgtaactgaagatggcagaaaagaagtttatgatggcatccatgccgcgcaactctatttttctagcaagcatgttcaagtcatgccttttgcttatttttcgcctaagatttacggagcgcccggtgttaaaatccatattgatagcaacccgaaattcaaaggcttagggttaagggctcaaaccactattaatgtgattttccctgtttatgctaaagatttatacgatgtgtattggcgtaactctaagattggcgagtggggcgcatcgcttttgatccaccaacgctttgactacaacgaatttaactttggctttggttattaccaaaattttggcaacgctaacgcaaggattggctggtatggtaaccccatcccttttaattatagaaataacagcgtttatggtggggtcttcagtaacgctattaccgcagacgccgtttctgggtatgtctttggtgggggggtgtatagagggtttttatggggtattttaggcagatacacttatgccactagagcgagcgaaagatccatcaacttgaacttgggctataaatggggttcttttgctagagttgatgtgaatttagaatactatgtggtcagcatgcacaacggctatagattagactatctcaccggccctttcaacaaagcctttaaggctgacgcacaagataggagtaaccttatggttagcatgaaattctttttttaa

SEQ ID NO: 208 - DNA (genomic), 1458 bp, Helicobacter pylori; double-stranded, circular
  misc_feature (B) LOCATION 1...1458
  hypothetical: NO
  anti-sense: NO
tatttagataattatttgaatacttttatttttaatgggtttttaagaaagatagactattatgcgagtgggaaattaaaaaggattggtgcggtgttaaaatttcaaaaattacccttattgtttgtttccattctttataatcaaagccctttattggcttttgattataagtttagtggggtagcggaatctgtttctaaagtggggtttaaccattccaaactcaattccaaagaagggattttccctacagccacctttgtaaccgccacgatcaagcttcaagtggattccaatctgctccctaaaaacattgaaaaacacagcttaaaaataggcgttggggggattttaggagcgctcgcttacgattccaccaaaacgctcatagaccaagccacgcatcaaatctatggctcagaacttttttacctcatagggcgttggtgggggtttttaggcaacgctccttggaaagactccctcatagaatctgacgctcacacccgtaattatgtgctgtataattcctatctgttttattcttatggcgataaattccacctaaaattagggcgttatctctctaacatggattttatgagttcctacacacagggttttgaactggattataaaatcaattctaaaatagcgttaaaatggtttagctcttttgggagggcgttggcttttgggcaatggatacgggattggtatgcccctattgtaactgaagatggcagaaaagaagtttatgatggcatccatgccgcgcaactctatttttctagcaagcatgttcaagtcatgccttttgcttatttttcgcctaagatttacggagcgcccggtgttaaaatccatattgatagcaacccgaaattcaaaggcttagggttaagggctcaaaccactattaatgtgattttccctgtttatgctaaagatttatacgatgtgtattggcgtaactctaagattggcgagtggggcgcatcgcttttgatccaccaacgctttgactacaacgaatttaactttggctttggttattaccaaaattttggcaacgctaacgcaaggattggctggtatggtaaccccatcccttttaattatagaaataacagcgtttatggtggggtcttcagtaacgctattaccgcagacgccgtttctgggtatgtctttggtgggggggtgtatagagggtttttatggggtattttaggcagatacacttatgccactagagcgagcgaaagatccatcaacttgaacttgggctataaatggggttcttttgctagagttgatgtgaatttagaatactatgtggtcagcatgcacaacggctatagattagactatctcaccggccctttcaacaaagcctttaaggctgacgcacaagataggagtaaccttatggttagcatgaaattctttttt

SEQ ID NO: 209 - DNA (genomic), 684 bp, Helicobacter pylori; double-stranded, circular
  misc_feature (B) LOCATION 1...684
  hypothetical: NO
  anti-sense: NO
gtgcgttttggtaaaattgattatttgaacatgctcccttttgatgtgtttatcaaatcctaccccaccccttgttatttcaaacaattcttacggcttaaaaaaacctacccctccaaactcaatgagagttttttattcaggcgcattgatgcggggtttatttcttctatcgctggctatccattcgctctttgttcttattctctaggcattgtcgcttataaggaagttttaagcgtgttggttgtaaatagagaaaacgcttttgacaaagaaagcgcttcttcaaacgccctctctaaagtgttagggttaaaaggcgaggtcttaatcggcaataaagcgctgcaattttattattccaaccctaaaaaagattttatagatttagccgctctgtggtatgaaaaaaaacgcttgccgtttgtttttgggcgtctgtgctattatcaaaacaaggatttttacaaacgcttgtctttagccttcaaacatcaaaaaacaaaaatccctcactacatccttaaagaagccgctttgaaaaccaacttgaaacgccaagatattctaaactacttgcaaaaaatttactacactttaggcaaaaaggaacaatcaggccttaaagcgttctatcgtgaattgttgttcaaacgcatccaaaaacccaagcggttttag

SEQ ID NO: 210 - DNA (genomic), 681 bp, Helicobacter pylori; double-stranded, circular
  misc_feature (B) LOCATION 1...681
  hypothetical: NO
  anti-sense: NO
gtgcgttttggtaaaattgattatttgaacatgctcccttttgatgtgtttatcaaatcctaccccaccccttgttatttcaaacaattcttacggcttaaaaaaacctacccctccaaactcaatgagagttttttattcaggcgcattgatgcggggtttatttcttctatcgctggctatccattcgctctttgttcttattctctaggcattgtcgcttataaggaagttttaagcgtgttggttgtaaatagagaaaacgcttttgacaaagaaagcgcttcttcaaacgccctctctaaagtgttagggttaaaaggcgaggtcttaatcggcaataaagcgctgcaattttattattccaaccctaaaaaagattttatagatttagccgctctgtggtatgaaaaaaaacgcttgccgtttgtttttgggcgtctgtgctattatcaaaacaaggatttttacaaacgcttgtctttagccttcaaacatcaaaaaacaaaaatccctcactacatccttaaagaagccgctttgaaaaccaacttgaaacgccaagatattctaaactacttgcaaaaaatttactacactttaggcaaaaaggaacaatcaggccttaaagcgttctatcgtgaattgttgttcaaacgcatccaaaaacccaagcggttt

SEQ ID NO: 211 - DNA (genomic), 435 bp, Helicobacter pylori; double-stranded, circular
  misc_feature (B) LOCATION 1...435
  hypothetical: NO
  anti-sense: NO
aatagctttgataaataccatattttaggcttaagggtgtggggggatgtagaatacgctaaggctcaattaggtcaaaaagtggggggtaacacccttttatcccaagcgaattataacccaagcgcgattaaaacctacgatcctacttcaaacgctcaaggctctttagttttgcaaaaaaccccaagcccccaagatttccttttcaataacgggcatttcatggcgtttggtttgaacgtgaacatgtttgtcaatctccctatagacacccttttaaaactcgctttaaaaacggaaaaaatgctgttttttaaaataggcgtgtttggtgggggtggggtggaatacgcaatcttgtggagtcctcaatataaaaatcaaaatacccatcaagacgataaattttttgcgcaggtggggggttttttg

SEQ ID NO: 212 - DNA (genomic), 918 bp, Helicobacter pylori; double-stranded, circular
  misc_feature (B) LOCATION 1...918
  hypothetical: NO
  anti-sense: NO
atgggtagaattgaatcaaaaaagcgtttgaaagcactcatttttttagcgagtttgggggtgttgtggggcaatgcggctgaaaaaacgcctttttttaaaactaaaaaccacatttatttgggttttaggctaggcacaggggctactacgcgcacaagcatgtggcaacaagcctataaagacaaccccacttgccctagcagcgtgtgttatggcgagaaattagaagcccattataaggggggtaaaaacttatcttataccgggcaaataggcgatgaaatagcttttgataaataccatattttaggcttaagggtgtggggggatgtagaatacgctaaggctcaattaggtcaaaaagtggggggtaacacccttttatcccaagcgaattataacccaagcgcgattaaaacctacgatcctacttcaaacgctcaaggctctttagttttgcaaaaaaccccaagcccccaagatttccttttcaataacgggcatttcatggcgtttggtttgaacgtgaacatgtttgtcaatctccctatagacacccttttaaaactcgctttaaaaacggaaaaaatgctgttttttaaaataggcgtgtttggtgggggtggggtggaatacgcaatcttgtggagtcctcaatataaaaatcaaaatacccatcaagacgataaattttttgccgcaggtggggggttttttgtgaattttggaggctctttgtatataggcaagcgcaaccgcttcaatgtggggctaaaaatcccttattatagcttgagcgcgcaaagttggaaaaattttggctctagcaatgtgtggcagcaacaaacgatccgacaaaacttcagcgtttttaggaataaagaagtttttgtcagctacgcgttcttgttttag

SEQ ID NO: 213 - DNA (genomic), 339 bp, Helicobacter pylori; double-stranded, circular
  misc_feature (B) LOCATION 1...339
  hypothetical: NO
  anti-sense: NO
cactttgtttttaggggcgatttttgttgggcttatcgctattactccatagataaggagagagagactcagaggcatgacagctcttacattgtgatagacgaattagtgggcatgtgccttgcgatggcgattaacggattatcgttagtgggtgtgatcttgagttttatctttttaggatgctatgatattactaaaccctcactcattggcaaaatagacaaagaagttaaagggggcttaggggttgtggctgatgacgctttagccggggttttagccggattgagcacgttattagccatcaatattttaggattttttaacattaagttt

SEQ ID NO: 214 - DNA (genomic), 477 bp, Helicobacter pylori; double-stranded, circular
  misc_feature (B) LOCATION 1...477
  hypothetical: NO
  anti-sense: NO
ttgaataaatttggttggcgtgcgtgttttctaacccttttttttagcgggtattctaaaaaagctcctggaacgatagggagtttagtggcgttgttactgggcttacctattttaattttttcggctaacactttgtttttaggggcgatttttgttgggcttatcgctattactcaaatagataaggaagaagaagagactaagaggcatgacagctcttacattgtgatagacgaattagtgggcatgtggcttgcgatggcgattagcggattatcgttagtgggtgtgatcttgagttttatcttttttaggatctatgatattactaaaccctcactcattggcaaaatagacaaagaagttaaagggggcttaggggttgtggctgatgacgctttagccggggttttagccggattgagcacgttattagccatcaatattttaggattttttaacattaagttttag

SEQ ID NO: 215 - DNA (genomic), 2007 bp, Helicobacter pylori; double-stranded, circular
  misc_feature (B) LOCATION 1...2007
  hypothetical: NO
  anti-sense: NO
atgaaaaatcaacacaaaaatcccctaacaaaagctttaatgaaaacttatccatataaccattttttatttttctgctttattctaggagcgtttttattaggtttgctcagtccagcttatgctttaagtattatcaccactaaagaaattgacgctaatttgcttaatggagcgatagaaagcagggtggtgttaggcaagagggtgtttaaagtagaagctcatgggttttattttagaaacaatgcgactaacagcatagatatagaaatcaccagtcttttaagagacaatcaatcgtttcctttgactagcagtgctaaaaccagtttaaaaatacctcctaacgccaagattaaaaaatccactatccttgttttgaaaggcgagaacgctgaagaagtggctaagattttaggcgttagcaaagaagaataccaaaagctagaaaacatcgctcaaaccaaagcggctaatgaccctatgtatgctaacacgccttttagtaatggttctgatagttccttttacgataacaatcctaatagccctagcaataacgctatcaatggcaaagatggcgcaaatgggagtaacggctatggggcaaatggcaatgatggggtaaatgggatcagtgggagtaatggtgcaaatgggagtcattcaaataataatgcaataggcagtggtattgatacagatggcgtgttaggggtggatggggtgaatggctctagttcttcaagtggcggctctgtagggggttatgagaataatttcactaatcatggctctactaacaataacacaggagggtatgacaattttaataatggcagctcaagtggtgggagtttagggaatggggggcttttccctattccttttggtaatggagacacaaacaattccaataattccactaacaccactagcccaactaatggcagtagttctaataacgccactaatcctagttcgcaagaaaacaattactccagccagtattgtaaagtgccagagttaagccccaacaacacgatgaaactagatgttatcgctaaagatggctcttgtatttctatgaacgctttaagagatgacactaaatgcgcttatagatacgattttgaagccggtaaagccatcaagcaaacgcaatactactatgtagatagggaaaataaaacgcaaaatatcggtggttgtgtggatttacaaggcgctcaatacgccatgcaactttacaaagatgacagcaaatgcgccttacaaaccacgagcgataaaggttatggtatggggaaaacgcaaacctttcaaactgaaatcgtgtttcgtgggatggacaatttaatccatgtcgctgtgccttgcagcgattatgcaagggtgcaagacaggattgttaggtatgaaaaaaatgataaaacccaaaccttaacgcctatagtggatcagtattataatgatcctaacaaccctaacaagcaagagattttaaatcgtgggattgccacccaattaagctcgcaatatcaagaatttgcatgcggtcaatgggaatacaatgacgctaaattagaagccaaaagacctacaatgctaaaaagctataacaagcttaatggagaatgggtagaagttacgccctgtaattttgaagcagggattaaaagcggtgcggttgttagcccttatgtgatgggcgtgcctagttctaaagtcttaagcgatattactacaagccattattttaggatagaaaggaaaaattatggtgagagagaacaatgccaaaaactttatggagtcaatcgttgccaaccgcaatattccatactgatcctagtatcaccgattggagcgccacttacaaaaccactaccacccaaaccactcaaccttatttacgcccagcccaagataatgaaaaacaccccacaacctataatcttatcaccactcaaaccaccatcaacaggactcaaagcgttttga

SEQ ID NO: 216 - DNA (genomic), 2031 bp, Helicobacter pylori; double-stranded, circular
  misc_feature (B) LOCATION 1...2031
  hypothetical: NO
  anti-sense: NO
atccaaagatattggaatggagcgttaatgaaaaatcaacacaaaaatcccctaacaaaagctttaatgaaaacttatccatataaccattttttatttttctgctttattctaggagcgtttttattaggtttgctcagtccagcttatgctttaagtattatcaccactaaagaaattgacgctaatttgcttaatggagcgatagaaagcagggtggtgttaggcaagagggtgtttaaagtagaagctcatgggttttattttagaaacaatgcgactaacagcatagatatagaaatcaccagtcttttaagagacaatcaatcgtttcctttgactagcagtgctaaaaccagtttaaaaatacctcctaacgccaagattaaaaaatccactatccttgttttgaaaggcgagaacgctgaagaagtggctaagattttaggcgttagcaaagaagaataccaaaagctagaaaacatcgctcaaaccaaagcggctaatgaccctatgtatgctaacacgccttttagtaatggttctgatagttccttttacgataacaatcctaatagccctagcaataacgctatcaatggcaaagatggcgcaaatgggagtaacggctatggggcaaatggcaatgatggggtaaatgggatcagtgggagtaatggtgcaaatgggagtcattcaaataataatgcaataggcagtggtattgatacagatggcgtgttaggggtggatggggtgaatggctctagttcttcaagtggcggctctgtagggggttatgagaataatttcactaatcatggctctactaacaataacacaggagggtatgacaattttaataatggcagctcaagtggtgggagtttagggaatggggggcttttccctattccttttggtaatggagacacaaacaattccaataattccactaacaccactagcccaactaatggcagtagttctaataacgccactaatcctagttcgcaagaaaacaattactccagccagtattgtaaagtgccagagttaagccccaacaacacgatgaaactagatgttatcgctaaagatggctcttgtatttctatgaacgctttaagagatgacactaaatgcgcttatagatacgattttgaagccggtaaagccatcaagcaaacgcaatactactatgtagatagggaaaataaaacgcaaaatatcggtggttgtgtggatttacaaggcgctcaatacgccatgcaactttacaaagatgacagcaaatgcgccttacaaaccacgagcgataaaggttatggtatggggaaaacgcaaacctttcaaactgaaatcgtgtttcgtgggatggacaatttaatccatgtcgctgtgccttgcagcgattatgcaagggtgcaagacaggattgttaggtatgaaaaaaatgataaaacccaaaccttaacgcctatagtggatcagtattataatgatcctaacaaccctaacaagcaagagattttaaatcgtgggattgccacccaattaagctcgcaatatcaagaatttgcatgcggtcaatgggaatacaatgacgctaaattagaagccaaaagacctacaatgctaaaaagctataacaagcttaatggagaatgggtagaagttacgccctgtaattttgaagcagggattaaaagcggtgcggttgttagcccttatgtgatgggcgtgcctagttctaaagtcttaagcgatattactacaagccattattttaggatagaaaggaaaaattatggtgagagagaacaatgccaaaaactttatggagtcaatcgttgccaaccgcaatattccatactgatcctagtatcaccgattggagcgccacttacaaaaccactaccacccaaaccactcaaccttatttacgcccagcccaagataatgaaaaacaccccacaacctataatcttatcaccactcaaaccaccatcaacaggactcaaagcgttt

SEQ ID NO: 217 - DNA (genomic), 285 bp, Helicobacter pylori; double-stranded, circular
  misc_feature (B) LOCATION 1...285
  hypothetical: NO
  anti-sense: NO
cgcaacgtggaagcgcgttattattatggggacacttcatacttttatttgcatgcgggagttttacaagagttcgctcactttggatcgaatgatgtggcgtctttaaacacctttaaaatcaatgccgctcgcagtcctttaagcacctatgcaagagcgatgatgggtggggaattgcaattggctaaagaagtgtttttgaatttgggcgtggtttatttgcacaatttgatttccaacgcaagccatttcgcttccaatttaggaatgaggtatagtttc

SEQ ID NO: 218 - DNA (genomic), 399 bp, Helicobacter pylori; double-stranded, circular
  misc_feature (B) LOCATION 1...399
  hypothetical: NO
  anti-sense: NO
ttgtttaaaaccaatgggataagtgtgggggaatacactcattttagcgaagatataggcagtcaatcgcgtatcaataccgtgcgtttggaaactggcactaggtcaatcttttctgggggtgtcaaatttaaaagcggtgaaaaactagttatcaatgatttttactatagcccttggaattattttgacgctaggaatgttaaaaatgttgaaatcaccagaaaattcgcttcttcaaccccagaaaacccttggggcacatcaaagctcatgtttaataatctaaccttgggtcaaaatgcggtcatggactatagtcaattttcaaatttaaccattcaggggattttatctacaatcaagcgatatcatttgacgaagggtttttttaccccc

SEQ ID NO: 219 - DNA (genomic), 528 bp, Helicobacter pylori; double-stranded, circular
  misc_feature (B) LOCATION 1...528
  hypothetical: NO
  anti-sense: NO
gcagctatgatgtttaataatgatatagacagcgcgaccggattttacaaaccgctcatcaagattaacagcgctcaagatctcattaaaaatacagagcatgttttattgaaagcgaaaatcattggttatggtaatgtttctacaggtaccaatggcattagtaatgttaatctagaagagcaattcaaagagcgcctagccctttataacaataataaccgcatggatacttgtgtggtgcgaaatactgatgacattaaagcatgcggtatggctatcggcaatcaaagcatggtgaacaaccctgacaattacaagtatcttatcggtaaggcatggagaaatataggcatcagtaaaacggctaacggctctaaaatttcggtgtattatttaggcaattctacgcctactgagaatggtggcaataccaccaacttacccacaaacaccactaataatgcgcattctgctaactacgctctcgtgaagaacgctcctttcgctcacaacaccactcctaat

SEQ ID NO: 220 - DNA (genomic), 525 bp, Helicobacter pylori; double-stranded, circular
  misc_feature (B) LOCATION 1...525
  hypothetical: NO
  anti-sense: NO
gctatgatgtttaataatgatatagacagcgcgaccggattttacaaaccgctcatcaagattaacagcgctcaagatctcattaaaaatacagagcatgttttattgaaagcgaaaatcattggttatggtaatgtttctacaggtaccaatggcattagtaatgttaatctagaagagcaattcaaagagcgcctagccctttataacaataataaccgcatggatacttgtgtggtgcgaaatactgatgacattaaagcatgcggtatggctatcggcaatcaaagcatggtgaacaaccctgacaattacaagtatcttatcggtaaggcatggagaaatataggcatcagtaaaacggctaacggctctaaaatttcggtgtattatttaggcaattctacgcctactgagaatggtggcaataccaccaacttacccacaaacaccactaataatgcgcattctgctaactacgctctcgtgaagaacgctcctttcgctcacaacaccactcctaat

SEQ ID NO: 221 - DNA (genomic), 633 bp, Helicobacter pylori; double-stranded, circular
  misc_feature (B) LOCATION 1...633
  hypothetical: NO
  anti-sense: NO
aaacctaccaatgtttgggctaacgctattgggggagcgagcttgaatagcggctctaacgcttcattgtatggcacaagcgccggcgtagacgctttccttaacgggaatgtggaagccattgtgggcggttttggaagctatggttatagctcctttagcaatcaagcgaactctcttaactctggggccaataacgctaattttggcgtgtatagccgtttttttgccaaccaccctgaatttgactttgaagctcaaggggcgctagggagcgatcaatcaagcttgaatttcaaaagcactctattacaagatttgaatcaaagctataattacttagcctatagcgccacagcaagagcgagttatggttatgacttcgcgttttttaggaacgctttagtgttaaaaccaagcgtgggcgtgagctataaccatttaggttcaaccaactttaaaagcaatagccaatcacaagtggctttaaaaaatggcgcgagcagtcagcatttattcaacgctaacgcaacgtggaagcgcgttattattatggggacacttcatacttttatttgcatgcgggagttttacaagagttcgctcactttggatcgaatgatgtggcgtctt

SEQ ID NO: 222 - DNA (genomic), 774 bp, Helicobacter pylori; double-stranded, circular
  misc_feature (B) LOCATION 1...774
  hypothetical: NO
  anti-sense: NO
ttgaatagcggctctaacgcttcattgtatggcacaagcgccggcgtagacgctttccttaacgggaatgtggaagccattgtgggcggttttggaagctatggttatagctcctttagcaatcaagcgaactctcttaactctggggccaataacgctaattttggcgtgtatagccgtttttttgccaaccagcatgaatttgactttgaagctcaaggggcgctagggagcgatcaatcaagcttgaatttcaaaagcactctattacaagatttgaatcaaagctataattacttagcctatagcgccacagcaagagcgagttatggttatgacttcgcgttttttaggaacgctttagtgttaaaaccaagcgtgggcgtgagctataaccatttaggttcaaccaactttaaaagcaatagccaatcacaagtggctttaaaaaatggcgcgagcagtcagcatttattcaacgctaacgctaacgtggaagcgcgttattattatggggacacttcatacttttatttgcatgcgggagttttacaagagttcgctcactttggatcgaatgatgtggcgtctttaaacacctttaaaatcaatgccgctcgcagtcctttaagcacctatgcaagagcgatgatgggtggggaattgcaattggctaaagaagtgtttttgaatttgggcgtggtttatttgcacaatttgatttccaacgcaagccatttcgcttccaatttaggaatgaggtatagtttctaa

SEQ ID NO: 223 - DNA (genomic), 1221 bp, Helicobacter pylori; double-stranded, circular
  misc_feature (B) LOCATION 1...1221
  hypothetical: NO
  anti-sense: NO
agtcgcaccctttgtgcaaaaatcgttttacaaaaagaaaggaagaaaatggaaatacaacaaacacaccgcaaaatcaatcgccctttagtttctctcgttttagcaggagcgttgattagcgccataccgcaagagagtcatgccgcctttttcacgaccgtgatcattccagccattgttgggggtatcgccacaggcactgctgtaggaacggtctcagggcttcttagttggggactcaaacaagccgaagaagcgaataaaaccccagataaacccgataaagtttggcgcattcaagcaggaaaaggctttaatgaatttcctaacaaggaatacgacttatacaaatcccttttatccagtaagattgatggaggttgggactgggggaacgccgctaggcattattgggtcaaaggcgggcaatggaacaagcttgaagtggatatgaaagacgctgtagggacttataaactatcagggcttagaaactttactggtggggatttagacgtgaatatgcaaaaagccactttgcgtttgggccaattcaatggcaattctttcacaagctataaggatagcgctgatcgcaccacgagagtgaatttcaacgctaaaaatatttcaattgataattttgtagaaatcaataatcgtgtgggttctggagccgggagaaaagccagctctacggttttgactttgcaagcttcagaagggatcactagcagtaaaaatgcggaaatttctctttatgatggcgccacgctcaatttggcttcaaacagcgttaaattaaatggtaatgtgtggatgggccgtttgcaatacgtgggagcgtatttagccccttcatacagcacgatcaacacttcaaaagttcaaggggaagtggattttaaccatctcactgtgggggatcaaaacgccgctcaagcgggcattatcgctagcaataagactcatattggcacactggatttgtggcaaagcgccgggttaaatatcattgcccctccagaaggtggctacaaggataaacctaatagtaccacttctcaaagtggcactaaaaacgacaagaaagagatcagtcaaaataacaatagcaacacagaggtcattaacccacccaataacacgcaaaaaacagaaactgaacccaccaagtcattgatgggccttttgctgaaggcaaagactcggttgtca

SEQ ID NO: 224 - DNA (genomic), 3867 bp, Helicobacter pylori; double-stranded, circular
  misc_feature (B) LOCATION 1...3867
  hypothetical: NO
  anti-sense: NO
atggaaatacaacaaacacaccgcaaaatcaatcgccctttagtttctctcgttttagcaggagcgttgattagcgccataccgcaagagagtcatgccgcctttttcacgaccgtgatcattccagccattgttgggggtatcgccacaggcactgctgtaggaacggtctcagggcttcttagttggggactcaaacaagccgaagaagcgaataaaaccccagataaacccgataaagtttggcgcattcaagcaggaaaaggctttaatgaatttcctaacaaggaatacgacttatacaaatcccttttatccagtaagattgatggaggttgggactgggggaacgccgctaggcattattgggtcaaaggcgggcaatggaacaagcttgaagtggatatgaaagacgctgtagggacttataaactatcagggcttagaaactttactggtggggatttagacgtgaatatgcaaaaagccactttgcgtttgggccaattcaatggcaattctttcacaagctataaggatagcgctgatcgcaccacgagagtgaatttcaacgctaaaaatatttcaattgataattttgtagaaatcaataatcgtgtgggttctggagccgggagaaaagccagctctacggttttgactttgcaagcttcagaagggatcactagcagtaaaaatgcggaaatttctctttatgatggcgccacgctcaatttggcttcaaacagcgttaaattaaatggtaatgtgtggatgggccgtttgcaatacgtgggagcgtatttagccccttcatacagcacgatcaacacttcaaaagttcaaggggaagtggattttaaccatctcactgtgggggatcaaaacgccgctcaagcgggcattatcgctagcaataagactcatattggcacactggatttgtggcaaagcgccgggttaaatatcattgcccctccagaaggtggctacaaggataaacctaatagtaccacttctcaaagtggcactaaaaacgacaagaaagagatcagtcaaaataacaatagcaacacagaggtcattaacccacccaataacacgcaaaaaacagaaactgaacccacgcaagtcattgatgggccttttgctggcggcaaagacacggttgtcaatattttccacttaaacactaaagccgatggcacgattaaagtgggagggtttaaagcttctcttaccacgaatgcggctcatttgaatatcggcaaaggcggtgtcaatctgtccaatcaagcgagcgggcgcacccttttagtggaaaatctaaccgggaatatcaccgttgatgggcctttaagagtgaataatcaagtgggtggctatgctttggcaggatcaagcgcgaattttgagtttaaggctggtgtggatactaaaaacggcacagccactttcaataacgatattagtttgggaagatttgtgaatttaaaggtggatgctcatacagctaattttaaaggtattgatacgggtaatggtggtttcaacaccttagattttagtggtgttacagacaaagtcaatatcaacaagctcatcacagcttccactaatgtggccgttaaaaacttcaacattaatgaattgattgttaaaaccaatgggataagtgtgggggaatacactcattttagcgaagatataggcagtcaatcgcgtatcaataccgtgcgtttggaaactggcactaggtcaatcttttctgggggtgtcaaatttaaaagcggtgaaaaactagttatcaatgatttttactatagcccttggaattattttgacgctaggaatgttaaaaatgttgaaatcaccagaaaattcgcttcttcaaccccagaaaacccttggggcacatcaaagctcatgtttaataatctaaccttgggtcaaaatgcggtcatggactatagtcaattttcaaatttaaccattcagggggattttatcaacaatcaaggcactatcaactatctggtccgaggcgggaaagtggcaaccttaaatgtaggcaatgcagcagctatgatgtttaataatgatatagacagcgcgaccggattttacaaaccgctcatcaagattaacagcgctcaagatctcattaaaaatacagagcatgttttattgaaagcgaaaatcattggttatggtaatgtttctacaggtaccaatggcattagtaatgttaatctagaagagcaattcaaagagcgcctagccctttataacaataataaccgcatggatacttgtgtggtgcgaaatactgatgacattaaagcatgcggtatggctatcggcaatcaaagcatggtgaacaaccctgacaattacaagtatcttatcggtaaggcatggagaaatataggcatcagtaaaacggctaacggctctaaaatttcggtgtattatttaggcaattctacgcctactgagaatggtggcaataccaccaacttacccacaaacaccactaataatgcgcattctgctaactacgctctcgtgaagaacgctcctttcgctcacagcgccactcctaatttagtcgctatcaatcagcatgattttggcactattgagagcgtgtttgaattggctaaccgctctaaagatattgacacgctctatactcattcaggcgcgcaaggcagggatctcttgcaaactttattgattgatagccatgatgcgggttatgccagacaaatgattgataacacaagcaccggtgaaatcaccaagcaattgaatgcggccactgacgctttaaacaacgtagccagtttagagcataaacaaagcggcttacaaaccttgagcttgagtaatgcgatgattttaaattctcgtttagtcaatctctctaggaagcacaccaaccatattaactcgttcgctcaacgcttacaagctttaaaaggccaagaattcgcttctttagagagcgcggcagaagtgttgtatcaatttgcccctaaatatgaaaaacctaccaatgtttgggctaacgctattgggggagcgagcttgaatagcggctctaacgcttcattgtatggcacaagcgccggcgtagacgctttccttaacgggaatgtggaagccattgtgggcggttttggaagctatggttatagctcctttagcaatcaagcgaactctcttaactctggggccaataacgctaattttggcgtgtatagccgtttttttgccaaccagcatgaatttgactttgaagctcaaggggcgctagggagcgatcaatcaagcttgaatttcaaaagcactctattacaagatttgaatcaaagctataattacttagcctatagcgccacagcaagagcgagttatggttatgacttcgcgttttttaggaacgctttagtgttaaaaccaagcgtgggcgtgagctataaccatttaggttcaaccaactttaaaagcaatagccaatcacaagtggctttaaaaaatggcgcgagcagtcagcatttattcaacgctaacgctaacgtggaagcgcgttattattatggggacacttcatacttttatttgcatgcgggagttttacaagagttcgctcactttggatcgaatgatgtggcgtctttaaacacctttaaaatcaatgccgctcgcagtcctttaagcacctatgcaagagcgatgatgggtggggaattgcaattggctaaagaagtgtttttgaatttgggcgtggtttatttgcacaatttgatttccaacgcaagccatttcgcttccaatttaggaatgaggtatagtttctaa

SEQ ID NO: 225 - DNA (genomic), 3867 bp, Helicobacter pylori; double-stranded, circular; identical to SEQ ID NO: 224
  misc_feature (B) LOCATION 1...3867
  hypothetical: NO
  anti-sense: NO

SEQ ID NO: 226 - DNA (genomic), 228 bp, Helicobacter pylori; double-stranded, circular
  misc_feature (B) LOCATION 1...228
  hypothetical: NO
  anti-sense: NO
atgccaaaagaaaacaccacccacgaagacgctttagcgaaatgctttgcgcctgcaatttttaaagccatcatgctgaataaattgatattggcggttgtggctgctcccattataaagatgcttaaattgagtaaagagatttggtggaaaaaaatgggcaaaaaacatgcgatagattttaaaatgaggataaagatattggcttctttagcccctagcttttga

SEQ ID NO: 227 - DNA (genomic), 276 bp, Helicobacter pylori; double-stranded, circular
  misc_feature (B) LOCATION 1...276
  hypothetical: NO
  anti-sense: NO
cccaaatcccctaaaaagatcgtaaaaagatacgaaaaaagcgcttggaaaatgccaaaagaaaacaccacccacgaagacgctttagcgaaatgctttgcgcctgcaatttttaaagccatcatgctgaataaattgatattggcggttgtggctgctcccattataaagatgcttaaattgagtaaagagatttggtggaaaaaaatgggcaaaaaacatgcgatagattttaaaatgaggataaagatattggcttctttagcccctagcttt

SEQ ID NO: 228 - DNA (genomic), 543 bp, Helicobacter pylori; double-stranded, circular
  misc_feature (B) LOCATION 1...543
  hypothetical: NO
  anti-sense: NO
atgttaaacaagtttaaaaaaatcgttggcgtgggtgtgttagtgggctgtttaggggttttgcaagctaaaaacagcttatttgtcttaccttatgagcaaagagacgctctcaattctttaatttctgggattagcagcgctagagagaacgtgaaaatcgctatttatagtttcacgcacagagatattgcaagagcgattaaaagcgtagcgagtagggggattaaggtgcaaatcatttatgattatgaaagcaatcacaataacaagcaatccactattggctatttagacaaataccctaacacgaaagtgtgcttattaaaggggcttaaggctaaaaacgggaattattacggcatcatgcaccaaaaagtagcgatcattgatgataaaatcgtgtttttaggctcagcgaattggagcaaaaacgcttttgaaaacaattatgaagtgcttctaaaaaccgatgacacagagacgatcctcaaagccaagagttattatcaaaagatgctagaaggttgcgttgggttttaa

SEQ ID NO: 229 - DNA (genomic), 555 bp, Helicobacter pylori; double-stranded, circular
  misc_feature (B) LOCATION 1...555
  hypothetical: NO
  anti-sense: NO
aataaggatcatttgatgttaaacaagtttaaaaaaatcgttggcgtgggtgtgttagtgggctgtttaggggttttgcaagctaaaaacagcttatttgtcttaccttatgagcaaagagacgctctcaattctttaatttctgggattagcagcgctagagagaacgtgaaaatcgctatttatagtttcacgcacagagatattgcaagagcgattaaaagcgtagcgagtagggggattaaggtgcaaatcatttatgattatgaaagcaatcacaataacaagcaatccactattggctatttagacaaataccctaacacgaaagtgtgcttattaaaggggcttaaggctaaaaacgggaattattacggcatcatgcaccaaaaagtagcgatcattgatgataaaatcgtgtttttaggctcagcgaattggagcaaaaacgcttttgaaaacaattatgaagtgtttttaaaacgggatgacacagagacgatcttcaaagccaagagttattatcaaaagatgctagaaggttgcgttgggttt

SEQ ID NO: 230 - DNA (genomic), 984 bp, Helicobacter pylori; double-stranded, circular
  misc_feature (B) LOCATION 1...984
  hypothetical: NO
  anti-sense: NO
gtgcttaaggggttaaaaaaagcgtttaaggagaggttttgctctcaagtgtatatctcttttaatgtggatcacaatcttttatccgctcaagttttaagggttaaaaaccaccgcatcaaagagaaattttttaaaacttttgagactaaagtggaaactaaaaatggtgaagtccccattcaagccttaaaaatcgccagaacttatagccaaaaatacccctacacctattttagcgcgatgagtaaagctaaagaggttttatgcgaaaagcaggcgtttgaacaaatcaaacaagaaaatcaagattatcaggcttgtgaagtcaatcaaaagtattgcgtttatgtggaatctaaggattttctaaaggatttcaagcgttttaaaatccaggatgtggattttttgttttcgccctttagccttatttatgattttgtgcgcgataatttagaaaacaagccgttgttgtatctgcttttagagcgttcaaggttttattttttgattgcggataaaaaagagatttttttagccaaatccgtgtttttagaagagcaacctgaagagtttatagagagcaaagaagaagattctatgggaatggataatgaagctgtggatttgtttttgagtgaaatccaagaagatattgacagccttgaagaagcgataggcctagacagcagcaaggataatagcgaaaaaataacagaggacgcttatagtttgattgaaggcatgacgaatatccccttgattgcagatgttttgcaagagggattgcgtggcgtctatcattctagagagatagactttgtagaaaaagtggttgttttagacagctgtcaaatccaccacaaggcgttaatgcatttgcaagaaactttgatgatagaagtggataggctcgatttttctttagtggagcggttgaatgttttagcgcgcatggagaatgaaaagcatgcgttttag

SEQ ID NO: 231 - DNA (genomic), 1029 bp, Helicobacter pylori; double-stranded, circular
  misc_feature (B) LOCATION 1...1029
  hypothetical: NO
  anti-sense: NO
agacgcgcatggattctgttgggtttgaagaatctcaaaggggtttgggtgcttaaggggttaaaaaaagcgtttaaggagaggttttgctctcaagtgtatatctcttttaatgtggatcacaatcttttatccgctcaagttttaagggttaaaaaccaccgcatcaaagagaaattttttaaaacttttgagactaaagtggaaactaaaaatggtgaagtccccattcaagccttaaaaatcgccagaacttatagccaaaaatacccctacacctattttagcgcgatgagtaaagctaaagaggttttatgcgaaaagcaggcgtttgaacaaatcaaacaagaaaatcaagattatcaggcttgtgaagtcaatcaaaagtattgcgtttatgtggaatctaaggattttctaaaggatttcaagcgttttaaaatccaggatgtggattttttgttttcgccctttagccttatttatgattttgtgcgcgataatttagaaaacaagccgttgttgtatctgcttttagagcgttcaaggttttattttttgattgcggataaaaaagagatttttttagccaaatccgtgtttttagaagagcaacctgaagagtttatagagagcaaagaagaagattctatgggaatggataatgaagctgtggatttgtttttgagtgaaatccaagaagatattgacagccttgaagaagcgataggcctagacagcagcaaggataatagcgaaaaaataacagaggacgcttatagtttgattgaaggcatgacgaatatccccttgattgcagatgttttgcaagagggattgcgtggcgtctatcattctagagagatagactttgtagaaaaagtggttgttttagacagctgtcaaatccaccacaaggcgttaatgcatttgcaagaaactttgatgatagaagtggataggctcgatttttctttagtggagcggttgaatgttttagcgcgcatggagaatgaaaagcatgcgttt

SEQ ID NO: 232 - DNA (genomic), 273 bp, Helicobacter pylori; double-stranded, circular
  misc_feature (B) LOCATION 1...273
  hypothetical: NO
  anti-sense: NO
atgctgacgattgaaaccagtaaaaaatttgataaggatcttaaaattcttgttaaaaatgggtttgatttaaagcttttgtataaagtggttggaaatttagccacagagcaacccctagaacccaaatacaaagaccacccactcaaaggcgctttaaaagactttagggaatgccacctaaaaccggatttattgcttgtctatcaaattaaaaaacaagaaaacactctttttttagtaaggctaggcagtcatagcgagctgttttga

SEQ ID NO: 233 - DNA (genomic), 279 bp, Helicobacter pylori; double-stranded, circular
  misc_feature (B) LOCATION 1...279
  hypothetical: NO
  anti-sense: NO
gatttaaaaatgctgacgattgaaaccagtaaaaaatttgataaggatcttaaaattcttgttaaaaatgggtttgatttaaagcttttgtataaagtggttggaaatttagccacagagcaacccctagaacccaaatacaaagaccacccactcaaaggcgctttaaaagactttagggaatgccacctaaaaccggatttattgcttgtctatcaaattaaaaaacaagaaaacactctttttttagtaaggctaggcagtcatagcgagctgttt

SEQ ID NO: 234 - DNA (genomic), 363 bp, Helicobacter pylori; double-stranded, circular
  misc_feature (B) LOCATION 1...363
  hypothetical: NO
  anti-sense: NO
cctccttttaacacttacgatcctttttcgtggcaaatttttaaggaaaaaactttgagtttgaaagatgagggcgcgtttaatgcgatgctaaaaagcctgtattatgaaaaaagcgctcctgaattgacttaccttttaagccaacgcaataaagacaagatttattattatttatccccttatgagggcattattgagtggcaaaatacagatgaaagggctatggcgtatgcgatcgctaggcaagaaagctttttgctcccggctttaatctctcgctccttcgctctagggcttatgcagatcatgccttttaatgtagggcctttcgctaaagccttggcatggataatgttgatc

SEQ ID NO: 235 - DNA (genomic), 369 bp, Helicobacter pylori; double-stranded, circular
  misc_feature (B) LOCATION 1...369
  hypothetical: NO
  anti-sense: NO
acccctccttttaacacttacgatcctttttcgtggcaaatttttaaggaaaaaactttgagtttgaaagatgagggcgcgtttaatgcgatgctaaaaagcctgtattatgaaaaaagcgctcctgaattgacttaccttttaagccaacgcaataaagacaagatttattattatttatccccttatgagggcattattgagtggcaaaatacagatgaaagggctatggcgtatgcgatcgctaggcaagaaagctttttgctcccggctttaatctctcgctccttcgctctagggcttatgcagatcatgccttttaatgtagggcctttcgctaaagccttggcatggataatgttgatctaa

SEQ ID NO: 236 - DNA (genomic), 582 bp, Helicobacter pylori; double-stranded, circular
  misc_feature (B) LOCATION 1...582
  hypothetical: NO
  anti-sense: NO
cgggttggatttcgctcctttagtggtggtcattgtgctgaaatttttagatttaaccctcatccaatggctttttgcgctcgccaaaagcctctaaaggaaatcatgcgtttttttattttattttttatgggtatgcttggcgttggtttttctcaaaccgagttggatttaaaggatttagaaaaaaagcccgccgggatcgttagggattattatttatggcgttatattagcgataaaaaaacgagtttagaaaacgctaaaaaagcctatgaattgactcaaaataaaaacagcgccctacaaaaagccatgcaagaaaaaggcgtagaaaattcagataaaagccctgatgccaaaatgcctgaagatatttattgcaagcaaattaccttagaaagcatgttagaaacaacagacgctttccaagcgagttgtatcgctatcgctttaaaatcaaaaatcagagattttgataaaatccccattcaaacctttaaacctttacaagaaaaaatcaaagaggcttaccccattctttatgaagaattagaaatcttgcaaagtaagaacgtgagc

SEQ ID NO: 237 - DNA (genomic), 999 bp, Helicobacter pylori; double-stranded, circular
  misc_feature (B) LOCATION 1...999
  hypothetical: NO
  anti-sense: NO
atgcgtttttttattttattttttatgggtatgcttggcgttggtttttctcaaaccgagttggatttaaaggatttagaaaaaaagcccgccgggatcgttagggattattatttatggcgttatattagcgataaaaaaacgagtttagaaaacgctaaaaaagcctatgaattgactcaaaataaaaacagcgccctacaaaaagccatgcaagaaaaaggcgtagaaaattcagataaaagccctgatgccaaaatgcctgaagatatttattgcaagcaaattaccttagaaagcatgttagaaacaacagacgctttccaagcgagttgtatcgctatcgctttaaaatcaaaaatcagagattttgataaaatccccattcaaacctttaaacctttacaagaaaaaatcaaagaggcttaccccattctttatgaagaattagaaatcttgcaaagtaagaacgtgagcgcttctttgtttaaggctaacgcgcaagtgtttagcgcgctctttaatcatttgagttatgaaaaaaagctccaaatttttgaaaagcatatcccgattaaagagttaaaccgccttttagatgaagattacccggcgtttaaccgcttgatctatcaagtcatcttagatcctaaattggatcattttaaagacgctctcgctaaaagtaacgccacccaaagcaacgcgcaaaccttttttattctaggaatcaatgaaatcttgcacaaaaaaacttctaaagcgctcaagtattttgaacgctcagaagcggttgtcaaggacgatgatttttcaaaagacagagcgattttttggcagtatttagcctctaaaaagaaaaaaactttggagcacctttcacaaagcccagccctaaacctctatagtctttatgcgagccgcaaacctcaaaaccacgcccagttatcgcatcatttctcatatccaaaatttaagccaagagaaccctccttttaa

SEQ ID NO: 238 - DNA (genomic), 1392 bp, Helicobacter pylori; double-stranded, circular
  misc_feature (B) LOCATION 1...1392
  hypothetical: NO
  anti-sense: NO
atggctttttgcgctcgccaaaagcctctaaaggaaatcatgcgtttttttattttattttttatgggtatgcttggcgttggtttttctcaaaccgagttggatttaaaggatttagaaaaaaagcccgccgggatcgttagggattattatttatggcgttatattagcgataaaaaaacgagtttagaaaacgctaaaaaagcctatgaattgactcaaaataaaaacagcgccctacaaaaagccatgcaagaaaaaggcgtagaaaattcagataaaagccctgatgccaaaatgcctgaagatatttattgcaagcaaattaccttagaaagcatgttagaaacaacagacgctttccaagcgagttgtatcgctatcgctttaaaatcaaaaatcagagattttgataaaatccccattcaaacctttaaacctttacaagaaaaaatcaaagaggcttaccccattctttatgaagaattagaaatcttgcaaagtaagaacgtgagcgcttctttgtttaaggctaacgcgcaagtgtttagcgcgctctttaatcatttgagttatgaaaaaaagctccaaatttttgaaaagcatatcccgattaaagagttaaaccgccttttagatgaagattacccggcgtttaaccgcttgatctatcaagtcatcttagatcctaaattggatcattttaaagacgctctcgctaaaagtaacgccacccaaagcaacgcgcaaaccttttttattctaggaatcaatgaaatcttgcacaaaaaaacttctaaagcgctcaagtattttgaacgctcagaagcggttgtcaaggacgatgatttttcaaaagacagagcgattttttggcagtatttagcctctaaaaagaaaaaaactttggagcacctttcacaaagcccagccctaaacctctatagtctttatgcgagccgcaaactcaaaaccacgcccagttatcgcatcatttctcatatccaaaatttaagccaagagaaccctccttttaacacttacgatcctttttcgtggcaaatttttaaggaaaaaactttgagtttgaaagatgagggcgcgtttaatgcgatgctaaaaagcctgtattatgaaaaaagcgctcctgaattgacttaccttttaagccaacgcaataaagacaagatttattattatttatccccttatgagggcattattgagtggcaaaatacagatgaaagggctatggcgtatgcgatcgctaggcaagaaagctttttgctcccggctttaatctctcgctccttcgctctagggcttatgcagatcatgccttttaatgtagggcctttcgctaaagccttggcatggataatgttgatctaa

SEQ ID NO: 239 - DNA (genomic), 474 bp, Helicobacter pylori; double-stranded, circular
  misc_feature (B) LOCATION 1...474
  hypothetical: NO
  anti-sense: NO
gtgcatctagcccactacctcaaaaggaatttttcttttttccctagcgtggatattgtggatggggggactatggctcagcaactcattcctttaatcacttcgtatgaaaaggttttgattttagattgcgtgagcgctaaaggcgttgaaattggctcagtttatgcctttgattttaaggacgctcctaaagaaatcacatgggctgggagtgcgcatgaagtggaaatgctgcacactttaaggctcacggagtttttaggggatttgcctaaaacttttatcgtggggcttgtgccttttgtgatagggagcgagaccactttcaagctttcaagcgaaatgttaaacgctttagaaacagccctaaaagccatagaaacccaactcaacgcatggggagttaaaatgcaacgcaccgatcatattgccctagattgtatcgctgaactctcttataagggtttttga

SEQ ID NO: 240 - DNA (genomic), 555 bp, Helicobacter pylori; double-stranded, circular
  misc_feature (B) LOCATION 1...555
  hypothetical: NO
  anti-sense: NO
tggctatggttacaccaaagaatgagtcaaaaaatcctaattttaggcattggcaatatcctttttggcgatgaagggattggggtgcatctagcccactacctcaaaaggaatttttcttttttccctagcgtggatattgtggatggggggactatggctcagcaactcattcctttaatcacttcgtatgaaaaggttttgattttagattgcgtgagcgctaaaggcgttgaaattggctcagtttatgcctttgattttaaggacgctcctaaagaaatcacatgggctgggagtgcgcatgaagtggaaatgctgcacactttaaggctcacggagtttttaggggatttgcctaaaacttttatcgtggggcttgtgccttttgtgatagggagcgagaccactttcaagctttcaagcgaaatgttaaacgctttagaaacagccctaaaagccatagaaacccaactcaacgcatggggagttaaaatgcaacgcaccgatcatattgccctagattgtatcgctgaactctcttataagggtttt

SEQ ID NO: 241 - DNA (genomic), 414 bp, Helicobacter pylori; double-stranded, circular
  misc_feature (B) LOCATION 1...414
  hypothetical: NO
  anti-sense: NO
atgcgtatagttagaaatttatttcttgtatcgtttgtggcgtatagtagtgcgttcgcagcggatttagaaaccggaaccaaaaacgacaaaaagagcggtaaaaaattttacaaactccataaaaaccatggctcagaaaccgagactaaaaacgataaaaagctttatgatttcactaaaaatagcggattagaaggcgtggatttagaaaaaagccctaaccttaaaagccataaaaaaagcgataaaaagttttataaacaactcgctaaaaacaatatcgctgaaggggtgagcatgccgattgtgaatttcaataaagccctatcttttgggccttattttgaaaggactaaaagcaaaaaaacccaatacatggacggcgggttgatgatgcacatccgtttttaa

SEQ ID NO: 242 - DNA (genomic), 444 bp, Helicobacter pylori; double-stranded, circular
  misc_feature (B) LOCATION 1...444
  hypothetical: NO
  anti-sense: NO
gtgataargaaaggctatataagaggagatcttatgcgtatagttagaaatttatttcttgtatcgtttgtggcgtatagtagtgcgttcgcagcggatttagaaaccggaaccaaaaacgacaaaaagagcggtaaaaaattttacaaactccataaaaaccatggctcagaaaccgagactaaaaacgataaaaagctttatgatttcactaaaaatagcggattagaaggcgtggatttagaaaaaagccctaaccttaaaagccataaaaaaagcgataaaaagttttataaacaactcgctaaaaacaatatcgctgaaggggtgagcatgccgattgtgaatttcaataaagccctatcttttgggccttattttgaaaggactaaaagcaaaaaaacccaatacatggacggcgggttgatgatgcacatccgtttt

SEQ ID NO: 243 - DNA (genomic), 471 bp, Helicobacter pylori; double-stranded, circular
  misc_feature (B) LOCATION 1...471
  hypothetical: NO
  anti-sense: NO
tggttgtttctaacatgctatggtagtgtgataaagaaaggctatataagaggagatcttatgcgtatagttagaaatttatttcttgtatcgtttgtggcgtatagtagtgcgttcgcagcggatttagaaaccggaaccaaaaacgacaaaaagagcggtaaaaaattttacaaactccataaaaaccatggctcagaaaccgagactaaaaacgataaaaagctttatgatttcactaaaaatagcggattagaaggcgtggatttagaaaaaagccctaaccttaaaagccataaaaaaagcgataaaaagttttataaacaactcgctaaaaacaatatcgctgaaggggtgagcatgccgattgtgaatttcaataaagccctatcttttgggccttattttgaaaggactaaaagcaaaaaaacccaatacatggacggcgggttgatgatgcacatccgtttt

SEQ ID NO: 244 - DNA (genomic), 138 bp, Helicobacter pylori; double-stranded, circular
  misc_feature (B) LOCATION 1...138
  hypothetical: NO
  anti-sense: NO
atattccatagcgttagcgttcctttaatccaaagcggtattaagatcgcttctaataatggtatctatgcagactctgttgttttgaatgaagggggtagccattttaaagtgttttttaattacgggtgggtattt

SEQ ID NO: 245 - DNA (genomic), 969 bp, Helicobacter pylori; double-stranded, circular
  misc_feature (B) LOCATION 1...969
  hypothetical: NO
  anti-sense: NO
tggcttcaatcaaggtgttttagggatagcgccttttgccttagttccgaaaaattgttcggtaaaaatttgaataaagtggtcattttggcattaagagacattatccatgaatatgggcatactttaggctatacccataacgggaacatgacttatcaaagggtgcgtttatgccaagaaggaaacgggccagaggcacgctgtgagggcgggcatgaagtggagaaaaacggcaaagaagagctagaattcagtaatgggcatgaagtgcgagaccatgatggttacacctatgatgtttgctctcgttttggcggcaaaaatcagcccgctttccctagcaattaccccaattccatctataccaattgcgctcaagtccccgctgggcttataggggttactaccgctgtttggcaacagctcatcaatcaaaacgccctgcccattaatttcgctaacctaaatagccaaaccagccatttaaacgccgggttgaatgcgcaaaattttgcaacctctatggtcagcgcgatcgcgcaaaatttttccaccacttccactaccacttaccgctcttcaagtaagaattttagaagccctattttaggggttaatgttaaaataggctaccaacattatttcaatgactacatcgggttagcctattacggcattatccaatacaactacgctcaagctaacgatgaaaaaatccagcaattaagctatggtgggggaatggatgtgctgtttgatttcatcaccacttacaccaataaaaagcaagaccatccaactaaaaaggtttttgcttcctcttttggggtgtttggggggttaaggggcttatacaatagctactatgtcttcaatcaagtcaaaggaagcggtaatttagatatagtaaccgggtttaattaccgctacaagcattctaaatattccatagcgttagcgttcctt

SEQ ID NO: 246 - DNA (genomic), 1248 bp, Helicobacter pylori; double-stranded, circular
  misc_feature (B) LOCATION 1...1248
  hypothetical: NO
  anti-sense: NO
ggagatttcatgttaaaactcgccagtaaaacgatttgtttgtccctaatcagctcattcacggctgtagaagcctttcaaaaacaccaaaaagacggctttttcatagaagccggctttgaaaccgggctattacaaggcgcgcaaaccaaagaacaagcaatagcccaaaacacccaaaacacccaaaaaatttatgaaaaccccctaacccacccccaaactaaagaacaacctaaagaacaaaacaaaagcgatacagccaccccacaaagcgtctatgggagatactacatcctccaaaacaccattttagaaaaagcgactgagctattcacagcggctaatatcaatggcaacggcttaactttttattctcaaaaccctgtgtatgtgatggcatacaataaagataatgccgagtttgaaggctatggcaataacagcgtggttgtgatacaaaacttcctgccctacaatttaaacaatattgagctgagttatacagacgctcaaggcaaggcagtcaatttaggcgtgatagagaccatccctaaagattctcaaatcatcttgcctgcaagtttgtttaataatttttcaaacgattcaccattcaactctgatggcctccaacaactccaaaccactaccacccccttttctgatgctaacacgcagagtttgtttgaaaagctcagtcaaatcacgaccaatcttcaaatgacttatatcaatacagaccccttttctagcggcaacaacgatcctaatggccctctcgcttctcctaaacctcattatgaatgccctggttataaaaagagttgtcaagtcgcttcggtgtctttcaccccacaaaccgcagaagaattgaccaatttaatgttagacatgattgcggtgtttgactctaaatcttgggaagaagccgttttaaacgcccctttccaattttctaacagcccatcagagtgcggcattgattaccctaaatgcgttaatccctttaataacgggcttgttgatcctaaagatgaaaaatacgcgctaaccccagaagaggttatcaatagttatagagtcgccaatgaacttaccgtgaacctcttgaatgcggccaaggggtttctagggctaggatcccaactgggtagcgccaatgcccccgatgatgatggcttcaatcaaggtgttttagggatagcgccttttgccttagttccgaaaaattgttcggtaaaaatt

SEQ ID NO: 247 - DNA (genomic), 396 bp, Helicobacter pylori; double-stranded, circular
  misc_feature (B) LOCATION 1...396
  hypothetical: NO
  anti-sense: NO
agcttgggacgggcgctttttcatcgtgcctggtttgcgctacgctttgtgcaatacaacaacgaaaatgcgtctaactggatgcaaatccctgagaaggatttaagaaaaatcaagcacatgaacaattggatgccctcaaccaacattggctttatccctgtgcaaggcgatcacaatgtgcttacctacttcaactaccaacgctctttcgtcccgcctcaattagacgttttgagctatggaggagcggagtattttacccaacactttgacacggtggaagcaggagcgcgctacacctataaagataaatcagcttcaatgcggactactttaggatttgggcgcgcgattttgccaccgggcagtattcagtctatacgagcgggccca

SEQ ID NO: 248 - DNA (genomic), 693 bp, Helicobacter pylori; double-stranded, circular
  misc_feature (B) LOCATION 1...693
  hypothetical: NO
  anti-sense: NO
atcagcttcaatgcggactactttaggatttgggcgcgcgattttgccaccgggcagtattcagtctatacgagcgggcccatgaaaggtaatgtgcgccccattaatggctattctcaaggcgtggagctggaattgtattacaggcccattagagggttgcaattccatgccgctttcaactacattgacactcgtgtaactagccatggccctttaaccgacttgaacggggatgtgctaaaagggactagctataacaagcatttcccttttgtaagccctttccaattcatttttgacgctcgctacaattggcgtaaaaccaccattggtatttctagctatttttatagccgtgcttatagcgggattagcaacagcgcagcaggaggctattatgggatgcaatactatagtggggggaacaactatgaaagcgttcttaatagcggttatcaatgcgaagcttggtgtatgacccaacatgaagggctcttgccttggtattgggtgtggaatatccaagtgagccaaattttctgggaaaacggaagacacagagttacaggaagcttacaaatcaataacatcttcaacatgaagtattattttacagggattggctctagccctgcaggcttgcaacctgcgcctggaagatcggttacagcgtatttgaactacactttc

SEQ ID NO: 249 - DNA (genomic), 1131 bp, Helicobacter pylori; double-stranded, circular
  misc_feature (B) LOCATION 1...1131
  hypothetical: NO
  anti-sense: NO
ttgtgtgagggccctaacgtgatgagcggttggaaaccccacatcaagcatggcgtttatagaaactggaataactggcgcaacaattacacagcggtctatttgagcgatcgcattgaagcttgggacgggcgctttttcatcgtgcctggtttgcgctacgcttttgtgcaatacaacaacgaaaatgcgtctaactggatgcaaatccctgagaaggatttaagaaaaatcaagcacatgaacaattggatgccctcaaccaacattggctttatccctgtgcaaggcgatcacaatgtgcttacctacttcaactaccaacgctctttcgtcccgcctcaattagacgttttgagctatggaggagcggagtattttacccaacactttgacacggtggaagcaggagcgcgctacacctataaagataaattcagcttcaatgcggactactttaggatttgggcgcgcgattttgccaccgggcagtattcagtctatacgagcgggcccatgaaaggtaatgtgcgccccattaatggctattctcaaggcgtggagctggaattgtattacaggcccattagagggttgcaattccatgccgctttcaactacattgacactcgtgtaactagccatggccctttaaccgacttgaacggggatgtgctaaaagggactagctataacaagcatttcccttttgtaagccctttccaattcatttttgacgctcgctacaattggcgtaaaaccaccattggtatttctagctatttttatagccgtgcttatagcgggattagcaacagcgcagcaggaggctattatgggatgcaatactatagtggggggaacaactatgaaagcgttcttaatagcggttatcaatgcgaagcttggtgtatgacccaacatgaagggctcttgccttggtattgggtgtggaatatccaagtgagccaaattttctgggaaaacggaagacacagagttacaggaagcttacaaatcaataacatcttcaacatgaagtattattttacagggattggctctagccctgcaggcttgcaacctgcgcctggaagatcggttacagcgtatttgaactacactttctaa

SEQ ID NO: 250 - DNA (genomic), 219 bp, Helicobacter pylori; double-stranded, circular
  misc_feature (B) LOCATION 1...219
  hypothetical: NO
  anti-sense: NO
aggcaaagactacccataagtggggctgccacttttttaaccaactttggggatagggaatccattatgggcgcttatcgtaaccatcattttgatgcgcttttgtattacacgcacccaaatattttttattatcgtgatggggataactcgatgaaaaatctttttgaccctaaagcggataataaagttacagcaagccctagcgaacaaacaatg

SEQ ID NO: 251 - DNA (genomic), 312 bp, Helicobacter pylori; double-stranded, circular
  misc_feature (B) LOCATION 1...312
  hypothetical: NO
  anti-sense: NO
atgacaagcgttttagaaaaatattgtagtttttctatttttttgtccttattaggaacgtttgaattagaggctaaagaagaagaaaaagaagaaaaaaagacagaaaggaacaaagataaagaaaagaacgcccaacacactttgggtaaagttaccactcaagcggctaaaatctttaattacaacaaccagacaaccatttcaagtaaagaattagaaagaaggcaagccaaccaaatcagcgacatgtttagaaggaaccccaatatcaatgtgggcggtggtgcggtgatagcgcaaaaaatttac

SEQ ID NO: 252 - DNA (genomic), 471 bp, Helicobacter pylori; double-stranded, circular
  misc_feature (B) LOCATION 1...471
  hypothetical: NO
  anti-sense: NO
cgaacaaacaatgtgatggctaagatcaatggttatttgagcgaaagggataccttaacgctcagttataacatgactagagataacgccaatcgccctttaagagcgaattttaccggcacttttttaccctattcttgtggtgatttcaacgctttccctaacgagaaaaaccctagcgattgtttgtttgaaaatgacgccagtttgtttaaaacttatagcgtcaatttagtgcataacgtgagcttgaattatgaaagggaaggggggagtcgctttggcgatcctaaattaaaaatcaatggctacacgagcattaggaatgtccaaattgatccgcttttcagacctagcgatatagcgactaccattcctttcaccccaaacccgcagctctctcaaggcgaagaaaatcaatgcgtggcgcaagggggcatttatgacgctcttaaacaaacttgctccatc

SEQ ID NO: 253 - DNA (genomic), 2445 bp, Helicobacter pylori; double-stranded, circular
  misc_feature (B) LOCATION 1...2445
  hypothetical: NO
  anti-sense: NO
atgacaagcgttttagaaaaatattgtagtttttctatttttttgtccttattaggaacgtttgaattagaggctaaagaagaagaaaaagaagaaaaaaagacagaaaggaacaaagataaagaaaagaacgcccaacacactttgggtaaagttaccactcaagcggctaaaatctttaattacaacaaccagacaaccatttcaagtaaagaattagaaagaaggcaagccaaccaaatcagcgacatgtttagaagaaaccccaatatcaatgtgggcggtggtgcggtgatagcgcaaaaaatttacgtgcgcggtattgaagacagattggctagggttacggtggatggcgtggcgcaaatgggcgcaagctatgggcatcaaggcaatacaatcattgaccctggaatgctcaaaagcgtggtggttaccaagggggcggctcaagcgagcgcggggcctatggctttaattggcgcgatcaaaatggagactaggagcgcgagcgattttatccctaaaggcaaagactacgccataagtggggctgccacttttttaaccaactttggggatagggaaaccattatgggcgcttatcgtaaccatcattttgatgcgcttttgtattacacgcaccaaaatattttttattatcgtgatggggataacgcgatgaaaaatctttttgaccctaaagcggataataaagttacagcaagccctagcgaacaaaacaatgtgatggctaagatcaatggttatttgagcgaaagggataccttaacgctcagttataacatgactagagataacgccaatcgccctttaagagcgaattttaccggcacttttttaccctattcttgtggtgatttcaacgctttccctaacgagaaaaaccctagcgattgtttgtttgaaaatgacgccagtttgtttaaaacttatagcgtcaatttagtgcataacgtgagcttgaattatgaaagggaaggggggagtcgctttggcgatcctaaattaaaaatcaatggctacacgagcattaggaatgtccaaattgatccgcttttcagacctagcgatatagcgactaccattcctttcaccccaaacccgcagctctctcaaggcgaagaaaatcaatgcgtggcgcaagggggcatttatgacgctcttaaacaaacttgctccatcacttttaaaagccttggagggggttctgttgtcgctaataaaaatttattcatcatcaattctgggtttaatgcgaacgtgatccacaccatagaccacaagaatgacaatcttttggaatacgggttgaattaccagaatttaaccacttttgataaagcgatccctgatagcgaattagtcaagcccggcgatgcccctgatgcgtgcttaagagttacaggacctgatgatcctaacatgaacgggcgctgccaacggaatggcgctacggcgaatgtggttggggtgtatgcgcaagcgaattacaccttgcaccctatggtaactttaggggcagggactcgttatgacgtttatactttagtggataaagactggcaattgcacgtaactcaagggtttagccctagcgcggctttaaacgtctcgcctttagaaaatttgaatttcaggctttcttacgcgtatgtaactagaggccctatgcctggaggtttggtgtggatgcgtcaagacaatttgcgctataaccgcaatttaaagccagaaattgggcaaaatgcggaatttaacaccgaatacagcagtcagtattttgatttcagagccgccggttttgtccaattgatttctaattacatcaatcaattttcttcaacgctttttgtcaccaacttgcccgcacaagatattatttatgtgcctggctatgaagtttcagggacggctaaatacaagggtttttctttaggcttgagcgtggcgcgatcatggccttctttaaaagggcgtttgatcgctgacgtgtatgaattggcggctacgacaggcaatgtgtttattttaacggcaagctatacaatcccacgcaccggccttagcatcacttggctttcacgctttgttactaatttgagttattgctcttatagcccttatcgtaacggccctacggatattgacagaaggcctagtaattgccctaaaacgcccgggatttttcatgtgcataaacccggctatggggtgagcagtttctttatcacttacaagcctacttataagaaactcaaagggttgagcctgaacgcggtgtttaataatgtttttaaccaacaatatattgatcaagcaagcccggtgatgagccctgatgaacccaatcaagacaaatacgcaaggggcatggcagagcctggctttaacgctaggtttgaaatttcttataagttttaa

SEQ ID NO: 254 - DNA (genomic), 2448 bp, Helicobacter pylori; double-stranded, circular
  misc_feature (B) LOCATION 1...2448
  hypothetical: NO
  anti-sense: NO
atgaatgacaagcgttttagaaaatattgtagtttttctatttttttgtccttattaggaacgtttgaattagaggctaaagaagaagaaaaagaagaaaaaaagacagaaaggaacaaagataaagaaaagaacgcccaacacactttgggtaaagttaccactcaagcggctaaaatctttaattacaacaaccagacaaccatttcaagtaaagaattagaaagaaggcaagccaaccaaatcagcgacatgtttagaagaaaccccaatatcaatgtgggcggtggtgcggtgatagcgcaaaaaatttacgtgcgcggtattgaagacagattggctagggttacggtggatggcgtggcgcaaatgggcgcaagctatgggcatcaaggcaatacaatcattgaccctggaatgctcaaaagcgtggtggttaccaagggggcggctcaagcgagcgcggggcctatggctttaattggcgcgatcaaaatggagactaggagcgcgagcgattttatccctaaaggcaaagactacgccataagtggggctgccacttttttaaccaactttggggatagggaaaccattatgggcgcttatcgtaaccatcattttgatgcgcttttgtattacacgcaccaaaatattttttattatcgtgatggggataacgcgatgaaaaatctttttgaccctaaagcggataataaagttacagcaagccctagcgaacaaaacaatgtgatggctaagatcaatggttatttgagcgaaagggataccttaacgctcagttataacatgactagagataacgccaatcgccctttaagagcgaattttaccggcacttttttaccctattcttgtggtgatttcaacgctttccctaacgagaaaaaccctagcgattgtttgtttgaaaatgacgccagtttgtttaaaacttatagcgtcaatttagtgcataacgtgagcttgaattatgaaagggaaggggggagtcgctttggcgatcctaaattaaaaatcaatggctacacgagcattaggaatgtccaaattgatccgcttttcagacctagcgatatagcgactaccattcctttcaccccaaacccgcagctctctcaaggcgaagaaaatcaatgcgtggcgcaagggggcatttatgacgctcttaaacaaacttgctccatcacttttaaaagccttggagggggttctgttgtcgctaataaaaatttattcatcatcaattctgggtttaatgcgaacgtgatccacaccatagaccacaagaatgacaatcttttggaatacgggttgaattaccagaatttaaccacttttgataaagcgatccctgatagcgaattagtcaagcccggcgatgcccctgatgcgtgcttaagagttacaggacctgatgatcctaacatgaacgggcgctgccaacggaatggcgctacggcgaatgtggttggggtgtatgcgcaagcgaattacaccttgcaccctatggtaactttaggggcagggactcgttatgacgtttatactttagtggataaagactggcaattgcacgtaactcaagggtttagccctagcgcggctttaaacgtctcgcctttagaaaatttgaatttcaggctttcttacgcgtatgtaactagaggccctatgcctggaggtttggtgtggatgcgtcaagacaatttgcgctataaccgcaatttaaagccagaaattgggcaaaatgcggaatttaacaccgaatacagcagtcagtattttgatttcagagccgccggttttgtccaattgatttctaattacatcaatcaattttcttcaacgctttttgtcaccaacttgcccgcacaagatattatttatgtgcctggctatgaagtttcagggacggctaaatacaagggtttttctttaggcttgagcgtggcgcgatcatggccttctttaaaagggcgtttgatcgctgacgtgtatgaattggcggctacgacaggcaatgtgtttattttaacggcaagctatacaatcccacgcaccggccttagcatcacttggctttcacgctttgttactaatttgagttattgctcttatagcccttatcgtaacggccctacggatattgacagaaggcctagtaattgccctaaaacgcccgggatttttcatgtgcataaacccggctatggggtgagcagtttctttatcacttacaagcctacttataagaaactcaaagggttgagcctgaacgcggtgtttaataatgtttttaaccaacaatatattgatcaagcaagcccggtgatgagccctgatgaacccaatcaagacaaatacgcaaggggcatggcagagcctggctttaacgctaggtttgaaatttcttataagttttaa

SEQ ID NO: 255 - DNA (genomic), 579 bp, Helicobacter pylori; double-stranded, circular
  misc_feature (B) LOCATION 1...579
  hypothetical: NO
  anti-sense: NO
ttgttagggaggaatggcgttactttaaatatccgccaggttttttggtgggataatttcaactggtccattggcttttataacacctttggcaattcagacgcttttttaggctctcacaccatgccaagggggaataacacttcctatatcagtaatgaaatctcagtaacgactaggcatgccggaatgatcggctatgatttttgggataatacggcttatgatgggctggctgatgcgatcactaacgcgaacactttcactttttacacttcggttggagggatccataagcgttttgcatggcatgtttttgggcgcgtctctcatgcgaataaaaatgcgttagggcaagtggggagggctaatgaatattccttgcaattcaatgcgagctatgcgttcactgaatcggttctccttaactttaggatcacttattatggggctaggatcaataaagggtatcaagcagggtattttggagcgcccaaattcaataacccggatggcgattttagcgctaattaccaagacagaagttacatgatgaccaacctcacgctgaagttttga

SEQ ID NO: 256 - DNA (genomic), 594 bp, Helicobacter pylori; double-stranded, circular
  misc_feature (B) LOCATION 1...594
  hypothetical: NO
  anti-sense: NO
ttgggggctatcatggatacttttttaacaagtatcttggtcctgcttatgcggggacttctcaatcagcgagctatcatgcaaggccttatgtggtggataccgcttttttacgatacgattaccaaagatgtttttgggtttaaggcggggcgctatgaagcgaatattgatttcatgagcggttcgaatcaagggtgggaagtgtattatcagccctataagactgagacgcaaaggttaaggttttggtggtggagttcttttgggagaggtttggcgtttaactcttggatttatgagttttttgcgaccgtgccttatttgaaaaagggaggcaaccctagtaacagcaacgatttcatcaattatggctggcatgggatcaccacgacttattcttataaaggtttagacgctcaatttttttattattttgcacccaaaacttataacgcttccggttttaagctagtctatgacacgaataggaattttgaaaacgtaggctttcgctctcaaagcatgatcatgacgaccttccctttatattatagggggtggtataacccagagaccacacttatagcttag

SEQ ID NO: 257 - DNA (genomic), 624 bp, Helicobacter pylori; double-stranded, circular
  misc_feature (B) LOCATION 1...624
  hypothetical: NO
  anti-sense: NO
cccagagaccacacttatagcttagaagacagcacgcctcatggctctttgttagggaggaatggcgttactttaaatatccgccaggttttttggtgggataatttcaactggtccattggcttttataacacctttggcaattcagacgcttttttaggctctcacaccatgccaagggggaataacacttcctatatcagtaatgaaatctcagtaacgactaggcatgccggaatgatcggctatgatttttgggataatacggcttatgatgggctggctgatgcgatcactaacgcgaacactttcactttttacacttcggttggagggatccataagcgttttgcatggcatgtttttgggcgcgtctctcatgcgaataaaaatgcgttagggcaagtggggagggctaatgaatattccttgcaattcaatgcgagctatgcgtccactgaatcggttctccttaactttaggatcacttattatggggctaggatcaataaagggtatcaagcagggtattttggagcgcccaaattcaataacccggatggcgattttagcgctaattaccaagacagaagttacatgatgaccaacctcacgctgaagttt

SEQ ID NO: 258 - DNA (genomic), 792 bp, Helicobacter pylori; double-stranded, circular
  misc_feature (B) LOCATION 1...792
  hypothetical: NO
  anti-sense: NO
aaaaaagggatttatcctaccgaaagttttatagatattgtaactttagcgcaagtcaaagtcaatttactccctaaaggcaccgaaaaccacaggctttctgtttctttgggtggggcgattgcagccattccttacgataagactaagtattatattaaccaggctaacgggaaggtttttggcccaattgtagagaatttcattgggggctatcatggatacttttttaacaagtatcttggtcctgcttatgcggggacttctcaatcagcgagctatcatgcaaggccttatgtggtggatacgcttttttaccaaacgattacaacaattttgtgggttaaggcggggcgctatgaaacgaatattgatgtcatgagcggttcgaatcaagggtgggaagtgtattatcagccctataagactgagacgcaaaggttaaggttttggtggtggagttcttttgggagaggtttggcgtttaactcttggatttatgagttttttgcgaccgtgccttatttgaaaaagggaggcaaccctagtaacagcaacgatttcatcaattatggctggcatgggatcaccacgacttattcttataaaggtttagacgctcaatttttttattattttgcacccaaaacttataacgcttccggttttaagctagtctatgacacgaataggaattttgaaaacgtaggctttcgctctcaaagcatgatcatgacgaccttccctttatattatagggggtggtataacccagagaccacacttatagct

SEQ ID NO: 259 - DNA (genomic), 789 bp, Helicobacter pylori; double-stranded, circular
  misc_feature (B) LOCATION 1...789
  hypothetical: NO
  anti-sense: NO
aaagggatttatcctaccgaaagttttatagatattgtaactttagcgcaagtcaaagtcaatttactccctaaaggcaccgaaaaccacaggctttctgtttctttgggtggggcgattgcagccattccttacgataagactaagtattatattaaccaggctaacgggaaggtttttggcccaattgtagagaatttcattgggggctatcatggatacttttttaacaagtatcttggtcctgcttatgcggggacttctcaatcagcgagctatcatgcaaggccttatgtggtggatacgcttttttaccaaacgattacaacaattttgtgggttaaggcggggcgctatgaaacgaatattgatgtcatgagcggttcgaatcaagggtgggaagtgtattatcagccctataagactgagacgcaaaggttaaggttttggtggtggagttcttttgggagaggtttggcgtttaactcttggatttatgagttttttgcgaccgtgccttatttgaaaaagggaggcaaccctagtaacagcaacgatttcatcaattatggctggcatgggatcaccacgacttattcttataaaggtttagacgctcaatttttttattattttgcacccaaaacttataacgcttccggttttaagctagtctatgacacgaataggaattttgaaaacgtaggctttcgctctcaaagcatgatcatgacgaccttccctttatattatagggggtggtataacccagagaccacacttatagct

SEQ ID NO: 260 - DNA (genomic), 1197 bp, Helicobacter pylori; double-stranded, circular
  misc_feature (B) LOCATION 1...1197
  hypothetical: NO
  anti-sense: NO
ttgggggctatcatggatacttttttaacaagtatcttggtcctgcttatgcggggacttctcaatcagcgagctatcatgcaaggccttatgtggtggataccgcttttttacgatacgattaccaaagatgtttttgggtttaaggcggggcgctatgaagcgaatattgatttcatgagcggttcgaatcaagggtgggaagtgtattatcagccctataagactgagacgcaaaggttaaggttttggtggtggagttcttttgggagaggtttggcgtttaactcttggatttatgagttttttgcgaccgtgccttatttgaaaaagggaggcaaccctagtaacagcaacgatttcatcaattatggctggcatgggatcaccacgacttattcttataaaggtttagacgctcaatttttttattattttgcacctaaaacttataacgctcccggttttaagctagtctatgacacgaataggaattttgaaaacgtaggctttcgctctcaaagcatgatcatgacgaccttccctttatattatagggggtggtataacccagagacaaacacttatagcttagaagacagcacgcctcatggctctttgttagggaggaatggcgttactttaaatatccgccaggttttttggtgggataatttcaactggtccattggcttttataacacctttggcaattcagacgcttttttaggctctcacaccatgccaagggggaataacacttcctatatcagtaatgaaatctcagtaacgactaggcatgccggaatgatcggctatgatttttgggataatacggcttatgatgggctggctgatgcgatcactaacgcgaacactttcactttttacacttcggttggagggatccataagcgttttgcatggcatgtttttgggcgcgtctctcatgcgaataaaaatgcgttagggcaagtggggagggctaatgaatattccttgcaattcaatgcgagctatgcgttcactgaatcggttctccttaactttaggatcacttattatggggctaggatcaataaagggtatcaagcagggtattttggagcgcccaaattcaataacccggatggcgattttagcgctaattaccaagacagaagttacatgatgaccaacctcacgctgaagttttga

SEQ ID NO: 261 - DNA (genomic), 258 bp, Helicobacter pylori; double-stranded, circular
  misc_feature (B) LOCATION 1...258
  hypothetical: NO
  anti-sense: NO
ttgcctggcgatgacgttttgatgcgcgatcccacggtgatttatcaaaggaatttacgcccatcaatcggtcaaaatgtggaattcaatgtggattacaacagcaagtatttcaatgtacgcggggcagcgttctatcaagtcatcaataacttcatcaacagctacgggcaagacacttctaaaaatggtggaggtaacgcgaccgcaaaaaacatgtcagggaatttacccgaaaccattaacgtctatggttat

SEQ ID NO: 262 - DNA (genomic), 258 bp, Helicobacter pylori; double-stranded, circular
  misc_feature (B) LOCATION 1...258
  hypothetical: NO
  anti-sense: NO
ggggctttgcctggcgatgacgttttgatgcgcgatcccacggtgatttatcaaaggaatttacgcccatcaatcggtcaaaatgtggaattcaatgtggattacaacagcaagtatttcaatgtacgcggggcagcgttctatcaagtcatcaataacttcatcaacagctacgggcaagacacttctaaaaatggtggaggtaacgcgaccgcaaaaaacatgtcagggaatttacccgaaaccattaacgtctat

SEQ ID NO: 263 - DNA (genomic), 1680 bp, Helicobacter pylori; double-stranded, circular
  misc_feature (B) LOCATION 1...1680
  hypothetical: NO
  anti-sense: NO
atggggaattttaatagctatggcgatttggtgtttaacctcagtcattcagttagtcatgctattatcaatactcaaggcacagcgacgatcatggccaataataaccctttgatccaattcaacgcttcttcaaaagaagtgggtacttacacgctgattgatagcgctaaagccatttattacgggtataacaaccaaatcacaggaggcagtagcctggataattaccttaagctttatgcgctcattgatattaatggcaagcacatggtgatgactgacaacggcttaacctataacgggcaagccgtgagcgttaaagatggcggtttagttgtaggctttaaggactctcaaaatcaatacatttacacttccattctttataataaagtgaaaatcgctgtttctaatgatcctatcaataacccacaagcccccactttaaaacaatatatcgctcaaattcagggcgttcaaagcgtggatagcatcratcaagctgggggaaatcaagcgattaattggctcaataaaatctttgaaactaaaggaagccctttattcgctccctattatctagagagccactccacaaaagatttaaccacgatcgctggagatattgctaacactttagaagtcatcgctaaccctaattttaaaaatgacgccactaatattttacagatcaacacctacacgcagcaaatgagtcgtttagccaagctctctgacacttcaactttcgcccgttctgatttcttagaacgcttagaagcccttaaaaacaagcgattcgctgatgcgatccctaacgctatggatgtgattttaaaatactctcaaaggaatagagttaaaaataatgtgtgggcgacaggagttggaggggctagtttcattagtggaggtactgraactttatatggtatcaatgwagggtatgataggtttattaagggcgtgattgtgggaggttatgccgcttatgggtatagcgggttccatgcaaacatcactcaatcaggctctagcaatgtcaatgtgggcgtttatagccgagcgtttatcaaaagaagcgagctaaccatgagcttgaatgagacttggggatacaataaaactttcatcaactcctatgaccccctactctcaatcatcaatcagtcttacagatacgacacttggacgactgacgctaaaatcaattatggctatgatttcatgtttaaagataaaagcgttatttttaaaccccaagtaggcttaagctattattacattggtttgtctggtttaaggggcattatggatgatcctatttacaaccaattcagagccaatgctgaccctaataaaaaatccgttctaacgatcaattttgccctagaaagtcggcattatttcaataaaaactcttattattttgtgattgcggatgtgggcagagacttattcattaattctatgggggataaaatggtgcgtttcatcggtaataacaccctaagctatagagatggtggcagatacaacacttttgctagcattatcacaggcggggagataagattgttcaaaaccttttatgtgaatgcgggcataggggctaggtttgggcttgattataaagatattaatattaccggaaatattggtatgcwsyatrctttt

SEQ ID NO: 264 - DNA (genomic), 4149 bp, Helicobacter pylori; double-stranded, circular
  misc_feature (B) LOCATION 1...4149
  hypothetical: NO
  anti-sense: NO
ttgaattttaataaccttacggctaatggggcgttaaattttaatggttatgcgccctctttaactaaggctttaatgaatgtcagcgggcagtttgttttagggaataatggggatattaatttatctgacatcaatatctttgacaacatcacaaaatctgtaacttacaacatcttaaacgctcaaaaagggattactggcattagtggggctaatggctatgaaaaaatccttttttatggcatgaaaatccaaaacgctacctatagcgataataacaacatccaaacttggtcgtttataaaccctctcaattcttctcaaatcattcaagagagcattaaaaatggggatctaaccatagaagttttaaataaccctaactcggcttccaacactatttttaatatcgctcctgagctttataattaccaagattctaagcaaaatcctaccggctatagctatgattatagcgacaatcaagcaggcacttattacttgacaagcaacattaaaggtcttttcacccctaaaggctctcaaacgcctcaaaccccaggcacttatagcccatttaaccagcctttgaatagtttgaatatctacaataagggtttttctagcgagaatttaaaaacgcttttagggatcctttctcaaaattccgccaccttaaaagaaatgattgaatccaaccaactagacaatatcactaacattaatgaagtgttgcaactcttagataagattaaaatcacccaagcgcaaaagcaagcgctcctagaaacgatcaaccatttgactgacaacatcaatcaaacctttaataacgggaatctcgttataggcgctacccaagataatgttacaaactctactagctctatatggtttgggggcaatggctatagcagcccttgcgcgctagatagcgccacttgttcttcttttagaaacacttacttggggcaattattaggctcaacttccccttatttaggctacattaacgctgattttaaagctaaaagcatttatattaccgggacaattggaagtagtaacgcttttgaaagcggagggagcgcggatgtaacctttcaaagcgctaataacttagtgttgaataaagctaacatagaagctcaagccacagacaatatctttaatcttttgggtcaagaagggattgataaaatctttaatcaggggaatttagcgaatgttcttagtcaaatggctatggaaaaaatcaagcaagccggcggtttagggaactttatagaaaacgctctaagccctttgagtaaggaattacccgctagcttgcaagatgaaaccttaggccaacttataggtcaaaataacttagatgatttattgaataatagtggagtcatgaatgaaatccaaaacattatcagtcaaaaactaagcatttttggcaattttgttaccccatccatcatagaaaactaccttgctaagcagtctttaaaaagcatgctagacgataaagggcttttgaattttatcggtgggtatatagacgcttctgaattaagctctattttaggcgtgattttaaaggatattactaacccccctacaagcctgcaaaaagacattggtgtggtagcgaacgacttgttgaacgagtttttaggacaagatgttgtcaaaaagctagaaagtcaaggcttggtgagtaatatcatcaataatgttatttctcaaggcgggttgagcggcgtttataatcaaggtttagggagcgtgttgccgccctctttacaaaacgcgctcaaagaaaacgatttaggcactcttttatcgcctagaggcttgcatgatttttggcaaaaagggtattttaactttttaagcaatggctatgtttttgtcaataacagctcttttagtaacgctactgggggtagtttgaattttgtcgccaacaagtctattatctttaatggcgataatacgattgactttagcaagtatcaaggcgcattgatttttgcttctaatggtgtttctaatatcaatatcaccaccctaaacgccactaatggcttaagccttaatgcgggtttgaataatgtgagcgttcaaaaaggagaaatttgtatcaatttagccaattgccctacaaccaaaaacagctctcctgcaaactctagcgtaacccccactaatgagtctttaagcgtgcacgctaataatttcactttcttaggcacaatcatctctaatggggctattgatttgtctcaagtaacaaataatagcgttataggcacgctcaatctcaatgaaaatgcgaccttgcaagctaataatttaacgatcaccaacgcttttaacaacgcctctaactctacggctaatattgatggtaatttcaccttaaaccaacaagcgactttaagcactaacgctagtggtttgaatgtcatggggaattttaatagctatggcgatttggtgtttaacctcagtcattcagttagtcatgctattatcaatactcaaggcacagcgacgatcatggccaataataaccctttgatccaattcaacgcttcttcaaaagaagtgggtacttacacgctgattgatagcgctaaagccatttattacgggtataacaaccaaatcacaggaggcagtagcctggataattaccttaagctttatgcgctcattgatattaatggcaagcacatggtgatgactgacaacggcttaacctataacgggcaagccgtgagcgttaaagatggcggtttagttgtaggctttaaggactctcaaaatcaatacatttacacttccattctttataataaagtgaaaatcgctgtttctaatgatcctatcaataacccacaagcccccactttaaaacaatatatcgctcaaattcagggcgttcaaagcgtggatagcatcgatcaagctgggggaaatcaagcgattaattggctcaataaaatctttgaaactaaaggaagccctttattcgctccctattatctagagagccactccacaaaagatttaaccacgatcgctggagatattgctaacactttagaagtcatcgctaaccctaattttaaaaatgacgccactaatattttacagatcaacacctacacgcagcaaatgagtcgtttagccaagctctctgacacttcaactttcgcccgttctgatttcttagaacgcttagaagcccttaaaaacaagcgattcgctgatgcgatccctaacgctatggatgtgattttaaaatactctcaaaggaatagagttaaaaataatgtgtgggcgacaggagttggaggggctagtttcattagtggaggtactggaactttatatggtatcaatgtagggtatgataggtttattaagggcgtgattgtgggaggttatgccgcttatgggtatagcgggttccatgcaaacatcactcaatcaggctctagcaatgtcaatgtgggcgtttatagccgagcgtttatcaaaagaagcgagctaaccatgagcttgaatgagacttggggatacaataaaactttcatcaactcctatgaccccctactctcaatcatcaatcagtcttacagatacgacacttggacgactgacgctaaaatcaattatggctatgatttcatgtttaaagataaaagcgttatttttaaaccccaagtaggcttaagctattattacattggtttgtctggtttaaggggcattatggatgatcctatttacaaccaattcagagccaatgctgaccctaataaaaaatccgttctaacgatcaattttgccctagaaagtcggcattatttcaataaaaactcttattattttgtgattgcggatgtgggcagagacttattcattaattctatgggggataaaatggtgcgtttcatcggtaataacaccctaagctatagagatggtggcagatacaacacttttgctagcattatcacaggcggggagataagattgttcaaaaccttttatgtgaatgcgggcataggggctaggtttgggcttgattataaagatattaatattaccggaaatattggtatgcgctatgctttttaa

SEQ ID NO: 265 - DNA (genomic), 4239 bp, Helicobacter pylori; double-stranded, circular
  misc_feature (B) LOCATION 1...4239
  hypothetical: NO
  anti-sense: NO
acgctaatatcaattttcagcgcaagccaggctgattttggaggcaacacgactattgatacagcaagctttaattttgacagcgcaagttcattgaattttaataaccttacggctaatggggcgttaaattttaatggttatgcgccctctttaactaaggctttaatgaatgtcagcgggcagtttgttttagggaataatggggatattaatttatctgacatcaatatctttgacaacatcacaaaatctgtaacttacaacatcttaaacgctcaaaaagggattactggcattagtggggctaatggctatgaaaaaatccttttttatggcatgaaaatccaaaacgctacctatagcgataataacaacatccaaacttggtcgtttataaaccctctcaattcttctcaaatcattcaagagagcattaaaaatggggatctaaccatagaagttttaaataaccctaactcggcttccaacactatttttaatatcgctcctgagctttataattaccaagattctaagcaaaatcctaccggctatagctatgattatagcgacaatcaagcaggcacttattacttgacaagcaacattaaaggtcttttcacccctaaaggctctcaaacgcctcaaaccccaggcacttatagcccatttaaccagcctttgaatagtttgaatatctacaataagggtttttctagcgagaatttaaaaacgcttttagggatcctttctcaaaattccgccaccttaaaagaaatgattgaatccaaccaactagacaatatcactaacattaatgaagtgttgcaactcttagataagattaaaatcacccaagcgcaaaagcaagcgctcctagaaacgatcaaccatttgactgacaacatcaatcaaacctttaataacgggaatctcgttataggcgctacccaagataatgttacaaactctactagctctatatggtttgggggcaatggctatagcagcccttgcgcgctagatagcgccacttgttcttcttttagaaacacttacttggggcaattattaggctcaacttccccttatttaggctacattaacgctgattttaaagctaaaagcatttatattaccgggacaattggaagtagtaacgcttttgaaagcggagggagcgcggatgtaacctttcaaagcgctaataacttagtgttgaataaagctaacatagaagctcaagccacagacaatatctttaatcttttgggtcaagaagggattgataaaatctttaatcaggggaatttagcgaatgttcttagtcaaatggctatggaaaaaatcaagcaagccggcggtttagggaactttatagaaaacgctctaagccctttgagtaaggaattacccgctagcttgcaagatgaaaccttaggccaacttataggtcaaaataacttagatgatttattgaataatagtggagtcatgaatgaaatccaaaacattatcagtcaaaaactaagcatttttggcaattttgttaccccatccatcatagaaaactaccttgctaagcagtctttaaaaagcatgctagacgataaagggcttttgaattttatcggtgggtatatagacgcttctgaattaagctctattttaggcgtgattttaaaggatattactaacccccctacaagcctgcaaaaagacattggtgtggtagcgaacgacttgttgaacgagtttttaggacaagatgttgtcaaaaagctagaaagtcaaggcttggtgagtaatatcatcaataatgttatttctcaaggcgggttgagcggcgtttataatcaaggtttagggagcgtgttgccgccctctttacaaaacgcgctcaaagaaaacgatttaggcactcttttatcgcctagaggcttgcatgatttttggcaaaaagggtattttaactttttaagcaatggctatgtttttgtcaataacagctcttttagtaacgctactgggggtagtttgaattttgtcgccaacaagtctattatctttaatggcgataatacgattgactttagcaagtatcaaggcgcattgatttttgcttctaatggtgtttctaatatcaatatcaccaccctaaacgccactaatggcttaagccttaatgcgggtttgaataatgtgagcgttcaaaaaggagaaatttgtatcaatttagccaattgccctacaaccaaaaacagctctcctgcaaactctagcgtaacccccactaatgagtctttaagcgtgcacgctaataatttcactttcttaggcacaatcatctctaatggggctattgatttgtctcaagtaacaaataatagcgttataggcacgctcaatctcaatgaaaatgcgaccttgcaagctaataatttaacgatcaccaacgcttttaacaacgcctctaactctacggctaatattgatggtaatttcaccttaaaccaacaagcgactttaagcactaacgctagtggtttgaatgtcatggggaattttaatagctatggcgatttggtgtttaacctcagtcattcagttagtcatgctattatcaatactcaaggcacagcgacgatcatggccaataataaccctttgatccaattcaacgcttcttcaccagaagtgggtacttacacgctgattgatagcgctaaagccatttattacgggtataacaaccaaatcacaggaggcagtagcctggataattaccttaagctttatgcgctcattgatattaatggcaagcacatggtgatgactgacaacggcttaacctataacgggcaagccgtgagcgttaaagatggcggtttagttgtaggctttaaggactctcaaaatcaatacatttacacttccattctttataataaagtgaaaatcgctgtttctaatgatcctatcaataacccacaagcccccactttaaaacaatatatcgctcaaattcagggcgttcaaagcgtggatagcatcgatcaagctgggggaaatcaagcgattaattggctcaataaaatctttgaaactaaaggaagccctttattcgctccctattatctagagagccactccacaaaagatttaaccacgatcgctggagatattgctaacactttagaagtcatcgctaaccctaattttaaaaatgacgccactaatattttacagatcaacacctacacgcagcaaatgagtcgtttagccaagctctctgacacttcaactttcgcccgttctgatttcttagaacgcttagaagcccttaaaaacaagcgattcgctgatgcgatccctaacgctatggatgtgattttaaaatactctcaaaggaatagagttaaaaataatgtgtgggcgacaggagttggaggggctagtttcattagtggaggtactggaactttatatggtatcaatgtagggtatgataggtttattaagggcgtgattgtgggaggttatgccgcttatgggtatagcgggttccatgcaaacatcactcaatcaggctctagcaatgtcaatgtgggcgtttatagccgagcgtttatcaaaagaagcgagctaaccatgagcttgaatgagacttggggatacaataaaactttcatcaactcctatgaccccctactctcaatcatcaatcagtcttacagatacgacacttggacgactgacgctaaaatcaattatggctatgatttcatgtttaaagataaaagcgttatttttaaaccccaagtaggcttaagctattattacattggtttgtctggtttaaggggcattatggatgatcctatttacaaccaattcagagccaatgctgaccctaataaaaaatccgttctaacgatcaattttgccctagaaagtcggcattatttcaataaaaactcttattattttgtgattgcggatgtgggcagagacttattcattaattctatgggggataaaatggtgcgtttcatcggtaataacaccctaagctatagagatggtggcagatacaacacttttgctagcattatcacaggcggggagataagattgttcaaaaccttttatgtgaatgcgggcataggggctaggtttgggcttgattataaagatattaatattaccggaaatattggtatgcgctatgctttt

SEQ ID NO: 266 - DNA (genomic), 756 bp, Helicobacter pylori; double-stranded, circular
  misc_feature (B) LOCATION 1...756
  hypothetical: NO
  anti-sense: NO
atgaaactcccggtcgttgagagctttttttccttacagggtgaaggaaaaaggataggcaagcccagtctttttttgcgcttaggggggtgtaacctttcatgcaagggctttaattgtaaaaccttattcaatgatgaaatcctaacaggttgcgatagtttgtatgcggtgcatcctaaattcaaaacatcttgggattattacaatgagcctaagcccttgattgaacgattagttaatttagcccctaattataaggattttgatttcattcttacaggcggggagccaagcttgtattttaataaccctattttattgagcgttttagagcatttttaccataaaaaaatccctttatttgtagagagtaatggctctattttttttgaatttagccctattttaaaagaattgcatttcaccctaagcgtcaaactctctttttctttggagcaagaaagcaagcggatcaaccttaaagccttacaaaatatcttaaataacgctaaaagcgtgcattttaaattcgtattggagagtcaaaacgccgctcattctatcgcagaaattcaaagccttttgaaacagctctccttaaaaaataatgaaatctttttaatgcccctaggcacaactaacaacgagctagacaaaaatctaaaaaccctagcccccctagccatagagcatggttttaggctgagcgataggcttcatatccgcttgtgggacaataagaaagggttttaa

SEQ ID NO: 267 - DNA (genomic), 771 bp, Helicobacter pylori; double-stranded, circular
  misc_feature (B) LOCATION 1...771
  hypothetical: NO
  anti-sense: NO
gcccttacaccaaatcccatgaaactcccggtcgttgagagctttttttccttacagggtgaaggaaaaaggataggcaagcccagtctttttttgcgcttaggggggtgtaacctttcatgcaagggctttaattgtaaaaccttattcaatgatgaaatcctaacaggttgcgatagtttgtatgcggtgcatcctaaattcaaaacatcttgggattattacaatgagcctaagcccttgattgaacgattagttaatttagcccctaattataaggattttgatttcattcttacaggcggggagccaagcttgtattttaataaccctattttattgagcgttttagagcatttttaccataaaaaaatccctttatttgtagagagtaatggctctattttttttgaatttagccctattttaaaagaattgcatttcaccctaagcgtcaaactctctttttctttggagcaagaaagcaagcggatcaaccttaaagccttacaaaatatcttaaataacgctaaaagcgtgcattttaaattcgtattggagagtcaaaacgccgctcattctatcgcagaaattcaaagccttttgaaacagctctccttaaaaaataatgaaatctttttaatgcccctaggcacaactaacaacgagctagacaaaaatctaaaaaccctagcccccctagccatagagcatggttttaggctgagcgataggcttcatatccgcttgtgggacaataagaaagggttt

SEQ ID NO: 268 - DNA (genomic), 279 bp, Helicobacter pylori; double-stranded, circular
  misc_feature (B) LOCATION 1...279
  hypothetical: NO
  anti-sense: NO
aaaaggaatttttcttcatcttttggtatctttggggggttaaggggcttgtataacagctattatgtgttgaacaaagtcaaaggaagcggcaatttagatgtggctaccgggttgaactaccgctataagcattctaaatattctgtagggattagcatccctttaatccaaagaaaagctagcgtcgtttctagcggtggcgattatacgaactcttttgttttcaatgaaggggctagccactttaaggtgtttttcaattacgggtgggtgttt

SEQ ID NO: 269 - DNA (genomic), 1632 bp, Helicobacter pylori; double-stranded, circular
  misc_feature (B) LOCATION 1...1632
  hypothetical: NO
  anti-sense: NO
gtgatagagaccatccccaaacactctaagattgttttacccggggaggcgtttgatagtttaaaagaggcgtttgataaaattgacccctatactttcttttttccaaaatttgaagccactagcacttctatttctgatactaacacgcagagggtgtttgaaacgctcaataacattaaaacaaatcttataatgaaatatagtaatgaaaatccaaacaatttcaacacttgtccttacaataataatggtaatacaaaaaatgattgttggcaaaatttcaccccacaaaccgcagaagaattcaccaatttaatgttgaacatgatcgctgtcttagactcccaatcttggggcgatgcgatcttaaacgctccttttgaattcactaacagctcaacagattgcgatagcgatccttcaaaatgcgtaaatcccggagtaaatgggcgtgttgatactaaagtcgatcaacaatatatactcaacaaacaaggtattattaataattttagaaaaaaaatagaaattgatgcggttgttttaaaaaattcaggggttgtagggttagccaatggatatggcaatgatggtgaatatggcacattaggggtagaagcctatgctttagatcctaaaaaactctttggcaacgaccttaagactatcaatttagaagatttaagaaccatcttgcatgaattcagccacactaaaggctatgggcataacgggaatatgacctatcaaagagtgccggtaacgaaagatggtcaagtggaaaaggatagtaatggcaagccaaaagattctgatggcctcccctataatgtgtgttcgctttatgggggatccaatcagcccgctttccctagcaactaccctaattccatctatcacaattgtgcggatgtcccggctggctttttaggggtaacagcagcggtttggcagcagctcatcaatcaaaacgccttgccgatcaactacgctaacttggggagtcaaacaaactacaacctaaacgctagtttaaacacgcaagatttagccaattccatgctcagcaccatccaaaaaacctttgtaacttctagcgttaccaaccaccatttttcaaacgcatcgcaaagttttagaagccctattttaggggttaacgctaaaataggctatcaaaactactttaatgatttcatagggttggcttattatggcatcatcaaatacaattacgctaaagctgttaatcaaaaagtccagcaattgagctatggtggggggatagatttgttattggatttcatcaccacttactccaataaaaatagccctacaggcattcaaaccaaaaggaatttttcttcatcttttggtatctttggggggttaaggggcttgtataacagctattatgtgttgaacaaagtcaaaggaagcggcaatttagatgtggctaccgggttgaactaccgctataagcattctaaatattctgtagggattagcatccctttaatccaaagaaaagctagcgtcgtttctagcggtggcgattatacgaactcttttgttttcaatgaaggggctagccactttaaggtgtttttcaattacggtgggtgtttt

SEQ ID NO: 270 - DNA (genomic), 1644 bp, Helicobacter pylori; double-stranded, circular
  misc_feature (B) LOCATION 1...1644
  hypothetical: NO
  anti-sense: NO
attgatctaggcgtgatagagaccatccccaaacactctaagattgttttacccggggaggcgtttgatagtttaaaagaggcgtttgataaaattgacccctatactttcttttttccaaaatttgaagccactagcacttctatttctgatactaacacgcagagggtgtttgaaacgctcaataacattaaaacaaatcttataatgaaatatagtaatgaaaatccaaacaatttcaacacttgtccttacaataataatggtaatacaaaaaatgattgttggcaaaatttcaccccacaaaccgcagaagaattcaccaatttaatgttgaacatgatcgctgttttagactcccaatcttggggcgatgcgatcttaaacgctccttttgaattcactaacagctcaacagattgcgatagcgatccttcaaaatgcgtaaatcccggagtaaatgggcgtgttgatactaaagtcgatcaacaatatatactcaacaaacaaggtattattaataattttagaaaaaaaatagaaattgatgcggttgttttaaaaaattcaggggttgtagggttagccaatggatatggcaatgatggtgaatatggcacattaggggtagaagcctatgctttagatcctaaaaaactctttggcaacgaccttaagactatcaatttagaagatttaagaaccatcttgcatgaattcagccacactaaaggctatgggcataacgggaatatgacctatcaaagagtgccggtaacgaaagatggtcaagtggaaaaggatagtaatggcaagccaaaagattctgatggccttccctataatgtgtgttcgctttatgggggattcaatcagcccgctttccctagcaactaccctaattccatctatcacaattgtgcggatgtcccggctggctttttaggggtaacagcagcggtttggcagcagctcatcaatcaaaacgccttgccgatcaactacgctaacttggggagtcaaacaaactacaacctaaacgctagtttaaacacgcaagatttagccaattccatgctcagcaccatccaaaaaacctttgtaacttctagcgttaccaaccaccatttttcaaacgcatcgcaaagttttagaagccctattttaggggttaacgctaaaataggctatcaaaactactttaatgatttcatagggttggcttattatggcatcatcaaatacaattacgctaaagctgttaatcaaaaagtccagcaattgagctatggtggggggatagatttgttattggatttcatcaccacttactccaataaaaatagccctacaggcattcaaaccaaaaggaatttttcttcatcttttggtatctttggggggttaaggggcttgtataacagctattatgtgttgaacaaagtcaaaggaagcggcaatttagatgtggctaccgggttgaactaccgctataagcattctaaatattctgtagggattagcatccctttaatccaaagaaaagctagcgtcgtttctagcggtggcgattatacgaactcttttgttttcaatgaaggggctagccactttaaggtgtttttcaattacgggtgggtgttt

SEQ ID NO: 271 - DNA (genomic), 2007 bp, Helicobacter pylori; double-stranded, circular
  misc_feature (B) LOCATION 1...2007
  hypothetical: NO
  anti-sense: NO
atgagaaaactattcatcccacttttattattcagcgctttagaagcgaacgagaaaaacggctttttcatagaagccggctttgaaactgggctattagaaggcacacaaacgcaagaaaaaagacacaccaccacaaaaaacacttacgcaacttacaattatttacccacagacacgattttaaaaagagcggctaatttattcaccaatgccgaagcgatttcaaaattaaaattctcatctttatcccctgttagagtgttgtatatgtataatggtcaattaactatagaaaacttcttgccttataatttaaataatgttaagcttagttttacagacgctcaaggcaacacgattgatctaggcgtgatagagaccatccccaaacactctaagattgttttacccggggaggcgtttgatagtttaaaagaggcgtttgataaaattgacccctatactttatttcttccaaaatttgaagccactagcacttctatttctgatactaacacgcagagggtgtttgaaacgctcaataacattaaaacaaatcttataatgaaatatagtaatgaaaatccaaacaatttcaacacttgtccttacaataataatggtaatacaaaaaatgattgttggcaaaatttcaccccacaaaccgcagaagaattcaccaatttaatgttgaacatgatcgctgtcttagactcccaatcttggggcgatgcgatcttaaacgctccttttgaattcactaacagctcaacagattgcgatagcgatccttcaaaatgcgtaaatcccggagtaaatgggcgtgttgatactaaagtcgatcaacaatatatactcaacaaacaaggtattattaataattttagaaaaaaaatagaaattgatgcggttgttttaaaaaattcaggggttgtagggttagccaatggatatggcaatgatggtgaatatggcacattaggggtagaagcctatgctttagatcctaaaaaactctttggcaacgaccttaagactatcaatttagaagatttaagaaccatcttgcatgaattcagccacactaaaggctatgggcataacgggaatatgacctatcaaagagtgccggtaacgaaagatggtcaagtggaaaaggatagtaatggcaagccaaaagattctgatggcctcccctataatgtgtgttcgctttatgggggatccaatcagcccgctttccctagcaactaccctaattccatctatcacaattgtgcggatgtcccggctggctttttaggggtaacagcagcggtttggcagcagctcatcaatcaaaacgccttgccgatcaactacgctaacttggggagtcaaacaaactacaacctaaacgctagtttaaacacgcaagatttagccaattccatgctcagcaccatccaaaaaacctttgtaacttctagcgttaccaaccaccatttttcaaacgcatcgcaaagttttagaagccctattttaggggttaacgctaaaataggctatcaaaactactttaatgatttcatagggttggcttattatggcatcatcaaatacaattacgctaaagctgttaatcaaaaagtccagcaattgagctatggtggggggatagatttgttattggatttcatcaccacttactccaataaaaatagccctacaggcattcaaaccaaaaggaatttttcttcatcttttggtatctttggggggttaaggggcttgtataacagctattatgtgttgaacaaagtcaaaggaagcggcaatttagatgtggctaccgggttgaactaccgctataagcattctaaatattctgtagggattagcatccctttaatccaaagaaaagctagcgtcgtttctagcggtggcgattatacgaactcttttgttttcaatgaaggggctagccactttaaggtgtttttcaattacgggtgggtgttttag

SEQ ID NO: 272 - DNA (genomic), 417 bp, Helicobacter pylori; double-stranded, circular
  misc_feature (B) LOCATION 1...417
  hypothetical: NO
  anti-sense: NO
atgcgttctccaaatttagaaaaagaagaaactgaaatcatagaaacgcttcttgtgcgtgaaaaaatgcgtttatgccccttgtattggcgcatcttagcgtttttaatcgatagtttattggtggcgtttttattgagcgatcttttaagggcatgcgcttttttacattctttatattggctgactaaccccatttattacagcgcgtttgttgtgatgggttttatcatcttgtatggcgtttatgaaatcttttttgtgtgtttgtgcaagatgagtttggctaaactggtttttaggattaagatcattgatatttatttagcggattgccccagtaggggctattttattgaagcgtttagggttaaaaatcgtggtttttctatgcccctttttatggtttgtggtgtt

SEQ ID NO: 273 - DNA (genomic), 480 bp, Helicobacter pylori; double-stranded, circular
  misc_feature (B) LOCATION 1...480
  hypothetical: NO
  anti-sense: NO
atgcgttctccaaatttagaaaaagaagaaactgaaatcatagaaacgcttcttgtgcgtgaaaaaatgcgtttatgccccttgtattggcgcatcttagcgtttttaatcgatagtttattggtggcgtttttattgagcgatcttttaagggcatgcgcttttttacattctttatattggctgactaaccccatttattacagcgcgtttgttgtgatgggttttatcatcttgtatggcgtttatgaaatcttttttgtgtgtttgtgcaagatgagtttggctaaactggtttttaggattaagatcattgatatttatttagcggattgccccagtagggctattttattgaagcgtttagggttaaaaatcgtggtttttctatgcccctttttatggtttgtggtgtttaaaaacccctatcatagggcatggcatgaagaaaaaagcaaaagtcttttggtgttgttttaa

SEQ ID NO: 274 - DNA (genomic), 441 bp, Helicobacter pylori; double-stranded, circular
  misc_feature (B) LOCATION 1...441
  hypothetical: NO
  anti-sense: NO
atgagattgttgttcttgttactgagcgctactttgatgttactggctgaagaaaaaatacctttaagcgatgacgcccccattaaattggttcattggcaaaatgcgctaaaagaagtccaacccgattcaaacgctccggcaacgccacctataaaggccgtgcaaaccacgctcacttttgaaacgccttttaataaaacgcctaaaatcatggaggttgaagggcaaaaagtcatcgtgttaaaaaacgctcaattggattctaaaaaaacgatggattttaaagaagcctctttgaatgccttagaaatgttttcctaccaaaatgacatctacctcttgtctaaaaaagctaaagcgggattagaaatccaagcttcaagcagcaaggataaaaagcaactcgctttctttttttacccaaaggttttcatttag

SEQ ID NO: 275 - DNA (genomic), 444 bp, Helicobacter pylori; double-stranded, circular
  misc_feature (B) LOCATION 1...444
  hypothetical: NO
  anti-sense: NO
aaattcatgagattgttgttcttgttactgagcgctactttgatgttactggctgaagaaaaaatacctttaagcgatgacgcccccattaaattggttcattggcaaaatgcgctaaaagaagtccaacccgattcaaacgctccggcaacgccacctataaaggccgtgcaaaccacgctcacttttgaaacgccttttaataaaacgcctaaaatcatggaggttgaagggcaaaaagtcatcgtgttaaaaaacgctcaattggattctaaaaaaacgatggattttaaagaagcctctttgaatgccttagaaatgttttcctaccaaaatgacatctacctcttgtctaaaaaagctaaagcgggattagaaatccaagcttcaagcagcaaggataaaaagcaactcgctttctttttttacccaaaggttttcatt

SEQ ID NO: 276 - DNA (genomic), 480 bp, Helicobacter pylori; double-stranded, circular
  misc_feature (B) LOCATION 1...480
  hypothetical: NO
  anti-sense: NO
aaagcaactcgctttctttttttacccaaaggttttcatttagccccaccgcctagcctgaaagaaaaatctcagcatgccaatctcgcaagccaagatgaaaaagagcgagccaaaagcccctcaaacgctctagagttaaaacccccactggatttaagccatgcttacaaggggttagcggttattgctgtcttactcttaatattgtatgtaatcaaaaaaaaaattgttcctacaccagggtcttttttaaaaaaagatttgaagctagacattagcgttttgggtcgtgttgatgcgaaccataaaatcatctcaatagaaaccaataaggagcgttacttggtcttactaagcgacaaatacggcctgcttttagacaaaataagcccaaaaacatctaaagaagaactgattaaagaagctgaaaataagataaagaattcaaaattaggaaatttatatgccggaaaattc

SEQ ID NO: 277 - DNA (genomic), 882 bp, Helicobacter pylori; double-stranded, circular
  misc_feature (B) LOCATION 1...882
  hypothetical: NO
  anti-sense: NO
atgagattgttgttcttgttactgagcgctactttgatgttactggctgaagaaaaaatacctttaagcgatgacgcccccattaaattggttcattggcaaaatgcgctaaaagaagtccaacccgattcaaacgctccggcaacgccacctataaaggccgtgcaaaccacgctcacttttgaaacgccttttaataaaacgcctaaaatcatggaggttgaagggcaaaaagtcatcgtgttaaaaaacgctcaattggattctaaaaaaacgatggattttaaagaagcctctttgaatgccttagaaatgttttcctaccaaaatgacatctacctcttgtctaaaaaagctaaagcgggattagaaatccaagcttcaagcagcaaggataaaaagcaactccgctttctttttttacccaaaggttttcatttagccccaccgcctagcctgaaagaaaaatctcagcatgccaatctcgcaagccaagatgaaaaagagcgagccaaaagcccctcaaacgctctagagttaaaacccccactggatttaagccatgcttacaaggggttagcggttattgctgtcttactcttaatattgtatgtaatcaaaaaaaaaattgttcctacaccagggtcttttttaaaaaaagatttgaagctagacattagcgttttgggtcgtgttgatgcgaaccataaaatcatctcaatagaaaccaataaggagcgttacttggtcttactaagcgacaaatacggcctgcttttagacaaaataagcccaaaaacatctaaagaagaactgattaaagaagctgaaaataagataaagaattcaaaattaggaaatttatatgccggaaaattctaa

SEQ ID NO: 278 - DNA (genomic), 882 bp, Helicobacter pylori; double-stranded, circular; identical to SEQ ID NO: 277
  misc_feature (B) LOCATION 1...882
  hypothetical: NO
  anti-sense: NO

SEQ ID NO: 279 - DNA (genomic), 315 bp, Helicobacter pylori; double-stranded, circular
  misc_feature (B) LOCATION 1...315
  hypothetical: NO
  anti-sense: NO
accaaaaagttaaacaatactctattcaataaaggattaattatttttaaaatgtttaaaaaaatcatttttttgtgcgtttttttgatagggggatttgtcattccaccccttgaagccatgcctattttgcgcaataaaacccccaaaaaaaattaccaagaagcccatgaaaagctctatagaagcatcattaaccgccaaaagctcacgcgtaaaaaaagcgggtggtattttttagggggggttggcgctgtagaagccattaaggactatcaaggcaaggaaatgaaagattggatgccacgctcaatt

SEQ ID NO: 280 - DNA (genomic), 372 bp, Helicobacter pylori; double-stranded, circular
  misc_feature (B) LOCATION 1...372
  hypothetical: NO
  anti-sense: NO
ggactatcaaggcaaggaaatgaaagattggatgccacgctcaatttaaaaaccggcgtgcaaagtttttttaaaaaatacatcgggattaggggggtttttgcatgggatcttgggtcaggaaaagtgaattatcaaagctataaagatcctaccaactctttttttaccatgcttgcggtgggtttggatgtgatcatggaatttcctctagggagttataagcattatttaggggcgtttgggggagctaggggggctttagttgtttatacagacaagcaaaatttcaagttttttaaacattctgtggtttcagggggattagcgattagtggaggttggttgatattgttgcggacaccgcacttc

SEQ ID NO: 281 - DNA (genomic), 696 bp, Helicobacter pylori; double-stranded, circular
  misc_feature (B) LOCATION 1...696
  hypothetical: NO
  anti-sense: NO
atgtttaaaaaaatcatttttttgtgcgtttttttgatagggggatttgtcattccaccccttgaagccatgcctattttgcgcaataaaacccccaaaaaaaattaccaagaagcccatgaaaagctctatagaagcatcattaaccgccaaaagctcacgcgtaaaaaaagcgggtggtattttttagggggggttggcgctgtagaagccattaaggactatcaaggcaaggaaatgaaagattggatcgccacgctcaatttaaaaaccggcgtgcaaagtttttttaaaaaatacatcgggattaggggggtttttgcatgggatcttgggtcaggaaaagtgaattatcaaagctataaagatcctaccaactctttttttaccatgcttgcggtgggtttggatgtgatcatggaatttcctctagggagttataagcattatttaggggcgtttgggggagctaggggggctttagttgtttatacagacaagcaaaatttcaagttttttaaacattctgtggtttcagggggattagcgattagtggaggggtcatgctcacgctttttttaaggcaccgcattgaattagggtttaagatcttgcccaccgccagattgctttctagctctagtcgctttgaaacttcgcccctattttatgcggcatacagctataaattttaa

SEQ ID NO: 282 - DNA (genomic), 204 bp, Helicobacter pylori; double-stranded, circular
  misc_feature (B) LOCATION 1...204
  hypothetical: NO
  anti-sense: NO
ggagtttctatcattatggtattgaaaacaaaattaaaaattataagctcggtgattttgagtactttattgtgggtgggttgctcaagcgaaatggcgacttatcaaaatgtgaatgacgccactaaaaatacgactgcaagtattaatagcacggatttattgctaaccgctaacgcgatgttagattccatgttagggacc

SEQ ID NO: 283 - DNA (genomic), 465 bp, Helicobacter pylori; double-stranded, circular
  misc_feature (B) LOCATION 1...465
  hypothetical: NO
  anti-sense: NO
cgcgatgttagattccatgttagggacctagttcggcaactcaagggcaagcatttgattgaagtttcagatgtgattaacgacaccactcagcccaatttggacatgaatcttttgacgaccgaaatcgcgcggcagttgcgattgcgatctaatgggaggttcaatatcacaagggcgagtggagggagtggtattgaagcagacagcagaatggtgaaacagcgcgaaaaagaacgagagagcgaagagtataatcaagacaccactgtagaaaaaggcactttaaaagccgctgatttatctttaagtggtaaagtatccagtatcgcagcctctattagtagttctaggcaacgcttagactacgacttcaccctaagccttaccaataggaaaacgggtgaagaggtatggagcgatgttaagcctattgtgaaaaatgctagcaataagcgtatgttt

SEQ ID NO: 284 - DNA (genomic), 633 bp, Helicobacter pylori; double-stranded, circular
  misc_feature (B) LOCATION 1...633
  hypothetical: NO
  anti-sense: NO
atggtattgaaaacaaaattaaaaattataagctcggtgattttgagtactttattgtgggtgggttgctcaagcgaaatggcgacttatcaaaatgtgaatgacgccactaaaaatacgactgcaagtattaatagcacggatttattgctaaccgctaacgcgatgttagattccatgtttagcgaccctaattttgagcaactcaagggcaagcatttgattgaagtttcagatgtgattaacgacaccactcagcccaatttggacatgaatcttttgacgaccgaaatcgcgcggcagttgcgattgcgatctaatgggaggttcaatatcacaagggcgagtggagggagtggtattgaagcagacagcagaatggtgaaacagcgcgaaaaagaacgagagagcgaagagtataatcaagacaccactgtagaaaaaggcactttaaaagccgctgatttatctttaagtggtaaagtatccagtatcgcagcctctattagtagttctaggcaacgcttagactacgacttcaccctaagccttaccaataggaaaacgggtgaagaggtatggagcgatgttaagcctattgtgaaaaatgctagcaataagcgtatgttttaa

SEQ ID NO: 285 - DNA (genomic), 276 bp, Helicobacter pylori; double-stranded, circular
  misc_feature (B) LOCATION 1...276
  hypothetical: NO
  anti-sense: NO
gcgccatgttattctgattaccttacatgcgtgaatccttacaacgatgggcttgttgatcctaaattgatcgccaaaaataaaggagatgaatacaatatagaaaacgggcaaacaggctcagtgatattaacgccgcaagatgttatctatagctatagagtcgctaataatatttatgtgaatctcttgcccacaagaggaggggatttagggttagggtctcaatatggtggcccgaatggccaggcgatgatggcaccaattttggcgctt

SEQ ID NO: 286 - DNA (genomic), 648 bp, Helicobacter pylori; double-stranded, circular
  misc_feature (B) LOCATION 1...648
  hypothetical: NO
  anti-sense: NO
atgttaaaactcgccagtaaaacgatttgtttgtccctaatcagctcattcacggctgtagaagcctttcaaaaacaccaaaaagacggctttttcatagaagccggctttgaaaccgggctattacaaggcacacaaacccaagaacaaaccatagccaccactcaagaaaaacccaaacccaaacccaaaccaaaacccattacccctcaaagcacctatgggaaatactacatctcccaaagcaccattttaaagaatgcgactgagttgtttgcagaggataatatcaccaacttaaccttttactctcaaaaccctgtgtatgtaaccgcttataaccaagaaagcgctgaagaagctggctatggtaataacagcttgattatgatacaaaacttcttgccttataacttgaacaacattgagctgagttacacggacgatcaaggcaatgtggtcagtttgggcgtgatagagactatccctaaacaatctcaaatcattctgcccgcaagcttgtttaacgacccacagcttaacgccgatggctccaacaactccaaaccaacaccacacgattttctgatgccagcacgcagaatctgtttaacaagctcagcaaggttacaaccaatcttcaaatga

SEQ ID NO: 287 - DNA (genomic), 1179 bp, Helicobacter pylori; double-stranded, circular
  misc_feature (B) LOCATION 1...1179
  hypothetical: NO
  anti-sense: NO
tatttatgtgaatctcttgcccacaagaggaggggatttagggttagggtctcaatatggtggcccgaatggccaggcgatgatggcaccaattttggcgctttagggatattgtcccctttcttagaccctgaaatattgtttggcaaagaattgaataaagtcgccatcatgcaattaagagacatcatccatgaatacggccatactttaggctatacgcataacgggaacatgacttatcaaagagtgcgcatgtgcgaagaaaacaatgggccagaagagcgctgtcagggcggaaggatagagcaagtggatgggaaagaagtgcaagtgtttgacaacgggcatgaagtgcgagacaccgatggctctacctatgatgtgtgttctcgttttaaagataagccctatacagcgggcagctatcctaattccatctataccgattgctctcaagtccccgctgggcttataggcgttaccagcgctgtttggcaacaactcattgatcaaaacgccctaccggtggattttactaatttgagcagccaaaccaactatttgaacgccagcttgaacacgcaagactttgcgaccaccatgcttagcgcgatcagtcaaagcctttcatcttctaaatctagcgccactacttatcgcacttcaaaaacctcacggccctttggagcccccctattaggcgttaatcttaaaatgggctatcaaaaatattttaatgattatctagggttgtcttcttatggcattatcaaatacaactacgctcaagccaacaacgaaaaaatccagcaattaagctatggcgtgggaatggatgtgctgtttgatttcatcaccaattacactaacgaaaagaaccccaaaagcaatctaaccaagaaagttttcacttcctctcttggggtgtttggggggttaaggggcttatacaacagctattatgtgttgaaccaatacaaagggagcggtaatttaaatgtgaccggtgggttgaattaccgctacaagcattccaaatattctataggcattagcgttcctttggtccagttgaaatctaggatcgtttctagcgatggtgcttataccaattctatcaccctcaatgaagggggcagtcattttaaagtgttttttaattacgggtggattttc

SEQ ID NO: 288 - DNA (genomic), 1590 bp, Helicobacter pylori; double-stranded, circular
  misc_feature (B) LOCATION 1...1590
  hypothetical: NO
  anti-sense: NO
atgacttatatcaattacaaccaattttctagcggtaacggcagtggctctaaacccccatgccccccatacgaaaaccaagcaaattgtgtggctaaagtgccgcctttcacctctcaagacgctaaaaatttgaccaatttaatgctgaacatgatggcggtgtttgattctaaatcttgggaagacgccgtcttaaacgctcctttccaattcagcgacaacaacctgtcagcgccatgttattctgattaccttacatgcgtgaatccttacaacgatgggcttgttgatcctaaattgatcgccaaaaataaaggagatgaatacaatatagaaaacgggcaaacaggctcagtgatattaacgccgcaagatgttatctatagctatagagtcgctaataatatttatgtgaatctcttgcccacaagaggaggggatttagggttagggtctcaatatggtggcccgaatggcccaggcgatgatggcaccaattttggcgctttagggatattgtcccctttcttagaccctgaaatattgtttggcaaagaattgaataaagtcgccatcatgcaattaagagacatcatccatgaatacggccatactttaggctatacgcataacgggaacatgacttatcaaagagtgcgcatgtgcgaagaaaacaatgggccagaagagcgctgtcagggcggaaggatagagcaagtggatgggaaagaagtgcaagtgtttgacaacgggcatgaagtgcgagacaccgatggctctacctatgatgtgtgttctcgttttaaagataagccctatacagcgggcagctatcctaattccatctataccgattgctctcaagtccccgctgggcttataggcgttaccagcgctgtttggcaacaactcattgatcaaaacgccctaccggtggattttactaatttgagcagccaaaccaactatttgaacgccagcttgaacacgcaagactttgcgaccaccatgcttagcgcgatcagtcaaagcctttcatcttctaaatctagcgccactacttatcgcacttcaaaaacctcacggccctttggagcccccctattaggcgttaatcttaaaatgggctatcaaaaatattttaatgattatctagggttgtcttcttatggcattatcaaatacaactacgctcaagccaacaacgaaaaaatccagcaattaagctatggcgtgggaatggatgtgctgtttgatttcatcaccaattacactaacgaaaagaaccccaaaagcaatctaaccaagaaagttttcacttcctctcttggggtgtttggggggttaaggggcttatacaacagctattatttgttgaaccaatacaaagggagcggtaatttaaatgtgaccggtgggttgaattaccgctacaagcattccaaatattctataggcattagcgttcctttggtccagttgaaatctaggatcgtttctagcgatggtgcttataccaattctatcaccctcaatgaagggggcagtcattttaaagtgttttttaattacgggtggattttctaa

SEQ ID NO: 289 - DNA (genomic), 2235 bp, Helicobacter pylori; double-stranded, circular
  misc_feature (B) LOCATION 1...2235
  hypothetical: NO
  anti-sense: NO
atgttaaaactcgccagtaaaacgatttgtttgtccctaatcagctcattcacggctgtagaagcctttcaaaaacaccaaaaagacggctttttcatagaagccggctttgaaaccgggctattacaaggcacacaaacccaagaacaaaccatagccaccactcaagaaaaacccaaacccaaacccaaaccaaaacccattacccctcaaagcacctatgggaaatactacatctcccaaagcaccattttaaagaatgcgactgagttgtttgcagaggataatatcaccaacttaaccttttactctcaaaaccctgtgtatgtaaccgcttataaccaagaaagcgctgaagaagctggctatggtaataacagcttgattatgatacaaaacttcttgccttataacttgaacaacattgagctgagttacacggacgatcaaggcaatgtggtcagtttgggcgtgatagagactatccctaaacaatctcaaatcattctgcccgcaagcttgtttaacgacccacagcttaacgccgatggcttccaacaactccaaaccaacaccacacgattttctgatgccagcacgcagaatctgtttaacaagctcagcaaggttacaaccaatcttcaaatgacttatatcaattacaaccaattttctagcggtaacggcagtggctctaaacccccatgccccccatacgaaaaccaagcaaattgtgtggctaaagtgccgcctttcacctctcaagacgctaaaaatttgaccaatttaatgctgaacatgatggcggtgtttgattctaaatcttgggaagacgccgtcttaaacgctcctttccaattcagcgacaacaacctgtcagcgccatgttattctgattaccttacatgcgtgaatccttacaacgatgggcttgttgatcctaaattgatcgccaaaaataaaggagatgaatacaatatagaaaacgggcaaacaggctcagtgatattaacgccgcaagatgttatctatagctatagagtcgctaataatatttatgtgaatctcttgcccacaagaggaggggatttagggttagggtctcaatatggtggcccgaatggcccaggcgatgatggcaccaattttggcgctttagggatattgtcccctttcttagaccctgaaatattgtttggcaaagaattgaataaagtcgccatcatgcaattaagagacatcatccatgaatacggccatactttaggctatacgcataacgggaacatgacttatcaaagagtgcgcatgtgcgaagaaaacaatgggccagaagagcgctgtcagggcggaaggatagagcaagtggatgggaaagaagtgcaagtgtttgacaacgggcatgaagtgcgagacaccgatggctctacctatgatgtgtgttctcgttttaaagataagccctatacagcgggcagctatcctaattccatctataccgattgctctcaagtccccgctgggcttataggcgttaccagcgctgtttggcaacaactcattgatcaaaacgccctaccggtggattttactaatttgagcagccaaaccaactatttgaacgccagcttgaacacgcaagactttgcgaccaccatgcttagcgcgatcagtcaaagcctttcatcttctaaatctagcgccactacttatcgcacttcaaaaacctcacggccctttggagcccccctattaggcgttaatcttaaaatgggctatcaaaaatattttaatgattatctagggttgtcttcttatggcattatcaaatacaactacgctcaagccaacaacgaaaaaatccagcaattaagctatggcgtgggaatggatgtgctgtttgatttcatcaccaattacactaacgaaaagaaccccaaaagcaatctaaccaagaaagttttcacttcctctcttggggtgtttggggggttaaggggcttatacaacagctattatttgttgaaccaatacaaagggagcggtaatttaaatgtgaccggtgggttgaattaccgctacaagcattccaaatattctataggcattagcgttcctttggtccagttgaaatctaggatcgtttctagcgatggtgcttataccaattctatcaccctcaatgaagggggcagtcattttaaagtgttttttaattacgggtggattttctaa

SEQ ID NO: 290 - DNA (genomic), 186 bp, Helicobacter pylori; double-stranded, circular
  misc_feature (B) LOCATION 1...186
  hypothetical: NO
  anti-sense: NO
atgcaagaattcagtttgtggtgcgattttatagaaagggattttttagaaaacgattttttaaagctcatcaataagggggctatttgcgggrcgacgagtaaccctagtttgttttgcgaagcgatcacaaaaagcgcgttttatcaagatgaaatcgctaaamctcaaaggcaaaaaagctaa

SEQ ID NO: 291 - DNA (genomic), 951 bp, Helicobacter pylori; double-stranded, circular
  misc_feature (B) LOCATION 1...951
  hypothetical: NO
  anti-sense: NO
atgcaagaattcagtttgtggtgcgattttatagaaagggattttttagaaaacgattttttaaagctcatcaataagggggctatttgcggggcgacgagtaaccctagtttgttttgcgaagcgatcacaaaaagcgcgttttatcaagatgaaatcgctaaactcaaaggcaaaaaagctaaagaaatttatgaaactctggcactaaaggatattttacaagcctctagcgcgttaatgcctttgtatgaaaaagaccctaacaacggctacatcagcctagaaattgacccctttttagaagacgatgcgattaaaagcattgatgaagccaagcggttattcaaaacattaaaccgccccaatgtgatgattaaagtcccggcgagtgaaagcgcttttgaagtcattagcgctctggctcaagcctctatccccattaatgtaactttagtcttttcgcctaaaattgccggtgaaatcgctcaaatcttagccaaagaagcacgaaaaagagcggtcattagcgtgtttgtctcacgatttgacaaagaaatagacccactagtgccacaaaatttgcaagctcaaagtgggatcatgaacgctaccgagtgttattatcaaatcaaccagcatgctaataagctaataagcaccctttttgcatccaccggcgttaaatctaattctttagctaaagattactacattaaagcgctgtgttttaaaaactctatcaacacagcccccctagacgccctaaacgcttatttgcttgacccaaacaccgagtgtcaaacccctttaaaaatcacagaaattgaagcgttcaaaaaagaattaaaaacgcacaatattgatttagaaaacaccgcccaaaaactccttaaagaaggcttgatagcgttcaaacaatcctttgaaaagcttttaagcagtttttga

SEQ ID NO: 292 - DNA (genomic), 981 bp, Helicobacter pylori; double-stranded, circular
  misc_feature (B) LOCATION 1...981
  hypothetical: NO
  anti-sense: NO
agattattatctcaatttaaaacaaggataaacatgcaagaattcagtttgtggtgcgattttatagaaagggattttttagaaaacgattttttaaagctcatcaataagggggctatttgcggggcgacgagtaaccctagtttgttttgcgaagcgatcacaaaaagcgcgttttatcaagatgaaatcgctaaactcaaaggcaaaaaagctaaagaaatttatgaaactctggcactaaaggatattttacaagcctctagcgcgttaatgcctttgtatgaaaaagaccctaacaacggctacatcagcctagaaattgacccctttttagaagacgatgcgattaaaagcattgatgaagccaagcggttattcaaaacattaaaccgccccaatgtgatgattaaagtcccggcgagtgaaagcgcttttgaagtcattagcgctctggctcaagcctctatccccattaatgtaactttagtcttttcgcctaaaattgccggtgaaatcgctcaaatcttagccaaagaagcacgaaaaagagcggtcattagcgtgtttgtctcacgatttgacaaagaaatagacccactagtgccacaaaatttgcaagctcaaagtgggatcatgaacgctaccgagtgttattatcaaatcaaccagcatgctaataagctaataagcaccctttttgcatccaccggcgttaaatctaattctttagctaaagattactacattaaagcgctgtgttttaaaaactctatcaacacagcccccctagacgccctaaacgcttatttgcttgacccaaacaccgagtgtcaaacccctttaaaaatcacagaaattgaagcgttcaaaaaagaattaaaaacgcacaatattgatttagaaaacaccgcccaaaaactccttaaagaaggcttgatagcgttcaaacaatcctttgaaaagcttttaagcagtttt

SEQ ID NO: 293 - DNA (genomic), 264 bp, Helicobacter pylori; double-stranded, circular
  misc_feature (B) LOCATION 1...264
  hypothetical: NO
  anti-sense: NO
atgtttatactttttaagtttggtagggttttgggtaaggcttatagcttatacttatatatatatgaaagcttgatttgtcaagcttttgggttgtcattgagttgcaataactctatgctgttttctacttttttgataaatctaccattaccacacaatgagtccttatgctgttgtagggatattttagcgtattctaactcttcatcgctaaagacatattcattggagtcaaatttttctttcaattctttattttga

SEQ ID NO: 294 - DNA (genomic), 300 bp, Helicobacter pylori; double-stranded, circular
  misc_feature (B) LOCATION 1...300
  hypothetical: NO
  anti-sense: NO
cccaaaccttacgccgtcagtattctatgtatttgcgttatgtttatactttttaagtttggtagggttttgggtaaggcttatagcttatacttatatatatatgaaagcttgatttgtcaagcttttgggttgtcattgagttgcaataactctatgctgttttctacttttttgataaatctaccattaccacacaatgagtccttatgctgttgtagggatattttagcgtattctaactcttcatcgctaaagacatattcattggagtcaaatttttctttcaattctttattt

SEQ ID NO: 295 - DNA (genomic), 228 bp, Helicobacter pylori; double-stranded, circular
  misc_feature (B) LOCATION 1...228
  hypothetical: NO
  anti-sense: NO
ttgaaaattttaaccctttttttgataggtttaaacgcattgttcgccctagatttgaacgcgcttaaaacagaaatcaaagaaacctatctcaaagaatacaaagacttaaaattggaaattgaaacaattaatttagaaatcccagagcgtttttctcacgcttccattttaagctatgaattgaacgcttctaacaagcttaaaaaagatgggtcgtgtttttaa

SEQ ID NO: 296 - DNA (genomic), 444 bp, Helicobacter pylori; double-stranded, circular
  misc_feature (B) LOCATION 1...444
  hypothetical: NO
  anti-sense: NO
atggaatttttgagcgggtattttttatgggttaaagctttccatgtgatagcggtcatttcgtggatggcagcgttattttatttgccacgcctttttgtctatcatgcagagaacgcgcataaaaaagagtttgtaggcgtggttcaaatccaagagaaaaagctctattcctttatcgcttcgccggcgatgggtttcacgcttattacagggattttgatgttgttgatcgcccctgaaatgtttaaaagcgggggttggttgcatgctaaattggctttagtggtattgcttttaatctatcatttttattgcaaaaaatgcatgcgcgagctggaaaaagaccctacagggaaaaacgcaaggttttatcgtgtgtttaatgaaatacccacgattttaatgatccttattgtgatcttagtggttgtcaagcctttt

SEQ ID NO: 297 - DNA (genomic), 447 bp, Helicobacter pylori; double-stranded, circular
  misc_feature (B) LOCATION 1...447
  hypothetical: NO
  anti-sense: NO
atggaatttttgagcgggtattttttatgggttaaagctttccatgtgatagcggtcatttcgtggatggcagcgttattttatttgccacgcctttttgtctatcatgcagagaacgcgcataaaaaagagtttgtaggcgtggttcaaatccaagagaaaaagctctattcctttatcgcttcgccggcgatgggtttcacgcttattacagggattttgatgttgttgatcgcccctgaaatgtttaaaagcgggggttggttgcatgctaaattggctttagtggtattgcttttaatctatcatttttattgcaaaaaatgcatgcgcgagctggaaaaagaccctacagggaaaaacgcaaggttttatcgtgtgtttaatgaaatacccacgattttaatgatccttattgtgatcttagtggttgtcaagcctttttaa

SEQ ID NO: 298 - DNA (genomic), 198 bp, Helicobacter pylori; double-stranded, circular
  misc_feature (B) LOCATION 1...198
  hypothetical: NO
  anti-sense: NO
agagcaagggaatcggatcgccactttcctaaacgctctagctcttatgatcctgtgtctaaacgcttgtatgtagggggggaagtgtttgttttgggcgcagaatacaaaaataaaaatttgatattcgttccttttattttaacggacacccgcttgcctttgcccacccaaaatgttttagtgcaaatggggggg

SEQ ID NO: 299 - DNA (genomic), 360 bp, Helicobacter pylori; double-stranded, circular
  misc_feature (B) LOCATION 1...360
  hypothetical: NO
  anti-sense: NO
ttttggacgggtttttatatcgttccggcaaggaacaataagggctatctatggacttttaatgacaggactaaattctatggccgtgggatcaacgcgccggtaccagcgatttattttgctaactccagcatttcaggctatgtttttttagggcttaagactaaaagggtgcgtttagatgcgatggtggcttttggggattatcaagaatattctttgatgagcagttttagggtttggacttatagggatttgtcttttgatatgggtggggggtatgtgtatgcttataattctaaagccacgagaaaaagccttggagatagctcttttgtcttttttgggaagtttttgttt

SEQ ID NO: 300 - DNA (genomic), 510 bp, Helicobacter pylori; double-stranded, circular
  misc_feature (B) LOCATION 1...510
  hypothetical: NO
  anti-sense: NO
aaaccctttggctatctcgggctattgtataagcaagggacgcaaaaaaaccctcacagctatgtgggggctccagcgcgtcttggggtggatttttcttatagcaatgggtggtcgtttggtattggggctattggggcttggaatatttataacaaacagcgtttggctaacctttacatcagtctagggaatttttttggtaaccctaacaacgttaagccttatttgagcgccggcgatgtttctgatgcgtatcttcaatacgctaaccagcgttttaaaatcgctttagggcgttttaataccgattttgtggattttgattggatagggggcaatattcaaggggtctctgtggctttcaagcaaaattccatgcgttattttgggatttttatggatagcatgctttataatgggcatcaaatcaataaagagcaagggaatcggatcgccactttcctaaacgctctagctcttatgatcctgtgtctaaacgcttgtatg

SEQ ID NO: 301 - DNA (genomic), 507 bp, Helicobacter pylori; double-stranded, circular
  misc_feature (B) LOCATION 1...507
  hypothetical: NO
  anti-sense: NO
ccctttggctatctcgggctattgtataagcaagggacgcaaaaaaaccctcacagctatgtgggggctccagcgcgtcttggggtggatttttcttatagcaatgggtggtcgtttggtattggggctattggggcttggaatatttataacaaacagcgtttggctaacctttacatcagtctagggaatttttttggtaaccctaacaacgttaagccttatttgagcgccggcgatgtttctgatgcgtatcttcaatacgctaaccagcgttttaaaatcgctttagggcgttttaataccgattttgtggattttgattggatagggggcaatattcaaggggtctctgtggctttcaagcaaaattccatgcgttattttgggatttttatggatagcatgctttataatgggcatcaaatcaataaagagcaagggaatcggatcgccactttcctaaacgctctagctcttatgatcctgtgtctaaacgcttgtatg

SEQ ID NO: 302 - DNA (genomic), 633 bp, Helicobacter pylori; double-stranded, circular
  misc_feature (B) LOCATION 1...633
  hypothetical: NO
  anti-sense: NO
gtgtttgttttgggcgcagaatacaaaaataaaaatttgatattcgttccttttattttaacggacacccgcttgcctttgcccacccaaaatgttttagtgcaagtggggggtaagttggagtatgacgcttctttagctaagggtttcacttcgcgcactctagtgcatggcatgtatcaatacggcaacaccgatattactacaagcgctaaaaatgccggcttgtttttgatcgatcaaactttcaaatataaaatttttaattttggaacgggtttttatatcgttccggcaaggaacaataagggctatctatggacttttaatgacaggactaaattctatggccgtgggatcaacgcgcccggcgtaccagcgatttattttgctaactccagcatttcaggctatgtttttttagggcttaagactaaaagggtgcgtttagatgcgatggtggcttttggggattatcaagaatattctttgatgagcagttttagggtttggacttatagggatttgtcttttgatatgggtggggggtatgtgtatgcttataattctaaagccacgagaaaaagccttggagatagctcttttgtcttttttgggaagtttttgttttaa

SEQ ID NO: 303 - DNA (genomic), 756 bp, Helicobacter pylori; double-stranded, circular
  misc_feature (B) LOCATION 1...756
  hypothetical: NO
  anti-sense: NO
atgcaatataagaaaaataagaaaagatattatcatttagcgttagggatccttttttgtaatggtctgtctttgaaagctttagaaattgccgtcaaaccctttggctatctggggctattgtataatcaagggacgcaaaaaaaccctcacagctatgtgggggctttagcgcgtcttggggtggatttttcttatagcaatgggtggtcgtttggtattggggctattggggcttggaatatttataacaaacagcgtttggctaacctttacatcagtctagggaatttttttggtaaccctaacaacgttaagccttatttgagcgccggcgatgtttctgatgcgtatcttcaatacgctaaccagcgttttaaaatcgctttagggcgttttaataccgattttgtggattttgattggatagggggcaatattcaaggggtctctgtggctttcaagcaaaattccatgcgttattttgggatttttatggatagcatgctttataatgggcatcaaatcaataaagagcaagggaatcggatcgccacttccctaaacgctctagcgtcttatgatcctgtgtctaaacgcttgtatgtagggggggaagtgtttgttttgggcgcagaatacaaaaataaaaatttgatattcgttccttttattttaacggacacccgcttgcctttgcccacccaaaatgttttagtgcaagtggggggtaagttggagtatcgacgcttcttt

SEQ ID NO: 304 - DNA (genomic), 1251 bp, Helicobacter pylori; double-stranded, circular
  misc_feature (B) LOCATION 1...1251
  hypothetical: NO
  anti-sense: NO
atgcaatataagaaaaataagaaaagatattatcatttagcgttagggatccttttttgtaatggtctgtctttgaaagctttagaaattgccgtcaaaccctttggctatctggggctattgtataatcaagggacgcaaaaaaaccctcacagctatgtgggggctttagcgcgtcttggggtggatttttcttatagcaatgggtggtcgtttggtattggggctattggggcttggaatatttataacaaacagcgtttggctaacctttacatcagtctagggaatttttttggtaaccctaacaacgttaagccttatttgagcgccggcgatgtttctgatgcgtatcttcaatacgctaaccagcgttttaaaatcgctttagggcgttttaataccgattttgtggattttgattggatagggggcaatattcaaggggtctctgtggctttcaagcaaaattccatgcgttattttgggatttttatggatagcatgctttataatgggcatcaaatcaataaagagcaagggaatcggatcgccacttccctaaacgctctagcgtcttatgatcctgtgtctaaacgcttgtatgtagggggggaagtgtttgttttgggcgcagaatacaaaaataaaaatttgatattcgttccttttattttaacggacacccgcttgcctttgcccacccaaaatgttttagtgcaagtggggggtaagttggagtatgacgcttctttagctaagggtttcacttcgcgcactctagtgcatggcatgtatcaatacggcaacaccgatattactacaagcgctaaaaatgccggcttgtttttgatcgatcaaactttcaaatataaaatttttaattttggaacgggtttttatatcgttccggcaaggaacaataagggctatctatggacttttaatgacaggactaaattctatggccgtgggatcaacgcgcccggcgtaccagcgatttattttgctaactccagcatttcaggctatgtttttttagggcttaagactaaaagggtgcgtttagatgcgatggtggcttttggggattatcaagaatattctttgatgagcagttttagggtttggacttatagggatttgtcttttgatatgggtggggggtatgtgtatgcttataattctaaagccacgagaaaaagccttggagatagctcttttgtcttttttgggaagtttttgttttaa

SEQ ID NO: 305 - DNA (genomic), 345 bp, Helicobacter pylori; double-stranded, circular
  misc_feature (B) LOCATION 1...345
  hypothetical: NO
  anti-sense: NO
atgcgttttttgaataacaaacatagagaaaagggcttaaaggctgaagaagaagcttgcgggtttttaaaaacgctgggttttgaaatgatagagaggaactttttttcacaatttggtgaaattgatattatcgctttgaaaaaaggggttttgcatttcattgaagtcaaaagcggggaaaattttgatcccatttatgcgatcacgccgagcaaattaaaaaagatgattaaaacgatccgctgttatttgtctcaaaaagatcccaatagcgatttttgcattgacgctcttattgtgaaaaatggtaaatttgagcttttagaaaatatcactttttag

SEQ ID NO: 306 - DNA (genomic), 342 bp, Helicobacter pylori; double-stranded, circular
  misc_feature (B) LOCATION 1...342
  hypothetical: NO
  anti-sense: NO
atgcgttttttgaataacaaacatagagaaaagggcttaaaggctgaagaagaagcttgcgggtttttaaaaacgctgggttttgaaatgatagagaggaactttttttcacaatttggtgaaattgatattatcgctttgaaaaaaggggttttgcatttcattgaagtcaaaagcggggaaaattttgatcccatttatgcgatcacgccgagcaaattaaaaaagatgattaaaacgatccgctgttatttgtctcaaaaagatcccaatagcgatttttgcattgacgctcttattgtgaaaaatggtaaatttgagcttttagaaaatatcactttt

SEQ ID NO: 307 - DNA (genomic), 255 bp, Helicobacter pylori; double-stranded, circular
  misc_feature (B) LOCATION 1...255
  hypothetical: NO
  anti-sense: NO
ctggcaggatttggtgatcacgcccttactaggtttcattttaggggaagggttttaccagctcacgcctatatccaacgcaacgaaggcaagctgtttggctctttatttttagggcgtttagccatcgcccttatggatcctatcggttttatcattagggatttagggcttggggaagccttagggatttataataaacatgaaatccgttctaatttaagccccaatggtttgaatttgacttacaaattt

SEQ ID NO: 308 - DNA (genomic), 729 bp, Helicobacter pylori; double-stranded, circular
  misc_feature (B) LOCATION 1...729
  hypothetical: NO
  anti-sense: NO
actctttttaagtcaagcgataaagtttgcaacctaatgagagtaataataaagtttatgctgatttcattaaaaacattcctaaaaatattattggaaatattcctaaaaaccttccaaaagatttggatagtttgcgtggttatttgggggttgggctgtagttttttaaacgctaacagcgttcaattagaagaaacgctgagacgaaatcctaaaaatcttatttggcaacactttaaaaagaagtttaaaaagagtaacacgatcccttatgcccctaatagccgttggaaatatttaggcacaagtatagggattttgggcgtgtcgttggtgatagggattgtggggttgtatctcatgccagagagcgtaacgaattgggataaagaaaagtttggcgtcaaaagttggtttgaaaatgtccgcatggggccaaaactagacaatgatagttttatttttaatgaaatcttgcacccttattttggggctatgtattacatgcaaccgcgcatggctgggtttagctggatgacatcagcgtttttttcttttatcacttctacacttttttgggaatatggcttggaaccgtttgtggaagtgcctagctggcaggatttggtgatcacgcccttactaggtttcattttaggggaagggttttaccagctcacgcctatatccaacgcaacgaaggcaagctgtttggctctttatttt

SEQ ID NO: 309 - DNA (genomic), 840 bp, Helicobacter pylori; double-stranded, circular
  misc_feature (B) LOCATION 1...840
  hypothetical: NO
  anti-sense: NO
atgagagtaataataaagtttatgctgatttcattaaaaacattcctaaaaatattattgaaaatattcctaaaaaccttccaaaagatttggatagtttgcgtggttatttgggggttgggctgtagttttttaaacgctaacagcgttcaattagaagaaacgctgagacgaaatcctaaaaatcttatttggcaacactttaaaaagaagtttaaaaagagtaacacgatcccttatgcccctaatagccgttggaaatatttaggcacaagtatagggattttgggcgtgtcgttggtgatagggattgtggggttgtatctcatgccagagagcgtaacgaattgggataaagaaaagtttggcgtcaaaagttggtttgaaaatgtccgcatggggccaaaactagacaatgatagttttatttttaatgaaatcttgcacccttattttggggctatgtattacatgcaaccgcgcatggctgggtttagctggatgacatcagcgtttttttcttttatcacttctacgcttttttgggaatatggcttggaagcgtttgtggaagtgcctagctggcaggatttggtgatcacgcccttactaggttccattttaggggaagggttttaccagctcacgcgctatatccaacgcaacgaaggcaagctgtttggctctttatttttagggcgtttagccatcgcccttatggatcctatcggttttatcattagggatttagggcttggggaagccttagggatttataataaacatgaaatccgttctaatttaagccccaatggtttgaatttgacttacaaattttaa

SEQ ID NO: 310 - DNA (genomic), 837 bp, Helicobacter pylori; double-stranded, circular
  misc_feature (B) LOCATION 1...837
  hypothetical: NO
  anti-sense: NO
ttgaacaaactgcttaaaaaggggtttttagcgttctttttaagcgtgtatttaagggctgatgatctggttacttatacgatcgccaaagaagaagatctagggtaccagcggtttttagccaagaagtgtttaaggggtaaaacccaccccccatgttttaccgcgtctaaaaagcccaagaggaaaccttttaatatagataaaagctcccattattatggcacgagcgtggtgcaaatgtcatggctacagagtagggaaaaatttgaaaaccattcaaaataccgaaacattccttttgctgaagtcagtttgatttatggctataaacaattttttcctaaaaaagagcactacggcttccgtttttatgtctctttggattacgcttatggcttttttcttaaaaataaaggcgcattaggcgatagtttgagggcgagttcgcagatccctaaaagctatagagaaaaattacaaagaaaagagacttttattaacgctattttttatggcgtgggggctgactttttatacaaacgcgcttttgggacgctgattttaggggtgaatttcgtgggagaaacctggttttatgaaacaaagattttcaaacaatgggctaaagactctctaaatacttaccgccccaacatgtttcaagtgatgttgaatgtggggtatcgctaccgcttttcaaggtataagaattgggcgatagaatttggcgcgcgcatcccctttttaattaatgattattttaaaacccctttatacacccttcatttcaaacgcaatatttctgtctatctcacttcaacttatgatttttag

SEQ ID NO: 311 - DNA (genomic), 855 bp, Helicobacter pylori; double-stranded, circular
  misc_feature (B) LOCATION 1...855
  hypothetical: NO
  anti-sense: NO
aaacaaataagaaaagaacgcttgaacaaactgcttaaaaaggggtttttagcgttctttttaagcgtgtatttaagggctgatgatctggttacttatacgatcgccaaagaagaagatctagggtaccagcggtttttagccaagaagtgtttaaggggtaaaacccaccccccatgttttaccgcgtctaaaaagcccaagaggaaaccttttaatatagataaaagctcccattattatggcacgagcgtggtgcaaatgtcatggctacagagtagggaaaaatttgaaaaccattcaaaataccgaaacattccttttgctgaagtcagtttgatttatggctataaacaattttttcctaaaaaagagcactacggcttccgtttttatgtctctttggattacgcttatggcttttttcttaaaaataaaggcgcattaggcgatagtttgagggcgagttcgcagatccctaaaagctatagagaaaaattacaaagaaaagagacttttattaacgctattttttatggcgtgggggctgactttttatacaaacgcgcttttgggacgctgattttaggggtgaatttcgtgggagaaacctggttttatgaaacaaagattttcaaacaatgggctaaagactctctaaatacttaccgccccaacatgtttcaagtgatgttgaatgtggggtatcgctaccgcttttcaaggtataagaattgggcgatagaatttggcgcgcgcatcccctttttaattaatgattattttaaaacccctttatacacccttcatttcaaacgcaatatttctgtctatctcacttcaacttatgatttt

SEQ ID NO: 312 - DNA (genomic), 195 bp, Helicobacter pylori; double-stranded, circular
  misc_feature (B) LOCATION 1...195
  hypothetical: NO
  anti-sense: NO
agcgctgtagtggagagcgtggttattttaaagattgacatcaatcaggggcgttcttgctcgctctaccccacgcctaaaagcgtttctttagtgaggaatcaaagcgtagcctatgaaattttatgcgaaaaccagccgctatggatagaagttagcaccaatttagggcaaacgctacctttcagtttaatt

SEQ ID NO: 313 - DNA (genomic), 300 bp, Helicobacter pylori; double-stranded, circular
  misc_feature (B) LOCATION 1...300
  hypothetical: NO
  anti-sense: NO
acagcaagaatgaatcgcatgaaaccaatttttttgttaatctttttgttgttagcgagccttattgctagagaaaaggacgcttcttcaaacctttttgatttgatcgataaggggattaacagagaacaagaattgaaagagcaggagcaaaaaacgcgcttgaaactggctcaaagccctttagtggcgttagaaattgtcccccaagaaacgccctatttagaatggcaaggggctagggagtcgtattatttgaaagtagagcgctgtagtggagagcgtggttattttaaagat

SEQ ID NO: 314 - DNA (genomic), 438 bp, Helicobacter pylori; double-stranded, circular
  misc_feature (B) LOCATION 1...438
  hypothetical: NO
  anti-sense: NO
atgaaaccaatttttttgttaatctttttgttgttagcgagccttattgctagagaaaaggacgcttcttcaaacctttttgatttgatcgataaggggattaacagagaacaagaattgaaagagcaggagcaaaaaacgcgcttgaaactggctcaaagccctttagtggcgttagaaattgtcccccaagaaacgccctatttagaatggcaaggggctagggagtcgtattatttgaaagtgagcgctgtagtggagagcgtggttattttaaagattgacatcaatcaggggcgttcttgctcgctctaccccacgcctaaaagcgtttctttagtgaggaatcaaagcgtagcctatgaaattttatgcgaaaaccagccgctatggatagaagttagcaccaatttaggcaaacgcacctttcagttttaa

SEQ ID NO: 315 - DNA (genomic), 789 bp, Helicobacter pylori; double-stranded, circular
  misc_feature (B) LOCATION 1...789
  hypothetical: NO
  anti-sense: NO
gcaggcaatgtcggctataaacccattaaagaattattgttttatttcaattaccaaagaagctacattccgccccaattcagcaatatcggtaattttgtaggcacaagcacggattattttcaaatctttaatgtcatggaaggcggctcaagatattattttaaccatcaagtgagttttaacgcgaactattttgtgatttttgcgaatcattattttaccgggcgctatggggacaacagagagccggtcaatgcgagatcgcaaggcgtggagctggaactctactacacgcctattagggggcttaatttccatgcggcttacacttttatagacgctaatatcacaagccacacgatggttactaaccctgctaatcctaaagggcctaaaaaagatatttttggcaaaaagctcccttttgtcagcccgcaccaattcattttagacgcgagttacacttacgctaaaaccacgattgggttaagctctttcttttatagccgcgcttatagcgatgtgttaaacaccgtgccttttacagaatacgcgcccacgattaaaaatggggctatcgttaccaaaacagcgggcatgacgccgtactattgggtgtggaatttgcaaatttctaccactttgtgggaacgcaaaaatcaaagcgtgaatgcgagcttgcaaatcaataacatttttaacatgaaatattggtttagcgggataggcactagccctaacggaaagaagctgcgctcccaggagcatcacagcgtatgtgagtta

SEQ ID NO: 316 - DNA (genomic), 1587 bp, Helicobacter pylori; double-stranded, circular
  misc_feature (B) LOCATION 1...1587
  hypothetical: NO
  anti-sense: NO
atgagaaaggttatcataatgaatggttatttgagggtaaaaaccccgtattttttagcgtcggtcgttttgactttttggacttttaattcttttatgagcgcgaaagataagcaccattttttaaaaaaagttacaaccaccgagcaaaaattcagttctagtgccccaatttcatggcaaagcgaagaggtgcgtaattccacaagctctcgcacggtgatttccaacaaagaactcaaaaaaacggggaatttgaatattgaaaacgccttgcaaaatgtaccagggattcaaatcagagacgctacaggcacgggcgtgctgcctaaaatttcggtgcgcggttttggtgggggcggtaacgggcatagcaacaccaacatgattttagtcaatggtatccccatttatggcgcgccgtattccaatattgaactggcgattttccctgtaactttccagtcagtggataggattgatgtgattaaggggggaacgagcgtccaatacggccctaacacttttggaggcgtggtgaatgtcatcactaaagaaatccccaaagagtgggaaaatcaagcggctgaaaggatcactttttgggggcgctcctctaatgggaattttgtcgatcccaaagaaaaaggcaagcccttagcccaaactttaggaaaccaaatgctgtttaacacttatgggcgaacggctgggatgttgggtaaatatataggcattagcgctcaaggcaattggattaatgggcaaggtttcaggcaaaatagccctacaaaggtgcaaaactacttgttggatgcgatttataagatcaatgcgaccaatacttttaaagcttattaccagtattatcaatacaactcttaccatccaggcactttgagcgcgcaagattacgcctataaccgcttcatcaatgagcgccctgacaatcaagatggagggcgagccaagcgctttgggatcgtgtatcaaaactactttggcgatccggataggaaagtggggggcgattttaaattcacttatttcacgcatgacatgagtagggattttgggttttccaaccaataccaaagcgtgtatatgagcggtcaaaataagattttaccctttaaaggcaagggagaaatcagcgcaaaaaaccctaattgcggtctgtattcttatagcgacacgaatagcccttgctggcaattttttgacaatatccgccgatccgtggtgaatgcctttgagccaaaactcaatcttatcgtcaatactggtaaagtcaaacaaacttttaacatgggaatgcgctttttaactgaagatttataccgccgatccaccaccaggaaaaaccctagcatgcctaataatgggagtgggtttgatgcaggaacttcactcaataatttcaacaattataccgctgtgtatgccagcgatgaaatcaatttcaataacggcatgctaacgatcacgccgggcttgagatacacttttttaaattacgaaaaaaaagacgctcctccctttaaggtgggtcaaaccccaaaaaccacgaaagagcgttataaccaa

SEQ ID NO: 317 - DNA (genomic), 1599 bp, Helicobacter pylori; double-stranded, circular
  misc_feature (B) LOCATION 1...1599
  hypothetical: NO
  anti-sense: NO
atgagaaaggttatcataatgaatggttatttgagggtaaaaaccccgtattttttagcgtcggtcgttttgactttttggacttttaattcttttatgagcgcgaaagataagcaccattttttaaaaaaagttacaaccaccgagcaaaaattcagttctagtgccccaatttcatggcaaagcgaagaggtgcgtaattccacaagctctcgcacggtgatttccaacaaagaactcaaaaaaacggggaatttgaatattgaaaacgccttgcaaaatgtgccagggattcaaatcagagacgctacaggcacgggcgtgctgcctaaaatttcggtgcgcggttttggtgggggcggtaacgggcatagcaacaccaacatgattttagtcaatggtatccccatttatggcgcgccgtattccaatattgaactggcgattttccctgtaactttccagtcagtggataggattgatgtgattaaggggggaacgagcgtccaatacggccctaacacttttggaggcgtggtgaatgtcatcactaaagaaatccccaaagagtgggaaaatcaagcggctgaaaggatcactttttgggggcgctcctctaatgggaattttgtcgatcccaaagaaaaaggcaagcccttagcccaaactttaggaaaccaaatgctgtttaacacttatgggcgaacggctgggatgttgggtaaatatataggcattagcgctcaaggcaattggattaatgggcaaggtttcaggcaaaatagccctacaaaggtgcaaaactacttgttggatgcgatttataagatcaatgcgaccaatacttttaaagcttattaccagtattatcaatacaactcttaccatccaggcactttgagcgcgcaagattacgcctataaccgcttcatcaatgagcgccctgacaatcaagatggagggcgagccaagcgctttgggatcgtgtatcaaaactactttggcgatccggataggaaagtggggggcgattttaaattcacttatttcacgcatgacatgagtagggattttgggttttccaaccaataccaaagcgtgtatatgagcggtcaaaataagattttaccctttaaaggcaagggagaaatcagcgcaaaaaaccctaattgcggtctgtattcttatagcgacacgaatagcccttgctggcaattttttgacaatatccgccgatccgtggtgaatgcctttgagccaaaactcaatcttatcgtcaatactggtaaagtcaaacaaacttttaacatgggaatgcgctttttaactgaagatttataccgccgatccaccaccaggaaaaaccctagcatgcctaataatgggagtgggtttgatgcaggaacttcactcaataatttcaacaattataccgctgtgtatgccagcgatgaaatcaatttcaataacggcatgctaacgatcacgccgggcttgagatacacttttttaaattacgaaaaaaaagacgctcctccctttaaggtgggtcaaaccccaaaaaccacgaaagagcgttataaccaatggaatccggca

SEQ ID NO: 318 - DNA (genomic), 2382 bp, Helicobacter pylori; double-stranded, circular
  misc_feature (B) LOCATION 1...2382
  hypothetical: NO
  anti-sense: NO
ataatgaatggttatttgagggtaaaaaccccgtattttttagcgtcggtcgttttgactttttggacttttaattcttttatgagcgcgaaagataagcaccattttttaaaaaaagttacaaccaccgagcaaaaattcagttctagtgccccaatttcatggcaaagcgaagaggtgcgtaattccacaagctctcgcacggtgatttccaacaaagaactcaaaaaaacggggaatttgaatattgaaaacgccttgcaaaatgtgccagggattcaaatcagagacgctacaggcacgggcgtgctgcctaaaatttcggtgcgcggttttggtgggggcggtaacgggcatagcaacaccaacatgattttagtcaatggtatccccatttatggcgcgccgtattccaatattgaactggcgattttccctgtaactttccagtcagtggataggattgatgtgattaaggggggaacgagcgtccaatacggccctaacacttttggaggcgtggtgaatgtcatcactaaagaaatccccaaagagtgggaaaatcaagcggctgaaaggatcactttttgggggcgctcctctaatgggaattttgtcgatcccaaagaaaaaggcaagcccttagcccaaactttaggaaaccaaatgctgtttaacacttatgggcgaacggctgggatgttgggtaaatatataggcattagcgctcaaggcaattggattaatgggcaaggtttcaggcaaaatagccctacaaaggtgcaaaactacttgttggatgcgatttataagatcaatgcgaccaatacttttaaagcttattaccagtattatcaatacaactcttaccatccaggcactttgagcgcgcaagattacgcctataaccgcttcatcaatgagcgccctgacaatcaagatggagggcgagccaagcgctttgggatcgtgtatcaaaactactttggcgatccggataggaaagtggggggcgattttaaattcacttatttcacgcatgacatgagtagggattttgggttttccaaccaataccaaagcgtgtatatgagcggtcaaaataagattttaccctttaaaggcaagggagaaatcagcgcaaaaaaccctaattgcggtctgtattcttatagcgacacgaatagcccttgctggcaattttttgacaatatccgccgatccgtggtgaatgcctttgagccaaaactcaatcttatcgtcaatactggtaaagtcaaacaaacttttaacatgggaatgcgctttttaactgaagatttataccgccgatccaccaccaggaaaaaccctagcatgcctaataatgggagtgggtttgatgcaggaacttcactcaataatttcaacaattataccgctgtgtatgccagcgatgaaatcaatttcaataacggcatgctaacgatcacgccgggcttgagatacacttttttaaattacgaaaaaaaagacgctcctccctttaaggtgggtcaaaccccaaaaaccacgaaagagcgttataaccaatggaatccggcagtcaatgtcggctataaacccattaaagaattattgttttatttcaattaccaaagaagctacattccgccccaattcagcaatatcggtaattttgtaggcacaagcacggattattttcaaatctttaatgtcatggaaggcggctcaagatattattttaaccatcaagtgagttttaacgcgaactattttgtgatttttgcgaatcattattttaccgggcgctatggggacaacagagagccggtcaatgcgagatcgcaaggcgtggagctggaactctactacacgcctattagggggcttaatttccatgcggcttacacttttatagacgctaatatcacaagccacacgatggttactaaccctgctaatcctaaagggcctaaaaaagatatttttggcaaaaagctcccttttgtcagcccgcaccaattcattttagacgcgagttacacttacgctaaaaccacgattgggttaagctctttcttttatagccgcgcttatagcgatgtgttaaacaccgtgccttttacagaatacgcgcccacgattaaaaatggggctatcgttaccaaaacagcgggcatgacgccgtactattgggtgtggaatttgcaaatttctaccactttgtgggaacgcaaaaatcaaagcgtgaatgcgagcttgcaaatcaataacatttttaacatgaaatattggtttagcgggataggcactagccctaacgggaaagaagctgcgcctcccaggagcatcacagcgtatgtgagttataatttttaa

SEQ ID NO: 319 - DNA (genomic), 2397 bp, Helicobacter pylori; double-stranded, circular
  misc_feature (B) LOCATION 1...2397
  hypothetical: NO
  anti-sense: NO
atgagaaaggttatcataatgaatggttatttgagggtaaaaaccccgtattttttagcgtcggtcgttttgactttttggacttttaattcttttatgagcgcgaaagataagcaccattttttaaaaaaagttacaaccaccgagcaaaaattcagttctagtgccccaatttcatggcaaagcgaagaggtgcgtaattccacaagctctcgcacggtgatttccaacaaagaactcaaaaaaacggggaatttgaatattgaaaacgccttgcaaaatgtgccagggattcaaatcagagacgctacaggcacgggcgtgctgcctaaaatttcggtgcgcggttttggtgggggcggtaacgggcatagcaacaccaacatgattttagtcaatggtatccccatttatggcgcgccgtattccaatattgaactggcgattttccctgtaactttccagtcagtggataggattgatgtgattaaggggggaacgagcgtccaatacggccctaacacttttggaggcgtggtgaatgtcatcactaaagaaatccccaaagagtgggaaaatcaagcggctgaaaggatcactttttgggggcgctcctctaatgggaattttgtcgatcccaaagaaaaaggcaagcccttagcccaaactttaggaaaccaaatgctgtttaacacttatgggcgaacggctgggatgttgggtaaatatataggcattagcgctcaaggcaattggattaatgggcaaggtttcaggcaaaatagccctacaaaggtgcaaaactacttgttggatgcgatttataagatcaatgcgaccaatacttttaaagcttattaccagtattatcaatacaactcttaccatccaggcactttgagcgcgcaagattacgcctataaccgcttcatcaatgagcgccctgacaatcaagatggagggcgagccaagcgctttgggatcgtgtatcaaaactactttggcgatccggataggaaagtggggggcgattttaaattcacttatttcacgcatgacatgagtagggattttgggttttccaaccaataccaaagcgtgtatatgagcggtcaaaataagattttaccctttaaaggcaagggagaaatcagcgcaaaaaaccctaattgcggtctgtattcttatagcgacacgaatagcccttgctggcaattttttgacaatatccgccgatccgtggtgaatgcctttgagccaaaactcaatcttatcgtcaatactggtaaagtcaaacaaacttttaacatgggaatgcgctttttaactgaagatttataccgccgatccaccaccaggaaaaaccctagcatgcctaataatgggagtgggtttgatgcaggaacttcactcaataatttcaacaattataccgctgtgtatgccagcgatgaaatcaatttcaataacggcatgctaacgatcacgccgggcttgagatacacttttttaaattacgaaaaaaaagacgctcctccctttaaggtgggtcaaaccccaaaaaccacgaaagagcgttataaccaatggaatccggcagtcaatgtcggctataaacccattaaagaattattgttttatttcaattaccaaagaagctacattccgccccaattcagcaatatcggtaattttgtaggcacaagcacggattattttcaaatctttaatgtcatggaaggcggctcaagatattattttaaccatcaagtgagttttaacgcgaactattttgtgatttttgcgaatcattattttaccgggcgctatggggacaacagagagccggtcaatgcgagatcgcaaggcgtggagctggaactctactacacgcctattagggggcttaatttccatgcggcttacacttttatagacgctaatatcacaagccacacgatggttactaaccctgctaatcctaaagggcctaaaaaagatatttttggcaaaaagctcccttttgtcagcccgcaccaattcattttagacgcgagttacacttacgctaaaaccacgattgggttaagctctttcttttatagccgcgcttatagcgatgtgttaaacaccgtgccttttacagaatacgcgcccacgattaaaaatggggctatcgttaccaaaacagcgggcatgacgccgtactattgggtgtggaatttgcaaatttctaccactttgtgggaacgcaaaaatcaaagcgtgaatgcgagcttgcaaatcaataacatttttaacatgaaatattggtttagcgggataggcactagccctaacgggaaagaagctgcgcctcccaggagcatcacagcgtatgtgagttataatttttaa

SEQ ID NO: 320 - DNA (genomic), 417 bp, Helicobacter pylori; double-stranded, circular
  misc_feature (B) LOCATION 1...417
  hypothetical: NO
  anti-sense: NO
atgttatatctaaggaaagaaaatggggttaggacactaataagtttagggattttgttaagcgttttgaatggcgatgatctgagattgtattcaaaacctttggtctattcggctggaagtgggattattgggattgatattgacaaacggacattctataaacgagcgttcgctttcacgatgaaatcgttgtttggtgaaaacttgcttttgtttgttaaattgaagcattctgcgttgatgagcaaacacatgaaagggcctttagaaaaccgccaccaccattctttcgctaaaaattatgaaaaagcggttaatggttgtcaaaaatatgtccatatcaaattgcctgaaggcgctcctagcaacttccaatcaggctcatacatggcgactatggtgatgcgtttttaa

SEQ ID NO: 321 - DNA (genomic), 447 bp, Helicobacter pylori; double-stranded, circular
  misc_feature (B) LOCATION 1...447
  hypothetical: NO
  anti-sense: NO
gttaaatttccttatctgttaaacatacggataatgttatatctaaggaaagaaaatggggttaggacactaataagtttagggattttgttaagcgttttgaatggcgatgatctgagattgtattcaaaacctttggtctattcggctggaagtgggattattgggattgatattgacaaacggacattctataaacgagcgttcgctttcacgatgaaatcgttgtttggtgaaaacttgcttttgtttgttaaattgaagcattctgcgttgatgagcaaacacatgaaagggcctttagaaaaccgccaccaccattctttcgctaaaaattatgaaaaagcggttaatggttgtcaaaaatatgtccatatcaaattgcctgaagggcctcctagcaacttccaatcaggctcatacatggcgactatggtgatgcgtttt

SEQ ID NO: 322 - DNA (genomic), 615 bp, Helicobacter pylori; double-stranded, circular
  misc_feature (B) LOCATION 1...615
  hypothetical: NO
  anti-sense: NO
atgcaagggtttcttttacaaacacaaagcataagagatgaagatttgatcgtgcacgttttaaccaaaaaccagctcaaaaccctctatcgtttctatggcaaacgccacagcgtgctgaatgtgggtcgtaaaattgattttgaagaagaaaacgatgataaatttttacccaagttaaggaatattttgcatttaggctatatttgggaaagagaaatggagcgcttgtttttttggcaacgcttttgcgctcttttgttcaagcatttagagggcgtgcattctttagatagcatctattttgacactttagatgatggggctagcaaactctccaaacagcaccccttaagagtgattttagaaatgtatgcagtccttttgaattttgaagggcgcttgcaaagttacaattcttgttttttatgcgatgcaaaattagagcgttctgtcgctttagcgcaagggtttattttagcgcacccctcttgcttgaaagctaaaagcttggatttagaaaaaatccaagcttttttccgcactcaaagcacgattgatctagaaacagaagaagtggaagaattatggcgcacgctgaatttagggttttga

SEQ ID NO: 323 - DNA (genomic), 663 bp, Helicobacter pylori; double-stranded, circular
  misc_feature (B) LOCATION 1...663
  hypothetical: NO
  anti-sense: NO
gattgtatccaagttttgcttataataaaccaaattatcttaagagtagcgatgcaagggtttcttttacaaacacaaagcataagagatgaagatttgatcgtgcacgttttaaccaaaaaccagctcaaaaccctctatcgtttctatggcaaacgccacagcgtgctgaatgtgggtcgtaaaattgattttgaagaagaaaacgatgataaatttttacccaagttaaggaatattttgcatttaggctatatttgggaaagagaaatggagcgcttgtttttttggcaacgcttttgcgctcttttgttcaagcatttagagggcgtgcattctttagatagcatctattttgacactttagatgatggggctagcaaactctccaaacagcaccccttaagagtgattttagaaatgtatgcagtccttttgaattttgaagggcgcttgcaaagttacaattcttgttttttatgcgatgcaaaattagagcgttctgtcgctttagcgcaagggtttattttagcgcacccctcttgcttgaaagctaaaagcttggatttagaaaaaatccaagcttttttccgcactcaaagcacgattgatctagaaacagaagaagtggaagaattatggcgcacgctgaatttagggttt

SEQ ID NO: 324 - DNA (genomic), 378 bp, Helicobacter pylori; double-stranded, circular
  misc_feature (B) LOCATION 1...378
  hypothetical: NO
  anti-sense: NO
gcagtagcgttttgcttaccgtattcaagcccaaagacttctttagccactgaattgcactatagcgctaatgaacgcatagaggctttttcaagcaatgacgaaaaaacagagagttttgaactgaatgagcaaagttttgaggcgattaaagagaatgcggcgaagtattcataccttaaggtttatttgaagaacgtagccttaaaagatagtgcgcctttagtgtttgtggatatgcccgggtttgatagccccatttcaagccacacccatgccattttggaatatttggaaaggggcgtgcattttgtcattctcacaagcgtagaagagggtaacctcactaaacgcatggttagggagttaaaaaccttt

SEQ ID NO: 325 - DNA (genomic), 501 bp, Helicobacter pylori; double-stranded, circular
  misc_feature (B) LOCATION 1...501
  hypothetical: NO
  anti-sense: NO
ttggagattgataaaacagaatgctctactcttttagcaagcattcaaaaacaacagcttgtgatacccgttgtggggaattttagcgcaggcaaaagcacgctattaaaccgctttttaggcagtagcgttttgcctaccggtatcacgccagagacttctttagccactgaattgcactatagcgctaatgaacgcatagaggctttttcaagcaatgacgaaaaaacagagagttttgaactgaatgagcaaagttttgaggcgattaaagagaatgcggcgaagtattcctaccttaaggtttatttgaataatgaagccttaaaagatagtgcgcctttagtgtttgtggatatgcccgggtttgatagccccatttcaagccacacccatgccattttggaatatttggaaaggggcgtgcattttgtcattctcacaagcgtagaagagggtaacctcactaaacgcatggttagggagttaaaaaccttttag

SEQ ID NO: 326 - DNA (genomic), 834 bp, Helicobacter pylori; double-stranded, circular
  misc_feature (B) LOCATION 1...834
  hypothetical: NO
  anti-sense: NO
ttgaaacgagcgttatggttaattttagggcttttttacgcgcttaatgcagagagctttaaagatgttttgactaaaggggattacactttttttaataaaaaggtggtttcgcctatcaaacgctatgcggatagatcggcgttttatctggggcttgggtatcaattagggagcattcagcacaactctagcaacttgaatttatcccaacgatttaataagagtcagattattttcagcgatagtctaagccctgtttttaaaaattcgtatgtgtctaatggtcttggcgttcaagtgggctataagtgggtgggtaagcatgaagagacgaaatggtttggcttcaggtgggggctgttttatgatttgagcgcttctctttatggctctcaagaatcgcagtctatcatcatttccacttacggcacttatatggatttattgcttaacgcttataatggggataagttttttgccgggttcaatctggggatcgcttttgctggagtgtatgacagattgagcgatgcgttattgtatcaaactcttcttcaaaacacttttggcgggaaagtgaatttaaacggcttccagtttttggtggatttaggggttcgtttagggaatgaacacaaccaatttggctttgggattaaaatccctacttattattttaaccattattattccatgaataacattagcaataatagtgaaaatgtcttaaaagttttacgatttttagaatacgggatcaacagcttgttgtatcaagttgatttcaggcgcaattactcggtttatttcaactacacttatagtttttaa

SEQ ID NO: 327 - DNA (genomic), 852 bp, Helicobacter pylori; double-stranded, circular
  misc_feature (B) LOCATION 1...852
  hypothetical: NO
  anti-sense: NO
aatttcaatcaaagggcttttttgaaacgagcgttatggttaattttagggcttttttacgcgcttaatgcagagagctttaaagatgttttgactaaaggggattacactttttttaataaaaaggtggtttcgcctatcaaacgctatgcggatagatcggcgttttatctggggcttgggtatcaattagggagcattcagcacaactctagcaacttgaatttatcccaacgatttaataagagtcagattattttcagcgatagtctaagccctgtttttaaaaattcgtatgtgtctaatggtcttggcgttcaagtgggctataagtgggtgggtaagcatgaagagacgaaatggtttggcttcaggtgggggctgttttatgatttgagcgcttctctttatggctctcaagaatcgcagtctatcatcatttccacttacggcacttatatggatttattgcttaacgcttataatggggataagttttttgccgggttcaatctggggatcgcttttgctggagtgtatgacagattgagcgatgcgttattgtatcaaactcttcttcaaaacacttttggcgggaaagtgaatttaaacggcttccagtttttggtggatttaggggttcgtttagggaatgaacacaaccaatttggctttgggattaaaatccctacttattattttaaccattattattccatgaataacattagcaataatagtgaaaatgtcttaaaagttttacgatttttagaatacgggatcaacagcttgttgtatcaagttgatttcaggcgcaattactcggtttatttcaactacacttatagtttt

SEQ ID NO: 328 - DNA (genomic), 534 bp, Helicobacter pylori; double-stranded, circular
  misc_feature (B) LOCATION 1...534
  hypothetical: NO
  anti-sense: NO
gggttggggtatcagcttagcgcgatcaacacgtcttttagcaccagttctatagataaatcgtatttcatgaccggcaatggttttggcgtggtgttgggggggaaatttgtggctaaaacgcaagctgtagagcatgtgggttttcgttacgggttgttttatgatcagaccttttcttctcacaaatcctatatttctacctatggtttagaatttagcggtttgtgggacgctttcaattcgccaaagatgtttttggggttggagtttggcttaggcatcgctggggcgacttacatgccaggaggggccatgcatgggattatcgctcaatatttaggcaaagaaaattcgcttttccaattgcttgtgaaagtgggttttcgttttggctttttccacaatgaaatcacctttgggttgaaattccctgtcattcctaacaaaaaaacggaaatcgttgatggcttgagcgcgaccactttatggcaacgcttgccggtagcctatttcaattatatctataatttt

SEQ ID NO: 329 - DNA (genomic), 663 bp, Helicobacter pylori; double-stranded, circular
  misc_feature (B) LOCATION 1...663
  hypothetical: NO
  anti-sense: NO
atgaataaaacaacaattaaaatattaatgggcatggcgttattatcatcgcttcaagccgcagaggcagagcttgatgaaaaatcaaaaaaacctaaatttgcggataggaatacgttttatttaggggttgggtatcagcttagcgcgatcaacacgtcttttagcaccagttctatagataaatcgtatttcatgaccggcaatggttttggcgtggtgttgggggggaaatttgtggctaaaacgcaagctgtagagcatgtgggttttcgttacgggttgttttatgatcagaccttttcttctcacaaatcctatatttctacctatggtttagaatttagcggtttgtgggacgctttcaattcgccaaagatgtttttggggttggagtttggcttaggcatcgctggggcgacttacatgccaggaggggccatgcatgggattatcgctcaatatttaggcaaagaaaattcgcttttccaattgcttgtgaaagtgggttttcgttttggctttttccacaatgaaatcacctttgggttgaaattccctgtcattcctaacaaaaaaacggaaatcgttgatggcttgagcgcgaccactttatggcaacgcttgccggtagcctatttcaattatatctataatttttag

SEQ ID NO: 330 - DNA (genomic), 690 bp, Helicobacter pylori; double-stranded, circular
  misc_feature (B) LOCATION 1...690
  hypothetical: NO
  anti-sense: NO
gtgaaaggcgagaaaaacgcttggtatctggggattagctatcaagtcggtcaggcttcacaaagcgttaaaaacccccccaaaagcagtgaatttaactatcctaagttccctgtgggtaaaaccgactatctggccgttatgcaaggcttagggcttactgtgggttataagcagtttttcggggagaaaagatggtttggtgcgcgctattacggctttatggattatgggcatgccgtgtttggagcgaacgctttgacatcagataatggtggggtgtgcaaactcaatgagccatgcgcgaccaaagtagggactatgggcaatctgtctgacatgttcacttatggtgtgggtattgacactttatacaatgtcattaataaggaagacgcgagttttggtttcttttttggggctcaaatcgcgggtaactcttggggtaatacgacaggggcctttttggaaactaaaagcccttataagcacacctcctatagccttgatccggcgattttccagttcctttttaatttagggattcgcacccatattggtcagcatcaagaatttgactttggcgtgaagattcctactatcaatgtttattattttaaccatgggaacttgagcttcacttaccgccgtcaatacagcctttatgtagggtatcgttacaatttctga

SEQ ID NO: 331 - DNA (genomic), 687 bp, Helicobacter pylori; double-stranded, circular
  misc_feature (B) LOCATION 1...687
  hypothetical: NO
  anti-sense: NO
gtgaaaggcgagaaaaacgcttggtatctggggattagctatcaagtcggtcaggcttcacaaagtgttaaaaacccccccaaaagtagtgaatttaactatcctaagttccctgtgggtaaaaccgactatctggccgttatgcaaggcttagggcttactgtgggttataagcagtttttcggggagaaaagatggtttggtgcgcgctattacggctttatggattatgggcatgccgtgtttggagcgaacgctttgacatcagataatggtggggtgtgcaaactcaatgagccatgcgcgaccaaagtagggactatgggcaatctgtctgacatgttcacttatggtgtgggtattgacactttatacaatgtcattaataaggaagacgcgagttttggtttcttttttggggctcaaatcgcgggtaactcttggggtaatacgacaggggcctttttggaaactaaaagcccttataagcacacctcctatagccttgatccggcgattttccagttcctttttaatttagggattcgcacccatattggtcagcatcaagaatttgactttggcgtgaagattcctactatcaatgtttattattttaaccatgggaacttgagcttcacttaccgccgtcaatacagcctttatgtagggtatcgttacaatttc

SEQ ID NO: 332 - DNA (genomic), 684 bp, Helicobacter pylori; double-stranded, circular
  misc_feature (B) LOCATION 1...684
  hypothetical: NO
  anti-sense: NO
aaaggcgagaaaaacgcttggtatctggggattagctatcaagtcggtcaggcttcacaaagtgttaaaaacccccccaaaagtagtgaatttaactatcctaagttccctgtgggtaaaaccgactatctggccgttatgcaaggcttagggcttactgtgggttataagcagtttttcggggagaaaagatggtttggtgcgcgctattacggctttatggattatgggcatgccgtgtttggagcgaacgctttgacatcagataatggtggggtgtgcaaactcaatgagccatgcgcgaccaaagtagggactatgggcaatctgtctgacatgttcacttatggtgtgggtattgacactttatacaatgtcattaataaggaagacgcgagttttggtttcttttttggggctcaaatcgcgggtaactcttggggtaatacgacaggggcctttttggaaactaaaagcccttataagcacacctcctatagccttgatccggcgattttccagttcctttttaatttagggattcgcacccatattggtcagcatcaagaatttgactttggcgtgaagattcctactatcaatgtttattattttaaccatgggaacttgagcttcacttaccgccgtcaatacagcctttatgtagggtatcgttacaatttc

SEQ ID NO: 333 - DNA (genomic), 813 bp, Helicobacter pylori; double-stranded, circular
  misc_feature (B) LOCATION 1...813
  hypothetical: NO
  anti-sense: NO
atgaaaaagtttgtagtgtttaaaacgctctgtttatcggtagtgttaggtaatagtcttgtggcagcagaaggtagcacagaagtgcaaaagcaattggaaaagccaaaagattataaagcagtgaaaggcgagaaaaacgcttggtatctggggattagctatcaagtcggtcaggcttcacaaagcgttaaaaacccccccaaaagcagtgaatttaactatcctaagttccctgtgggtaaaaccgactatctggccgttatgcaaggcttagggcttactgtgggttataagcagtttttcggggagaaaagatggtttggtgcgcgctattacggctttatggattatgggcatgccgtgtttggagcgaacgctttgacatcagataatggtggggtgtgcaaactcaatgagccatgcgcgaccaaagtagggactatgggcaatctgtctgacatgttcacttatggtgtgggtattgacactttatacaatgtcattaataaggaagacgcgagttttggtttcttttttggggctcaaatcgcgggtaactcttggggtaatacgacaggggcctttttggaaactaaaagcccttataagcacacctcctatagccttgatccggcgattttccagttcctttttaatttagggattcgcacccatattggtcagcatcaagaatttgactttggcgtgaagattcctactatcaatgtttattattttaaccatgggaacttgagcttcacttaccgccgtcaatacagcctttatgtagggtatcgttacaatttctga

SEQ ID NO: 334 - DNA (genomic), 171 bp, Helicobacter pylori; double-stranded, circular
  misc_feature (B) LOCATION 1...171
  hypothetical: NO
  anti-sense: NO
caagcgatttggggcataacttcttcaggctatcttaaagattacatagggaaatgcgatgtgagtggtgtgagtagttcaaatatgacaccgcaaaatatgaataccacttgggggaaaggctgcgccggcgtggaaagaaactcaaacttcgttaaaagcaagcaccac

SEQ ID NO: 335 - DNA (genomic), 198 bp, Helicobacter pylori; double-stranded, circular
  misc_feature (B) LOCATION 1...198
  hypothetical: NO
  anti-sense: NO
ctgcgcaaaacctttggactcagagcgcaaacgattgtaaatacccttaaggattattgccccatgttgatagcgaaatctagtagtaatggtggaactaatggcgcaaacaccccttcatggcaaacagccggtggcgggctaaaattcatgttgcgacttttgggtgcggagtttagtggctatttcagacatgat

SEQ ID NO: 336 - DNA (genomic), 216 bp, Helicobacter pylori; double-stranded, circular
  misc_feature (B) LOCATION 1...216
  hypothetical: NO
  anti-sense: NO
ttagtaacgctcaaaaaatcgttcaagaaaacccaacaacttaacgccaaccaacccaaaaatatcacccaacccaataatttcaaccttaactctcctggcagtcttacggctttagctcaaagcatgctcaaaaacgctcaatctcaaacagaaattttaaaattagccaatcaggtagcaagcgatttggggcataacttcttcaggctatct

SEQ ID NO: 337 - DNA (genomic), 426 bp, Helicobacter pylori; double-stranded, circular
  misc_feature (B) LOCATION 1...426
  hypothetical: NO
  anti-sense: NO
atgggctatgcggtcgtatgcggaggttatattaaaaaaccgggcgaaaacaatcaaaaaaatttccactacaccgatgagaatggcaacggcactacaatcaattgcggtgggagcacaaatagtaatggcactcatagtcctaatggcacaaatacattaaaagcagacaaaaatgtttctctatctattgagcaatatgaaaaaatccatgaagcctatcaaatcctttcaaaggctttaaaacaagctgggcttgctcctttaaatagcaaaggggaaaagttagaagcgcatgtaaccacatcaaaggatcaacaaggaacatccagtgaccaaactacaaccacaacttctgtaattgatacgactaatgatgcgcaaaatcttttgactcagagcgcaaacgattgtcaatacccttaa

SEQ ID NO: 338 - DNA (genomic), 432 bp, Helicobacter pylori; double-stranded, circular
  misc_feature (B) LOCATION 1...432
  hypothetical: NO
  anti-sense: NO
ttagggttatggaatagcatgggctatgcggtcgtatgcggaggttatattaaaaaaccgggcgaaaacaatcaaaaaaatttccactacaccgatgagaatggcaacggcactacaatcaattgcggtgggagcacaaatagtaatggcactcatagtcctaatggcacaaatacattaaaagcagacaaaaatgtttctctatctattgagcaatatgaaaaaatccatgaagcctatcaaatcctttcaaaggctttaaaacaagctgggcttgctcctttaaatagcaaaggggaaaagttagaagcgcatgtaaccacatcaaaggatcaacaaggaacatccagtgaccaaactacaaccacaacttctgtaattgatacgactaatgactgcgcaaaacctttggactcagagcgcaaacgattg

SEQ ID NO: 339 - DNA (genomic), 429 bp, Helicobacter pylori; double-stranded, circular
  misc_feature (B) LOCATION 1...429
  hypothetical: NO
  anti-sense: NO
gggttatggaatagcatgggctatgcggtcgtatgcggaggttatattaaaaaaccgggcgaaaacaatcaaaaaaatttccactacaccgatgagaatggcaacggcactacaatcaattgcggtgggagcacaaatagtaatggcactcatagtcctaatggcacaaatacattaaaagcagacaaaaatgtttctctatctattgagcaatatgaaaaaatccatgaagcctatcaaatcctttcaaaggctttaaaacaagctgggcttgctcctttaaatagcaaaggggaaaagttagaagcgcatgtaaccacatcaaaggatcaacaaggaacatccagtgaccaaactacaaccacaacttctgtaattgatacgactaatgactgcgcaaaacctttggactcagagcgcaaacgattg

SEQ ID NO: 340 - DNA (genomic), 459 bp, Helicobacter pylori; double-stranded, circular
  misc_feature (B) LOCATION 1...459
  hypothetical: NO
  anti-sense: NO
atgttgatagcgaaatctagtagtaatggtggaactaatggcgcaaacaccccttcatggcaaacagccggtggcggcaaaaattcatgtgcgacttttggtgcggagtttagtgctatttcagacatgattagtaacgctcaaaaaatcgttcaagaaacccaacaacttaacgccaaccaacccaaaaatatcacccaacccaataatttcaaccttaactctcctggcagtcttacggctttagctcaaagcatgctcaaaaacgctcaatctcaaacagaaattttaaaattagccaatcaggtagcaagcgattttgacaaactttcttcaggctatcttaaagattacatagggaaatgcgatgtgagtggtgtgagtagttcaaatatgacaccgcaaaatatgaataccacttggggggaaaggctgcgccggcgtggaaagaaactctaa

SEQ ID NO: 341 - DNA (genomic), 1932 bp, Helicobacter pylori; double-stranded, circular
  misc_feature (B) LOCATION 1...1932
  hypothetical: NO
  anti-sense: NO
atgaaaaaaacgaaaaaaacgattctgctttctctaactcttgcggcgtcattgctccatgctgaagacaacggcgtttttttaagcgtgggctatcaaatcggtgaagcggttcaaaaggtgaaaaacgccgacaaggtacaaaagctttcagacgtttatgaacaattaagcaagcttttagccaacgataatggcactagctcaaaaacaagcgcgcaagcgatcaatcaagcggttaataatttgaatgaaagcgcaaaaactttagccggtgggacaaccaattcccctgcctatcaagccacgcttttagcattgagatcggcgttagggttatggaatagcatgggctatgcggtcgtatgcggaggttatattaaaaaaccgggcgaaaacaatcaaaaaaatttccactacaccgatgagaatggcaacggcactacaatcaattgcggtgggagcacaaatagtaatggcactcatagtcctaatggcacaaatacattaaaagcagacaaaaatgtttctctatctattgagcaatatgaaaaaatccatgaagcctatcaaatcctttcaaaggctttaaaacaagctgggcttgctcctttaaatagcaaaggggaaaagttagaagcgcatgtaaccacatcaaaggatcaacaaggaacatccagtgaccaaactacaaccacaacttctgttattgatacgactaatgatgcgcaaaatcttttgactcaagcgcaaacgattgtcaatacccttaaagattattgccccatgttgatagcgaaatctagtagtaatggtggaactaatggcgcaaacaccccttcatggcaaacagccggtggcggcaaaaattcatgtgcgacttttggtgcggagtttagtgctatttcagacatgattagtaacgctcaaaaaatcgttcaagaaacccaacaacttaacgccaaccaacccaaaaatatcacccaacccaataatttcaaccttaactctcctggcagtcttacggctttagctcaaagcatgctcaaaaacgctcaatctcaaacagaaattttaaaattagccaatcaggtagcaagcgattttgacaaactttcttcaggctatcttaaagattacatagggaaatgcgatgtgagtggtgtgagtagttcaaatatgacaccgcaaaatatgaataccacttgggggaaaggctgcgcgggcgtggaagaaactctaacttcgttaaaagcaagcaccactgattttaacaaccagacaacgccccaactcgatcaagcgcaaaccctagccaatacccttactcaagaactcggcaataaccctttcaaacgagtgggtatcattggctctcaaaccaataacggggcgatgaatggccttggggtgcaagcgggttataagcaattctttggtcaaaaaagaaggtgggggttaaggtattacggcttttttgactacaaccatacctacatcaaatccagcttttttaactcgtcttctgacgttttgacttatggggtgggtagcgatttattgtttaatttcatcaatgataaaaacaccaatttcttaggcaagaacaataagatttctgtggggctttttggaggtatcgccttagcagggacttcgtggcttaattctcaattcgtgaatttaaaaaccatcagcaatgtttatagcgctaaagtgaatacggctaatttccaattcttattcaatttaggcttgagaaccaatctcgctaggcctaagaaaaaagacagcgatcattccgcgcaacatggcatggaattgggcgtgaaaatccctaccattaacacgaattactattcttacttgggaactaaactagaataccgaagactctatagcgtgtatctcaattatgtgtttgcgtattga

SEQ ID NO: 342 - DNA (genomic), 639 bp, Helicobacter pylori; double-stranded, circular
  misc_feature (B) LOCATION 1...639
  hypothetical: NO
  anti-sense: NO
atggcttatgggctctatcgctctaaagcagtgattggcggagtgattgatgaaatgcaaactaaagtgaatcaagtctatcaaatgggctttgctaggaattttttggagcataactctaattctaataacatgaacggctttggcgtgaaaatgggctataagcaatttttcggcaaaaagcgcatgtttgggcttaggtattatggtttttatgattttggttacgctcaatttggcacagaatcttctttagtgaaagccaccctctctagctatggagcgggcacagactttctttataatgtttttacccgaaaaagagggactgaagcgatagatataggtttttttgccggtatccaacttgcagggcaaacctggaaaacgaattttttagatcaagtggatggcaaccatcttaaacctaaggacacttctttccaattcctttttgatttgggcataaggaccaatttttccaaaatcgctcatcaaaaaagatcccgtttttctcaagggatagaatttggccttaaaataccggtgctttatcacacctattaccaatcagaaggcgttacagcgaagtatagaagagactttagtttttatgtgggctacaacataggcttttga

SEQ ID NO: 343 - DNA (genomic), 834 bp, Helicobacter pylori; double-stranded, circular
  misc_feature (B) LOCATION 1...834
  hypothetical: NO
  anti-sense: NO
cagatgcaagacgtgatcaattacggggaaagcttgcttagtaacaccgtagcgtatggggatttcatcaccaattgggtcgccccctatttggatttaaacaataaaggtttgaatttcttgcctaattatggggggcaattgaatggcgctaataatcaaaccccacaattaaccccacaacaagcccaacaagaacaaaaagtgatcatgaaccaattagagcaagccacaaacgcccccacccccgcgcaaataaacaggattttagccaacccctattcccccacggcaaaaactttaatggcttatgggctctatcgctctaaagcagtgattggcggagtgattgatgaaatgcaaactaaagtgaatcaagtctatcaaatgggctttgctaggaattttttggagcatacactctacattctaataacactgaacggctttggcgtgaaaatgggctataagcaatttttcggcaaaaagcgcatgtttgggcttaggtattatggtttttatgattttggttacgctcaatttggcacagaatcttctttagtgaaagccaccctctctagctatggagcgggcacagactttctttataatgtttttacccgaaaaagagggactgaagcgatagatataggtttttttgccggtatccaacttgcagggcaaacctggaaaacgaattttttagatcaagtggatggcaaccatcttaaacctaaggacacttctttccaattcctttttgatttgggcataatggaccaaatttttccaaaatcgctcatctcaaaaaagaatctcgtttttctcaaggga

SEQ ID NO: 344 - DNA (genomic), 840 bp, Helicobacter pylori; double-stranded, circular
  misc_feature (B) LOCATION 1...840
  hypothetical: NO
  anti-sense: NO
tataaccagatgcaagacgtgatcaattacggggaaagcttgcttagtaacaccgtagcgtatggggatttcatcaccaattgggtcgccccctatttggatttaaacaataaaggtttgaatttcttgcctaattatggggggcaattgaatggcgctaataatcaaaccccacaattaaccccacaacaagcccaacaagaacaaaaagtgatcatgaaccaattagagcaagccacaaacgcccccacccccgcgcaaataaacaggattttagccaacccctattcccccacggcaaaaactttaatggcttatgggctctatcgctctaaagcagtgattggcggagtgattgatgaaatgcaaactaaagtgaatcaagtctatcaaatgggctttgctaggaattttttggagcatacactctacattctaataacactgaacggctttggcgtgaaaatgggctataagcaatttttcggcaaaaagcgcatgtttgggcttaggtattatggtttttatgattttggttacgctcaatttggcacagaatcttctttagtgaaagccaccctctctagctatggagcgggcacagactttctttataatgtttttacccgaaaaagagggactgaagcgatagatataggtttttttgccggtatccaacttgcagggcaaacctggaaaacgaattttttagatcaagtggatggcaaccatcttaaacctaaggacacttctttccaattcctttttgatttgggcataatggaccaaatttttccaaaatcgctcatctcaaaaaagaatctcgtttttctcaaggga

SEQ ID NO: 345 - DNA (genomic), 975 bp, Helicobacter pylori; double-stranded, circular
  misc_feature (B) LOCATION 1...975
  hypothetical: NO
  anti-sense: NO
aaagaaaaggataaccccttgcaaaactttgtttttaataaaaaatggctcatctattctagcctactccccttattttttcttaaccctttaatggcagaagacgatgggttttttatgggggtgagttatcaaacttctttggccgttcaaagggtggataactcagggcttaacgccagtcaagacgcatccacttatatccgccaaaacgctatcgctctagaatctgcggcggtgcctttagcctattatttagaagcgatgggccaacaaacgagagtcttaatgcaaatgctctgccctgatccttctaaaagatgtttgctctatgcagggggctatcaaaacggacaaaataataacggcgatacaggcaacaaccccccaagaggcaatgtcaatgccacctttgatatgcaatctctagtcaataatttaaacaagctcacccaactcatcggcgaaactttaatccgtaaccctgaaaatcttcctaactccaaagtctttaacgtcaaatttggcaatcaaagcactgttattgcattgcctgagggtctagccaataccatggacgctttaaacaatgacatcaccaacgctttaaccacgctctggtataaccaaaccttaacgaataaatcttttagcacccctagtaacacttctgtgaattttagcccccaagtcttgcaacaccttttacaagacggcttagccacagcaaataataatcaaaccatttgcagcactcaaaaccaatgcaccgccactaatgaagctaaatctatcgctcaaaacgcccaaaacatcttccaggctttaatgcaagcagggattttagggggcttagccaatgaaaagcaatttggcttcacttacaacaaagcccccaatggcggcgattcccaacaaggctattcaaagctttgcggcccgggtattacaccaaaacgacaacaccacgcaagc

SEQ ID NO: 346 - DNA (genomic), 978 bp, Helicobacter pylori; double-stranded, circular
  misc_feature (B) LOCATION 1...978
  hypothetical: NO
  anti-sense: NO
aaagaaaaggataaccccttgcaaaactttgtttttaataaaaaatggctcatctattctagcctactccccttattttttcttaaccctttaatggcagaagacgatgggttttttatgggggtgagttatcaaacttctttggccgttcaaagggtggataactcagggcttaacgccagtcaagacgcatccacttatatccgccaaaacgctatcgctctagaatctgcggcggtgcctttagcctattatttagaagcgatgggccaacaaacgagagtcttaatgcaaatgctctgccctgatccttctaaaagatgtttgctctatgcagggggctatcaaaacggacaaaataataacggcgatacaggcaacaaccccccaagaggcaatgtcaatgccacctttgatatgcaatctctagtcaataatttaaacaagctcacccaactcatcggcgaaactttaatccgtaaccctgaaaatcttcctaactccaaagtctttaacgtcaaatttggcaatcaaagcactgttattgcattgcctgagggtctagccaataccatggacgctttaaacaatgacatcaccaacgctttaaccacgctctggtataaccaaaccttaacgaataaatcttttagcacccctagtaacacttctgtgaattttagcccccaagtcttgcaacaccttttacaagacggcttagccacagcaaataataatcaaaccatttgcagcactcaaaaccaatgcaccgccactaatgaagctaaatctatcgctcaaaacgcccaaaacatcttccaggctttaatgcaagcagggattttagggggcttagccaatgaaaagcaatttggcttcacttacaacaaagcccccaatggcggcgattcccaacaaggctattcaaagctttgcggcccgggtattacaccaaaacgacaacaccacgcaagcgcc

SEQ ID NO: 347 - DNA (genomic), 2094 bp, Helicobacter pylori; double-stranded, circular
  misc_feature (B) LOCATION 1...2094
  hypothetical: NO
  anti-sense: NO
ttgcaaaactttgtttttaataaaaaatggctcatctattctagcctactccccttattttttcttaaccctttaatggcagaagacgatgggttttttatgggggtgagttatcaaacttctttggccgttcaaagggtggataactcagggcttaacgccagtcaagacgcatccacttatatccgccaaaacgctatcgctctagaatctgcggcggtgcctttagcctattatttagaagcgatgggccaacaaacgagagtcttaatgcaaatgctctgccctgatccttctaaaagatgtttgctctatgcagggggctatcaaaacggacaaaataataacggcgatacaggcaacaaccccccaagaggcaatgtcaatgccacctttgatatgcaatctctagtcaataatttaaacaagctcacccaactcatcggcgagactttaatccgtaaccctgaaaatcttcctaactccaaagtctttaacgtcaaatttggcaatcaaagcactgttattgcattgcctgagggtctagccaataccatggacgctttaaacaatgacatcaccaacgctttaaccacgctctggtataaccaaaccttaacgaataaatcttttagcacccctagtaacacttctgtgaattttagcccccaagtcttgcaacaccttttacaagacggcttagccacagcaaataataatcaaaccatttgcagcactcaaaaccaatgcaccgccactaatgaagctaaatctatcgctcaaaacgcccaaaacatcttccaggctttaatgcaagcagggattttagggggcttagccaatgaaaagcaatttggcttcacttacaacaaagcccccaatggcagcgattcccaacaaggctatcaaagctttagcggcccgggttattacaccaaaaacgacaacaccacgcaagcgcccttaaaagcattacccgctggagcgacaattggatcaggcaatggccaatacacctaccaccccagctcggcagtctattatttagccgatagcatcatcgctaatggcatcaccgcttctatgattttttcaggcatgcaaaatttcgccaataaagccgctaaactgataggcacttcaagctataaccagatgcaagatgtgatcaattacggggaaagcttgcttagtaacaccgtagcgtatggggatttcatcaccaattgggtcgccccctatttggatttaaacaataaaggtttgaatttcttgcctaattatggggggcaattgaatggcgctaataatcaaaccccacaattaaccccacaacaagcccaacaagaacaaaaagtgatcatgaaccaattagagcaagccacaaacgcccccacccccgcgcaaataaacaggattttagccaacccctattcccccacggcaaaaactttaatggcttatgggctctatcgctctaaagcagtgattggcggagtgattgatgaaatgcaaactaaagtgaatcaagtctatcaaatgggctttgctaggaattttttggagcataactctaattctaataacatgaacggctttggcgtgaaaatgggctataagcaatttttcggcaaaaagcgcatgtttgggcttaggtattatggtttttatgattttggttacgctcaatttggcacagaatcttctttagtgaaagccaccctctctagctatggagcgggcacagactttctttataatgtttttacccgaaaaagagggactgaagcgatagatataggtttttttgccggtatccaacttgcagggcaaacctggaaaacgaattttttagatcaagtggatggcaaccatcttaaacctaaggacacttctttccaattcctttttgatttgggcataaggaccaatttttccaaaatcgctcatcaaaaaagatctcgtttttctcaagggatagaatttggccttaaaataccggtgctttatcacacctactaccaatcagaaggcgttacagcgaagtatagaagagcctttagtttttatgtgggctacaacataggcttttga

SEQ ID NO: 348 - DNA (genomic), 2094 bp, Helicobacter pylori; double-stranded, circular; identical to SEQ ID NO: 347
  misc_feature (B) LOCATION 1...2094
  hypothetical: NO
  anti-sense: NO

SEQ ID NO: 349 - DNA (genomic), 405 bp, Helicobacter pylori; double-stranded, circular
  misc_feature (B) LOCATION 1...405
  hypothetical: NO
  anti-sense: NO
aacccattcttcacaatcacagccaaactcctttccaacacccaaagcgcgtttgatcagggcatcgctctaagctctaatatcattagtgcagtcaatagcctaaaccctagcaacaactcccaagaagtcaaagcccagctccaaaacaccgcgcaatccatgacagaattgttgcaacaaattgaacacagcatcactaaaaccactagcaccacttacgcacaatccttactctccaatctgaccgatgcggtgaatgcatctagcaataataccacttatgtgagcgctcttgttaacgctttaaacactttaggggtgggggttttccccaccacaacctcaacgcatgtggtgctaaacccaccggacaagtcgtattctatccaactaattcccttt

SEQ ID NO: 350 - DNA (genomic), 492 bp, Helicobacter pylori; double-stranded, circular
  misc_feature (B) LOCATION 1...492
  hypothetical: NO
  anti-sense: NO
acggcgggtaaaagcacccgacacggcatgagcaatggcttaggggttggcataggctataaatacttctttggtaaggctaggaaattaggccttaggcattattttttctttgattacggctttagtgaaataggcctagccaatcaaagcgtgaaagcgaatatctttgcttatggggtaggcacggattttttatggaatctattcaggaggacttacaacactaaagcgttgaattttgggctatttgccggggtccaactgggcggtgcaacttggcttagttccttaaggcaacaaatcattgacaactgggggaacgctaatgacatccattcaacgaattttcaagtggcgctgaattttggggtgcgcaccaatttcgcggagtttaagcgttttgctaagaaattccacaatcaaggggtcatcagccaaaagagcgtggaatttgggatcaaggtgcctctcatcaatcaagcgtatttg

SEQ ID NO: 351 - DNA (genomic), 942 bp, Helicobacter pylori; double-stranded, circular
  misc_feature (B) LOCATION 1...942
  hypothetical: NO
  anti-sense: NO
ttgcacaacgctttgaatttccaagcctatcaaagcacgatagaacaatacaataacgctttaaagcaaatttcgtggattagttttagcgagcctaaaaacttgctcaaaaacacttccaataactaccaaatcggcacggttaccaacgatcaagggcaaaatatcagcgcctatgattgcacaagcgctaccggaagcctttctagcgatgcttctagtgggatttcatgctcagccacaagctccacaagcaacacaaatagttttgacaattctttagtcgctacctccaaagtccaaaccatcaacggcaaagagcagatcggcgtgaattcttttaatcttgtctctcaagtgtggagcgtttataactctttaaaaacttcagaagaaaatttgcaaaaaaacgccaaaatattatgcaacaatggatcacaatctgggacaagcccatgcaatatctcttcagggggtttgagcatcaccgggaacgcccaattgcaaggtattatacgcgctactaatgggactaccactaatactcaagctagtagcaacgcttccaaactaaaagcgatggttatggtgaataatgaagaagaagccgaaacgaccaatttcaatcacagcagtgggccaaccacactatcttctaacagaacggtgatgggagctttaaacaccgtattgcaaaatgtcagctatttccaacaaagcattcaaagcgcttttcacaaccaagaaaataatatccaagcttgggcgaacgcactttataacactaataaccctaatgggaatcaatcgcaaaatttagccactaacaataaccaagatttacgcatccaattaagggcgaatttttaccagctcatcgttaacataaaccaacaagtgcctacagacatgaacgctttaataatcaaagccaacaaaccc

SEQ ID NO: 352 - DNA (genomic), 1095 bp, Helicobacter pylori; double-stranded, circular
  misc_feature (B) LOCATION 1...1095
  hypothetical: NO
  anti-sense: NO
cgctttaaacactttaggggtgggggttttccccaccacaacctcaacgcatgtggtgctaaacccaccggacaagtcgtattctatccaactaattcccttttaggctctacttcttcaaacagcaataaccaacaacaatacaacaacacccttttaatgaacaccttacaaggggaattaagcactaacaatcaaaataaccccaatggttgcgccaatcaaatccagtgtttagagcaattcatccaaaatttaacccctttagccgcaacccccacttcaactaaccaggccaaccagcaagtccaagccatcgctcaaaaacttcaaagcgttgctatcaacgctttagacaacaatgcgatcaacaacaccacctataatttaaacaacttgcacaacgctttgaatttccaagcctatcaaagcacgatagaacaatacaataacgctttaaagcaaatttcgtggattagttttagcgagcctaaaaacttgctcaaaaacacttccaataactaccaaatcggcacggttaccaacgatcaagggcaaaatatcagcgcctatgattgcacaagcgctaccggaagcctttctagcgatgcttctagtgggatttcatgctcagccacaagctccacaagcaacacaaatagttttgacaattctttagtcgctacctccaaagtccaaaccatcaacggcaaagagcagatcggcgtgaattcttttaatcttgtctctcaagtgtggagcgtttataactctttaaaaacttcagaagaaaatttgcaaaaaaacgccaaaatattatgcaacaatggatcgcaatctgggacaagcccatgcaatagctcttcagggggtttgagcatcagcgggaacgcccaattgcaaaatattttaagccctactaatgggactaccactaatactcaagctaaaagcaacgcttccaaactaaaagcgatggtaatggtgaataatgaagaagaagccaaaacgaccaatttcaatcaaagcagtgggccaaccacacaatcttctaacagcacggtgatgggagctttaaacaccgtattgcaaaat

SEQ ID NO: 353 - DNA (genomic), 1293 bp, Helicobacter pylori; double-stranded, circular
  misc_feature (B) LOCATION 1...1293
  hypothetical: NO
  anti-sense: NO
tttcaaaaccaagaaaataatattcaagcttgggcgaacgcactttataacactagtaaccctaatgggaatcaatcgcaaaatttaaccactaacaataaccaagatttacgcatccaattaagggcgaatttttaccagctcatcaataccattaaccagcaagtgcctacagacatgaacgctttaattaatcaaagccaacaaacccagcaaacaagcggatcagcaagcaccacgaacaacgcatgcgcgagcggaatggggagtagtggcaactggtgctaccagcagtggtccgattctaaggcttattacagcgggttgcaaagcgctttagggtatcaaacacaagcgacaactcaaaatgggagcagtggtgggagcaatatcacctacaatgtccaacaaatcacgctcactagcggtggtttgctcaatcaaattatcacaaaccttaagagcgttaatgggggcagtaatgggggaagcagtgggaatggcactagtcaaatcaacacagcctaccaaatgctcacagacgctagcgatgggaaattagggacttataatagtagcaatagtagcaatagtagcaatagtggcaataataacggctatacgccatgcaatagcaccaacgggagcaatgggacgagtgggagcaattgttatgaacccaacaaacaacaaaacgccaccaccgcaaccaccacgaccgacagcaatttacaaaaagtctataatgacgcccaaaaaatagccaatattatcgccagctctgggaacaataaaggcgttgaaaacggcttaaaacaattctttgaagcgttaaaaagtaatagcagcagtcttagtaatttatgtggtaatggtagtagcggtagtagctctacttgctccggtgggcttatcaaccttttaggggcaatccccacaaacggagtgagcgatacgaataatttaattaatctgctcactgaattcattaaaaccgccgggtttatccaaaataaggatagtaatgtatctactagtcttacaagcgcttttcaagccattacgagcgctatttctcaagggtttcaagccttgcaaaacgatattagccctaatgcgattttgaccttgctccaagaaatcacttctaacaccaccaccattcagtcattctcgcaaaccttacggcagcttttaggggataaaaccttctttatggtgcaacaaaagctcattgatgcgatgattaacgccagtaatcaggatcgaaacgcgcaaatacaggccaatgag

SEQ ID NO: 354 - DNA (genomic), 3714 bp, Helicobacter pylori; double-stranded, circular
  misc_feature (B) LOCATION 1...3714
  hypothetical: NO
  anti-sense: NO
atgataaaaaaagctaaaaaatttataccactctttttaattggctccctcttagctgaagacaatggctggtatatgtctgtaggctatcaaatcggtggcacgcagcaattcatcaataacaaacaacttttagaaaatcaaaatatcatcaatagcatcacccaaagcgcgatcaatattgcagggcctactaccggcctaatcactttaagctctcaaagcgttattgacgctttaggctatggcgtgagtaacaccgtgggtaaccaattagaaggcatttctaatatcctgaatcaaattggcaaaagaaaagacttttattctagccgtcaaatctctagcatttcccagcaaatcatagggcttaaaggaagctctgatcccttaaaagcccattcttcacaaatcacagccaaactcctttccaacacccaaagcgcgtttgatcagggcatcgctctaagctctaatatcattagtgcagtcaatagcctaaaccctagcaacaactcccaagaagtcaaagcccagctccaaaacaccgcgcaatccatgacagaattgttgcaacaaattgaacacagcatcactaaaaccactagcaccacttacgcacaatccttactctccaatctgaccgatgcggtgaatgcatctagcaataataccacttatgtgagcgctcttgttaacgctttaaacactttaggggtgggggttttccccaccacaacctcaacgcatgtggtgctaaacccaccgggacaagtcgtattctatccaactaattcccttttaggctctacttcttcaaacagcaataaccaacaacaatacaacaacacccttttaatgaacaccttacaaggggaattaagcactaacaatcaaaataaccccaatggttgcgccaatcaaatccagtgtttagagcaattcatccaaaatttaacccctttagccgcaacccccacttcaactaaccaggccaaccagcaagtccaagccatcgctcaaaaacttcaaagcgttgctatcaacgctttagacaacaatgcgatcaacaacaccacctataatttaaacaacttgcacaacgctttgaatttccaagcctatcaaagcacgatagaacaatacaataacgctttaaagcaaatttcgtggattagttttagcgagcctaaaaacttgctcaaaaacacttccaataactaccaaatcggcacggttaccaacgatcaagggcaaaatatcagcgcctatgattgcacaagcgctaccggaagcctttctagcgatgcttctagtgggatttcatgctcagccacaagctccacaaataacacaaatagttttgacaattctttagtcgctacctccaaagtccaaaccatcaacggcaaagagcagatcggcgtgaattcttttaatcttgtctctcaagtgtggagcgtttataactctttaaaaacttcagaagaaaatttgcaaaaaaacgccaaaatattatgcaacaatggatcgcaatctgggacaagcccatgcaatagctcttcagggggtttgagcatcagcgggaacgcccaattgcaaaatattttaagccctactaatgggactaccactaatactcaagctaaaagcaacgcttccaaactaaaagcgatggtaatggtgaataatgaagaagaagccaaaacgaccaatttcaatcaaagcagtgggccaaccacacaatcttctaacagcacggtgatgggagctttaaacaccgtattgcaaaatgtcagcaatttccaacaaagcattcaaagcgcttttcaaaaccaagaaaataatatccaagcttgggcgaacgcactttataacactagtaaccctaatgggaatcaatcgcaaaatttaaccactaacaataaccaagatttacgcatccaattaagggcgaatttttaccagctcatcaataccattaaccagcaagtgcctacagacatgaacgctttaattaatcaaagccaacaaacccagcaaacaagcggatcagcaagcaccacgaacaacgcatgcgcgagcggaatggggagtagtggcaactggtgctaccagcagtggtccgattctaaggcttattacagcgggttgcaaagcgctttagggtatcaaacacaagcgacaactcaaaatgggagcagtggtgggagcaatatcacctacaatgtccaacaaatcacgctcactagcggtggtttgctcaatcaaattatcacaaaccttaagagcgttaatgggggcagtaatgggggaagcagtgggaatggcactagtcaaatcaacacagcctaccaaatgctcacagacgctagcgatgggaaattagggacttataatagtagcaatagtagcaatagtagcaatagtggcaataataacggctatacgccatgcaatagcaccaacgggagcaatgggacgagtgggagcaattgttatgaacccaacaaacaacaaaacgccaccaccgcaaccaccacgaccgacagcaatttacaaaaagtctataatgacgcccaaaaaatagccaatattatcgccagctctgggaacaataaaggcgttgaaaacggcttaaaacaattctttgaagcgttaaaaagtaatagcagcagtcttagtaatttatgtggtaatggtagtagcggtagtagctctacttgctccggtgggcttatcaaccttttaggggcaatccccacaaacggagtgagcgatacgaataatttaattaatctgctcactgaattcattaaaaccgccgggtttatccaaaataatgatagtaatgtatctactagtcttacaagcgcttttcaagccattacgagcgctatttctcaagggtttcaagccttgcaaaacgatattagccctaatgcgattttgaccttgctccaagaaatcacttctaacaccaccaccattcagtcattctcgcaaaccttacggcagcttttaggggataaaaccttctttatggtgcaacaaaagctcattgatgcgatgattaacgccagaaatcaggttcaaaacgcgcaaaatcaagccaataactacggctctcaacccgttttaagccagtatgcggccggtaaaagcacccaacacggcatgagcaatggcttaggggttggcataggctataaatacttctttggtaaggctaggaaattaggccttaggcattattttttctttgattacggctttagtgaaataggcctagccaatcaaagcgtgaaagcgaatatctttgcttatggggtaggcacggattttttatggaatctattcaggaggacttacaacactaaagcgttgaattttgggctatttgccggggtccaactgggcggtgcaacttggcttagttccttaaggcaacaaatcattgacaactgggggaacgctaatgacatccattcaacgaattttcaagtggcgctgaattttggggtgcgcaccaatttcgcggagtttaagcgttttgctaagaaattccacaatcaaggggtcatcagccaaaagagcgtggaatttgggatcaaggtgcctctcatcaatcaagcgtatttgaatagtgctggggctgatgtgagctacaggaggctttatactttctatatcaattacatcatggggttttaa

SEQ ID NO: 355 - DNA (genomic), 471 bp, Helicobacter pylori; double-stranded, circular
  misc_feature (B) LOCATION 1...471
  hypothetical: NO
  anti-sense: NO
atgattaaaagaattgcttgtattttaagcttgagcgcgagtttagcgttagctggcgaagtgaatgggtttttcatgggtgcgggttatcaacaaggtcgttatggcccttataacagcaattactctgattggcgtcatggcaatgacctttatggtttgaatttcaaattaggttttgtaggctttgccaataaatggtttggggctagggtgtatggctttttagattggtttaacacttcagggactgaacacaccaaaaccaatttgctcacctatggcggcggtggcgatttgattgtcaatctcattcctttggataaattcgctctaggtctcattggtggcgttcaattagccggaaacacttggatgttcccttatgatgtcaatcaaaccagattccagttcttatggaatttaggcggaagaatgcgtgttggggatrcagtgcgtttgaagcgggcg

SEQ ID NO: 356 - DNA (genomic), 561 bp, Helicobacter pylori; double-stranded, circular
  misc_feature (B) LOCATION 1...561
  hypothetical: NO
  anti-sense: NO
atgattaaaagaattgcttgtattttaagcttgagcgcgagtttagcgttagctggcgaagtgaatgggtttttcatgggtgcgggttatcaacaaggtcgttatggcccttataacagcaattactctgattggcgtcatggcaatgacctttatggtttgaatttcaaattaggttttgtaggctttgccaataaatggtttggggctagggtgtatggctttttagattggtttaacacttcagggactgaacacaccaaaaccaatttgctcacctatggcggcggtggcgatttgattgtcaatctcattcctttggataaattcgctctaggtctcattggtggcgttcaattagccggaaacacttggatgttcccttatgatgtcaatcaaaccagattccagttcttatggaatttaggcggaagaatgcgtgttggggatcgcagtgcgtttgaagcgggcgtgaaattccctatggttaatcagggtagcaaagatgtagggcttatccgctactattcttggtatgtggattatgtcttcactttctag

SEQ ID NO: 357 - DNA (genomic), 561 bp, Helicobacter pylori; double-stranded, circular; identical to SEQ ID NO: 356
  misc_feature (B) LOCATION 1...561
  hypothetical: NO
  anti-sense: NO

SEQ ID NO: 358 - DNA (genomic), 591 bp, Helicobacter pylori; double-stranded, circular
  misc_feature (B) LOCATION 1...591
  hypothetical: NO
  anti-sense: NO
ggtgtaactttaattcaacaagaaggatttattatgattaaaagaattgcttgtattttaagcttgagcgcgagtttagcgttagctggcgaagtgaatgggtttttcatgggtgcgggttatcaacaaggtcgttatggcccttataacagcaattactctgattggcgtcatggcaatgacctttatggtttgaatttcaaattaggttttgtaggctttgccaataaatggtttggggctagggtgtatggctttttagattggtttaacacttcagggactgaacacaccaaaaccaatttgctcacctatggcggcggtggcgatttgattgtcaatctcattccttcggataaattcgctctaggtctcattggtggcgttcaattagccggaaacacttggatgttcccttatgatgtcaatcaaaccagattccagttcttatggaatttaggcggaagaatgcgtgttggggatcgcagtgcgtttgaagcgggcgtgaaattccctatggttaatcagggtagcaaagatgtagggcttatccgctactattcttggtatgtggattatgtcttcactttc

SEQ ID NO: 359 - DNA (genomic), 813 bp, Helicobacter pylori; double-stranded, circular
  misc_feature (B) LOCATION 1...813
  hypothetical: NO
  anti-sense: NO
atgaaaaagtttgtagctttagggcttctatccgcggttttaagctcttcgttgttagccgaaggtgatggtgtttatatagggactaattatcagcttggacaagcccgtttgaatagcaatatttataatacaggggattgcacagggagtgttgtaggttgccccccaggtcttaccgctaataagcataatccaggaggcaccaatatcaattggcactccaaatacgctaatggggctttgaatggttttgggttgaatgtgggttataagaaattcttccaattcaagtcgctagatatgacaagcaagtggtttggttttagagtgtatgggctttttgattacgggcatgccgatttaggtaaacaagtttatgcacctaataaaatccagttggatatggtctcttggggtgtggggagcgatttgttagctgatattattgataaagacaacgcttcttttggtatttttggtggggtcgctatcggcggtaacacttggaaaagctctgcagcaaactattggaaagagcaaatcattgaagccaaaggtcctgatgtttgtacccctacttattgtaaccctaatgccccttatagcaccaacacttcaaccgtcgcttttcaagtgtggttgaattttggggtgagagccaatatctacaagcataatggcgtggaatttggcgtgagagtgccgctactcatcaataaatttttgagcgcgggtcctaacgctactaacctttattaccatttgaaacgggattattcgctttatttggggtataactacactttttaa

SEQ ID NO: 360 - DNA (genomic), 822 bp, Helicobacter pylori; double-stranded, circular
  misc_feature (B) LOCATION 1...822
  hypothetical: NO
  anti-sense: NO
atggaatttatgaaaaagtttgtagctttagggcttctatccgcggttttaagctcttcgttgttagccgaaggtgatggtgtttatatagggactaattatcagcttggacaagcccgtttgaatagcaatatttataatacaggggattgcacagggagtgttgtaggttgccccccaggtcttaccgctaataagcataatccaggaggcaccaatatcaattggcactccaaatacgctaatggggctttgaatggttttgggttgaatgtgggttataagaaattcttccaattcaagtcgctagatatgacaagcaagtggtttggttttagagtgtatgggctttttgattacgggcatgccgatttaggtaaacaagtttatgcacctaataaaatccagttggatatggtctcttggggtgtggggagcgatttgttagctgatattattgataaagacaacgcttcttttggtatttttggtggggtcgctatcggcggtaacacttggaaaagctctgcagcaaactattggaaagagcaaatcattgaagccaaaggtcctgatgtttgtacccctacttattgtaaccctaatgccccttatagcaccaacacttcaaccgtcgcttttcaagtgtggttgaattttggggtgagagccaatatctacaagcataatggcgtggaatttggcgtgagagtgccgctactcatcaataaatttttgagcgcgggtcctaacgctactaacctttattaccatttgaaacgggattattcgctttatttggggtataactacactttttaa

SEQ ID NO: 361 - DNA (genomic), 822 bp, Helicobacter pylori; double-stranded, circular; identical to SEQ ID NO: 360
  misc_feature (B) LOCATION 1...822
  hypothetical: NO
  anti-sense: NO

SEQ ID NO: 362 - DNA (genomic), 831 bp, Helicobacter pylori; double-stranded, circular
  misc_feature (B) LOCATION 1...831
  hypothetical: NO
  anti-sense: NO
gaatgtaaaggaatggaatttatgaaaaagtttgtagctttagggcttctatccgcggttttaagctcttcgttgttagccgaaggtgatggtgtttatatagggactaattatcagcttggacaagcccgtttgaatagcaatatttataatacaggggattgcacagggagtgttgtaggttgccccccaggtcttaccgctaataagcataatccaggaggcaccaatatcaattggcactccaaatacgctaatggggctttgaatggttttgggttgaatgtgggttataagaaattcttccaattcaagtcgctagatatgacaagcaagtggtttggttttagagtgtatgggctttttgattacgggcatgccgatttaggtaaacaagtttatgcacctaataaaatccagttggatatggtctcttggggtgtggggagcgatttgttagctgatattattgataaagacaacgcttcttttggtatttttggtggggtcgctatcggcggtaacacttggaaaagctctgcagcaaactattggaaagagcaaatcattgaagccaaaggtcctgatgtttgtacccctacttattgtaaccctaatgccccttatagcaccaacacttcaaccgtcgcttttcaagtgtggttgaattttggggtgagagccaatatctacaagcataatggcgtggaatttggcgtgagagtgccgctactcatcaataaatttttgagcgcgggtcctaacgctactaacctttattaccatttgaaacgggattattcgctttatttggggtataactacactttt

SEQ ID NO: 363 - DNA (genomic), 372 bp, Helicobacter pylori; double-stranded, circular
  misc_feature (B) LOCATION 1...372
  hypothetical: NO
  anti-sense: NO
aaaaaacccttttactctctctctctcgcttcatcgcttttaaacgctgaagacaacggcttttttatcagcgcgggctatcaaatcggtgaagcggtgcaaatggtgaaaaacaccggcgaattgaaaaacttgaacgacaaatacgagcagttaagccaatctttagcccaactggcttcgttaaaaaaaagcattcaaacggcgaacaacattcaggctgtcaacaatgctttaagcgatttaaaaagctttgcgagtaacaaccacacaaacaaagaaacatcgcccatctacaacacgcgcaagctgttatcacttcagtattggctttttggagtctttatgcagggaacgctctcagttttcatg

SEQ ID NO: 364 - DNA (genomic), 405 bp, Helicobacter pylori; double-stranded, circular
  misc_feature (B) LOCATION 1...405
  hypothetical: NO
  anti-sense: NO
caaccacacaaacaaagaaacatcgcccatctacaacacgcgcaagctgttatcacttcagtattggctttttggagtctttatgcagggaacgctctcagttttcatgtgaccggtttgaatgatggatctaattctcctttaggaagaatccatagagatgggaactgcacaggattacaacaatgttttatgagcaaagaaacttatgataaaatgaagacacttgccgaaaacctccaaaaagctcaaggcaatctctgtgccttatcagaatgctctagcaatcaagatagcggatttcctgttttggatagtgcaggaaaacaagtaactataacaataacaacgcaaactaatggagctaataaaagtgaaactactactactactactactactaat

SEQ ID NO: 365 - DNA (genomic), 588 bp, Helicobacter pylori; double-stranded, circular
  misc_feature (B) LOCATION 1...588
  hypothetical: NO
  anti-sense: NO
atgagcaataacccctttaaaaaagtgggcatgatcagctctcaaaacaataacggcgctttgaacgggcttggcgtgcaagtgggttataaacaattctttggcgaaagcaaaagatgggggttaaggtattatggtttctttgattacaaccacggctatatcaaatccagcttttttaattcttcttctgatatatggacttatggcggtgggagcgatttgttagtgaattttatcaacgatagcatcacaagaaagaacaacaagctttctgtgggtctttttggtggtatccaactagcagggactacatggcttaattctcaatacatgaatttaacagcgttcaataacccttacagcgcgaaagtcaatgcttccaatttccaatttttgttcaatctcggcttgaggacgaatctcgctacagctaagaaaaaagacagcgaacgttccgcgcaacatggcgttgaactgggcattaaaatccctaccattaacaccaattattattcttttctaggcactaagctagaatacagaaggctttatagcgtgtatctcaattatgtgtttgcttattaa

SEQ ID NO: 366 - DNA (genomic), 1866 bp, Helicobacter pylori; double-stranded, circular
  misc_feature (B) LOCATION 1...1866
  hypothetical: NO
  anti-sense: NO
ttgcatgctgaagacaacggcttttttgtgagcgcgggctatcaaatcggcgaagcggtgcaaatggtcaaaaacaccggcgaattgaaaaacttgaacgacaaatacgagcagttaagccaatctttagcccaactggcttcgttaaaaaaaagcattcaaacggcgaacaacattcaggctgtcaacaatgctttaagcgatttaaaaagctttgcgagtaacaaccacacaaacaaagaaacatcgcccatctacaacaccgcgcaagctgttatcacttcagtattggctttttggagtctttatgcagggaacgctctcagttttcatgtgaccggtttgaatgatggatctaattctcctttaggaagaatccatagagatgggaactgcacaggattacaacaatgttttatgagcaaagaaacttatgataaaatgaagacacttgccgaaaacctccaaaaagctcaaggcaatctctgtgccttatcagaatgctctagcaatcaatcaaatggaggcaaaacttccatgactacagctcttcaaaccgcgcaacagctcatggacttaatcgaacagaccaaggtttctatggtgtggaaaaatatcgtcatcgcaggtgttacaaacaaacccaatggtgctggcgctatcacatccactggtcatgtaaccgactatgcggtgtttaacaacatcaaggcgatgctacctatcttgcaacaagcgcttacgctttctcaaagtaaccacaccctatccactcagttgcaagctcgagctatgggatctcaaacaaatcgtgaattcgctaaagacatctacgctttagctcaaaaccaaaagcaaatcctttctaacgcttcaagtatcttcaatctctttaattccattcctaaagaccaacttaagtatttggagaacgcttacttgaaagtgccacatttgggtaaaacccctactaacccttacagacagaatgtgaatttgaataaagaaattaatgcggttcaagacaatgtagctaattatggtaatcgtttggattcggctttaagcgtggctaaagatgtttataacctaaaatccaatcaaacagagatcgtaaccacttataacgatgctaagaatttgagcgaagagatttctaaacttccctataaccaagtcaatgtaacaaacatcgttatgtcgcctaaagattctacagcgggccaataccaaatcaacccagagcagcaatccaatcttaaccaagctttagcggcgatgagcaataacccctttaaaaaagtgggcatgatcagctctcaaaacaataacggcgctttgaacgggcttggcgtgcaagtgggttataaacaattctttggcgaaagcaaaagatgggggttaaggtattatggtttctttgattacaaccacggctatatcaaatccagcttttttaattcttcttctgatatatggacttatggcggtgggagcgatttgttagtgaattttatcaacgatagcatcacaagaaagaacaacaagctttctgtgggtctttttggtggtatccaactagcagggactacatggcttaattctcaatacatgaatttaacagcgttcaataacccttacagcgcgaaagtcaatgcttccaatttccaatttttgttcaatctcggcttgaggacgaatctcgctacagctaagaaaaaagacagcgaacgttccgcgcaacatggcgttgaactgggcattaaaatccctaccattaacaccaattattattcttttctaggcactaagctagaataccgaaggctttatagcgtgtatctcaattatgtgtttgcttattaa

SEQ ID NO: 367 - DNA (genomic), 1914 bp, Helicobacter pylori; double-stranded, circular
  misc_feature (B) LOCATION 1...1914
  hypothetical: NO
  anti-sense: NO
atgaaaagacaattctactctctctctctctctctcgcttcatcgctcttgcatgctgaagacaacggcttttttgtgagcgcgggctatcaaatcggcgaagcggtgcaaatggtcaaaaacaccggcgaattgaaaaacttgaacgacaaatacgagcagttaagccaatctttagcccaactggcttcgttaaaaaaaagcattcaaacggcgaacaacattcaggctgtcaacaatgctttaagcgatttaaaaagctttgcgagtaacaaccacacaaacaaagaaacatcgcccatctacaacaccgcgcaagctgttatcacttcagtattggctttttggagtctttatgcagggaacgctctcagttttcatgtgaccggtttgaatgatggatctaattctcctttaggaagaatccatagagatgggaactgcacaggattacaacaatgttttatgagcaaagaaacttatgataaaatgaagacacttgccgaaaacctccaaaaagctcaaggcaatctctgtgccttatcagaatgctctagcaatcaatcaaatggaggcaaaacttccatgactacagctcttcaaaccgcgcaacagctcatggacttaatcgaacagaccaaggtttctatggtgtggaaaaatatcgtcatcgcaggtgttacaaacaaacccaatggtgctggcgctatcacatccactggtcatgtaaccgactatgcggtgtttaacaacatcaaggcgatgctacctatcttgcaacaagcgcttacgctttctcaaagtaaccacaccctatccactcagttgcaagctcgagctatgggatctcaaacaaatcgtgaattcgctaaagacatctacgctttagctcaaaaccaaaagcaaatcctttctaacgcttcaagtatcttcaatctctttaattccattcctaaagaccaacttaagtatttggagaacgcttacttgaaagtgccacatttgggtaaaacccctactaacccttacagacagaatgtgaatttgaataaagaaattaatgcggttcaagacaatgtagctaattatggtaatcgtttggattcggctttaagcgtggctaaagatgtttataacctaaaatccaatcaaacagagatcgtaaccacttataacgatgctaagaatttgagcgaagagatttctaaacttccctataaccaagtcaatgtaacaaacatcgttatgtcgcctaaagattctacagcgggccaataccaaatcaacccagagcagcaatccaatcttaaccaagctttagcggcgatgagcaataacccctttaaaaaagtgggcatgatcagctctcaaaacaataacggcgctttgaacgggcttggcgtgcaagtgggttataaacaattctttggcgaaagcaaaagatgggggttaaggtattatggtttctttgattacaaccacggctatatcaaatccagcttttttaattcttcttctgatatatggacttatggcggtgggagcgatttgttagtgaattttatcaacgatagcatcacaagaaagaacaacaagctttctgtgggtctttttggtggtatccaactagcagggactacatggcttaattctcaatacatgaatttaacagcgttcaataacccttacagcgcgaaagtcaatgcttccaatttccaatttttgttcaatctcggcttgaggacgaatctcgctacagctaagaaaaaagacagcgaacgttccgcgcaacatggcgttgaactgggcattaaaatccctaccattaacaccaattattattcttttctaggcactaagctagaataccgaaggctttatagcgtgtatctcaattatgtgtttgcttattaa

SEQ ID NO: 368 - DNA (genomic), 1311 bp, Helicobacter pylori; double-stranded, circular
  misc_feature (B) LOCATION 1...1311
  hypothetical: NO
  anti-sense: NO
ttgcacgctgaagacaacggcttttttgtgagcgcgggctatcaaatcggcgaagcggtgcaaatggtcaaaaacaccggtgaattgaaaaacttgaacgaaaaatacgagcaattaagccagtatttaaatcaagtggcttcgttgaagcaaagcattcaaaacgccaacaacattgagctggtcaatagctctttaaactatttaaaaagctttaccaacaacaactacaacagcaccacccaatcgcccatctttaacgccgtgcaagccgttatcacttcggtattgggtttttggagtctttatgcggggaactatctcactttttttgtggttaataaggatactcgaaaacccgctagtgtccagggtaaccctcctttttcaactattgttcaaaactgctcaggaattgaaaactgcgcgatgaatcaaaccacttatgataagatgaaaaagctcgctgaagatctccaagcagcccaacaaaacgctaccactaaagcgaacaatctttgcgctttatccggatgcgccacaacacaaggccaaaacccaagctcaaccgtaagcaacgctcttaacttagcgcaacagcttatggatttgatcgcaaacactaacacggctatgatgtggaaaaatatcgtcatcgctggcgtttcaaacgtatccggcgctatcgattccactggctacccaacgcaatacgcggtgtttaacaacattaaggcgatgatacctatcttgcaacaagcggttacgctttctcaaagtaaccacacattatctgctagcttgcaagctcaagctacaggatctcaaacaaaccccaaattcgctaaagacatctacgctttcgctcaaaaccaaaagcaagtcatttcttacgctcaagacattttcaacctctttagttctatccctaaagatcagtatcgttatttagagaaagcctatttgaaaatacccaatgcgggtaaaacgcctactaacccttacagacaggaggtgaatttaaaccaagaaattcaaacgatccaaaacaatgtgagttattatggtaatcgggtggatgcggctttaagcgtggctaaagatgtttataatttaaaatccaatcaaacagaaatcgtaaccacctataacaacgctaagaatttgagccaagagatttctaaactcccctataaccaagtcaatacaaaagacattatcacactgccttacgatcaaaacgctccggcagcgggccaatacaactaccagatcaacccagagcagcatccaatctttctcaagctttag

SEQ ID NO: 369 - DNA (genomic), 180 bp, Helicobacter pylori; double-stranded, circular
  misc_feature (B) LOCATION 1...180
  hypothetical: NO
  anti-sense: NO
tttgatttgggcgtgcgcaccaactttgcaaaaaccaatttcaataagcacagattagaccaagggatagaatttggggtgaaaatccctgttatcgctcataaatattttgcaacccaaggctcaagcgcgagctatatgaggaattttagcttcatatgtgggctattcagtcggttt

SEQ ID NO: 370 - DNA (genomic), 177 bp, Helicobacter pylori; double-stranded, circular
  misc_feature (B) LOCATION 1...177
  hypothetical: NO
  anti-sense: NO
gatttgggcgtgcgcaccaactttgcaaaaaccaatttcaataagcacagattagaccaagggatagaatttggggtgaaaatccctgttatcgctcataaatattttgcaacccaaggctcaagcgcgagctatatgaggaattttagcttcatatgtgggctattcagtcggttt

SEQ ID NO: 371 - DNA (genomic), 534 bp, Helicobacter pylori; double-stranded, circular
  misc_feature (B) LOCATION 1...534
  hypothetical: NO
  anti-sense: NO
aaaatccaaggcttcactcaagcgcaagaattaaagcaactcattagagatggggctgtgaggttgcaaacttctgccattcccttatcctactacttggatattttagggaatacaacaaaaactcttttgagtgaaagcctacaaaacaatccgcaacaaccaaacgggcaacccaaccaagctttagtcaatttagagcaatctctagggattttaggaaaactactagatctatcccaacaatacgcttcagaaggtgtcattaaccctttggtggtggatgtagggaaagaacaaatcggtatcacggatagcatgctcttggtggctcaaaacatcgttttagctttagggcaagtggatttgagcaaaatccaacaaaacaatggtaaccaacagctatacgaaaacatcatgaaagtcatgcttttaggcgcaggcgggactaatggagcgtataatggcgtgagtgtgggcgatatcgccacaggcaatgcaaaattttccttcgcaaacgggcttgattggggc

SEQ ID NO: 372 - DNA (genomic), 639 bp, Helicobacter pylori; double-stranded, circular
  misc_feature (B) LOCATION 1...639
  hypothetical: NO
  anti-sense: NO
gtgtgggcgatatcgccacaggcaatgcaaaattttccttcgcaaacgggcttgattggggctaattctacggtgagcgagctcaacgctttgattaagagcgggatttctttagatcgtgaaactttggggttagggagttttattgaaaaaaatatctgcagcggtgcatcgtcttgttttagtgggaatcagcttatctataagaaagggctagacagaaccataaacatcattaatgcggtattaggtcagtttgaatcttcggctagttctctttataagatttcttatatccctaacctcttttcgctcaaagattaccagtcagcgagcatgaacggctttggggctaaaatgggttataaacaatttttcacccataagaaaaatatcggcttaaggtattatgggtttttggattatggctatgcgaattttggcgatacgaatttaaaagtgggagcgaatcttgttacttatggggtaggaacggattttttatacaatgtgtatgaacgctctagaaggagagaaaggactacaatcggtcttttctttggcgctcaaattgcagaacaaacttggtgttttaatgtgacaaccaaggccggcctacgtctttttcgacgcaagcca

SEQ ID NO: 373 - DNA (genomic), 1440 bp, Helicobacter pylori; double-stranded, circular
  misc_feature (B) LOCATION 1...1440
  hypothetical: NO
  anti-sense: NO
ttgaaaaaccactcctttaaaaaaacgatcgctctttccttgctggcgagcatgtctttgtgtaacgctgaagaagatggggcgttttttgtcattgattaccaaacgagtttggccagacaggaattgaaaaatccaggcttcactcaagcgcaagaattaaagcaactcattagagatggggctgtgaggttgcaaacttctgccattcccttatcctactacttggatattttagggaataaaacaaaaactcttttgagtgaaagcctaaaaaacaatccgcaacaaccaaacgggcaacccaaccaagctttagtcaatttagagcaatctctagggattttaggaaaactactagatctatcccaacaatacgcttcagaaggtgtcattaagcctttggtggtggatgtagggaaagaacaaatcggtatcacggatagcatgctcttggtggctcaaaacatcgttttagctttagggcaagtggatttgagcaaaatccaacaaaacaatggtaaccaacagctatacgaaaacatcatgaaagtcatgcttttaggcacaggcgggactaatggagcgtataatggcgtgagtgtgggcgatatcgccacaggcatgcaaaattttccttcgcaaacgggcttgattggggctaattctacggtgagcgagctcaacgctttgattaagagcgggatttctttagatcgtgaaactttggggttagggagttttattgaaaaaaatatctgcagcggtgcatcgtcttgttttagtgggaatcagcttatctataagaaagggctagacagaaccataaacatcattaatgcggtattaggtcagtttgaatcttcggctagttctctttataagatttcttatatccctaacctcttttcgctcaaagattaccagtcagcgagcatgaacggctttggggctaaaatgggttataaacaatttttcacccataagaaaaatatcggcttaaggtattatgggtttttggattatggctatgcgaattttggcgatacgaatttaaaagtgggagcgaatcttgttacttatggggtaggaacggattttttatacaatgtgtatgaacgctctagaaggagagaaaggactacaatcggtcttttctttggcgctcaaattgcagggcaaacttggagcactaatgtaacgaacttattgagcgggcaaaggcctgatgtcaagtccagttcgttccaattcttatttgatttgggcgtgcgcaccaactttgcaaaaaccaatttcaataagcacagattagaccaagggatagaatttggggtgaaaatccctgttatcgctcataaatattttgcaacccaaggctcaagcgcgagctatatgaggaattttagcttctatgtgggctattcagtcggtttttaa

SEQ ID NO: 374 - DNA (genomic), 141 bp, Helicobacter pylori; double-stranded, circular
  misc_feature (B) LOCATION 1...141
  hypothetical: NO
  anti-sense: NO
aatttgagaaccttgttaaaaatgttggttggtgtgagcttactaacacacgctttaatggctacagaagaaagcgctgccccttcttggacaaaaaatttgtatatgggattcaattaccaaacaggttctatcaattta

SEQ ID NO: 375 - DNA (genomic), 282 bp, Helicobacter pylori; double-stranded, circular
  misc_feature (B) LOCATION 1...282
  hypothetical: NO
  anti-sense: NO
aatttcttccaatggagtttttatcaagatgatattggcgtggatattggcgtctttggggggattgcgattgctgggaatatctggtatattggcaataaagggcacgaattattacgcatcaccaatattattgcggttgataacacctcttttcaattcctctttaactttggtttccaaagcttatttgtagatgaacatgaatatgaaattgggtttaaattccccactcttaacaacaaatactacaccaccgacgcgctcaaggttcaaatgcgt

SEQ ID NO: 376 - DNA (genomic), 738 bp, Helicobacter pylori; double-stranded, circular
  misc_feature (B) LOCATION 1...738
  hypothetical: NO
  anti-sense: NO
ttgagaaccttgttaaaaatgttggttggtgtgagcttactaacacacgctttaatggctacagaagaaagcgctgccccttcttggacaaaaaatttgtatatgggattcaattaccaaacaggttctatcaatttaatgactaatattcatgaagttagagaagttactagctatcaaaccggttacaccaatgtaatgactagcattaatagcgttaaaaaactcactaacatgggttctaatgggattggcttagtcatgggctataaccactttttccatccggataaagtcttgggtttgcgctattttgcttttttagattggcaaggctatggcatgagataccctaaaggctattatgggggcaataacatgatcacttatggcgtgggcgtggatgcgatatggaatttcttccaagggagtttttatcaagatgatattggcgtggatattggcgtttttggggggattgcgattgctgggaatagctggtatattggcaataaagggcaggaattattaggcatcaccaatagtagtgcggttgataacacctcttttcaattcctctttaactttggtttcaaagctttatttgtagatgaacatgaatttgaaattgggtttaaattccccactcttaacaacaaatactacaccaccgacgcgctcaaggttcaaatgcgtagggtctttgccttttatgtggggtataattaccacttctaa

SEQ ID NO: 377 - DNA (genomic), 1416 bp, Helicobacter pylori; double-stranded, circular
  misc_feature (B) LOCATION 1...1416
  hypothetical: NO
  anti-sense: NO
atgaaaaataccaatacaaaagagataaagaatacaaggatgaaaaaaggttatagtcaataccacacgctcaaaaaagggcttttaaaaaccgctctgctttttagccttcctttaagcgtggcgttagctgaagacgatggcttttatatgggagtgggctatcaaatcggcggcgcgcaacaaaacatcaacaacaaaggcagcaccctaaggaataatgtcattgatgatttccgccaagtgggcgtgggtatggcagggggtaatgggcttttagctttagcgacaaacacgaccatggacgctcttttagggataggcaaccaaattgtcaatactaatacaactgttggcaacaacaacgcagagttaacccagtttaaaaaaatactcccccaaattgaacaacgctttgagacgaataaaaacgcttatagcgttcaagccttgcaagtgtatttgagtaatgtgctttataacttggttaataatagtaataatggtagcaataatggagtcgttcctgaatatgtagggattataaaagttctctatggttctcaaaatgaattcagtctcttagccacggagagtgtggcgcttttaaacgcgctcacgagagtgaatctggatagtaattcggtgtttttaaaagggctattagcccaaatgcagctttttaatgacacttcttcagcaaagctaggtcagatcgcagaaaacttgaagaacggtggtgcaggggccatgcttcaaaaggatgtgaaaaccatctcggatcgaatcgctacttaccaagagaatctaaaacagctaggagggatgttaaagaattacgatgagccatacctaccccaatttgggccaggcacaagctctcagcatggggttattaatggctttggcattcaagtgggctataagcaattttttgggagcaagaagaatataggcttacgatattacgctttctttgattatggctttacgcaattgggcagtcttaacagtgctgttaaagcgaacatctttacttatggtgctggcacggactttttatggaatatctttagaagggtttttagcgatcagtccttgaatgtgggggtgtttgggggcattcaaatagcgggtaacacttgggatagctctttaagaggtcaaattgaaaactcgtttaaagaataccccactcccacgaatttccaatttttgtttaatttgggcttaagggctcattttgccagcaccatgcaccgccggtttttgagcgcgtctcaaagcattcagcatggtatggaatttggcgtgaaaatcccagctatcaatcaaaggtatttgaaagcgaatggggctgatgtggattacaggcgtttgtatgcgttctatatcaattacacgataggtttttaa

SEQ ID NO: 378 - DNA (genomic), 1467 bp, Helicobacter pylori; double-stranded, circular
  misc_feature (B) LOCATION 1...1467
  hypothetical: NO
  anti-sense: NO
ggaattttagcttcatatgtgggctattcagtcggttttaaaggaaggctcttgatgaaaaataccaatacaaaagagataaagaatacaaggatgaaaaaaggttatagtcaataccacacgctcaaaaaagggcttttaaaaaccgctctgctttttagccttcctttaagcgtggcgttagctgaagacgatggcttttatatgggagtgggctatcaaatcggcggcgcgcaacaaaacatcaacaacaaaggcagcaccctaaggaataatgtcattgatgatttccgccaagtgggcgtgggtatggcagggggtaatgggcttttagctttagcgacaaacacgaccatggacgctcttttagggataggcaaccaaattgtcaatactaatacaactgttggcaacaacaacgcagagttaacccagtttaaaaaaatactcccccaaattgaacaacgctttgagacgaataaaaacgcttatagcgttcaagccttgcaagtgtatttgagtaatgtgctttataacttggttaataatagtaataatggtagcaataatggagtcgttcctgaatatgtagggattataaaagttctctatggttctcaaaatgaattcagtctcttagccacggagagtgtggcgcttttaaacgcgctcacgagagtgaatctggatagtaattcggtgtttttaaaagggctattagcccaaatgcagctttttaatgacacttcttcagcaaagctaggtcagatcgcagaaaacttgaagaacggtggtgcaggggccatgcttcaaaaggatgtgaaaaccatctcggatcgaatcgctacttaccaagagaatctaaaacagctaggagggatgttaaagaattacgatgagccatacctaccccaatttgggccaggcacaagctctcagcatggggttattaatggctttggcattcaagtgggctataagcaattttttgggagcaaggaggatataggcttacgatattacgctttctttgattatggctttacgcaattgggcagtcttaacagtgctgttaaagcgaacatctttacttatggtgctggcacggactttttatggaatatctttagaagggtttttagcgatcagtccttgaatgtgggggtgtttgggggcattcaaatagcgggtaacacttgggatagctctttaagaggtcaaattgaaaactcgtttaaagaataccccactcccacgaatttccaatttttgtttaatttgggcttaagggctcattttgccagcaccatgcaccgccggtttttgagcgcgtctcaaagcattcagcatggtatggaatttggcgtgaaaatcccagctatcaatcaaaggtatttgaaagcgaatggggctgatgtggattacaggcgtttgtatgcgttctatatcaattacacgataggtttt

SEQ ID NO: 379 - DNA (genomic), 465 bp, Helicobacter pylori; double-stranded, circular
  misc_feature (B) LOCATION 1...465
  hypothetical: NO
  anti-sense: NO
atgcggatattaattctcaaaaacaagccaccaacgctacgatcaaaggctttgacgcgctcttggggtatcaatttttctttgaaaaacactttggcttacgcctttatggggttttttgactacgctcatgccaattctattaagcttaaaaaccctaactataatagcgaagcggcgcaagtggctagtcaaattcttgggaaacaagaaatcaatcgtttaacaaacattgccgatcccagaacttttgagccgaacatgctcacttatgggggggctatggacgtgatggttaatgtcatcaataacggcatcatgagtttgggggcttttggcgggatacaattggccggcaattcatggcttatggcgasaccgagctttgagggcattttaggggaacaagcccttgtgagcagaaagccacttctttccaatttttattcaatgtgggggctcgcm

SEQ ID NO: 380 - DNA (genomic), 729 bp, Helicobacter pylori; double-stranded, circular
  misc_feature (B) LOCATION 1...729
  hypothetical: NO
  anti-sense: NO
atgaaaaaatttttttctcaatctttgttagctcttattatctctatgaatgcggtatctggcatggatggtaatggcgtttttttaggggcgggttatttgcaaggacaggcgcaaatgcatgcggatattaattctcaaaaacaagccaccaacgctacgatcaaaggctttgacgcgctcttggggtatcaatttttctttgaaaaacactttggcttacgcctttatgggttttttgactacgctcatgccaattctattaagcttaaaaaccctaactataatagcgaagcggcgcaagtggctagtcaaattcttgggaaacaagaaatcaatcgtttaacaaacattgccgatcccagaacttttgagccgaacatgctcacttatgggggggctatggacgtgatggttaatgtcatcaataacggcatcatgagtttgggggcttttggcgggatacaattggccggcaattcatggcttatggcgacaccgagctttgagggcattttagtggaacaagcccttgtgagcaagaaagccacttctttccaatttttattcaatgtgggggctcgcttaaggatcttaaaacattctagcattgaagcgggcgtgaaattccccatgctaaagaaaaacccctacatcactgcaaaaaatttggatatagggtttaggcgcgtgtattcgtggtatgtgaattacgtgttcactttctag

SEQ ID NO: 381 - DNA (genomic), 729 bp, Helicobacter pylori; double-stranded, circular; identical to SEQ ID NO: 380
  misc_feature (B) LOCATION 1...729
  hypothetical: NO
  anti-sense: NO

SEQ ID NO: 382 - DNA (genomic), 789 bp, Helicobacter pylori; double-stranded, circular
  misc_feature (B) LOCATION 1...789
  hypothetical: NO
  anti-sense: NO
acttttttaattattttttgggtattctttttaagaattaagcattatgttaaggaattatccatgaaaaaatttttttctcaatctttgttagctcttattatctctatgaatgcggtatctggcatggatggtaatggcgtttttttaggggcgggttatttgcaaggacaggcgcaaatgcatgcggatattaattctcaaaaacaagccaccaacgctacgatcaaaggctttgacgcgctcttggggtatcaatttttctttgaaaaacactttggcttacgcctttatgggttttttgactacgctcatgccaattctattaagcttaaaaaccctaactataatagcgaagcggcgcaagtggctagtcaaattcttgggaaacaagaaatcaatcgtttaacaaacattgccgatcccagaacttttgagccgaacatgctcacttatgggggggctatggacgtgatggttaatgtcatcaataacggcatcatgagtttgggggcttttggcgggatacaattggccggcaattcatggcttatggcgacaccgagctttgagggcattttagtggaacaagcccttgtgagcaagaaagccacttctttccaatttttattcaatgtgggggctcgcttaaggatcttaaaacattctagcattgaagcgggcgtgaaattccccatgctaaagaaaaacccctacatcactgcaaaaaatttggatatagggtttaggcgcgtgtattcgtggtatgtgaattacgtgttcactttc

SEQ ID NO: 383 - DNA (genomic), 1458 bp, Helicobacter pylori; double-stranded, circular
  misc_feature (B) LOCATION 1...1458
  hypothetical: NO
  anti-sense: NO
gaagaagatgggggctttatgacctttgggtatgaattaggtcaggtggtccagcaagtgaaaaacccgggtaaaatcaaagccgaagaattagcgggcctgttaaactctaccacgacaaacaacaccaatatcaaatattgcggcacaggagggaatgtcgccgggactttgggcaacctttttatgaaccaattgggcaatttgattgatttgtatcctactttgaaaactaataatcttcaccaatgcggtagcactaatagcggtaatggcgctactgctgccgctgctactaacaatagcccttgtttccaaggtaacctggctctttataacgaaatggttgactctatcaaaactttgagtcaaaacatcagcaagaacatctttcaaggcgacaacaacaccacgagcgctaatctctccaaccagctcagtgagttgaacaccgctagcgtttatttgacttacatgaactcgttcttaaacgccaacaaccaagcgggtgggatttttcaaaacaacaccaatcaagcttacgagaatggtgttaccgctcaacaaatcgcttatgtcctaaagcaagcttcaatcactatggggccaagcggtgatagtggggctgcgggagcgtttttagacgccgctttagcccaacatgttttcaactcggctaacgctgggaacgatttgagcgctaaggaattcactagcttggtgcaaaacatcgtcaataattctcaaaacgctttaacgctagccaacaacgctaacatcagcaattcaacaggctatcaagtgagctatggtgggaatattgatcaagcgcgctctacccaactgttaaacaacaccacaaacactttggctaaagttaccgctctaaacaacgagcttaaagctaacccatggcttgggaatttcgctgctggtaacagctctcaagtgaatgcgtttaacgggtttatcactaaaatcggttataagcaattcttcggggaaaacaagaatgtgggcttacgctactacgggttcttcagctataacggagcgagcgtgggctttagatccactcaaaataatgtagggttatacacttatggggtggggactgatgtgttgtataacatctttagccgctcttttggcagtaggagtcttaatgcgggcttctttggggggatccaactcgcaggggacacttacatcagcacgctaagaaacagccctcagcttgcgagcagacctacagcgacaaaattccaattcttgtttgatgtgggcttacgcatgaactttggtatcttgaaaaaagacctaaaaagccataaccagcattctatagaaatcggtgtgcaaatccctacgatttacaacacttactataaagctggtggcgctgaagtgaaatacttccgcccttatagcgtgtattgggtctatggctacgccttc

SEQ ID NO: 384 - DNA (genomic), 1584 bp, Helicobacter pylori; double-stranded, circular
  misc_feature (B) LOCATION 1...1584
  hypothetical: NO
  anti-sense: NO
atgaaacaaaatttaaagccattcaaaatgattaaggaaaatttaatgacacaatctcaaaaagtaagattcttagcccctttgagcctagcgttaagcttgagcttcaatccagtgggcgctgaagaagatgggggctttatgacctttgggtatgaattaggtcaggtggtccagcaagtgaaaaacccgggtaaaatcaaagccgaagaattagcgggcctgttaaactctaccacgacaaacaacaccaatatcaatattgcaggcacaggagggaatgtcgccgggactttgggcaacctttttatgaaccaattgggcaatttgattgatttgtatcctactttgaaaactaataatcttcaccaatgcggtagcactaatagcggtaatggcgctactgctgccgctgctactaacaatagcccttgtttccaaggtaacctggctctttataacgaaatggttgactctatcaaaactttgagtcaaaacatcagcaagaacatctttcaaggcgacaacaacaccacgagcgctaatctctccaaccagctcagtgagttgaacaccgctagcgtttatttgacttacatgaactcgttcttaaacgccaacaaccaagcgggtgggatttttcaaaacaacaccaatcaagcttacgagaatggtgttaccgctcaacaaatcgcttatgtcctaaagcaagcttcaatcactatggggccaagcggtgatagtggggctgcgggagcgtttttagacgccgctttagcccaacatgttttcaactcggctaacgctgggaacgatttgagcgctaaggaattcactagcttggtgcaaaacatcgtcaataattctcaaaacgctttaacgctagccaacaacgctaacatcagcaattcaacaggctatcaagtgagctatggtgggaatattgatcaagcgcgctctacccaactgttaaacaacaccacaaacactttggctaaagttaccgctctaaacaacgagcttaaagctaacccatggcttgggaatttcgctgctggtaacagctctcaagtgaatgcgtttaacgggtttatcactaaaatcggttataagcaattcttcggggaaaacaagaatgtgggcttacgctactacgggttcttcagctataacggcgcgggcgtgggtaatggccccacttacaatcaagtcaatctgctcacttatggggtggggactgatgtgctttacaatgtgtttagccgctcttttggcagtaggagtcttaatgcgggcttctttggggggatccaactcgcaggggacacttacatcagcacgctaagaaacagccctcagcttgcgagcagacctacagcgacaaaattccaattcttgtttgatgtgggcttacgcatgaactttggtatcttgaaaaaagacctaaaaagccataaccagcattctatagaaatcggtgtgcaaatccctacgatttacaacacttactataaagctggtggcgctgaagtgaaatacttccgcccttatagcgtgtattgggtctatggctacgccttctaa

SEQ ID NO: 385 - DNA (genomic), 261 bp, Helicobacter pylori; double-stranded, circular
  misc_feature (B) LOCATION 1...261
  hypothetical: NO
  anti-sense: NO
ggaggcaatgtcgcaggggcgttgagtaacgctttctcccaatacctttattcgcttttaggggcgtatcccacgaaacccaatggtaacgacgtgtctgcgaacgctcttttaagtggtgcggtaggcagtgggacttgcgcggctgcagggacggctggtggcacaactcttaacactcaaagcgcttgcaccgctgcgggctattactggctccctagcttgactgataggattttaagcactgatcggcagccagac

SEQ ID NO: 386 - DNA (genomic), 258 bp, Helicobacter pylori; double-stranded, circular
  misc_feature (B) LOCATION 1...258
  hypothetical: NO
  anti-sense: NO
ggcaatgtcgcaggggcgttgagtaacgctttctcccaatacctttattcgcttttaggggcgtatcccacgaaacccaatggtaacgacgtgtctgcgaacgctcttttaagtggtgcggtaggcagtgggacttgcgcggctgcagggacggctggtggcacaactcttaacactcaaagcgcttgcaccgctgcgggctattactggctccctagcttgactgataggattttaagcactgatcggcagccagac

SEQ ID NO: 387 - DNA (genomic), 399 bp, Helicobacter pylori; double-stranded, circular
  misc_feature (B) LOCATION 1...399
  hypothetical: NO
  anti-sense: NO
gctttagagaagaatgggactgctactgctaatagcactagtagcactagcggtgcgactggttcagatggtcaaacttactctcaacaagctattcaataccttcaaggccaacaaaatatcttaaataacgcagcgaacttgctcaagcaagatgaattgctcctagaagctttcaactctgccgtagctgctaacattgggaataaggaattcaattcagccgcttttacaggtttggtgcaaggcattattgatcaatctcaattggtttataacgagctcactaaaaacaccattagcgggagcgcggttaataacgctgggataaactccaaccaagctaacgcgtgcaagggcgtgctagttagctccctaacgctctttacaacgtgcaag

SEQ ID NO: 388 - DNA (genomic), 1065 bp, Helicobacter pylori; double-stranded, circular
  misc_feature (B) LOCATION 1...1065
  hypothetical: NO
  anti-sense: NO
atgcaacaacagctcacctacttgaatgcggggaatgtgttttttaatgcgatgaataaggctttagagaagaatgggactgctactgctaatagcactagtagcactagcggtgcgactggttcagatggtcaaacttactctcaacaagctattcaataccttcaaggccaacaaaatatcttaaataacgcagcgaacttgctcaagcaagatgaattgctcctagaagctttcaactctgccgtagctgctaacattgggaataaggaattcaattcagccgcttttacaggtttggtgcaaggcattattgatcaatctcaattggtttataacgagctcactaaaaacaccattagcgggagcgcggttaataacgctgggataaactccaaccaagctaacgctgtgcaagggcgtgctagtcagctccctaacgctctttataacgtgcaagtaactttggataaaatcaacgcgctcaacaatcaggtgagaagcatgccttacttgccccaattcagagccgggaacagccgtgcaacgaatattttaaacgggttttacactaaagtgggctataagcaattcttcgggaagaaaaggaatatcggtttgcgctattatggtttcttttcttataacggagcgagcgtgggctttagatccactcaaaataatgtagggttatacacttatggggtggggactgatgtgttgtataacatctttagccgctcctatcaaaaccgctctgtggatatgggcttttttagcggtatccaattagccggtgagaccttccaatccacgctcagagatgaccccaatgtgaaattgcatgggaaaatcaataacacgcacttccagttcctctttgacttcggtatgagaatgaacttcggtaagttggacgggaaatccaaccgccacaaccagcacacggtggaatttggcgtagtagtgcctacgatttataacacttattacaaatcagcagggactaccgtgaagtatttccgtccttatagcgtttattggtcttatgggtattcattctaa

SEQ ID NO: 389 - DNA (genomic), 1335 bp, Helicobacter pylori; double-stranded, circular
  misc_feature (B) LOCATION 1...1335
  hypothetical: NO
  anti-sense: NO
ttgagtaacgctttctcccaatacctttattcgcttttaggggcgtatcccacgaaactcaatggtaacgacgtgtctgcgaacgctcttttaagtggtgcggtaggcagtgggacttgcgcggctgcagggacggctggtggcacaactcttaacactcaaagcgcttgcaccgctgcgggctattactggctccctagcttgactgataggattttaagcacgatcggcagccagactaactacggcacgaacaccaatttccccaacatgcaacaacagctcacctacttgaatgcggggaatgtgttttttaatgcgatgaataaggctttagagaagaatgggactgctactgctaatagcactagtagcactagcggtgcgactggttcagatggtcaaacttactctcaacaagctattcaataccttcaaggccaacaaaatatcttaaataacgcagcgaacttgctcaagcaagatgaattgctcctagaagctttcaactctgccgtagctgctaacattgggaataaggaattcaattcagccgcttttacaggtttggtgcaaggcattattgatcaatctcaattggtttataacgagctcactaaaaacaccattagcgggagcgcggttaataacgctgggataaactccaaccaagctaacgctgtgcaagggcgtgctagtcagctccctaacgctctttataacgtgcaagtaactttggataaaatcaacgcgctcaacaatcaggtgagaagcatgccttacttgccccaattcagagccgggaacagccgtgcaacgaatattttaaacgggttttacactaaagtgggctataagcaattcttcgggaagaaaaggaatatcggtttgcgctattatggtttcttttcttataacggagcgagcgtgggctttagatccactcaaaataatgtagggttatacacttatggggtggggactgatgtgttgtataacatctttagccgctcctatcaaaaccgctctgtggatatgggcttttttagcggtatccaattagccggtgagaccttccaatccacgctcagagatgaccccaatgtgaaattgcatgggaaaatcaataacacgcacttccagttcctctttgacttcggtatgagaatgaacttcggtaagttggacgggaaatccaaccgccacaaccagcacacggtggaatttggcgtagtagtgcctacgatttataacacttattacaaatcagcagggactaccgtgaagtatttccgtccttatagcgtttattggtcttatgggtattcattctaa

SEQ ID NO: 390 - DNA (genomic), 396 bp, Helicobacter pylori; double-stranded, circular
  misc_feature (B) LOCATION 1...396
  hypothetical: NO
  anti-sense: NO
gagacgctcgcaagggttctcaaagtttcatgtttggctatggggctggcacagatgtgttgtttaacccagctattttcaatcgtgagaaacttgcatttggggtttttcttgggcgttgcgattggtggcacctcttggggtccaacaaactattattttaaggacttagctgaagagtatagagggagtttccacccatcaaatttccaggtcttagttaatggcgggatccgcttaggcactaaacaccaaggttttgaaattggcttgaaaatccaaaccattcgcaataattactataccgctagcgcggataatgtgcctgaagggactacttatagattcactttccaccgcccttacgccttttattggcgttacattgtaagcttt

SEQ ID NO: 391 - DNA (genomic), 651 bp, Helicobacter pylori; double-stranded, circular
  misc_feature (B) LOCATION 1...651
  hypothetical: NO
  anti-sense: NO
aggagatgttgtaggagggaagacacgaagagatatgtgatagaagtggttatatctttaagcacaatgacaagtttattgtcagcagagacccctaagcaagaaaaggctattaagactagccctaccaaaaaaggtgaaagaaatgctgcttttatagggattgattaccagttgggtatgctcagcactaccgctcaaaattgttcccatgggaattgcaatggtaatcaaagtggggcttacggctctaatacgcctaacatgcctacagcgtcaaacccaacaggaggccttactcatggcgctctagggactcgtgggtataaaggcttaagcaaccaacaatacgctatcaatggttttgggtttgttgtagggtataagcatttttttaagaaagccccacaatttggaatgcgttattacggattctttgattttgcaagctcttattataagtactacacttataatgattatggcatgagagacgctcgcaagggttctcaaagtttcatgtttggctatggggctggcacagatgtgttgtttaacccagctattttcaatcgtgagaaacttgcatttggggtttttcttgggcgttgcgattggtggcacctcttggggtccaacaaactattattt

SEQ ID NO: 392 - DNA (genomic), 861 bp, Helicobacter pylori; double-stranded, circular
  misc_feature (B) LOCATION 1...861
  hypothetical: NO
  anti-sense: NO
atgaagaaatctgttatagtaggtgctatctctctagcaatgacaagcttattgtcagcagagacccctaagcaagaaaaggctattaagactagccctaccaaaaaaggtgaaagaaatgctgcttttatagggattgattaccagttgggtatgctcagcactaccgctcaaaattgttcccatgggaattgcaatggtaatcaaagtggggcttacggctctaatacgcctaacatgcctacagcgtcaaacccaacaggaggccttactcatggcgctctagggactcgtgggtataaaggcttaagcaaccaacaatacgctatcaatggttttgggtttgttgtagggtataagcatttttttaagaaagccccacaatttggaatgcgttattacggattctttgattttgcaagctcttattataagtactacacttataatgattatggcatgagagacgctcgcaagggttctcaaagtttcatgtttggctatggggctggcacagatgtgttgtttaacccagctattttcaatcgtgagaacttgcatttggggtttttcttgggcgttgcgattggtggcacctcttggggtccaacaaactattattttaaggacttagctgaagagtatagagggagtttccacccatcaaatttccaggtcttagttaatggcgggatccgcttaggcactaaacaccaaggttttgaaattggcttgaaaatccaaaccattcgcaataattactataccgctagcgcggataatgtgcctgaagggactacttatagattcactttccaccgcccttacgccttttattggcgttacattgtaagcttttaa

SEQ ID NO: 393 - DNA (genomic), 135 bp, Helicobacter pylori; double-stranded, circular
  misc_feature (B) LOCATION 1...135
  hypothetical: NO
  anti-sense: NO
atagacaagcctaaagccacggccgggttttttgtgggcgtgaattttgcgggtaacacttggactaataatcgtgtggggtattttaaggacgggtatgtttatggcgtcaatacggacgctgacgcacatgac

SEQ ID NO: 394 - DNA (genomic), 294 bp, Helicobacter pylori; double-stranded, circular
  misc_feature (B) LOCATION 1...294
  hypothetical: NO
  anti-sense: NO
cagcgtctatacctaggaaaattaaacgctaaagtgaatcacacgattttccaatttttagtgaatgtgggcattagaaccaatatttttgaacaccatggcattgagtttggtatcaaaatccccacgctccctaattactttttcaaaggttctactactataagagcgaaaaaacaaggcccactagagaatgggaacccgactactatcaccggagcagaaaccaatttcagcttaacccaaaccttacgccgtcagtattctatgtatttgcgttatgtttatactttt

SEQ ID NO: 395 - DNA (genomic), 405 bp, Helicobacter pylori; double-stranded, circular
  misc_feature (B) LOCATION 1...405
  hypothetical: NO
  anti-sense: NO
atgtttatggcgtcaatacggacgctgacgcacatgactaacgctgatggtacgatcacatgcggagacacgacgccggcgagttgtaatgtggggattaaccctaacagcgtctataccacaggaaaattaaacgctaaagtgaatcacacgattttccaatttttagtgaatgtgggcattagaaccaatatttttgaacaccatggcattgagtttggtatcaaaatccccacgctccctaattactttttcaaaggttctactactataagagcgaaaaaacaaggcccactagagaatgggaacccgactactatcaccggagcagaaaccaatttcagcttaacccaaaccttacgccgtcagtattctatgtatttgcgttatgtttatactttttaa

SEQ ID NO: 396 - DNA (genomic), 1023 bp, Helicobacter pylori; double-stranded, circular
  misc_feature (B) LOCATION 1...1023
  hypothetical: NO
  anti-sense: NO
ttgagttcgttatggctgacaaaccccttaaatgcccatgaaaagaatggcgcgtttgtggggattagcttggaagtgggtagggtcgatcaaaagaccaacgcttatagaaacggcgagttgtttcaagtgccttttggcgatgtttcggctaatgatgatggcaaagtccctgatgggcagaccggtggctgtcagccagcttcagggactccaggaacgccaggctatactaaagctaattgcgtggtcaattggacttctcgcaccatgcttagcaccaataaggacattcctggccgtaaccagccgatgtatgggctaggcgtgatgacagggtataagcattttgtgggtaaaaaaaggtggtttgggctgcgttattatggcttttttgattacgggcataccaatttctctaactctagggccgctaacgccatatcgcccttttatttgagcgatcaaaaagcggacatgtatacttatggttttggcacagacatgctttttaacgttatagacaagcctaaagccacggccgggttttttgtgggcgtgaattttgcgggtaacacttggactaataatcgtgtggggtattttaaggacgggtatgtttatggcgtcaatacggacgctgacgcttacatgactaacgctgatggcacgatcacatgcggagacacgacgccggcgagttgtaatgtggggattaaccctaacagcgtctataccacaggaaaattaaacgctaaagtgaatcacacgattttccaatttttagtgaatgtgggcattagaaccaatatttttgaacaccatggcattgagtttggtatcaaaatccccacgctccctaattactttttcaaaggttctactactataagagcgaaaaaacaaggcccactagagaatgggaacccgactactatcaccggagcagaaaccaatttcagcttaacccaaaccttacgccgtcagtattctatgtatttgcgttatgtttatactttttaa

SEQ ID NO: 397 - DNA (genomic), 1164 bp, Helicobacter pylori; double-stranded, circular
  misc_feature (B) LOCATION 1...1164
  hypothetical: NO
  anti-sense: NO
atggtcaattttatgacaaagaagaaaaatagaatgcaagattgcaaaatggtttgtaaaaattttaatcgtaaggaatctgttttgatagctcaatctttagatatttctaaaaaaggctcggtaattttaggcgctcttttgagttcgttatggctgacaaaccccttaaatgcccatgaaaagaatggcgcgtttgtggggattagcttggaagtgggtagggctgatcaaaagaccaacgcttatagaaacggcgagttgtttcaagtgccttttggcgatgtttcggctaatgatgatggcaaagtccctgatgggcagaccggtggctgtcagccagcttcagggactccaggaacgccaggctatactaaagctaattgcgtggtcaattggacttctcgcaccatgcttagcaccaataaggacattcctggccgtaaccagccgatgtatgggctaggcgtgatgacagggtataagcattttgtgggtaaaaaaaggtggtttgggctgcgttattatggcttttttgattacgggcataccaatttctctaactctagggccgctaacgccatatcgcccttttatttgagcgatcaaaaagcggacatgtatacttatggttttggcacagacatgctttttaacgttatagacaagcctaaagccacggccgggttttttgtgggcgtgaattttgcgggtaacacttggactaataatcgtgtggggtattttaaggacgggtatgtttatggcgtcaatacggacgctgacgcttacatgactaacgctgatggcacgatcacatgcggagacacgacgccggcgagttgtaatgtggggattaaccctaacagcgtctataccacaggaaaattaaacgctaaagtgaatcacacgattttccaatttttagtgaatgtgggcattagaaccaatatttttgaacaccatggcattgagtttggtatcaaaatccccacgctccctaattactttttcaaaggttctactactataagagcgaaaaaacaaggcccactagagaatgggaacccgactactatcaccggagcagaaaccaatttcagcttaacccaaaccttacgccgtcagtattctatgtatttgcgttatgtttatactttttaa

SEQ ID NO: 398 - DNA (genomic), 798 bp, Helicobacter pylori; double-stranded, circular
  misc_feature (B) LOCATION 1...798
  hypothetical: NO
  anti-sense: NO
ttgttggcgcgcaccatacttgattttagaggcagccttagtaatttaaacaacacttataacagcatcaccacgaccgcttcaaacacgcctaattccccattccttaaaaatttgataagccaatccactaaccctaataaccccgggggcttacaggccgtttatcaagtcaaccaaagcgcttattcgcaattattaagcgccacgcaagaattagggcataaccctttcagacgcgttggattaatcagctctcaaaccaacaatggtgccatgaatgggatcggtgtgcaagtgggctacaaacaattttttggtgaaaagagaaggtgggggttaaggtattacggcttttttgactataaccatgcttatatcaaatctagctttttcaattcggcttctgatgtgttcacttatggggtagggacagatgtcctctataactttatcaatgataaaaccaccaaaaacagcaagatttcttttggggtgtttggggggattgcgttagctggcacttcatggctgaattcccagtatgtgaatttagcgaccttcaataatttctatagcgctaaaatgaatgtggcgaatttccaattcttgttcaatttaggcttgagaatgaacctcgctaagaataagaaaaaagacagcgatcatgcggctcagcatggcgtggaattgggcgtgaaaatccctaccattaacaccaattattattcttttctaggcactaagctagaatacagaagactctatagcgtgtatctcaattatgtgtttgcgtat

SEQ ID NO: 399 - DNA (genomic), 795 bp, Helicobacter pylori; double-stranded, circular
  misc_feature (B) LOCATION 1...795
  hypothetical: NO
  anti-sense: NO
ttggcgcgcaccatacttgattttagaggcagccttagtaatttaaacaacacttataacagcatcaccacgaccgcttcaaacacgcctaattccccattccttaaaaatttgataagccaatccactaaccctaataaccccgggggcttacaggccgtttatcaagtcaaccaaagcgcttattcgcaattattaagcgccacgcaagaattagggcataaccctttcagacgcgttggattaatcagctctcaaaccaacaatggtgccatgaatgggatcggtgtgcaagtgggctacaaacaattttttggtgaaaagagaaggtgggggttaaggtattacggcttttttgactataaccatgcttatatcaaatctagctttttcaattcggcttctgatgtgttcacttatggggtagggacagatgtcctctataactttatcaatgataaaaccaccaaaaacagcaagatttcttttggggtgtttggggggattgcgttagctggcacttcatggctgaattcccagtatgtgaatttagcgaccttcaataatttctatagcgctaaaatgaatgtggcgaatttccaattcttgttcaatttaggcttgagaatgaacctcgctaagaataagaaaaaagacagcgatcatgcggctcagcatggcgtggaattgggcgtgaaaatccctaccattaacaccaattattattcttttctaggcactaagctagaatacagaagactctatagcgtgtatctcaattatgtgtttgcgtat

SEQ ID NO: 400 - DNA (genomic), 2004 bp, Helicobacter pylori; double-stranded, circular
  misc_feature (B) LOCATION 1...2004
  hypothetical: NO
  anti-sense: NO
aaaaaacccttttactctctctctctcgcttcatcgcttttaaacgctgaagacaacggcttttttatcagcgcgggctatcaaatcggtgaagccgctcaaatggtgaaaaacaccggcgaattgaaaaaactttcagacacttatgagaatttgagcaaccttttaaccaattttaacaacctcaatcaggcggtaacgaacgcgagcagcccttcagaaatcaatgctgcgatcgataatttaaaagcaaacacgcaagggctaattggcgaaaaaaccaattccccggcgtatcaagcggtgtatttggcgctcaatgcggcggtagggctgtggaatgtcatcgcctataatgtccaatgcggtcctggtaacagtggacaacaaagcgtaacctttgagggccaaccaggacataattcaagttccattaattgcaatttaaccggttataacaacggggttagcggccctttatccattgagaattttaaaaagcttaatcaggcttatcaaactatccaacaagctttaaaacaagatagcggatttcctgttttggatagtgcaggaaaacaagtaactataacaataacaacgcaaactaatggagctaataaaagtgaaactactactactactactactactaatgacgctcaaacccttttgcaagaagccagtaaaatgataagcgtcctcactacaaactgcccatgggtcaatcacaatcaaggacaaaacgggggcgcgccgtggggtttagatacggcagggaatgtgtgtcaggtttttgccacggaatttagcgccgttactagcatgatcaaaaacgcccaagaaatcgtaacgcaagctcaaagccttaaccagcaaaacaatcaaaacgcgccgcaagatttcaatccttacacctctgctgatagggctttcgctcaaaacatgctcaatcacgcgcaagcgcaagccaagatacttgagctagccgatcaaatgaaaaaagaccttaacactatcccaagccaatttatcacaaattacttggcagcttgccacaatgggggtgggacattacctgatgcgggggttactaacaacacttggggggccggttgcgcgtatgtggaagagacgataacggctttaaacaacagccttgcgcattttggcactcaagctgagcaaatcaagcaatctgagttgttggcgcgcaccatacttgattttagaggcagccttagtaatttaaacaacacttataacagcatcaccacgaccgcttcaaacacgcctaattccccattccttaaaaatttgataagccaatccactaaccctaataaccccgggggcttacaggccgtttatcaagtcaaccaaagcgcttattcgcaattattaagcgccacgcaagaattagggcataaccctttcagacgcgttggattaatcagctctcaaaccaacaatggtgccatgaatgggatcggtgtgcaagtgggctacaaacaattttttggtgaaaagagaaggtgggggttaaggtattacggcttttttgactataaccatgcttatatcaaatctagctttttcaattcggcttctgatgtgttcacttatggggtagggacagatgtcctctataactttatcaatgataaaaccaccaaaaacagcaagatttcttttggggtgtttggggggattgcgttagctggcacttcatggctgaattcccagtatgtgaatttagcgaccttcaataatttctatagcgctaaaatgaatgtggcgaatttccaattcttgttcaatttaggcttgagaatgaacctcgctaagaataagaaaaaagcgagcgatcatgcggctcagcatggcgtggaattaggcgtgaagatccccacgatcaacacgaattactattctttgctaggcactcaactccaataccgaagattgtatagcgtgtatttgaattatgtgttcgcttactaa

SEQ ID NO: 401 - DNA (genomic), 2007 bp, Helicobacter pylori; double-stranded, circular
  misc_feature (B) LOCATION 1...2007
  hypothetical: NO
  anti-sense: NO
atgaaaaaacccttttactctctctctctcgcttcatcgcttttaaacgctgaagacaacggcttttttatcagcgcgggctatcaaatcggtgaagccgctcaaatggtgaaaaacaccggcgaattgaaaaaactttcagacacttatgagaatttgagcaaccttttaaccaattttaacaacctcaatcaggcggtaacgaacgcgagcagcccttcagaaatcaatgctgcgatcgataatttaaaagcaaacacgcaagggctaattggcgaaaaaaccaattccccggcgtatcaagcggtgtatttggcgctcaatgcggcggtagggctgtggaatgtcatcgcctataatgtccaatgcggtcctggtaacagtggacaacaaagcgtaacctttgagggccaaccaggacataattcaagttccattaattgcaatttaaccggttataacaacggggttagcggccctttatccattgagaattttaaaaagcttaatcaggcttatcaaactatccaacaagctttaaaacaagatagcggatttcctgttttggatagtgcaggaaaacaagtaactataacaataacaacgcaaactaatggagctaataaaagtgaaactactactactactactactactaatgacgctcaaacccttttgcaagaagccagtaaaatgataagcgtcctcactacaaactgcccatgggtcaatcacaatcaaggacaaaacgggggcgcgccgtggggtttagatacggcagggaatgtgtgtcaggtttttgccacggaatttagcgccgttactagcatgatcaaaaacgcccaagaaatcgtaacgcaagctcaaagccttaaccagcaaaacaatcaaaacgcgccgcaagatttcaatccttacacctctgctgatagggctttcgctcaaaacatgctcaatcacgcgcaagcgcaagccaagatacttgagctagccgatcaaatgaaaaaagaccttaacactatcccaagccaatttatcacaaattacttggcagcttgccacaatgggggtgggacattacctgatgcgggggttactaacaacacttggggggccggttgcgcgtatgtggaagagacgataacggctttaaacaacagccttgcgcattttggcactcaagctgagcaaatcaagcaatctgagttgttggcgcgcaccatacttgattttagaggcagccttagtaatttaaacaacacttataacagcatcaccacgaccgcttcaaacacgcctaattccccattccttaaaaatttgataagccaatccactaaccctaataaccccgggggcttacaggccgtttatcaagtcaaccaaagcgcttattcgcaattattaagcgccacgcaagaattagggcataaccctttcagacgcgttggattaatcagctctcaaaccaacaatggtgccatgaatgggatcggtgtgcaagtgggctacaaacaattttttggtgaaaagagaaggtgggggttaaggtattacggcttttttgactataaccatgcttatatcaaatctagctttttcaattcggcttctgatgtgttcacttatggggtagggacagatgtcctctataactttatcaatgataaaaccaccaaaaacagcaagatttcttttggggtgtttggggggattgcgttagctggcacttcatggctgaattcccagtatgtgaatttagcgaccttcaataatttctatagcgctaaaatgaatgtggcgaatttccaattcttgttcaatttaggcttgagaatgaacctcgctaagaataagaaaaaagcgagcgatcatgcggctcagcatggcgtggaattaggcgtgaagatccccacgatcaacacgaattactattctttgctaggcactcaactccaataccgaagattgtatagcgtgtatttgaattatgtgttcgcttactaa

SEQ ID NO: 402 - DNA (genomic), 324 bp, Helicobacter pylori; double-stranded, circular
  misc_feature (B) LOCATION 1...324
  hypothetical: NO
  anti-sense: NO
tatcaaatcttaaaccaaagaaaaaccatgaaaaaagtcctcttactaactctctctctctctctctcgttttggctccacgctgaaaggaacggattttatttaggtttaaattttgcagaaggaagctatattcaaggacaaggtagcatcggcgaaaaagcttcagcagaaaacgccttaaatcaagcgatcaataacgcacaaaattcattattccctaacacacaagccataagagatgtgcaaaacgccttaaatgcagtgaaagattcaaacaaaatcgctaaccgattcgcaggaaatggtggatcgggcggtatt

SEQ ID NO: 403 - DNA (genomic), 924 bp, Helicobacter pylori; double-stranded, circular
  misc_feature (B) LOCATION 1...924
  hypothetical: NO
  anti-sense: NO
atgaaaaaagtcctcttactaactctctctctctctctctcgttttggctccacgctgaaaggaacggattttatttaggtttaaattttgcagaaggaagctatattcaaggacaaggtagcatcggcgaaaaagcttcagcagaaaacgccttaaatcaagcgatcaataacgcaaaaaattcattattccctaacacaaaagccataagagatgtgcaaaacgccttaaatgcagtgaaagattcaaacaaaatcgctaaccgattcgcaggaaatggtggatcgggcggtattttcaatgaactcagcttggggtataaatattttttgggtaaaaaaaggattatagggtttaggcactctctttttttcggttaccaacttggtggcgttggttctgttcctggcagcggtttaatagcttttttaccctatggtttcaatacggatttgctcattaattggactaacgataagcgagcgtctcaagaatacgttgaaagaagggtaaaagggctctctatattttacaaagatatgaccggcagaacgctagacgctgatacattaaaaagagcatcaaggcacataatcagaaaatcttcagggcttgtgattggcatggaactaggggctagcacttggtttgcaagtaacaatctcaccccttttaatcaagtcaagagtcgcacgatttttcagttacaagggaaatttggcgttcgttttagtagtgatgaatacgatattgatcgctatggcgatgaaaactatcttgggggttctagtgttgaattaggggttaaagtgccagcgtttaaagtcaattattatagcgatgattacggggataaattggattataaaagagtggtgagcgtttatcttaactatacgtataactttaaaaacaaacattaa

SEQ ID NO: 404 - DNA (genomic), 213 bp, Helicobacter pylori; double-stranded, circular
  misc_feature (B) LOCATION 1...213
  hypothetical: NO
  anti-sense: NO
cttaattccctgagtcttcctcccaggacgccaaactcgattaccggtgcgattgacaatctaagctcaagcgcgatcaatctcactagcgctaccaccacttctccggcctatcaagctgtggctttagcgctcaatgcggctgtgggcatgtggcaagtcatagcctttggcatcagctgtggccctggcccaatcttggcccagaacatt

SEQ ID NO: 405 - DNA (genomic), 579 bp, Helicobacter pylori; double-stranded, circular
  misc_feature (B) LOCATION 1...579
  hypothetical: NO
  anti-sense: NO
cgctaccaccacttctccggcctatcaagctgtggctttagcgctcaatgcggctgtgggcatgtggcaagtcatagcctttggcatcagctgtggccctggcccaatcttggcccagaacatttagaaaatgggggcgttcgatcgtttgacaacacgccaaactacagctacaacaccggtagcggaacgaccaccaccacttgtaatggagccagtaatgtagggcccaatggtatcctatctagcagcgaataccaggttctcaataccgcttatcaaactatccaaaccgctttaaaccaaaaccaaggaggcgggatgcctgccttgaatagctccaaaaatatggtagtcaatatcaatcaaactttcacaaaaaaccctaccacagaatacacttaccccgatgggaatggcaattattattcaggcggttcatcaatcccaatccagctaaagattagtagcgtcaatgacgctgaaaaccttttgcaacaagccgctactatcatcaatgtccttaccacccaaaacccgcatgtgaatggtggtggtggggtcatgggggtttggcgg

SEQ ID NO: 406 - DNA (genomic), 1254 bp, Helicobacter pylori; double-stranded, circular
  misc_feature (B) LOCATION 1...1254
  hypothetical: NO
  anti-sense: NO
atggtggtggtggggtcatgggggtttggcggtaagaccgggaatgtgatggatatttttggcgatagttttaacgctattaacgaaatgatcaaaaacgctcaagccgttttagaaaaaacccaacagcttaacgctaatgaaaacacccaaatcacgcaaccagacaatttcaacccctacacttctaaagacacgcagttcgctcaagaaatgctcaatagagctaacgctcaagcagagattttgagcttagcccaacaagtagcggacaatttccacagcattcaagggcctatccaacaagatctagaagaatgcaccgcaggatcagccggtgtgattaacgacaacacttatggttcaggttgcgcgtttgtgaaagagactctcaattccttagagcaacacaccgcttattatggcaaccaggtcaatcaggatagggctttgtctcaaaccattttgaattttaaagaagcccttagcactttagggaacgactcaaaagcgatcaatagcggtatctctaacttgcctaacgctaagtcccttcaaaacatgacgcatgccactcaaaaccctaattccccagaaggtttgctcacttattctttggataccagcaaatacaaccagctccaaactgttgcgcaagaattaggcaaaaacccctttaggcgcatcggcgtgattaactatcaaaacaataacggggcgatgaacggcatcggcgtgcaagcgggctataagcaattctttggcaaaaaaaggaattgggggttaaggtattatggtttctttgattataaccatgcttatatcaaatctaatttttttaactcggcttctgatgtgtggacttatggggtgggtatggacgcgctttataacttcatcaacgataaaaacaccaactttttaggcaaaaataacaagctttctgtggggctttttggtggctttgcgttagccgggacttcgtggcttaattcccaacaagtgaatttgaccatgatgaatggcatttataacgctaatgtcagcgcttctaacttccaatttttgtttgatttaggcttgagaatgaacctcgctaggcccaagaaaaaagacagcgatcatgccgctcagcatggcatggaattgggcgtgaaaatccccaccattaacacggattattattctttcatgggggctgaactcaaatacagaaggctctatagcgtgtatctcaattatgtgtttgcttac

SEQ ID NO: 407 - DNA (genomic), 1482 bp, Helicobacter pylori; double-stranded, circular
  misc_feature (B) LOCATION 1...1482
  hypothetical: NO
  anti-sense: NO
atgcctgccttgaatagctccaaaaatatggtagtcaatatcaatcaaactttcacaaaaaaccctaccacagaatacacttaccccgatgggaatggcaattattattcaggcggttcatcaatcccaatccagctaaagattagtagcgtcaatgacgctgaaaaccttttgcaacaagccgctactatcatcaatgtccttaccacccaaaacccgcatgtgaatggtggcggtggggcatgggggtttggcggtaagaccgggaatgtgatggatatttttggcgatagttttaacgctattaacgaaatgatcaaaaacgctcaagccgttttagaaaaaacccaacagcttaacgctaatgaaaacacccaaatcacgcaaccagacaatttcaacccctacacttctaaagacacgcagttcgctcaagaaatgctcaatagagctaacgctcaagcagagattttgagcttagcccaacaagtagcggacaatttccacagcattcaagggcctatccaacaagatctagaagaatgcaccgcaggatcagctggtgtgattaacgacaacacttatggttcaggttgcgcgtttgtgaaagagactctcaattccttagagcaacacaccgcttattatggcaaccaggtcaatcaggatagggctttgtctcaaaccattttgaattttaaagaagcccttagcactttagggaacgactcaaaagcgatcaatagcggtatctctaacttgcctaacgctaagtcccttcaaaacatgacgcatgccactcaaaaccctaattccccagaaggtttgctcacttattctttggataccagcaaatacaaccagctccaaactgttgcgcaagaattaggcaaaaacccctttaggcgcatcggcgtgattaactatcaaaacaataacggggcgatgaacggcatcggcgtgcaagcgggctataagcaattctttggcaaaaaaaggaattgggggttaaggtattatggtttctttgattataaccatgcttatatcaaatctaatttttttaactcggcttctgatgtgtggacttatggggtgggtatggacgcgctttataacttcatcaacgataaaaacaccaactttttaggcaaaaataacaagctttctgtggggctttttggtggctttgcgttagccgggacttcgtggcttaattcccaacaagtgaatttgaccatgatgaatggcatttataacgctaatgtcagcgcttctaacttccaatttttgtttgatttaggcttgagaatgaacctcgctaggcccaagaaaaaagacagcgatcatgccgctcagcatggcatggaattgggcgtgaaaatccccaccattaacacggattattattctttcatgggggctgaactcaaatacagaaggctctatagcgtgtatctcaattatgtgtttgcttactag

SEQ ID NO: 408 - DNA (genomic), 2091 bp, Helicobacter pylori; double-stranded, circular
  misc_feature (B) LOCATION 1...2091
  hypothetical: NO
  anti-sense: NO
atgaaaatcaaaaaatccctctttgctctctctttctctctcatggcttcattatcaagggctgaagatgacggattttacatgagtgtgggctatcaaatcggtgaagcggtccaaaaagtgaaaaacactggagcattacaaaatcttgcagacagatacgataacttgagcaaccttttaaaccaatacaattacttaaattccttagtcaatctagccagcacgcctagcgcgattaccggtgcgattgacaatctaagctcaagcgcgatcaatctcactagcgctaccaccacttctccggcctatcaagctgtggctttagcgctcaatgcggctgtgggcatgtggcaagtcatagcctttggcatcagctgtggccctggccccaatcttggcccagaacatttagaaaatgggggcgttcgatcgtttgacaacacgccaaactacagctacaacaccggtagcggaacgaccaccaccacttgtaatggagccagtaatgtagggcccaatggtatcctatctagcagcgaataccaggttctcaataccgcttatcaaactatccaaaccgctttaaaccaaaaccaaggaggcgggatgcctgccttgaatagctccaaaaatatggtagtcaatatcaatcaaactttcacaaaaaaccctaccacagaatacacttaccccgatgggaatggcaattattattcaggcggttcatcaatcccaatccagctaaagattagtagcgtcaatgacgctgaaaaccttttgcaacaagccgctactatcatcaatgtccttaccacccaaaacccgcatgtgaatggtggcggtggggcatgggggtttggcggtaagaccgggaatgtgatggatatttttggcgatagttttaacgctattaacgaaatgatcaaaaacgctcaagccgttttagaaaaaacccaacagcttaacgctaatgaaaacacccaaatcacgcaaccagacaatttcaacccctacacttctaaagacacgcagttcgctcaagaaatgctcaatagagctaacgctcaagcagagattttgagcttagcccaacaagtagcggacaatttccacagcattcaagggcctatccaacaagatctagaagaatgcaccgcaggatcagctggtgtgattaacgacaacacttatggttcaggttgcgcgtttgtgaaagagactctcaattccttagagcaacacaccgcttattatggcaaccaggtcaatcaggatagggctttgtctcaaaccattttgaattttaaagaagcccttagcactttagggaacgactcaaaagcgatcaatagcggtatctctaacttgcctaacgctaagtcccttcaaaacatgacgcatgccactcaaaaccctaattccccagaaggtttgctcacttattctttggataccagcaaatacaaccagctccaaactgttgcgcaagaattaggcaaaaacccctttaggcgcatcggcgtgattaactatcaaaacaataacggggcgatgaacggcatcggcgtgcaagcgggctataagcaattctttggcaaaaaaaggaattgggggttaaggtattatggtttctttgattataaccatgcttatatcaaatctaatttttttaactcggcttctgatgtgtggacttatggggtgggtatggacgcgctttataacttcatcaacgataaaaacaccaactttttaggcaaaaataacaagctttctgtggggctttttggtggctttgcgttagccgggacttcgtggcttaattcccaacaagtgaatttgaccatgatgaatggcatttataacgctaatgtcagcgcttctaacttccaatttttgtttgatttaggcttgagaatgaacctcgctaggcccaagaaaaaagacagcgatcatgccgctcagcatggcatggaattgggcgtgaaaatccccaccattaacacggattattattctttcatgggggctgaactcaaatacagaaggctctatagcgtgtatctcaattatgtgtttgcttactag

SEQ ID NO: 409 - DNA (genomic), 828 bp, Helicobacter pylori; double-stranded, circular
  misc_feature (B) LOCATION 1...828
  hypothetical: NO
  anti-sense: NO
ttgctagatgtcaaagccaattcccccgcctatcaagcggtgcttttagcattgaacgctgcagtgggcttgtggcaagttacaagctatgcctttaccgcttgtggtcctggtagcaatgagaacgcgaatggaggtatccaaacctttaataatgtgccaggacaaaacacgacgaccatcacttgtaattcgtattatgagccaggacatggcgggccaatatccactgaaaattatgcgatcatcaacaaggcttatcaaatcattcaaaaggctttgacagccaatggagaagggatcccagttttaagcaacaccactacaaaacttgatttcactatcaatggagacaaaagaacgggtggcgaaccaaataaaaaattagtatacccatggagtcatgggaaacctatttcaacctcgtggaatgcaaccataacagtaccaacaacagaaaatatcaatacaaccaatagcgctcaagagcttttaaaacaagcgagcatcattatcactaccctgaatagtgcatgcccaaacttccaaaatggtggtagcggttattgggcagggataagtggcaatgggacaatgtgtgggatgtttaagaatgaaatcagcgctatccaaggcatgatcgctaacgcgcaagaagctgtcgcgcaagccaaaatcgttagtgaaaacacgcaaaatcaaaacagcctagacgctgaaaaccattcaacccctacacagacgctagttttgctgaaagcatgctcaaaaacgcgaagcccaagcggagattttaaaccaagccgaacaagtggtgaaaaactttga

SEQ ID NO: 410 - DNA (genomic), 1251 bp, Helicobacter pylori; double-stranded, circular
  misc_feature (B) LOCATION 1...1251
  hypothetical: NO
  anti-sense: NO
atgtgtgggatgtttaagaatgaaatcagcgctatccaaggcatgatcgctaacgcgcaagaagctgtcgcgcaagccaaaatcgttagtgaaaacacgcaaaatcaaaacagcctagacgctggaaaaccattcaacccctacacagacgctagttttgctgaaagcatgctcaaaaacgcgcaagcccaagcggagattttaaaccaagccgaacaagtggtgaaaaactttgaaaaaatccctacagcctttgtaaatgactctttaggggtgtgttatgaagtgcaaggaggtgagcgtcgtggcaccaatccgggtcagacgacttctaacacttggggggcaggctgtgcgtatgtaggacaaacgataacaaatcttaaaaacagcatcgcccattttggcactcaagagcagcagatacagcaagccgaaaacatcgctgacactctggtgaatttcaaatctagatacagcgaattgggcaacacttataacagcatcaccactgcgctctctaatatccctaacgcgcaaagcttgcaaaatgcggtgagtaaaaagaataacccctatagcccgcaaggcatagacaccaattactacctcaatcaaaactcttacaaccaaatccaaaccatcaaccaagaactcgggcgtaacccctttaggaaagtggggattgttagttctcaaaccaataatggcgcgatgaatgggatcggtattcaggtgggttacaaacaattctttggccaaaaaagaaaatggggcgctaggtattacggcttttttgattacaaccatgcgttcattaaatccagcttcttcaactcggcttctgacgtgtggacttatggctttggagcggacgctctttataatttcatcaacgataaagccaccaatttcttaggcaaaaacaacaagctttctgtggggctttttgggggtattgcattagccgggacttcatggcttaattctgagtatgtgaatttagccaccatgaataacgtctataacgctaaaatgaacgtggcgaatttccaattcttattcaacatgggagtgaggatgaatttagccaggcctaagaaaaaagacagcgatcatgcggctcagcatgggattgagttagggcttaaaatccccaccatcaacacgaactactactcctttatgggggctgaactcaaataccgaaggctctatagcgtgtatttgaattacgtgttcgcttactaa

SEQ ID NO: 411 - DNA (genomic), 1908 bp, Helicobacter pylori; double-stranded, circular
  misc_feature (B) LOCATION 1...1908
  hypothetical: NO
  anti-sense: NO
ctgtcctccgatccgagtgctgtcaacgacgcaagggataatctaggctcaagcactaggaatttgctagatgtcaaagccaattcccccgcctatcaagcggtgcttttagcattgaacgctgcagtgggcttgtggcaagttacaagctatgcctttaccgcttgtggtcctggtagcaatgagaacgcgaatggaggtatccaaacctttaataatgtgccaggacaaaacacgacgaccatcacttgtaattcgtattatgagccaggacatggcgggccaatatccactaaaaattatgcgatcatcaacaaggcttatcaaatcattcaaaaggctttgacagccaatggagaagggatcccagttttaagcaacaccactacaaaacttgatttcactatcaatggagacaaaagaacgggtggcgaaccaaataaaaaattagtatacccatggagtcatgggaaagctatttcaacctcgtggaatgcaaccataacagcaccaacaacagaaaatatcaatacaaccaatagcgctcaagagcttttaaaacaagcgagcatcattatcactaccctgaatagtgcatgcccaaacttccaaaatggtggtagcggttattgggcagggataagtggcaatgggacaatgtgtgggatgtttaagaatgaaatcagcgctatccaaggcatgatcgctaacgcgcaagaagctgtcgcgcaagccaaaatcgttagtgaaaacacgcaaaatcaaaacagcctagacgctggaaaaccattcaacccctacacagacgctagttttgctgaaagcatgctcaaaaacgcgcaagcccaagcggagattttaaaccaagccgaacaagtggtgaaaaactttgaaaaaatccctacagcctttgtaaatgactctttaggggtgtgttatgaagtgcaaggaggtgagcgtcgtggcaccaatccgggtcagacgacttctaacacttggggggcaggctgtgcgtatgtaggacaaacgataacaaatcttaaaaacagcatcgcccattttggcactcaagagcagcagatacagcaagccgaaaacatcgctgacactctggtgaatttcaaatctagatacagcgaattgggcaacacttataacagcatcaccactgcgctctctaatatccctaacgcgcaaagcttgcaaaatgcggtgagtaaaaagaataacccctatagcccgcaaggcatagacaccaattactacctcaatcaaaactcttacaaccaaatccaaaccatcaaccaagaactcgggcgtaacccctttaggaaagtggggattgttagttctcaaaccaataatggcgcgatgaatgggatcggtattcaggtgggttacaaacaattctttggccaaaaaagaaaatggggcgctaggtattacggcttttttgattacaaccatgcgttcattaaatccagcttcttcaactcggcttctgacgtgtggacttatggctttggagcggacgctctttataatttcatcaacgataaagccaccaatttcttaggcaaaaacaacaagctttctgtggggctttttgggggtattgcattagccgggacttcatggcttaattctgagtatgtgaatttagccaccatgaataacgtctataacgctaaaatgaacgtggcgaatttccaattcttattcaacatgggagtgaggatgaatttagccaggcctaagaaaaaagacagcgatcatgcggctcagcatgggattgagttagggcttaaaatccccaccatcaacacgaactactactcctttatgggggctgaactcaaataccgaaggctctatagcgtgtatttgaattacgtgttcgcttactaa

SEQ ID NO: 412 - DNA (genomic), 1938 bp, Helicobacter pylori; double-stranded, circular
  misc_feature (B) LOCATION 1...1938
  hypothetical: NO
  anti-sense: NO
tcgaattacaacaacctaaacactcttgtatcgctgtcctccgatccgagtgctgtcaacgacgcaagggataatctaggctcaagcgctaggaatttgctagatgtcaaagccaattcccccgcctatcaagcggtgcttttagcattgaacgctgcagtgggcttgtggcaagttacaagctatgcctttaccgcttgtggtcctggtagcaatgagaacgcgaatggaggtatccaaacctttaataatgtgccaggacaaaacacgacgaccatcacttgtaattcgtattatgagccaggacatggcgggccaatatccactgaaaattatgcgatcatcaacaaggcttatcaaatcattcaaaaggctttgacagccaatggagaagggatcccagttttaagcaacaccactacaaaacttgatttcactatcaatggagacaaaagaacgggtggcgaaccaaataaaaaattagtatacccatggagtcatgggaaagctatttcaacctcgtggaatgcaaccataacagtaccaacaacagaaaatatcaatacaaccaatagcgctcaagagcttttaaaacaagcgagcatcattatcactaccctgaatagtgcatgcccaaacttccaaaatggtggtagcggttattgggcagggataagtggcaatgggacaatgtgtgggatgtttaagaatgaaatcagcgctatccaaggcatgatcgctaacgcgcaagaagctgtcgcgcaagccaaaatcgttagtgaaaacacgcaaaatcaaaacagcctagacgctggaaaaccattcaacccctacacagacgctagttttgctgaaagcatgctcaaaaacgcgcaagcccaagcggagattttaaaccaagccgaacaagtggtgaaaaactttgaaaaaatccctacagcctttgtaaatgactctttaggggtgtgttatgaagtgcaaggaggtgagcgtcgtggcaccaatccgggtcagacgacttctaacacttggggggcaggctgtgcgtatgtaggacaaacgataacaaatcttaaaaacagcatcgcccattttggcactcaagagcagcagatacagcaagccgaaaacatcgctgacactctggtgaatttcaaatctagatacagcgaattgggcaacacttataacagcatcaccactgcgctctctaatatccctaacgcgcaaagcttgcaaaatgcggtgagtaaaaagaataacccctatagcccgcaaggcatagacaccaattactacctcaatcaaaactcttacaaccaaatccaaaccatcaaccaagaactcgggcgtaacccctttaggaaagtggggattgttagttctcaaaccaataatggcgcgatgaatgggatcggtattcaggtgggttacaaacaattctttggccaaaaaagaaaatggggcgctaggtattacggcttttttgattacaaccatgcgttcattaaatccagcttcttcaactcggcttctgacgtgtggacttatggctttggagcggacgctctttataatttcatcaacgataaagccaccaatttcttaggcaaaaacaacaagctttctgtggggctttttgggggtattgcattagccgggacttcatggcttaattctgagtatgtgaatttagccaccatgaataacgtctataacgctaaaatgaacgtggcgaatttccaattcttattcaacatgggagtgaggatgaatttagccaggcctaagaaaaaagacagcgatcatgcggctcagcatgggattgagttagggcttaaaatccccaccatcaacacgaactactattcctttatgggggctgaactcaaataccgaaggctctatagcgtgtatttgaattacgtgttcgcttac

SEQ ID NO: 413 - DNA (genomic), 2007 bp, Helicobacter pylori; double-stranded, circular
  misc_feature (B) LOCATION 1...2007
  hypothetical: NO
  anti-sense: NO
atggtgaaaaacaccaaaggcattcaacagctttcagagaattatgaaaagttgaacaatcttttaaataattacaacaccctaaacactcttgtaaagctgtcctccgatccgagtgctgtcaacgacgcaagggataatctaggctcaagcactaggaatttgctagatgtcaaagccaattcccccgcctatcaagcggtgcttttagcattgaacgctgcagtgggcttgtggcaagttacaagctatgcctttaccgcttgtggtcctggtagcaatgagaacgcgaatggaggtatccaaacctttaataatgtgccaggacaaaacacgacgaccatcacttgtaattcgtattatgagccaggacatggcgggccaatatccactaaaaattatgcgatcatcaacaaggcttatcaaatcattcaaaaggctttgacagccaatggagaagggatcccagttttaagcaacaccactacaaaacttgatttcactatcaatggagacaaaagaacgggtggcgaaccaaataaaaaattagtatacccatggagtcatgggaaagctatttcaacctcgtggaatgcaaccataacagcaccaacaacagaaaatatcaatacaaccaatagcgctcaagagcttttaaaacaagcgagcatcattatcactaccctgaatagtgcatgcccaaacttccaaaatggtggtagcggttattgggcagggataagtggcaatgggacaatgtgtgggatgtttaagaatgaaatcagcgctatccaaggcatgatcgctaacgcgcaagaagctgtcgcgcaagccaaaatcgttagtgaaaacacgcaaaatcaaaacagcctagacgctggaaaaccattcaacccctacacagacgctagttttgctgaaagcatgctcaaaaacgcgcaagcccaagcggagattttaaaccaagccgaacaagtggtgaaaaactttgaaaaaatccctacagcctttgtaaatgactctttaggggtgtgttatgaagtgcaaggaggtgagcgtcgtggcaccaatccgggtcagacgacttctaacacttggggggcaggctgtgcgtatgtaggacaaacgataacaaatcttaaaaacagcatcgcccattttggcactcaagagcagcagatacagcaagccgaaaacatcgctgacactctggtgaatttcaaatctagatacagcgaattgggcaacacttataacagcatcaccactgcgctctctaatatccctaacgcgcaaagcttgcaaaatgcggtgagtaaaaagaataacccctatagcccgcaaggcatagacaccaattactacctcaatcaaaactcttacaaccaaatccaaaccatcaaccaagaactcgggcgtaacccctttaggaaagtggggattgttagttctcaaaccaataatggcgcgatgaatgggatcggtattcaggtgggttacaaacaattctttggccaaaaaagaaaatggggcgctaggtattacggcttttttgattacaaccatgcgttcattaaatccagcttcttcaactcggcttctgacgtgtggacttatggctttggagcggacgctctttataatttcatcaacgataaagccaccaatttcttaggcaaaaacaacaagctttctgtggggctttttgggggtattgcattagccgggacttcatggcttaattctgagtatgtgaatttagccaccatgaataacgtctataacgctaaaatgaacgtggcgaatttccaattcttattcaacatgggagtgaggatgaatttagccaggcctaagaaaaaagacagcgatcatgcggctcagcatgggattgagttagggcttaaaatccccaccatcaacacgaactactactcctttatgggggctgaactcaaataccgaaggctctatagcgtgtatttgaattacgtgttcgcttactaa

SEQ ID NO: 414 - DNA (genomic), 2115 bp, Helicobacter pylori; double-stranded, circular
  misc_feature (B) LOCATION 1...2115
  hypothetical: NO
  anti-sense: NO
atgatgaaaaaaacccccctactctctctctctctctcgtttttgctccacgctgaagacgacggcttttacgcaagcgcgggaattcggatcggtgaagccgctcaaatggtgaaaaacaccaaaggcattcaacagctttcagagaattatgaaaagttgaacaatcttttaaataattacaacaccctaaacactcttgtaaagctgtcctccgatccgagtgctgtcaacgacgcaagggataatctaggctcaagcactaggaatttgctagatgtcaaagccaattcccccgcctatcaagcggtgcttttagcattgaacgctgcagtgggcttgtggcaagttacaagctatgcctttaccgcttgtggtcctggtagcaatgagaacgcgaatggaggtatccaaacctttaataatgtgccaggacaaaacacgacgaccatcacttgtaattcgtattatgagccaggacatggcgggccaatatccactaaaaattatgcgatcatcaacaaggcttatcaaatcattcaaaaggctttgacagccaatggagaagggatcccagttttaagcaacaccactacaaaacttgatttcactatcaatggagacaaaagaacgggtggcgaaccaaataaaaaattagtatacccatggagtcatgggaaagctatttcaacctcgtggaatgcaaccataacagcaccaacaacagaaaatatcaatacaaccaatagcgctcaagagcttttaaaacaagcgagcatcattatcactaccctgaatagtgcatgcccaaacttccaaaatggtggtagcggttattgggcagggataagtggcaatgggacaatgtgtgggatgtttaagaatgaaatcagcgctatccaaggcatgatcgctaacgcgcaagaagctgtcgcgcaagccaaaatcgttagtgaaaacacgcaaaatcaaaacagcctagacgctggaaaaccattcaacccctacacagacgctagttttgctgaaagcatgctcaaaaacgcgcaagcccaagcggagattttaaaccaagccgaacaagtggtgaaaaactttgaaaaaatccctacagcctttgtaaatgactctttaggggtgtgttatgaagtgcaaggaggtgagcgtcgtggcaccaatccgggtcagacgacttctaacacttggggggcaggctgtgcgtatgtaggacaaacgataacaaatcttaaaaacagcatcgcccattttggcactcaagagcagcagatacagcaagccgaaaacatcgctgacactctggtgaatttcaaatctagatacagcgaattgggcaacacttataacagcatcaccactgcgctctctaatatccctaacgcgcaaagcttgcaaaatgcggtgagtaaaaagaataacccctatagcccgcaaggcatagacaccaattactacctcaatcaaaactcttacaaccaaatccaaaccatcaaccaagaactcgggcgtaacccctttaggaaagtggggattgttagttctcaaaccaataatggcgcgatgaatgggatcggtattcaggtgggttacaaacaattctttggccaaaaaagaaaatggggcgctaggtattacggcttttttgattacaaccatgcgttcattaaatccagcttcttcaactcggcttctgacgtgtggacttatggctttggagcggacgctctttataatttcatcaacgataaagccaccaatttcttaggcaaaaacaacaagctttctgtggggctttttgggggtattgcattagccgggacttcatggcttaattctgagtatgtgaatttagccaccatgaataacgtctataacgctaaaatgaacgtggcgaatttccaattcttattcaacatgggagtgaggatgaatttagccaggcctaagaaaaaagacagcgatcatgcggctcagcatgggattgagttagggcttaaaatccccaccatcaacacgaactactactcctttatgggggctgaactcaaataccgaaggctctatagcgtgtatttgaattacgtgttcgcttactaa

SEQ ID NO: 415 - DNA (genomic), 768 bp, Helicobacter pylori; double-stranded, circular
  misc_feature (B) LOCATION 1...768
  hypothetical: NO
  anti-sense: NO
atgaaaaagatttttttaggtatggcattagcctttagtgtgtccatggcagaaaaaagcggcgcgtttttaggaggggggtttcaatattctaatttagaaaaccaaaacaccacccgcaccccaagcgctaacaataacaccccgataaacacttcaatgtttggcaacaatcaagcggctccagcccaagaaacgccaagcgtgatcaacaccaataattacgggcaaatgtatggggtagatgcgatggcagggtataagtggttctttggcaaaaccaaacgctttggctttaggacttatggatactacagctataaccatgcgaatttgagctttgtaggcagtaagcttggaatcatggatggcgcatctcaagtgaataacttcacttatggcgtgggctttgatgcgctctataacttctatgaaagcaaagagggctataacacagcagggttgttcgtgggctttggattaggaggggattcgtttatcgttcaaggagagagctacttgaaatctcagatgcaaatttgcaacaacaccgccggctgttcagcgagcatgaacacgagctacttccaaatgcctgtggaatttggttttaggagcaatttctctaaacacagcgggattgaagtgggctttaaattgcctttatttaccaaccaattctataaagaaaggggcgtagatggatcggtagatgtgttctataaaaggaatttctctatctattttaactacatgatcaacctctaa

SEQ ID NO: 416 - DNA (genomic), 765 bp, Helicobacter pylori; double-stranded, circular
  misc_feature (B) LOCATION 1...765
  hypothetical: NO
  anti-sense: NO
atgaaaaagatttttttaggtatggcattagcctttagtgtgtccatggcagaaaaaagcggcgcgtttttaggaggggggtttcaatattctaatttagaaaaccaaaacaccacccgcaccccaagcgctaacaataacaccccgataaacacttcaatgtttggcaacaatcaagcggctccagcccaagaaacgccaagcgtgatcaacaccaataattacgggcaaatgtatggggtagatgcgatggcagggtataagtggttctttggcaaaaccaaacgctttggctttaggacttatggatactacagctataaccatgcgaatttgagctttgtaggcagtaagcttggaatcatggatggcgcatctcaagtgaataacttcacttatggcgtgggctttgatgcgctctataacttctatgaaagcaaagagggctataacacagcagggttgttcgtgggctttggattaggaggggattcgtttatcgttcaaggagagagctacttgaaatctcagatgcaaatttgcaacaacaccgccggctgttcagcgagcatgaacacgagctacttccaaatgcctgtggaatttggttttaggagcaatttctctaaacacagcgggattgaagtgggctttaaattgcctttatttaccaaccaattctataaagaaaggggcgtagatggatcggtagatgtgttctataaaaggaatttctctatctattttaactacatgatcaacctc

SEQ ID NO: 417 - DNA (genomic), 1023 bp, Helicobacter pylori; double-stranded, circular
  misc_feature (B) LOCATION 1...1023
  hypothetical: NO
  anti-sense: NO
atgattttaagcattgaaagttcttgcgatgacagctctttagcccttacaagaatagaggacgccaagctcatcgctcattttaaaatctctcaagaaaagcaccacagctcttatgggggcgttgtgcctgagattgcatcgcgcctgcatgctgagaatttgccgcttttattagaacgcgttaaaataagcttgaataaggatttttccaaaattaaagccatcgctatcactaatcagccaggtttgagcgttactttaatagagggtttgatgatggcaaaagccttgagcttgtctttgaatttacccttgattttggaagatcatttgagagggcatgtgtattcgctctttatcaatgaaaaacaaacccgcatgcctttaagcgtgctgctagtctctggggggcattctttaattttagaggctagagattatgaagacattaaaatcgttgccacgagtttagacgatagctttggggagagttttgataaggtttcaaaaatgcttgatttaggctatccaggaggccccatagtggaaaaattagcccttgattatgcacacccaaacgagcctttaatgttccctatccctttaaaaaacagcccgaatttggcttttagtttttcaggtttaaaaaatgcggtgcgtttggaggttgaaaaaaacgcccataatttgaacgatgaggtaaaacaaaagattggctatcattttcaaagcgcggctatcgagcatttaatccagcagactaaacgctattttaaaatcaaacgccctaaaatttttggcattgtggggggagcgagccaaaatctagccttaagaaaggcgtttgaggatttgtgtgctgagtttgattgcgagcttgttttagcccctttagaattttgcagcgacaatgccgccatgatagggcgatcaagcctagaagcttatcaaaaaaagcgctttatccctttagaaaaagccgatatttcgccaagaacgctgttaaaaaattttgagtga

SEQ ID NO: 418 - DNA (genomic), 1023 bp, Helicobacter pylori; double-stranded, circular; identical to SEQ ID NO: 417
  misc_feature (B) LOCATION 1...1023
  hypothetical: NO
  anti-sense: NO

SEQ ID NO: 419 - DNA (genomic), 1023 bp, Helicobacter pylori; double-stranded, circular; identical to SEQ ID NO: 417
  misc_feature (B) LOCATION 1...1023
  hypothetical: NO
  anti-sense: NO

SEQ ID NO: 420 - DNA (genomic), 1062 bp, Helicobacter pylori; double-stranded, circular
  misc_feature (B) LOCATION 1...1062
  hypothetical: NO
  anti-sense: NO
caaggtataattcaagcaaaaacaccacccaaagataaagacatgattttaagcattgaaagttcttgcgatgacagctctttagcccttacaagaatagaggacgccaagctcatcgctcattttaaaatctctcaagaaaagcaccacagctcttatgggggcgttgtgcctgagattgcatcgcgcctgcatgctgagaatttgccgcttttattagaacgcgttaaaataagcttgaataaggatttttccaaaattaaagccatcgctatcactaatcagccaggtttgagcgttactttaatagagggtttgatgatggcaaaagccttgagcttgtctttgaatttacccttgattttggaagatcatttgagagggcatgtgtattcgctctttatcaatgaaaaacaaacccgcatgcctttaagcgtgctgctagtctctggggggcattctttaattttagaggctagagattatgaagacattaaaatcgttgccacgagtttagacgatagctttggggagagttttgataaggtttcaaaaatgcttgatttaggctatccaggaggccccatagtggaaaaattagcccttgattatgcacacccaaacgagcctttaatgttccctatccctttaaaaaacagcccgaatttggcttttagtttttcaggtttaaaaaatgcggtgcgtttggaggttgaaaaaaacgcccataatttgaacgatgaggtaaaacaaaagattggctatcattttcaaagcgcggctatcgagcatttaatccagcagactaaacgctattttaaaatcaaacgccctaaaatttttggcattgtggggggagcgagccaaaatctagccttaagaaaggcgtttgaggatttgtgtgctgagtttgattgcgagcttgttttagcccctttagaattttgcagcgacaatgccgccatgatagggcgatcaagcctagaagcttatcaaaaaaagcgctttatccctttagaaaaagccgatatttcgccaagaacgctgttaaaaaattttgag

SEQ ID NO: 421 - DNA (genomic), 597 bp, Helicobacter pylori; double-stranded, circular
  misc_feature (B) LOCATION 1...597
  hypothetical: NO
  anti-sense: NO
atgttagttacaaaacttgcccccgattttaaagcgcctgccgttttaggaaacaatgaggttgatgaacactttgagctttctaaaaatttaggcaaaaatggtgtgatccttttcttttggccaaaagattttacttttgtatgccctacagaaatcattgcgtttgacaaaagagtgaaagacttccacgaaaaaggctttaatgtgattggcgtgtctattgacagcgaacaagtgcatttcgcatggaaaaacacccctgtggaaaaaggcggtatcggtcaagtgtctttccctatggtggctgatatcactaagagcatttctagagactatgatgtgctgtttgaagaagcgatcgctttgagaggtgcttttttgattgataaaaacatgaaagtaagacacgcagtgatcaatgacttgccattaggtaggaatgcagatgaaatgcttcgcatggtagacgctctcttacactttgaagaacatggtgaagtatgcccagcaggttggagaaaaggcgataaaggcatgaaagcaactcaccaaggcgttgcagagtatcttaaagaaaattccattaagctttaa

SEQ ID NO: 422 - DNA (genomic), 636 bp, Helicobacter pylori; double-stranded, circular
  misc_feature (B) LOCATION 1...636
  hypothetical: NO
  anti-sense: NO
ttgatccaacaaaattttaaaacacttaaggagttgtatatgttagttacaaaacttgcccccgattttaaagcgcctgccgttttaggaaacaatgaggttgatgaacactttgagctttctaaaaatttaggcaaaaatggtgtgatccttttcttttggccaaaagattttacttttgtatgccctacagaaatcattgcgtttgacaaaagagtgaaagacttccacgaaaaaggctttaatgtgattggcgtgtctattgacagcgaacaagtgcatttcgcatggaaaaacacccctgtggaaaaaggcggtatcggtcaagtgtctttccctatggtggctgatatcactaagagcatttctagagactatgatgtgctgtttgaagaagcgatcgctttgagaggtgcttttttgattgataaaaacatgaaagtaagacacgcagtgatcaatgacttgccattaggtaggaatgcagatgaaatgcttcgcatggtagacgctctcttacactttgaagaacatggtgaagtatgcccagcaggttggagaaaaggcgataaaggcatgaaagcaactcaccaaggcgttgcagagtatcttaaagaaaattccattaagctttaa

SEQ ID NO: 423 - DNA (genomic), 657 bp, Helicobacter pylori; double-stranded, circular
  misc_feature (B) LOCATION 1...657
  hypothetical: NO
  anti-sense: NO
attaaatctgttttaggtttaattttgatccaacaaaattttaaaacacttaaggagttgtatatgttagttacaaaacttgcccccgattttaaagcgcctgccgttttaggaaacaatgaggttgatgaacactttgagctttctaaaaatttaggcaaaaatggtgtgatccttttcttttggccaaaagattttacttttgtatgccctacagaaatcattgcgtttgacaaaagagtgaaagacttccacgaaaaaggctttaatgtgattggcgtgtctattgacagcgaacaagtgcatttcgcatggaaaaacacccctgtggaaaaaggcggtatcggtcaagtgtctttccctatggtggctgatatcactaagagcatttctagagactatgatgtgctgtttgaagaagcgatcgctttgagaggtgcttttttgattgataaaaacatgaaagtaagacacgcagtgatcaatgacttgccattaggtaggaatgcagatgaaatgcttcgcatggtagacgctctcttacactttgaagaacatggtgaagtatgcccagcaggttggagaaaaggcgataaaggcatgaaagcaactcaccaaggcgttgcagagtatcttaaagaaaattccattaagctt

SEQ ID NO: 424 - DNA (genomic), 1287 bp, Helicobacter pylori; double-stranded, circular
  misc_feature (B) LOCATION 1...1287
  hypothetical: NO
  anti-sense: NO
atgaagaaaaaatttctgtcattaaccttaggttcgcttttagtttccgctttaagcgctgaagacaacggcttttttgtgagcgccggctatcaaatcggtgaatccgctcaaatggtgaaaaacaccaaaggcattcaagatctttcagacagctatgaaagattgaacaaccttttaacgaattatagcgtcctaaacgctctcatcaggcagtccgccgaccccaacgccatcaataacgcaaggggcaatttgaacgcgagcgcgaagaatttgatcaatgataaaaagaattccccggcgtatcaagccgtgcttttagccttgaatgcggcagcggggttgtggcaagtcatgagctatgcgatcagcccttgtggtcccggtaaagacacaagcaaaaatgggggcgttcaaactttccacaacacgccttcaaatcaatggggaggcactaccattacttgtggcactactggttatgaaccaggaccatacagcattttatccactgaaaattacgcgaaaatcaataaagcttatcaaatcatccaaaaggcttttgggagcagcggaaaagatattcctgccttaagcgacaccaacacagaactcaaattcacaatcaataaaaataatggaaacacgaatacgaataataatggagaagaaattgttacaaaaaataacgctcaagttcttttagaacaggctagcaccattataactacccttaatagcgcatgcccatggatcaacaatggtggtgcaggtggtgcgagtagtggtagtttatgggaaggaatatatttgaaaggcgatgggagcgcttgcgggatttttaaaaatgaaatcagcgcgattcaagacatgatcaaaaacgctgcaatagccgtagagcaatccaagatcgttgctgcaaacgcgcaaaaccagcgcaacctagacaccgggaagacattcaacccctataaagacgccaacttcgcccaaagcatgttcgctaacgccaaagcgcaagcggagattttaaaccgcgcccaagcagtggtgaaagactttgaaagaatccctgcagagttcgtaaaagactctttaggggtgtgccatgaagtgcaaaacggccatctccgtggcacgccatccggcacggtaactgataacacttggggagccggttgcgcgtatgtgggagagaccgtaacgaatctaaaagacagcatcgctcattttggcgaccaagccgagcgaatccataacgcgcgcaacctcgctacactttag

SEQ ID NO: 425 - DNA (genomic), 2073 bp, Helicobacter pylori; double-stranded, circular
  misc_feature (B) LOCATION 1...2073
  hypothetical: NO
  anti-sense: NO
atgaagaaaaaatttctgtcattaaccttaggttcgcttttagtttccgctttaagcgctgaagacaacggcttttttgtgagcgccggctatcaaatcggtgaatccgctcaaatggtgaaaaacaccaaaggcattcaagatctttcagacagctatgaaagattgaacaaccttttaacgaattatagcgtcctaaacgctctcatcaggcagtccgccgaccccaacgccatcaataacgcaaggggcaatttgaacgcgagcgcgaagaatttgatcaatgataaaaagaattccccggcgtatcaagccgtgcttttagccttgaatgcggcagcggggttgtggcaagtcatgagctatgcgatcagcccttgtggtcccggtaaagacacaagcaaaaatgggggcgttcaaactttccacaacacgccttcaaatcaatggggaggcactaccattacttgtggcactactggttatgaaccaggaccatacagcattttatccactgaaaattacgcgaaaatcaataaagcttatcaaatcatccaaaaggcttttgggagcagcggaaaagatattcctgccttaagcgacaccaacacagaactcaaattcacaatcaataaaaataatggaaacacgaatacgaataataatggagaagaaattgttacaaaaaataacgctcaagttcttttagaacaggctagcaccattataactacccttaatagcgcatgcccatggatcaacaatggtggtgcaggtggtgcgagtagtggtagtttatgggaaggaatatatttgaaaggcgatgggagcgcttgcgggatttttaaaaatgaaatcagcgcgattcaagacatgatcaaaaacgctgcaatagccgtagagcaatccaagatcgttgctgcaaacgcgcaaaaccagcgcaacctagacaccgggaagacattcaacccctataaagacgccaacttcgcccaaagcatgttcgctaacgccaaagcgcaagcggagattttaaaccgcgcccaagcagtggtgaaagactttgaaagaatccctgcagagttcgtaaaagactctttaggggtgtgccatgaagtgcaaaacggccatctccgtggcacgccatccggcacggtaactgataacacttggggagccggttgcgcgtatgtgggagagaccgtaacgaatctaaaagacagcatcgctcattttggcgaccaagccgagcgaatccataacgcgcgcaacctcgcctacactttagcgaacttcagcagtcagtatcaaaaactaggcgaacactatgacagcatcacagcggccatttcaagcttgcctgatgcgcaatctttacaaaatgtggtgagcaaaaagactaaccctaatagcccacaaggcatacaggataactactatattgactccaatatccattctcaagtgcaatctaggagtcaagaactcggcagtaaccctttcaggcgtgctggcttaatcgccgcttctaccaccaataacggcgcgatgaacgggataggctttcaagtgggctataagcaattctttgggaaaaacaaacgatggggcgcaaggtattacggctttgtggattacaaccacacctataacaaatcccaatttttcaacgcctcttctgatgtctggacctatggcgtggggagcgatttgttagtgaatttcatcaacgataaagccactaaacacaataagatttcttttggcgcgtttggcggtatcgccttagccgggacttcatggcttaattctcagtatgtgaatttagcgaacgtgaataattattataaggccaaaatcaacacggcgaatttccaattcttattcaatctgggtttgagaatgaacctcgctaggaaaaagcatagagcgaccgataacgcggcccaacatggcattgaactaggcacaaagatccccacgatcaacacgaattactattctttgctaggcactaccttgcaatacagaaggctttatagcgtgtatctcaactatgtgttcgcttactaa

SEQ ID NO: 426 - DNA (genomic), 750 bp, Helicobacter pylori; double-stranded, circular
  misc_feature (B) LOCATION 1...750
  hypothetical: NO
  anti-sense: NO
atgaaaaaaggtagtttagcaatcgttttaggatcgttactagcaagtgggacgttttatacggctctagctgatggaatgcctatgaagcaacagcacaataacatgggtgagtctgtggagttgcatttccactatcctattaaaggcaaacaagagcctaaaaataaccatttagttgtcttaatcgatcctaagatagaggctaataaagttatccctgaaaattatcaaaaagaatttgagaagtctttgttcctccaactgagtaattttttagagagaaagggctatagcgtttcgcaatttaaagatgttagcgaaatccctcaagacatcaaagaaaaagcgttgctcgttttacgcatggatgggaatgtggctatcttggaagatattgtagaagagagcgatgcgctcagtgaagaaaaagtgatagacatgtcttcagggtatttgaatctgaattttgttgagccaaaaagtgaagacattatccatagttttggtattgatgtttcaaagattaaggctgtgattgaaagggtggaattgcggcgtaccaattctggaggttttgtccccaaaacttttgtgcataggatcaaggaaaccgaccatgacagagccattaaaaagatcatgaatcaagcctatcacaaagtgatggcgcatatcaccaaagaattaagcaaaaaacacatggaacgttatgaaaaagtttctagtgaaatgaaaaagcgaaagtag

SEQ ID NO: 427 - DNA (genomic), 750 bp, Helicobacter pylori; double-stranded, circular; identical to SEQ ID NO: 426
  misc_feature (B) LOCATION 1...750
  hypothetical: NO
  anti-sense: NO

SEQ ID NO: 428 - DNA (genomic), 783 bp, Helicobacter pylori; double-stranded, circular
  misc_feature (B) LOCATION 1...783
  hypothetical: NO
  anti-sense: NO
gaattgattttaaagaaaaagaaagaaaggaatttaatgaaaaaaggtagtttagcaatcgttttaggatcgttactagcaagtgggacgttttatacggctctagctgatggaatgcctatgaagcaacagcacaataacatgggtgagtctgtggagttgcatttccactatcctattaaaggcaaacaagagcctaaaaataaccatttagttgtcttaatcgatcctaagatagaggctaataaagttatccctgaaaattatcaaaaagaatttgagaagtctttgttcctccaactgagtaattttttagagagaaagggctatagcgtttcgcaatttaaagatgttagcgaaatccctcaagacatcaaagaaaaagcgttgctcgttttacgcatggatgggaatgtggctatcttggaagatattgtagaagagagcgatgcgctcagtgaagaaaaagtgatagacatgtcttcagggtatttgaatctgaattttgttgagccaaaaagtgaagacattatccatagttttggtattgatgtttcaaagattaaggctgtgattgaaagggtggaattgcggcgtaccaattctggaggttttgtccccaaaacttttgtgcataggatcaaggaaaccgaccatgacagagccattaaaaagatcatgaatcaagcctatcacaaagtgatggcgcatatcaccaaagaattaagcaaaaaacacatggaacgttatgaaaaagtttctagtgaaatgaaaaagcgaaag

SEQ ID NO: 429 - DNA (genomic), 198 bp, Helicobacter pylori; double-stranded, circular
  misc_feature (B) LOCATION 1...198
  hypothetical: NO
  anti-sense: NO
ggcgttgcttatggttcgtttttaatggattggtttgccgcacggaccacttatagcggaggctttaccaaaaacaataatggaggttatgatagccatgggcgaaaggtgctttatggcacgcatgcggtgcaactcacctataaacctcatcgtttcctcataggaaggcttttattacctttcgcctcaaatctt

SEQ ID NO: 430 - DNA (genomic), 378 bp, Helicobacter pylori; double-stranded, circular
  misc_feature (B) LOCATION 1...378
  hypothetical: NO
  anti-sense: NO
gaggcatgcatgccaaaggcaagtcaggttttattctttggagcgtttttaagcacttctttacaaggttttgaagctaagctcaacggctttgtggatcaatccagcacgatcggttttaaccagcataaaatcaataaagaaagaggcatctaccctatgcagcaattcgcaacgattgcgggctatttagggcttggttttagcctgttacccaaaaaggtttcagaccatgttctaaaaggcaaaatagggggcatggtcggatctattttctatgacggcacgaagaagtttgaagacggctctgtggcttacaacctctttggttattacgatgggtttatgggggtctatactaatatcttacaaaccgga

SEQ ID NO: 431 - DNA (genomic), 714 bp, Helicobacter pylori; double-stranded, circular
  misc_feature (B) LOCATION 1...714
  hypothetical: NO
  anti-sense: NO
atgccaaaggcaagtcaggttttattctttggagcgtttttaagcacttctttacaaggttttgaagctaagctcaacggctttgtggatcaatccagcacgatcggttttaaccagcataaaatcaataaagaaagaggcatctaccctatgcagcaattcgcaacgattgcgggctatttagggcttggttttagcctgttacccaaaaaggtttcagaccatgttctaaaaggcaaaatagggggcatggtcggatctattttctatgacggcacgaagaagtttgaagacggctctgtggcttacaacctctttggttattacgatgggtttatgggggtctatactaatatcttacaaaccgatagccttgagacacagaacatgaaacacaacaaaaatgtccgcaattatgtctttagcgacgcgtatttagaatacgcttataagaattattttgaaataaaagccgggcgctatctctccactatgccttataaaagcggtcaaacgcaaggctttcaagtttctgggcaatacaagcatgcgcgcttgacttggtttagctcatggggtagggcgtttgcttatggttcgtttttaatggattggtttgccgcacggaacacttatagcggaggctttaccaaaaacaataatggaggttatgatagccatgggcgaaaggtgctttatggcacgcatgcggtg

SEQ ID NO: 432 - DNA (genomic), 783 bp, Helicobacter pylori; double-stranded, circular
  misc_feature (B) LOCATION 1...783
  hypothetical: NO
  anti-sense: NO
atgccaaaggcaagtcaggttttattctttggagcgtttttaagcacttctttacaaggttttgaagctaagctcaacggctttgtggatcaatccagcacgatcggttttaaccagcataaaatcaataaagaaagaggcatctaccctatgcagcaattcgcaacgattgcgggctatttagggcttggttttagcctgttacccaaaaaggtttcagaccatgttctaaaaggcaaaatagggggcatggtcggatctattttctatgacggcacgaagaagtttgaagacggctctgtggcttacaacctctttggttattacgatgggtttatgggggtctatactaatatcttacaaaccgatagccttgagacacagaacatgaaacacaacaaaaatgtccgcaattatgtctttagcgacgcgtatttagaatacgcttataagaattattttgaaataaaagccgggcgctatctctccactatgccttataaaagcggtcaaacgcaaggctttcaagtttctgggcaatacaagcatgcgcgcttgacttggtttagctcatggggtagggcgtttgcttatggttcgtttttaatggattggtttgccgcacggaccacttatagcggaggctttaccaaaaacaataatggaggttatgatagccatgggcgaaaggtgctttatggcacgcatgcggtgcaactcacctataaacctcatcgtttcctcataggaaggcttttattacctttcgcctcaaatctttaa

SEQ ID NO: 433 - DNA (genomic), 324 bp, Helicobacter pylori; double-stranded, circular
  misc_feature (B) LOCATION 1...324
  hypothetical: NO
  anti-sense: NO
tatgcctttttttgtatttttattttaatatctttgggagttagggttttggaaattaagaaatattttctttacgctctattttttttgcttttttctggtctttttttatccaaacttcaagcttataaattcaacatgagtattgttggaaaggtgagcagctatactaagtttggctttaacaaccaaagataccagccttctaaagacatttatcctacaggtagttatacttctttactcggcgaattgaatttgagcatgggattatacaagggcttgagggcagaagtaggggctatgatgggcagcgcttcccta

SEQ ID NO: 434 - DNA (genomic), 321 bp, Helicobacter pylori; double-stranded, circular
  misc_feature (B) LOCATION 1...321
  hypothetical: NO
  anti-sense: NO
gcctttttttgtatttttattttaatatctttgggagttagggttttggaaattaagaaatattttctttacgctctattttttttgcttttttctggtctttttttatccaaacttcaagcttataaattcaacatgagtattgttggaaaggtgagcagctatactaagtttggctttaacaaccaaagataccagccttctaaagacatttatcctacaggtagttatacttctttactcggcgaattgaatttgagcatgggattatacaagggcttgagggcagaagtaggggctatgatgggcagcgcttcccta

SEQ ID NO: 435 - DNA (genomic), 432 bp, Helicobacter pylori; double-stranded, circular
  misc_feature (B) LOCATION 1...432
  hypothetical: NO
  anti-sense: NO
cacaagaaagacaaattcagttttggcgtgaaaggggggcgctatgatgctgaagagtatgattggttcacttcttacactcaaggggttgaaggctttgtcaaatacaaagacaccaggttaagggtgatgtattcagacgctagggcttcagcgtcaagcgactggttttggtattttgggcgttactatacaagcggtaaggctctaatgattgcggatttgaaatacgaaaaggacaacctaaaaatcaacccgtatttttatgcgatctttcaaagaatgtatgcgccaggcattaatatcacttacgacaccaaccctaatttcaacaataagggctttcgttttgtaggcactttcgtgggtttttccccatttttgccactccggctaatcaaaatgatattatcctattccaacaagtgccat

SEQ ID NO: 436 - DNA (genomic), 429 bp, Helicobacter pylori; double-stranded, circular
  misc_feature (B) LOCATION 1...429
  hypothetical: NO
  anti-sense: NO
aagaaagacaaattcagttttggcgtgaaaggggggcgctatgatgctgaagagtatgattggttcacttcttacactcaaggggttgaaggctttgtcaaatacaaagacaccaggttaagggtgatgtattcagacgctagggcttcagcgtcaagcgactggttttggtattttgggcgttactatacaagcggtaaggctctaatgattgcggatttgaaatacgaaaaggacaacctaaaaatcaacccgtatttttatgcgatctttcaaagaatgtatgcgccaggcattaatatcacttacgacaccaaccctaatttcaacaataagggctttcgttttgtaggcactttcgtgggtttttccccatttttgccactccggctaatcaaaatgatattatcctattccaacaagtgccat

SEQ ID NO: 437 - DNA (genomic), 606 bp, Helicobacter pylori; double-stranded, circular
  misc_feature (B) LOCATION 1...606
  hypothetical: NO
  anti-sense: NO
gggctttcgttttgtaggcactttcgtgggtttttccccatttttgccactccggctaatcaaaatgatattatcctattccaacaagtgccattaggaaagagcgggcaaacttatttcttccgcactcgtttttactataacaagtggcaatttgggggtagcgtctataaaaatatcggtaacgctaatggcgatataggtatttatggcgaccctctagggtataacatttggacgaatagtatttatgacgcagaaattaacaatatcgttggcgctgatgttattaacgggtttttatatgtaggctcgcagtatagggggtttagttggaaaattttaggccgttggacggatagcccaagggctgatgaaaggagtctcgcgctctttttgagttatttttctaataagtataatattagaatggatttgaaactagaatattatggcaatatcaccaaaaaaggctattgtattgggtattgtggcatgtatgttccagttgatcctaatgggcctggcacgcaacctttaacacacaacgtgtattctgacaggagccatatcatgtttaacattacttatggttttaggatttac

SEQ ID NO: 438 - DNA (genomic), 1308 bp, Helicobacter pylori; double-stranded, circular
  misc_feature (B) LOCATION 1...1308
  hypothetical: NO
  anti-sense: NO
atgagtattgttggaaaggtgagcagctatactaagtttggctttaacaaccaaagataccagccttctaaagacatttatcctacaggtagttatacttctttactcggcgaattgaatttgagcatgggattatacaagggcttgagggcagaagtaggggctatgatggcagcgcttccctatgactctaccgcctatcaaggcaataatatccctaatggccagcccggatctaggacggatccttttggggcgggtatcttttggcaatacattggctggtatgcaggacatagcggtttaaacgtgcaaaaacctcgtttggctatggtgcataacgcttttttgagctacaactacaagaaagacaaattcagttttggcgtgaaaggggggcgctatgatgctgaagagtatgattggttcacttcttacactcaaggggttgaaggctttgtcaaatacaaagacaccaggttaagggtgatgtattcagacgctagggcttcagcgtcaagcgactggttttggtattttgggcgttactatacaagcggtaaggctctaatgattgcggatttgaaatacgaaaaagacaacctaaaaatcaacccttatttttatgcgatctttcaaagaatgtatgcgccaggcattaatatcacttacgacaccaaccctaatttcaacaataagggctttcgttttgtaggcactttcgtggggtttttccccatttttgccactccggctaatcaaaatgatattatcctattccaacaagtgccattaggaaagagcgggcaaacttatttcttccgcactcgtttttactataacaagtggcaatttgggggtagcgtctataaaaatatcggtaacgctaatggcgatataggtatttatggcgaccctctagggtataacatttggacgaatagtatttatgacgcagaaattaacaatatcgttggcgctgatgttattaacgggtttttatatgtaggctcgcagtatagggggtttagttggaaaattttaggccgttggacggatagcccaagggctgatgaaaggagtctcgcgctctttttgagttatttttctaataagtataatattagaatggatttgaaactagaatattatggcaatatcaccaaaaaaggctattgtattgggtattgtggcatgtatgttccagttgatcctaatgggcctggcacgcaacctttaacacacaacgtgtattctgacaggagccatatcatgtttaacattacttatggttttaggatttactag

SEQ ID NO: 439 - DNA (genomic), 1413 bp, Helicobacter pylori; double-stranded, circular
  misc_feature (B) LOCATION 1...1413
  hypothetical: NO
  anti-sense: NO
ttgggagttagggttttggaaattaagaaatattttctttacgctctattttttttgcttttttctggtctttttttatccaaacttcaagcttataaattcaacatgagtattgttggaaaggtgagcagctatactaagtttggctttaacaaccaaagataccagccttctaaagacatttatcctacaggtagttatacttctttactcggcgaattgaatttgagcatgggattatacaagggcttgagggcagaagtaggggctatgatggcagcgcttccctatgactctaccgcctatcaaggcaataatatccctaatggccagcccggatctaggacggatccttttggggcgggtatcttttggcaatacattggctggtatgcaggacatagcggtttaaacgtgcaaaaacctcgtttggctatggtgcataacgcttttttgagctacaactacaagaaagacaaattcagttttggcgtgaaaggggggcgctatgatgctgaagagtatgattggttcacttcttacactcaaggggttgaaggctttgtcaaatacaaagacaccaggttaagggtgatgtattcagacgctagggcttcagcgtcaagcgactggttttggtattttgggcgttactatacaagcggtaaggctctaatgattgcggatttgaaatacgaaaaagacaacctaaaaatcaacccttatttttatgcgatctttcaaagaatgtatgcgccaggcattaatatcacttacgacaccaaccctaatttcaacaataagggctttcgttttgtaggcactttcgtggggtttttccccatttttgccactccggctaatcaaaatgatattatcctattccaacaagtgccattaggaaagagcgggcaaacttatttcttccgcactcgtttttactataacaagtggcaatttgggggtagcgtctataaaaatatcggtaacgctaatggcgatataggtatttatggcgaccctctagggtataacatttggacgaatagtatttatgacgcagaaattaacaatatcgttggcgctgatgttattaacgggtttttatatgtaggctcgcagtatagggggtttagttggaaaattttaggccgttggacggatagcccaagggctgatgaaaggagtctcgcgctctttttgagttatttttctaataagtataatattagaatggatttgaaactagaatattatggcaatatcaccaaaaaaggctattgtattgggtattgtggcatgtatgttccagttgatcctaatgggcctggcacgcaacctttaacacacaacgtgtattctgacaggagccatatcatgtttaacattacttatggttttaggatttactag

SEQ ID NO: 440 - DNA (genomic), 471 bp, Helicobacter pylori; double-stranded, circular
  misc_feature (B) LOCATION 1...471
  hypothetical: NO
  anti-sense: NO
atgaaaagcattttgctctttataatttttgtagtttgtcagttagaaggcaaaaaattttcacaagataattttaaggtggattataactactatttgcgcaaacaggatttgcacatcattaaaacgcaaaacgatttgtccaatgcctggtatctccctccacaaaaagcccccaaagaacattcttgggtggattttgctaaaaaatatttaaacatgatggattatctaggcacttattttttgcctttttatcatagtttcacccccatttttcaatggtaccaccctaatatcaacccctacyaacgcaatgagtttaagttccaaatcagttttagagtgcctgtatttaggcatattctttggactaaaggcacgctttatctggyttatacccaaactaactggtttcaaatttataatgaccctcaatccgcccccatgcgaatgattaaatttcatgcc

SEQ ID NO: 441 - DNA (genomic), 756 bp, Helicobacter pylori; double-stranded, circular
  misc_feature (B) LOCATION 1...756
  hypothetical: NO
  anti-sense: NO
ttgatgaaaagcattttgctctttatgatttttgtagtttgtcagttagaaggcaaaaaattttcacaagataattttaaggtggattataactactatttgcgcaaacaggatttgcacatcattaaaacgcaaaacgatttgtccaatgcctggtatctccctccacaaaaagcccccaaagaacattcttgggtggattttgctaaaaaatatttaaacatgatggattatctaggcacttattttttgcctttttatcatagtttcacccccatttttcaatggtaccaccctaatatcaacccctaccaacgcaatgagtttaagttccaaatcagttttagagtgcctgtatttaggcatattctttggactaaaggcacgctttatctggcttatacccaaactaactggtttcaaatttataatgaccctcaatccgcccccatgcgaatgatcaatttcatgcctgaactcatctatgtttatcctattaattttaaaccttttgggggtaaaatagggaatttttctgaaatttggataggttggcagcacatttctaatggtgtggggggtgcgcaatgttaccagccttttaataaagaaggtaatcctgaaaaccagtttccaggacaacctgtaatcgttaaagattataacgggcaaaaagatgtgcgctggggggggtgtcgttcggtgagcgcgggcaacgccctgtgtttcgtttggtgtgggaaaagggaggcctaa

SEQ ID NO: 442 - DNA (genomic), 759 bp, Helicobacter pylori; double-stranded, circular
  misc_feature (B) LOCATION 1...759
  hypothetical: NO
  anti-sense: NO
ggatgcttgatgaaaagcattttgctctttatgatttttgtagtttgtcagttagaaggcaaaaaattttcacaagataattttaaggtggattataactactatttgcgcaaacaggatttgcacatcattaaaacgcaaaacgatttgtccaatgcctggtatctccctccacaaaaagcccccaaagaacattcttgggtggattttgctaaaaaatatttaaacatgatggattatctaggcacttattttttgcctttttatcatagtttcacccccatttttcaatggtaccaccctaatatcaacccctaccaacgcaatgagtttaagttccaaatcagttttagagtgcctgtatttaggcatattctttggactaaaggcacgctttatctggcttatacccaaactaactggtttcaaatttataatgaccctcaatccgcccccatgcgaatgatcaatttcatgcctgaactcatctatgtttatcctattaattttaaaccttttgggggtaaaatagggaatttttctgaaatttggataggttggcagcacatttctaatggtgtggggggtgcgcaatgttaccagccttttaataaagaaggtaatcctgaaaaccagtttccaggacaacctgtaatcgttaaagattataacgggcaaaaagatgtgcgctggggggggtgtcgttcggtgagcgcgggcaacgccctgtgtttcgtttggtgtgggaaaagggaggcc

SEQ ID NO: 443 - DNA (genomic), 1071 bp, Helicobacter pylori; double-stranded, circular
  misc_feature (B) LOCATION 1...1071
  hypothetical: NO
  anti-sense: NO
ttgatgaaaagcattttgctctttatgatttttgtagtttgtcagttagaaggcaaaaaattttcacaagataattttaaggtggattataactactatttgcgcaaacaggatttgcacatcattaaaacgcaaaacgatttgtccaatgcctggtatctccctccacaaaaagcccccaaagaacattcttgggtggattttgctaaaaaatatttaaacatgatggattatctaggcacttattttttgcctttttatcatagtttcacccccatttttcaatggtaccaccctaatatcaacccctaccaacgcaatgagtttaagttccaaatcagttttagagtgcctgtatttaggcatattctttggactaaaggcacgctttatctggcttatacccaaactaactggtttcaaatttataatgaccctcaatccgcccccatgcgaatgatcaatttcatgcctgaactcatctatgtttatcctattaattttaaaccttttgggggtaaaatagggaatttttctgaaatttggataggttggcagcacatttctaatggtgtggggggtgcgcaatgttaccagccttttaataaagaaggtaatcctgaaaaccagtttccaggacaacctgtaatcgttaaagattataacgggcaaaaagatgtgcgctggggggggtgtckttcggtgarcscgggcaacsccctgtgtttcgttttggtgtgggaaaagggaggcctaaaaatcatggtcgcttattggccctatgtcccttatgatcaatccaaccctcaattgattgattacatggggtatggtaacgctaaaattgattacaggagagggcgccaccattttgaattgcaactttatgatattttcacgcaatactggcgttatgatcgctggcatggagctttccgcttaggctatacctaccgcattaacccttttgtggggatttatgcgcagtggtttaacggctatggcgatggcttgtatgaatacgatgttttttccaatcgtataggggtaggaatacgcttgaacccttaa

SEQ ID NO: 444 - DNA (genomic), 648 bp, Helicobacter pylori; double-stranded, circular
  misc_feature (B) LOCATION 1...648
  hypothetical: NO
  anti-sense: NO
atgaaaaaaccctacagaaagatttctgattatgcgatcgtgggtggtttgagcgcgttagtgatggtaagcattgtggggtgtaagagcaatgccgatgacaaaccaaaagagcaaagctctttaagtcaaagcgttcaaaaaggcgcgtttgtgattttagaagagcaaaaggataaatcttacaaggttgttgaagaataccccagctcaagaacccacattgtagtgcgcgatttgcaaggcaatgaacgcgtgttgagcaatgaagagattcaaaagctcatcaaagaagaagaagccaaaattgataacggcacgagcaagcttgtccagcctaataatggagggagtaatgaaggatcaggctttggcttgggaagcgcgattttagggagcgcggcgggggcgattttagggagttatattggcaataagctttttaataaccctaattatcagcaaaacgcccaacggacctacaaatccccacaagcttaccaacgctctcaaaattctttttctaaaagcgcacccagcgcttcaagcatgggcacagcgagtaagggacagagcgggttttttggctctagtaggcctactagttcgcctgcaataagctctgggacaaggggctttaacgcataa

SEQ ID NO: 445 - DNA (genomic), 330 bp, Helicobacter pylori; double-stranded, circular
  misc_feature (B) LOCATION 1...330
  hypothetical: NO
  anti-sense: NO
atgcttagaaatcaatttcgtatcgtgtttgtctcttgtattgtcgctagcagtttgcaagctcaagaaaatacccacactttgggtaaggtaaccactaagggtgaaaggacttttgaatacaacaataaaatgtatattgacaggaaagagctccaacaacgccaaagcaaccaaatccgtgatatttttaggactagggcggatgtgaatgtggccagtgggggcttaatggcgcaaaaaatctatgttagggggattgagagccgtctcttaagggtaacgatagatggcgtcgctcaaaatggtaacattttccaccatgacgct

SEQ ID NO: 446 - DNA (genomic), 345 bp, Helicobacter pylori; double-stranded, circular
  misc_feature (B) LOCATION 1...345
  hypothetical: NO
  anti-sense: NO
atccaaaggctaaaagaaatgcttagaaatcaatttcgtatcgtgtttgtcacctgcattgtcgctagcagtttgcaagctcaagaaaatacccccactttgggtaaggtaaccactaagggtgaaaggacttttgaatacaaccatcaaatgtatactgacaggaaagagctccaacaacgccaaagtaaccaaacccgtgatatttttaggactagggcggatgtgaatgcggccagtgggggcttaatggcgcaaaaaatctatgccagggggattgagagccgtctcttaagggtaacgatagatggcgtcgctcaaaatggtaacattttccaccatgac

SEQ ID NO: 447 - DNA (genomic), 342 bp, Helicobacter pylori; double-stranded, circular
  misc_feature (B) LOCATION 1...342
  hypothetical: NO
  anti-sense: NO
atccaaaggctaaaagaaatgcttagaaatcaatttcgtatcgtgtttgtcacctgcattgtcgctagcagtttgcaagctcaagaaaatacccccactttgggtaaggtaaccactaagggtgaaaggacttttgaatacaaccatcaaatgtatactgacaggaaagagctccaacaacgccaaagtaaccaaacccgtgatatttttaggactagggcggatgtgaatgcggccagtgggggcttaatggcgcaaaaaatctatgccagggggattgagagccgtctcttaagggtaacgatagatggcgtcgctcaaaatggtaacattttccaccat

SEQ ID NO: 448 - DNA (genomic), 861 bp, Helicobacter pylori; double-stranded, circular
  misc_feature (B) LOCATION 1...861
  hypothetical: NO
  anti-sense: NO
atgcttagaaatcaatttcgtatcgtgtttgtctcttgtattgtcgctagcagtttgcaagctcaagaaaatacccacactttgggtaaggtaaccactaagggtgaaaggacttttgaatacaacaataaaatgtatattgacaggaaagagctccaacaacgccaaagcaaccaaatccgtgatatttttaggactagggcggatgtgaatgtggccagtgggggcttaatggcgcaaaaaatctatgttagggggattgagagccgtctcttaagggtaacgatagatggcgtcgctcaaaatggtaacattttccaccatgacgctaacaccgtgatcgatcccaacatgattaaagaagtggaagtgattaagggggcagcgaacgcttcagcaggtccaggcgcggttgcgggtaaattgtctttcaccacgattgacgctaacgactttttaagaaagaatcaaacttatggcgctaaagcggaagcagccttttacactaactttggataccgcatgaacgccactgcagcctatcgggggaaaaactgggacatcctagcctattacaaccatcaaaatattttttactacagagacgggaataacgcttttaggagtctcttccaccctaactacgatttacaagatccaagcaatagcgaaatgagcgtagggactcctagtgaagtcaatagcgttttagctaaaattaatggctatatcaacgaaaccgatagcattagcgtgagctacaacctcacacgagacaattctacaaggcttttacgccctaacaccacttcagccctctccaaagccaatgaccaggaagccagccagccccctttgtga

SEQ ID NO: 449 - DNA (genomic), 549 bp, Helicobacter pylori; double-stranded, circular
  misc_feature (B) LOCATION 1...549
  hypothetical: NO
  anti-sense: NO
atgttaccgtgcttaatcctttttacgtctaaaagattttgggacacctaccagtttggcatgctagccggtaaaaacgcgcacagcttgatgatcaaacaaaaatttgaatggaatgaatacaattttggttttgggatttacaaatcctttgggaacgctaactggatgataggctaccatggtaaccgcttaggctttgacttttggacgaacaccgtttatgccaacacccttaactctttgtcttacatgatggatgcgaacgcttttaccgtgtttgcctttggcggtggggtgcataggaaactcctttggggtttgttagggcgtttgacttatgggcctagggctaatgaacaagtcctatcgctcaacttgggctataaattcactaaaaatttctcagccgacattaaatttgaatattataatgtgttaatgcatcaaggctataaaatggggtggaacgggccaaaattagacagccagcctgccaccgatcaagataggagtcatatttttaccgagatcgtgtggaagctttaa

SEQ ID NO: 450 - DNA (genomic), 564 bp, Helicobacter pylori; double-stranded, circular
  misc_feature (B) LOCATION 1...564
  hypothetical: NO
  anti-sense: NO
ggtttcgttctcaaacagatgttaccgtgcttaatcctttttacgtctaaaagattttgggacacctaccagtttggcatgctagccggtaaaaacgcgcacagcttgatgatcaaacaaaaatttgaatggaatgaatacaattttggttttgggatttacaaatcctttgggaacgctaactggatgataggctaccatggtaaccgcttaggctttgacttttggacgaacaccgtttatgccaacacccttaactctttgtcttacatgatggatgcgaacgcttttaccgtgtttgcctttggcggtggggtgcataggaaactcctttggggtttgttagggcgtttgacttatgggcctagggctaatgaacaagtcctatcgctcaacttgggctataaattcactaaaaatttctcagccgacattaaatttgaatattataatgtgttaatgcatcaaggctataaaatggggtggaacgggccaaaattagacagccagcctgccaccgatcaagataggagtcatatttttaccgagatcgtgtggaagctt

SEQ ID NO: 451 - DNA (genomic), 252 bp, Helicobacter pylori; double-stranded, circular
  misc_feature (B) LOCATION 1...252
  hypothetical: NO
  anti-sense: NO
atgaactacaaagttgcatctgctagaaatatcgcaacgcttcttttcttattcttttctcaaagtgaagcttttgatttgggtaaaatcgctaaaatcaaagcgggtgctgaaagtttctctaaagtcggtttcaataacaaacctatcaacamtaataaagggatttaccctaccgaaacctttatgacgattaatggcttacatgcaggtggattttacggagctcttgcccaaaagcgctacggctaa

SEQ ID NO: 452 - DNA (genomic), 375 bp, Helicobacter pylori; double-stranded, circular
  misc_feature (B) LOCATION 1...375
  hypothetical: NO
  anti-sense: NO
gggcggaaggtacgaatcccagcggattatatgagtggttacaaccaaggcttggacatgaccttaaatttagggaatttcaaattctggtggtttagctcgtttggtcgtggctttgcctataacgagtggctttataatttctattcgcctaaaacctacactcttaaaaacgggcaaaccataaacccaggggtgcatgccttttatatcatttggaattacaagggtttcagcattcagccttttgtctatttttcaccctttaacgaatacgaccccaactttacgatcacctatgatagtaaccccacttttactgggttagggtttcgttctcaaacagatgttaccgtgcttaatcctttttacgtc

SEQ ID NO: 453 - DNA (genomic), 645 bp, Helicobacter pylori; double-stranded, circular
  misc_feature (B) LOCATION 1...645
  hypothetical: NO
  anti-sense: NO
aggttaaacatgaactacaaagttgcatctgctagaaatatcgcaacgcttcttttcttattcttttctcaaagtgaagcttttgatttgggtaaaatcgctaaaatcaaagcgggtgctgaaagtttctctaaagtcggtttcaataacaaacctatcaacactaataaagggatttaccctaccgaaacctttatgacgattatggcttacatgcaggtggattttacggagctcttgcccaaaagcgctacggctaacgggcaccatttagacgggagccttgggggttgggggggtgctgtgatttatgatagcactaaggattttattaacgaagttacaggaaaaccctatggggctatgacgtggaactacgtgggctattggggcggtcttgtagggcaaaaaccatgggctagttgcgggttagccacagggaatttgacccaaggccaatacgataagatgactcaagctgaaatgacgcagttgtctaatcaagaagctttagcggcttccacttgcgcaaaaacctatgccgatcacacgagaaactatgtgatttataacgcttacttgcgctacaactacaaagatatttttgaaattaggggcggaaggtacgaatcccagcggattata

SEQ ID NO: 454 - DNA (genomic), 984 bp, Helicobacter pylori; double-stranded, circular
  misc_feature (B) LOCATION 1...984
  hypothetical: NO
  anti-sense: NO
atgaactacaaagttgcatctgctagaaatatcgcaacgcttcttttcttattcttttctcaaagtgaagcttttgatttgggtaaaatcgctaaaatcaaagcgggtgctgaaagtttctctaaagtcggtttcaataacaaacctatcaacactaataaagggatttaccctaccgaaacctttatgacgattatggcttacatgcaggtggattttacggagctcttgcccaaaagcgctacggctaacgggcaccatttagacgggagccttgggggttgggggggtgctgtgatttatgatagcactaaggattttattaacgaagttacaggaaaaccctatggggctatgacgtggaactacgtgggctattggggcggtcttgtagggcaaaaaccatgggctagttgcgggttagccacagggaatttgacccaaggccaatacgataagatgactcaagctgaaatgacgcagttgtctaatcaagaagctttagcggcttccacttgcgcaaaaacctatgccgatcacacgagaaactatgtgatttataacgcttacttgcgctacaactacaaagatatttttgaaattaggggcggaaggtacgaatccccagcggattatatgagtggttacaaccaaggcttggacatgaccttaaatttagggaatttcaaattctggtggtttagctcgtttggtcgtggctttgcctataacgagtggctttataatttctattcgcctaaaacctacactcttaaaaacgggcaaaccataaacccaggggtgcatgccttttatatcatttggaattacaagggtttcagcattcagccttttgtctatttttcaccctttaacgaatacgaccccaactttacgatcacctatgatagtaaccccacttttactgggttagggtttcgttctcaaacagatgttaccgtgcttaatcctttttacgtctaa

SEQ ID NO: 455 - DNA (genomic), 204 bp, Helicobacter pylori; double-stranded, circular
  misc_feature (B) LOCATION 1...204
  hypothetical: NO
  anti-sense: NO
tttaaggttacttctaaagaattggatcaacgccaaagcaatgaagtcaaagacctgtttaggactaaccctgatgtgaatgtgggcggagggagcgtgatggggcagaaaatctacgtgagaggcattgaagacaggcttctaagtgttacggtggatagggatgcgcaaactggtcttcaccacggcccgaaaaacctcccg

SEQ ID NO: 456 - DNA (genomic), 579 bp, Helicobacter pylori; double-stranded, circular
  misc_feature (B) LOCATION 1...579
  hypothetical: NO
  anti-sense: NO
atgtttttaagatcatacccaaagcttagatacgctttatgtttacccctactcactgagacttgctatagcgaggagcgcactttaaataaggttaccacccaagctaaaaggattttcacttacaataatgagtttaaggttacttctaaagaattggatcaacgccaaagcaatgaagtcaaagacctgtttaggactaaccctgatgtgaatgtgggcggagggagcgtgatggggcagaaaatctacgtgagaggcattgaagacaggcttttaagggttacggtggatggggctgcgcaaaatggcaacatttaccaccaccaaggcaacaccgtgattgaccctggcatgctcaaaagcgtggaagttactaaaggcgcggcgaatgcgagcgcggggccaggagcgatcgcgggagtgattaaaatggagactaaaggagcggctgattttatccctagggggaaaaattatgcagcgagtggggcggtgagtttttataccaattttggggacagagagacttttagatcggcctatcaaagcgcgcattttgatattatcgcttactag

SEQ ID NO: 457 - DNA (genomic), 777 bp, Helicobacter pylori; double-stranded, circular
  misc_feature (B) LOCATION 1...777
  hypothetical: NO
  anti-sense: NO
atgtttttaagatcatacccaaagcttagatacgctttatgtttacccctactcactgagacttgctatagcgaggagcgcactttaaataaggttaccacccaagctaaaaggattttcacttacaataatgagtttaaggttacttctaaagaattggatcaacgccaaagcaatgaagtcaaagacctgtttaggactaaccctgatgtgaatgtgggcggagggagcgtgatggggcagaaaatctacgtgagaggcattgaagacaggcttttaagggttacggtggatggggctgcgcaaaatggcaacatctaccaccaccaaggcaacaccgtgattgaccctggcatgctcaaaagcgtggaagttactaaaggcgcggcgaatgcgagcgcggggccaggagcgatcgcgggagtgattaaaatggagactaaaggagcggctgattttatccctagggggaaaaattatgcagcgagtggggcggtgagtttttataccaattttggggacagagagacttttagatcggcctatcaaagcgcgcattttgatattatcgcttactacacgcaccaaaatattttctattataggagcggcgccacagtgatgaaaaaccttttcaaacccacacaagccgataaagagccaggaactcccagcgagcaaaacaacgctttgattaaaatgaatggctatttgagcgacagagacacgctcactttcagctggaacatgacacgagataacgccacacgcctttaa

SEQ ID NO: 458 - DNA (genomic), 174 bp, Helicobacter pylori; double-stranded, circular
  misc_feature (B) LOCATION 1...174
  hypothetical: NO
  anti-sense: NO
agactggaatcaccgctacactcaggctttagccctagcgcggcccttgtgatcagccccattgagcctttatctctaaaaatcacttattctcaagttacaaggggggttatgccaggagatggcgtgtacatgcgtcaaaacgatttacgatacgctaagaaatatcaagtc

SEQ ID NO: 459 - DNA (genomic), 408 bp, Helicobacter pylori; double-stranded, circular
  misc_feature (B) LOCATION 1...408
  hypothetical: NO
  anti-sense: NO
attggattacaccatttccaaaaacagggatcaatcttgcatggctttagccgctttgttaccggtttggattattgcgggtttgatatttacttgcctgattatgggacagctgaaaaacccaaaacccctaccgatttagccaaatgcggatcccaattggggttagtgcatatgcacaaaccgggctatggcgtgagtaatttttatatcaattggagccctaaaaccaaaagccactggaagggtttgctgctttcagccgtgtttaataatgttttcaacaaattctatgtggatcaaacaagcccctatgtcatgagcccggatatgccaggcactgacgctattaaaagagcgatcgcagagcctgggtttaatgcgcgttttgaagtggcttacaaatgg

SEQ ID NO: 460 - DNA (genomic), 414 bp, Helicobacter pylori; double-stranded, circular
  misc_feature (B) LOCATION 1...414
  hypothetical: NO
  anti-sense: NO
attattattgactattcaagccagtattttagcgggagggctgcggcgttctatcaagctttggataatttcatctcacgatacgcgcaacgcttgatcgtaaccaatttgagtcaagcgattcgcatttatggctatgaagtgggtgggacttttagatacaagggcgtgagtttgaatgtggggatctcgcgcacttggcccaccactagggggtatttaatggcggacagctatgagcttgccgcaagcaccggtaatgtttttatcattaaattggattacaccatttccaaaaacagggatcaatcttgcatggctttagccgctttgttaccggtttggattattgcgggtttgatatttacttgcctgattatgggacagctgaaaaacccaaaacccctaccgatt

SEQ ID NO: 461 - DNA (genomic), 624 bp, Helicobacter pylori; double-stranded, circular
  misc_feature (B) LOCATION 1...624
  hypothetical: NO
  anti-sense: NO
ttggataatttcatctcacaatacgcgcaacgcttgatcgtaaccaatttgagtcaagcgattcgcatttatggctatgaagtgggtgggacttttagatacaagggcgtgagtttgaatgtggggatctcgcgcacttggcccaccactagggggtatttaatggcggacagctatgagcttgccgcaagcaccggtaatgtttttatcattaaattggattacaccattccaaaaacagggatcaatcttgcatggcttagccgctttgttaccggtttggattattgcgggtttgatatttacttgcctgattatgggacagctgaaaaacccaaaacccctaccgatttagccaaatgcggatcccaattggggttagtgcatatgcacaaaccgggctatggcgtgagtaatttttatatcaattggagccctaaaaccaaaagccactggaagggtttgctgctttcagccgtgtttaataatgttttcaacaaattctatgtggatcaaacaagcccctatgtcatgagcccggatatgccaggcactgacgctattaaaagagcgatcgcagagcctgggtttaatgcgcgttttgaagtggcttacaaatggtag

SEQ ID NO: 462 - DNA (genomic), 879 bp, Helicobacter pylori; double-stranded, circular
  misc_feature (B) LOCATION 1...879
  hypothetical: NO
  anti-sense: NO
agactggaatcaccgctacactcaggctttagccctagcgcggcccttgtgatcagccccattgagcctttatctctaaaaatcacttattctcaagttacaaggggggttatgccaggagatggcgtgtacatgcgtcaaaacgatttacgatacgctaaaaatatcaagcctgaagtgggctctaacgctgaatttaatattgactattcaagccagtattttagcgggagggctgcggcgttctatcaagctttggataatttcatctcacaatacgcgcaacgcttgatcgtaaccaatttgagtcaagcgattcgcatttatggctatgaagtgggtgggacttttagatacaagggcgtgagtttgaatgtggggatctcgcgcacttggcccaccactagggggtatttaatggcggacagctatgagcttgccgcaagcaccggtaatgtttttatcattaaattggattacaccattccaaaaacagggatcaatcttgcatggcttagccgctttgttaccggtttggattattgcgggtttgatatttacttgcctgattatgggacagctgaaaaacccaaaacccctaccgatttagccaaatgcggatcccaattggggttagtgcatatgcacaaaccgggctatggcgtgagtaatttttatatcaattggagccctaaaaccaaaagccactggaagggtttgctgctttcagccgtgtttaataatgttttcaacaaattctatgtggatcaaacaagcccctatgtcatgagcccggatatgccaggcactgacgctattaaaagagcgatcgcagagcctgggtttaatgcgcgttttgaagtggcttacaaatggtag

SEQ ID NO: 463 - DNA (genomic), 657 bp, Helicobacter pylori; double-stranded, circular
  misc_feature (B) LOCATION 1...657
  hypothetical: NO
  anti-sense: NO
catgaagaggctgctttatataaagaaaacagggggagcaaaaaatttaatggaacccgcgttaatttgacccttttgcggggtcggtgcgttccaaaaaacgctcagtttgatcctttatttgctcctaatggcgtttatgctaaattccccacttatttagcgagcgcatgggaaagagaaaattacccatgcgttgaaggcgggtattgcaccccaagcttctctgatgtggataaaccaagctcacaacctagaaatctgtttttaaacaacaccggcttaaaccttaaagtcgcgcatgtgattgatgaagccacagacagcctttttgaatacggattcaactaccaaaatttaagcgtttttgacgctcgtatccccaaatcagaattatacaggcccaatcaagtctatactgacgataaagggcaaaaacaaatcgcttgcagtcttgtggataataaccccaatgaccctacgctatgccaaagagggaaagcgaatgggaatatttatggaggctatgtgcaagcgaattactcgcctcataaaatcatcacgtttggagccggggtaaggtgggacgcctacacgctttatgataaagactggaatcaccgctacactcaggctttagccctagcgcggcccttg

SEQ ID NO: 464 - DNA (genomic), 696 bp, Helicobacter pylori; double-stranded, circular
  misc_feature (B) LOCATION 1...696
  hypothetical: NO
  anti-sense: NO
gtgctggatagtttcacaaggtatttgtatcactccattaatagcgctaacaatctttcattacaatacaaaagggaagcgggaaattcttttggcgacccacgattagattttaccctttatacaagcatcaggaacgctcagtttgatcctttatttgatcctaatggcgtttatgctaaattccccacttctttagcgagcgcatgggaaagagaaaattacccatgcgttgaaggcgggtattgcaccccaagcttctctgatgtggataaaccaagctcacaacctagaaatctgtttttaaacaacaccggcttaaaccttaaagtcgcgcatgtgattgatgaagccacagacagcctttttgaatacggattcaactaccaaaatttaagcgtttttgacgctcgtatccccaaatcagaattatacaggcccaatcaagtctatactgacgataaagggcaaaaacaaatcgcttgcagtcttgtggataataaccccaatgaccctacgctatgccaaagagggaaagcgaatgggaatatttatggaggctatgtgcaagcgaattactcgcctcataaaatcatcacgtttggagccggggtaaggtgggacgcctacacgctttatgataaagactggaatcaccgctacactcaggctttagccctagcgcggcccttgtga

SEQ ID NO: 465 - DNA (genomic), 498 bp, Helicobacter pylori; double-stranded, circular
  misc_feature (B) LOCATION 1...498
  hypothetical: NO
  anti-sense: NO
atggggtgttcgtttatctttaaaaaagttagggtttattctaaaatgttggttgctttggggctttcaagcgtgttgatcggttgcgcgatgaatccaagcgctgagacaaaaaaaccaaatgacgccaaaaaccaacaaccagttcaaactcatgaaagaatgacaacaagttctgaacatgttacgccactagattttaattacccggtgcatattgttcaagccccacaaaaccatcatgttgtaggtattttaatgccacgcattcaagtgagcgataatctaaaaccctatattgataagtttcaagacgctttaattaatcaaatccaaactatttttgaaaaaagaggctatcaagtgttgcgttttcaagatgaaaaagctttgaatgtgcaagataagaaaaagattttttccgttttggatttgaaagggtgggtaggaatcttagaagatttgaaaatgaatttaaaagattcccatagtcccatt

SEQ ID NO: 466 - DNA (genomic), 849 bp, Helicobacter pylori; double-stranded, circular
  misc_feature (B) LOCATION 1...849
  hypothetical: NO
  anti-sense: NO
atggggtgttcgtttatctttaaaaaagttagggtttattctaaaatgttggttgctttggggctttcaagcgtgttgatcggttgcgcgatgaatccaagcgctgagacaaaaaaaccaaatgacgccaaaaaccaacaaccagttcaaactcatgaaagaatgacaacaagttctgaacatgttacgccactagattttaattacccggtgcatattgttcaagccccacaaaaccatcatgttgtaggtattttaatgccacgcattcaagtgagcgataatctaaaaccctatattgataagtttcaagacgctttaattaatcaaatccaaactatttttgaaaaaagaggctatcaagtgttgcgttttcaagatgaaaaagctttgaatgtgcaagataagaaaaagattttttccgttttggatttgaaagggtgggtaggaatcttagaagatttgaaaatgaatttaaaagatcccaatagtcccaatttagacacgctagtggatcaaagctcaggctctgtatggtttaatttttatgaaccagaaagcaatcgtgtcgtccatgattttgctgtagaagtaggaacttttcaggcaataacatacacatacacctctactaataacgcttcaggagggtttaattcttcaaaaagcgttatccatgaaaatttggataagaatagagaagacgcgatacacaagattttaaacagaatgtatgcggttgtcatgaaaaaagctgtaacagaacttacaaaagaaaatatcgccaaatacagagacgctattgatagaatgaaaggctttaaaagttctatgcctcaaaaaaagtag

SEQ ID NO: 467 - DNA (genomic), 855 bp, Helicobacter pylori; double-stranded, circular
  misc_feature (B) LOCATION 1...855
  hypothetical: NO
  anti-sense: NO
gagtcttttatggggtgttcgtttatctttaaaaaagttagggtttattctaaaatgttggttgctttggggctttcaagcgtgttgatcggttgcgcgatgaatccaagcgctgagacaaaaaaaccaaatgacgccaaaaaccaacaaccagttcaaactcatgaaagaatgacaacaagttctgaacatgttacgccactagattttaattacccggtgcatattgttcaagccccacaaaaccatcatgttgtaggtattttaatgccacgcattcaagtgagcgataatctaaaaccctatattgataagtttcaagacgctttaattaatcaaatccaaactatttttgaaaaaagaggctatcaagtgttgcgttttcaagatgaaaaagctttgaatgtgcaagataagaaaaagattttttccgttttggatttgaaagggtgggtaggaatcttagaagatttgaaaatgaatttaaaagatcccaatagtcccaatttagacacgctagtggatcaaagctcaggctctgtatggtttaatttttatgaaccagaaagcaatcgtgtcgtccatgattttgctgtagaagtaggaacttttcaggcaataacatacacatacacctctactaataacgcttcaggagggtttaattcttcaaaaagcgttatccatgaaaatttggataagaatagagaagacgcgatacacaagattttaaacagaatgtatgcggttgtcatgaaaaaagctgtaacagaacttacaaaagaaaatatcgccaaatacagagacgctattgatagaatgaaaggctttaaaagttctatgcctcaaaaaaag

SEQ ID NO: 468 - DNA (genomic), 1311 bp, Helicobacter pylori; double-stranded, circular
  misc_feature (B) LOCATION 1...1311
  hypothetical: NO
  anti-sense: NO
atgatgaaattttttcttttaaagaaattcagcgaatttttaaacactcaaacgcattttaacctcaaacgcttgaacgcgtctagttttttattagagactttttctaaagaaaaacacgcctttgttgtggatttgagcgcgccttatattggtttgtccaaaaaacccccagagagcgttttaaaaaacactttagcgttagatttttgtttgaataaattcaccaaaaacgccaaaattttacaagcaaacgtcattgataacgatcggattttagaaatcaagggcgctaaagatttagcttataagagtgaaacttttattttgcgtttagaaatgatccctaaaaaagccaatctcatgattttagatcaagaaaaatgcgtgatagaggcttttcgttttaatgacagggtggctaaaaacgatattttaggggcattgcctcctaatatttacgagcatcaagaagaggatttggattttaagggattgttggacattttagaaaaagattttttatcctatcagcacaaagaattggaacacaaaaaaaatcaaatcatcaagcgattaaacgcccaaaaagaacgcttgaaagaaaaattagaaaaactagaagatcctaaaactttacagctggaagcgaaagaattgcaaactcaagcctcattgttgctcacttaccagcatttaatcaacaggcgtgaaaatcgcgtgattttaaaggattttgaagataaagaatgcatgattgaaattgataagagcatgcccttaaacgcttttatcaataaaaaattcactctcagcaagaaaaagaaacaaaaatcgcaattcttgtatttagaagaagagaatctgaaagaaaaaatcgcttttaaggaaaatcaaatcaactatgttagagacgctgcagaagaaagcgttttagaaatgtttatgccggtaaaaaactctaaaatcaaacgcccgatgaacgggtatgaagtgctgtattataaggattttaaaatcggtttagggaaaaaccaaaaagagaatatcaagcttttacaagacgcaagagcgaatgatttgtggatgcatgtgagagatattcctggatcgcatttgatcgttttttgccaaaagaatacgcctaaagatgaggtcattatggaattagccaaaatgttgattaaaatgcaaaaagatgcgtttaatggttacgagattgactacacgcaacgaaaatttgtcaaaatcatcaaaggagctcatgtcatttactcaaaataccgaactattagtctaaaggacacttaa

SEQ ID NO: 469 - DNA (genomic), 1092 bp, Helicobacter pylori; double-stranded, circular
  misc_feature (B) LOCATION 1...1092
  hypothetical: NO
  anti-sense: NO
atgaaattttttcttttaaagaaattcagcraatttttaaacactcaaacgcattttaacctcaaacgcttgaacgcgtctagttttttattagagactttttctaaagaaaaacacgcctttgttgtggatttgagcgcgccttatattggtttgtccaaaaaacccccagagagcgttttaaaaaacactttagcgttagatttttgtttgaataaattcaccaaaaacgccaaaattttacaagcaaacgtcattgataacgatcggattttagaaatcaagggcgctaaagatttagcttataagagtgaaacttttattttgcgtttagaaatgatccctaaaaaagccaatctcatgattttagatcaagaaaaatgcgtgatagaggcttttcgttttaatgacagggtggctaaaaacgatattttaggggcattgcctcctaatatttacgagcatcaagaagaggatttggattttaagggattgttggacattttagaaaaagattttttatcctatcagcacaaagaattggaacacaaaaaaaatcaaatcatcaagcgattaaacgcccaaaaagaacgcttgaaagaaaaattagaaaaactagaagatcctaaaactttacagctggaagcgaaagaattgcaaactcaagcctcattgttgctcacttaccagcatttaatcaacaggcgtgaaaatcgcgtgattttaaaggattttgaagataaagaatgcatgattgaaattgataagagcatgcccttaaacgcttttatcaataaaaaattcactctcagcaagaaaaagaaacaaaaatcgcaattcttgtatttagaagaagagaatctgaaagaaaaaatcgcttttaaggaaaatcaaatcaactatgttagagacgctgcagaagaaagcgttttagaaatgtttatgccggtaaaaaactctaaaatcaaacgcccgatgaacgggtatgaagtgctgtattataaggatttwaaawcgggtttrggaaaaaccaaaaagagaatatcaagcttttacaagacgcaararcgaatgatttktggatgcayktga

SEQ ID NO: 470 - DNA (genomic), 1326 bp, Helicobacter pylori; double-stranded, circular
  misc_feature (B) LOCATION 1...1326
  hypothetical: NO
  anti-sense: NO
ggaaaaattaaaggtgtgatgatgaaattttttcttttaaagaaattcagcgaatttttaaacactcaaacgcattttaacctcaaacgcttgaacgcgtctagttttttattagagactttttctaaagaaaaacacgcctttgttgtggatttgagcgcgccttatattggtttgtccaaaaaacccccagagagcgttttaaaaaacactttagcgttagatttttgtttgaataaattcaccaaaaacgccaaaattttacaagcaaacgtcattgataacgatcggattttagaaatcaagggcgctaaagatttagcttataagagtgaaacttttattttgcgtttagaaatgatccctaaaaaagccaatctcatgattttagatcaagaaaaatgcgtgatagaggcttttcgttttaatgacagggtggctaaaaacgatattttaggggcattgcctcctaatatttacgagcatcaagaagaggatttggattttaagggattgttggacattttagaaaaagattttttatcctatcagcacaaagaattggaacacaaaaaaaatcaaatcatcaagcgattaaacgcccaaaaagaacgcttgaaagaaaaattagaaaaactagaagatcctaaaactttacagctggaagcgaaagaattgcaaactcaagcctcattgttgctcacttaccagcatttaatcaacaggcgtgaaaatcgcgtgattttaaaggattttgaagataaagaatgcatgattgaaattgataagagcatgcccttaaacgcttttatcaataaaaaattcactctcagcaagaaaaagaaacaaaaatcgcaattcttgtatttagaagaagagaatctgaaagaaaaaatcgcttttaaggaaaatcaaatcaactatgttagagacgctgcagaagaaagcgttttagaaatgtttatgccggtaaaaaactctaaaatcaaacgcccgatgaacgggtatgaagtgctgtattataaggattttaaaatcggtttagggaaaaaccaaaaagagaatatcaagcttttacaagacgcaagagcgaatgatttgtggatgcatgtgagagatattcctggatcgcatttgatcgttttttgccaaaagaatacgcctaaagatgaggtcattatggaattagccaaaatgttgattaaaatgcaaaaagatgcgtttaatggttacgagattgactacacgcaacgaaaatttgtcaaaatcatcaaaggagctcatgtcatttactcaaaataccgaactattagtctaaaggacact

SEQ ID NO: 471 - DNA (genomic), 636 bp, Helicobacter pylori; double-stranded, circular
  misc_feature (B) LOCATION 1...636
  hypothetical: NO
  anti-sense: NO
gtgaaatttttttcaaaggatttgtttaaaaaagtaactcctttatttttaagcgtttattttttaagccccacccttacgcaagccaaaagccgtttttatgtggcttctcaataccaggtggggaaaatgatcatgaaaaaatacaacgatctcaaacgcacgattgaaggggcgagcttttctttaggctgggagattaaccccactaattactggttttattcgcgctattacttttttatggattacgggaatgtcattctcaataaaagaacgggcgctcaagcgaacatgttcacttacggctttggaggggatttgatcatggaatacaataaaaaccctttgtatgtattttctcttttttatggcatgcaagttgctgaaaacacatggacgatttccaaacacagcgcgaatttcatcattgacgactggcgcagcattcaagggttttcgctcaaaacttcaaatttcaggatgttgggtttagtggggtttaaattccaaaccgtgctattccaccatgacgctagtattgaagtggggatcaaatggccttttgcttttgaatacgactcaccctttgtaaggcttttttctgtctttatttcgcacactttctacctttaa

SEQ ID NO: 472 - DNA (genomic), 636 bp, Helicobacter pylori; double-stranded, circular
  misc_feature (B) LOCATION 1...636
  hypothetical: NO
  anti-sense: NO
agtgtgaaatttttttcaaaggatttgtttaaaaaagtaactcctttatttttaagcgtttattttttaagccccacccttacgcaagccaaaagccgtttttatgtggcttctcaataccaggtggggaaaatgatcatgaaaaaatacaacgatctcaaacgcacgattgaaggggcgagcttttctttaggctgggagattaaccccactaattactggttttattcgcgctattacttttttatggattacgggaatgtcattctcaataaaagaacgggcgctcaagcgaacatgttcacttacggctttggaggggatttgatcatggaatacaataaaaaccctttgtatgtattttctcttttttatggcatgcaagttgctgaaaacacatggacgatttccaaacacagcgcgaatttcatcattgacgactggcgcagcattcaagggttttcgctcaaaacttcaaatttcaggatgttgggtttagtggggtttaaattccaaaccgtgctattccaccatgacgctagtattgaagtggggatcaaatggccttttgcttttgaatacgactcaccctttgtaaggcttttttctgtctttatttcgcacactttctacctt

SEQ ID NO: 473 - DNA (genomic), 162 bp, Helicobacter pylori; double-stranded, circular
  misc_feature (B) LOCATION 1...162
  hypothetical: NO
  anti-sense: NO
catggggctggctggaggtacaccaacacctttagattaggggtaacttacatgggtaaaagcttgcgtttaatgggcgctattgattatgatcaagccccaagcccccaagacgcgataggcattccggactctaatggcttataccgtggcttttgggac

SEQ ID NO: 474 - DNA (genomic), 216 bp, Helicobacter pylori; double-stranded, circular
  misc_feature (B) LOCATION 1...216
  hypothetical: NO
  anti-sense: NO
cggtttaatcaaagcgagcgcgaatctttatggcacgactcaagtcgagcaaaatctaacggacaaggcgtatcgggggggtatagagtgggttcgagtttgcgtgtgtttgatcatggcatgttttctgtggtgtataattcttcagttacctttaacatgaaaggcggtttggtggctatcacagagcttggcccttcttttaggggagcgttt

SEQ ID NO: 475 - DNA (genomic), 468 bp, Helicobacter pylori; double-stranded, circular
  misc_feature (B) LOCATION 1...468
  hypothetical: NO
  anti-sense: NO
cgagcttcaatgaaaaacttttccccactctattgtcttaaaaagctcaaaaaacgccatttaatcgctctgagtctgcccttgctttcttatgcgaatggctttaaaatccaagagcaaagcttgaatggcacggctttaggctcggcgtatgtcgctggggctaggggtgctgacgcttctttttacaacccggctaacatgggctttactaacgattggggcgaaaacagaagcgaatttgaaatgaccaccaccgtgatcaatatcccggcctttagctttaaagtccctacgaccaatcaaggcttatattcggtaacaagtttagaaattgataaaagccaacaaaatattttaggcatcatcaacactatagggttaggcaatatccttaaagcgcttggcaatacggccgctaccaatggcttatcacaaggtatcaatcgtgttcaaggggttatgaac

SEQ ID NO: 476 - DNA (genomic), 483 bp, Helicobacter pylori; double-stranded, circular
  misc_feature (B) LOCATION 1...483
  hypothetical: NO
  anti-sense: NO
atgaaaaacttttccccactctattgtcttaaaaagctcaaaaaacgccatttaatcgctctgagtctgcccttgctttcttatgcgaatggctttaaaatccaagagcaaagcttgaatggcacggctttaggctcggcgtatgtcgctggggctaggggtgctgacgcttctttttacaacccggctaacatgggctttactaacgattggggcgaaaacagaagcgaatttgaaatgaccaccaccgtgatcaatatcccggcctttagctttaaagtccctacgaccaatcaaggcttatattcggtaacaagtttagaaattgataaaagccaacaaaatattttaggcatcatcaacactatagggttaggcaatatccttaaagcgcttggcaatacggccgctaccaatggcttatcacaagctatcaatcgtgttcaagggcttatgaacttaaccaatcaaaaagtcgtaacc

SEQ ID NO: 477 - DNA (genomic), 491 bp, Helicobacter pylori; double-stranded, circular
  misc_feature (B) LOCATION 1...491
  hypothetical: NO
  anti-sense: NO
atgaaaaacttttccccactctattgtcttaaaargctcaaaaaacgccatttaatcgctctgagtctgcccttgctttcttatgcgaatggctttaaaatccaagagcaaagcttgaatggcacggctttaggctcggcgtatgtcgctggggctaggggtgctgacgcttctttttacaacccggctaacatgggctttactaacgattggggcgaaaacagaagcgaatttgaaatgaccaccaccgtgatcaatatcccgacctttagctttaaagtccctacgaccaatcaagrcttatattcggtaacaagtttagaaattgataaaagccaacaaaatattttaggcatcatcaacactatagggttaggcaatatccttaaagcgcttggcaatacggccgctaccaatggcttatcacaagctatcaatcgtgttcaagggcttatgaacttaaccaatcaaaaagtcgtaaccctcgcttc

SEQ ID NO: 478 - DNA (genomic), 552 bp, Helicobacter pylori; double-stranded, circular
  misc_feature (B) LOCATION 1...552
  hypothetical: NO
  anti-sense: NO
agcgcttggcaatacggccgctaccaatggcttatcacaaggtatcaatcgtgttcaaggggttatgaactaacccattcaaaagttgtaaccttcgtttcaagacctgacactcaaatcgtgatcggctggacaggcacgactaattttgttatacctatattcttttataaaacgcgcacgcataacggcttcacttttggggggagttttaccgctcctagtgggttgggtatgaaatggaatggtaaggggggggaatttttgcatgacgtgtttatcatgatggtagagcttgccctagcgatgagttatactattaataaacgcttttctgtgggtgtgggtttaagggggctttatgcgaccgggagctttaataacaccgtttatgtgcctttagagggcgcttcagttttgagcgcggagcaaatgttaaacttacccaacaatgtttttgccgatcaagtgccaagtaacatgattactttattagaggctattggttacctgtatcgcatacgcaataagtttacaagatttgggggggga

SEQ ID NO: 479 - DNA (genomic), 1068 bp, Helicobacter pylori; double-stranded, circular
  misc_feature (B) LOCATION 1...1068
  hypothetical: NO
  anti-sense: NO
atgagttatactattaataaacgcttttctgtgggtgtgggtttaagggggctttatgcgaccgggagctttaataacaccgtttatgtgcctttagagggcgcttcagttttgagcgcggagcaaatcttaaacttacccaacaatgtttttgccgatcaagtgccaagtaacatgatgactttattaggcaatattggctaccaaccagcgcttaattgccaaaaagccggtggggacatgagtgatcagagctgtcaagagttttacaacggcttgaaaaaaatcatgggttatagcggtttaatcaaagcgagcgcgaatctttatggcacgactcaagtcgtgcaaaaatctaacggacaaggcgtatcgggggggtatagagtgggttcgagtttgcgtgtgtttgatcatggcatgttttctgtggtgtataattcttcagttacctttaacatgaaaggcggtttggtggctatcacagagcttggcccttctttagggagcgttttgactaaaggcagcttgaatatcaatgtttcactcccccaaactttaagcttagcctacgcccaccaattttttaaagatcgcctaagggttgaaggggtgtttgagcgcactttttggagtcaagggaataaatttttagtcacccctgattttgcgaacgccacttacaagggcttgagcgggacggtggcttccttggactctgaaacgcttaaaaaaatggtaggcctagcgaattttaaaagcgtgatgaacatgggggctggctggagggacaccaacacctttagattaggggtaacttacatgggtaaaagcttgcgtttaatgggcgctattgattatgatcaagccccaagcccccaagacgcgataggcattccggactctaatggctataccgtggcttttgggactaaatacaattttaggggctttgatttgggcgtagcggggagtttcacttttaagagcaaccgctccagtttgtatcaatccccaactattgggcaattgagaatctttagcgcctctttaggctatcgctggtaa

SEQ ID NO: 480 - DNA (genomic), 1764 bp, Helicobacter pylori; double-stranded, circular
  misc_feature (B) LOCATION 1...1764
  hypothetical: NO
  anti-sense: NO
atgaaaaacttttccccactctattgtcttaaaaagctcaaaaaacgccatttaatcgctctgagtctgcccttgctttcttatgcgaatggctttaaaatccaagagcaaagcttgaatggcacggctttaggctcggcgtatgtcgctggggctaggggtgctgacgcttctttttacaacccggctaacatgggctttactaacgattggggcgaaaacagaagcgaatttgaaatgaccaccaccgtgatcaatatcccggcctttagctttaaagtccctacgaccaatcaaggcttatattcggtaacaagtttagaaattgataaaagccaacaaaatattttaggcatcatcaacactatagggttaggcaatatccttaaagcgcttggcaatacggccgctaccaatggcttatcacaagctatcaatcgtgttcaagggcttatgaacttaaccaatcaaaaagtcgtaaccctcgcttcaaaacctgacactcaaatcgtgaatggctggacaggcacgactaattttgttttacctaaattcttttataaaacgcgcacgcataacggcttcacttttggggggagttttaccgctcctagtgggttgggtatgaaatggaatggtaaggggggggaatttttgcatgacgtgtttatcatgatggtagagcttgcccctagcatgagttatactattaataaacgcttttctgtgggtgtgggtttaagggggctttatgcgaccgggagctttaataacaccgtttatgtgcctttagagggcgcttcagttttgagcgcggagcaaatcttaaacttacccaacaatgtttttgccgatcaagtgccaagtaacatgatgactttattaggcaatattggctaccaaccagcgcttaattgccaaaaagccggtggggacatgagtgatcagagctgtcaagagttttacaacggcttgaaaaaaatcatgggttatagcggtttaatcaaagcgagcgcgaatctttatggcacgactcaagtcgtgcaaaaatctaacggacaaggcgtatcgggggggtatagagtgggttcgagtttgcgtgtgtttgatcatggcatgttttctgtggtgtataattcttcagttacctttaacatgaaaggcggtttggtggctatcacagagcttggcccttctttagggagcgttttgactaaaggcagcttgaatatcaatgtttcactcccccaaactttaagcttagcctacgcccaccaattttttaaagatcgcctaagggttgaaggggtgtttgagcgcactttttggagtcaagggaataaatttttagtcacccctgattttgcgaacgccacttacaagggcttgagcgggacggtggcttccttggactctgaaacgcttaaaaaaatggtaggcctagcgaattttaaaagcgtgatgaacatgggggctggctggagggacaccaacacctttagattaggggtaacttacatgggtaaaagcttgcgtttaatgggcgctattgattatgatcaagccccaagcccccaagacgcgataggcattccggactctaatggctataccgtggcttttgggactaaatacaattttaggggctttgatttgggcgtagcggggagtttcacttttaagagcaaccgctccagtttgtatcaatccccaactattgggcaattgagaatctttagcgcctctttaggctatcgctggtaa

SEQ ID NO: 481 - DNA (genomic), 456 bp, Helicobacter pylori; double-stranded, circular
  misc_feature (B) LOCATION 1...456
  hypothetical: NO
  anti-sense: NO
agtggagaacacacaatgaaaaaatatatcttaaatttagcgttagtgggcgcgttgagcgcgtcgtttttgatggctaagccggctcataatgcgaataactctacgcataacacgaaagaaacgactgatgcttcagcaggcgtgttagcgacagtggatggcagacccatcaccaaaagcgattttgatatgattaagcaacgaaatcctaattttgattttgacaagcttaaagagaaagaaaaagaagccttgattgagcaagctatccgcaccgcgcttgtagaaaatgaggctaaggcagaaaagcttaatcagactccagaatttaaagcgatgatggaagcggttaaaaaacaggctttagtggaattttgggctaaaaaacaggctgaagaagtgaaaaaagatccaaatcccagaaaaagaaatgcaggatttttacaacgccaa

SEQ ID NO: 482 - DNA (genomic), 504 bp, Helicobacter pylori; double-stranded, circular
  misc_feature (B) LOCATION 1...504
  hypothetical: NO
  anti-sense: NO
aaaaagatccaaatcccagaaaaagaaatgcaggatttttacaacgccaataaagatcagctttttgtcaagcaagaagcccatgctaggcatattttagtgaaaaccgaagatgaagccaaaaggattatttctgagattgacaaacagccaaaggctaaaaaagaagccaaattcattgagttagccaatcgggatacgattgatcctaacagcaagaacgcgcaaaatggcggtgatttggggaaattccaaaagaaccaaatggctccggatttttctaaagccgctttcgctttaactcctggggattacactaaaacccctgttaaaacagagtttggttatcatattatctatttgatttctaaagatagccctgtaacttatacttatgagcaagctaaacctacagagttaaggggatgttaccaggaagcttttcccagacgcatgaatcgacgcatggaattaagtagcacgctaagtgttatcaacaataga

SEQ ID NO: 483 - DNA (genomic), 900 bp, Helicobacter pylori; double-stranded, circular
  misc_feature (B) LOCATION 1...900
  hypothetical: NO
  anti-sense: NO
atgaaaaaaaatatcttaaatttagcgttagtgggcgcgttgagcgcgtcgtttttgatggctaagccggctcataatgcgaataactctacgcataacacgaaagaaacgactgatgcttcagcaggcgtgttagcgacagtggatggcagacccatcaccaaaagcgattttgatatgattaagcaacgaaatcctaattttgattttgacaagcttaaagagaaagaaaaagaagccttgattgagcaagctatccgcaccgcgcttgtagaaaatgaggctaaggcagaaaagcttaatcagactccagaatttaaagcgatgatggaagcggttaaaaaacaggctttagtggaattttgggctaaaaaacaggctgaagaagtgaaaaagatccaaatcccagaaaaagaaatgcaggatttttacaacgccaataaagatcagctttttgtcaagcaagaagcccatgctaggcatattttagtgaaaaccgaagatgaagccaaaaggattatttctgagattgacaaacagccaaaggctaaaaaagaagccaaattcattgagttagccaatcgggatacgattgatcctaacagcaagaacgcgcaaaatggcggtgatttggggaaattccaaaagaaccaaatggctccggatttttctaaagccgctttcgctttaactcctggggattacactaaaacccctgttaaaacagagtttggttatcatattatctatttgatttctaaagatagccctgtaacttatacttatgagcaagctaaacctaccattaaggggatgttacaagaaaagcttttccaagaacgcatgaatcaacgcattgaggaattaaggaagcacgctaaaattgttatcaacaagtag

SEQ ID NO: 484 - DNA (genomic), 528 bp, Helicobacter pylori; double-stranded, circular
  misc_feature (B) LOCATION 1...528
  hypothetical: NO
  anti-sense: NO
atgaaaaatcaagttaaaaaaattttagggatgagtgtggtagcagcgatggtgatcgtaggttgtagccatgccccaaaatcaggtatcagtaaaagcaataaggcatacaaagaagcgactaaaggcgctcctgattgggttgtaggggatttggaaaaagtggcgaagtatgaaaaatattcaggggtctttttaggaagggctgaagatttgatcactaataatgatgtggattattctacgaatcaggctacagccaaagctagggctaatttagcggcgaatctaaagtccactttacaaaaagatttggaaaatgaaaaaaccagaacggtagatgcttctggtaaaaggtccataagcggcactgatactgaaaaaatttctcaattagtggataaggaattgatcgcttctaaaatgcttgcccgctatgtcggtaaagatagggtttttgttttagtgggcttggataagcaaattgtggataaagtgcgcgaagagttaggcatggttaaaaagtag

SEQ ID NO: 485 - DNA (genomic), 528 bp, Helicobacter pylori; double-stranded, circular
  misc_feature (B) LOCATION 1...528
  hypothetical: NO
  anti-sense: NO
gcgatgaaaaatcaagttaaaaaaattttagggatgagtgtggtagcagcgatggtgatcgtaggttgtagccatgccccaaaatcaggtatcagtaaaagcaataaggcatacaaagaagcgactaaaggcgctcctgattgggttgtaggggatttggaaaaagtggcgaagtatgaaaaatattcaggggtctttttaggaagggctgaagatttgatcactaataatgatgtggattattctacgaatcaggctacagccaaagctagggctaatttagcggcgaatctaaagtccactttacaaaaagatttggaaaatgaaaaaaccagaacggtagatgcttctggtaaaaggtccataagcggcactgatactgaaaaaatttctcaattagtggataaggaattgatcacttctaaaatgcttgcccgctatgtcggtaaagatagggtttttgttttagtgggcttggataagcaaattgtggataaagtgcgcgaagagttaggcatggttaaaaag

SEQ ID NO: 486 - DNA (genomic), 540 bp, Helicobacter pylori; double-stranded, circular
  misc_feature (B) LOCATION 1...540
  hypothetical: NO
  anti-sense: NO
atgaagagatcttctgtatttagtttcttggtagcttttttattggtagttggctgtagtcataaaatggataataagactgtggctggcgatgtgagcactaaagcggttcagactgcgcctgttactacagaaccagctccagagaaagaagagcctaaacaagagccagctccagtggttgaagaaaagccggctattgaaagcgggactatcatcgcttctatttattttgattttgacaagtatgagatcaaagaatccgatcaagagactttagatgagatcgtgcaaaaagctaaagaaaaccacatgcaagtgcttttggaaggcaataccgatgaatttggctctagcgaatacaaccaagcgcttggcgttaaaaggactttgagcgtgaaaaacgctttagtcattaaaggggtagaaaaagatatgatcaaaaccatcagttttggcgaaagcaaacccaaatgcgtccaaaaaactagagaatgttacagagaaaacagaagagtggatgtcaaattagtgaagtaa

SEQ ID NO: 487 - DNA (genomic), 540 bp, Helicobacter pylori; double-stranded, circular; identical to SEQ ID NO: 486
  misc_feature (B) LOCATION 1...540
  hypothetical: NO
  anti-sense: NO

SEQ ID NO: 488 - DNA (genomic), 561 bp, Helicobacter pylori; double-stranded, circular
  misc_feature (B) LOCATION 1...561
  hypothetical: NO
  anti-sense: NO
aattttatttttggagaatttataatgaagagatcttctgtatttagtttcttggtagcttttttattggtagttggctgtagtcataaaatggataataagactgtggctggcgatgtgagcactaaagcggttcagactgcgcctgttactacagaaccagctccagagaaagaagagcctaaacaagagccagctccagtggttgaagaaaagccggctattgaaagcgggactatcatcgcttctatttattttgattttgacaagtatgagatcaaagaatccgatcaagagactttagatgagatcgtgcaaaaagctaaagaaaaccacatgcaagtgcttttggaaggcaataccgatgaatttggctctagcgaatacaaccaagcgcttggcgttaaaaggactttgagcgtgaaaaacgctttagtcattaaaggggtagaaaaagatatgatcaaaaccatcagttttggcgaaagcaaacccaaatgcgtccaaaaaactagagaatgttacagagaaaacagaagagtggatgtcaaattagtgaag

SEQ ID NO: 489 - DNA (genomic), 294 bp, Helicobacter pylori; double-stranded, circular
  misc_feature (B) LOCATION 1...294
  hypothetical: NO
  anti-sense: NO
ttgacaacaaaagcgtgttggttgcttcgggtttgttgttatagaagtctaaatattacaatcaaggatagaacgatgaaaaccaatggtcattttaaggattttgcatggaaaaaatgctttttaggcgcgagcgtggtggctttattagtggggtgtagcccgcatattattgaaaccaatgaagttgctttgaaattgaattaccatccagctagcgagaaagttcaagcgttagatgaaaagattttacttttaaggccagctttccaatacagcgakaatatttgctaa

SEQ ID NO: 490 - DNA (genomic), 783 bp, Helicobacter pylori; double-stranded, circular
  misc_feature (B) LOCATION 1...783
  hypothetical: NO
  anti-sense: NO
atgaaaacaaatggtcattttaaggattttgcatggaaaaaatgctttttaggcgcgagcgtggtggctttattagtggggtgtagcccgcatattattgaaaccaatgaagttgctttgaaattgaattaccatccagctagcgagaaagttcaagcgttagatgaaaagattttacttttaaggccagctttccaatacagcgataatattgctaaagagtatgaaaacaaattcaagaatcaaaccacgcttaaagttgaagagatcttgcaaaatcagggctataaggttattaatgtggatagcagcgataaagacgatttttcttttgcgcaaaaaaaagaagggtatttggctgtcgctatgaatggcgaaattgttttacgccccgatcctaaaaggaccatacagaaaaaatcagaacccgggttattattctccactggtttggataaaatggaaagggttttaatcccggctgggtttgtcaaggttaccatactagagcctatgagtggggaatctttggattcttttacgatggatttgagcgagttggacatccaagaaaaattcttaaaaaccacccattcaagccatagcggagggttagttagcactatggttaaggggacggataattctaatgacgcaattaagagcgctttgaataagatttttgcaagtatcatgcaagaaatggataagaaactcactcaaaggaatttagaatcttatcaaaaagacgccaaggaattaaaaaacaagagaaaccgataa

SEQ ID NO: 491 - DNA (genomic), 804 bp, Helicobacter pylori; double-stranded, circular
  misc_feature (B) LOCATION 1...804
  hypothetical: NO
  anti-sense: NO
aatattacaatcaaggatagaacgatgaaaacaaatggtcattttaaggattttgcatggaaaaaatgctttttaggcgcgagcgtggtggctttattagtggggtgtagcccgcatattattgaaaccaatgaagttgctttgaaattgaattaccatccagctagcgagaaagttcaagcgttagatgaaaagattttacttttaaggccagctttccaatacagcgataatattgctaaagagtatgaaaacaaattcaagaatcaaaccacgcttaaagttgaagagatcttgcaaaatcagggctataaggttattaatgtggatagcagcgataaagacgatttttcttttgcgcaaaaaaaagaagggtatttggctgtcgctatgaatggcgaaattgttttacgccccgatcctaaaaggaccatacagaaaaaatcagaacccgggttattattctccactggtttggataaaatggaaagggttttaatcccggctgggtttgtcaaggttaccatactaaagcctatgagtggggaatctttggattcttttacgatggatttgagcgagttggacatccaagaaaaattcttaaaaaccacccattcaagccatagcggagggttagttagcactatggttaaggggacggataattctaatgacgcaattaagagcgctttgaataagatttttgcaagtatcatgcaagaaatggataagaaactcactcaaaggaatttagaatcttatcaaaaagacgccaaggaattaaaaaacaagagaaaccga

SEQ ID NO: 492 - DNA (genomic), 582 bp, Helicobacter pylori; double-stranded, circular
  misc_feature (B) LOCATION 1...582
  hypothetical: NO
  anti-sense: NO
atgcaagaagcgttgttgcgttttcaagagggctttaaggagtggggttatcttattttatttttgtattccttggggggtgggtatgtagggattgtcatcgcttccattttgagcgctaccacgcacgctttggatataaaaataaccattcttgtcgcttttttagggaatttaatagggagtggggctcttgtaatctttgcccgctatcaaaaaagagagtttttaaagtatttccaaaagcatagaagaaagcttgctttggcgagtttgtgggtgaaacgctacgccttgctcatgatttttgtcaataaatatctctatgggattaaaagcgttgtgcctttggcaattggttttagcaaataccctttaaaaaagtttttatggcttaatgttttttccagttttttgtgggcgttaatcgtggggagcgtttcttttcaagcgagcgattgggtgaaaacgctgtatgaaaggctttctcattacacttcgttttttgtcataagttttgttcttatagcgcttttaatatggtttttattgaaacgatattcgcgcaaaatgggtttttaa

SEQ ID NO: 493 - DNA (genomic), 582 bp, Helicobacter pylori; double-stranded, circular
  misc_feature (B) LOCATION 1...582
  hypothetical: NO
  anti-sense: NO
atgcaagaagcgttgttgcgttttcaagagggctttaaggagtggggttatcttattttatttttgtattctttggggggtgggtatgtagggattgtcatcgcttccattttgagcgctaccacgcacgctttggatataaaaataaccattcttgtcgcttttttagggaatttaatagggagtggggctcttgtaatctttgcccgctatcaaaaaagagagtttttaaagtatttccaaaagcatagaagaaagcttgctttggcgagtttgtgggtgaaacgctacgccttgctcatgatttttgtcaataaatatctctatgggattaaaagcgttgtgcctttggcaattggttttagcaaataccctttaaaaaagtttttatggcttaatgttttttccagttttttgtgggcgttaatcgtggggagcgtttcttttcaagcgagcgattgggtgaaaacgctgtatgaaaggctttctcattacacttcgttttttgtcataagttttgttcttatagcgcttttaatatggtttttattgaaacgatattcgcgcaaaatgggkttttaa

SEQ ID NO: 494 - DNA (genomic), 603 bp, Helicobacter pylori; double-stranded, circular
  misc_feature (B) LOCATION 1...603
  hypothetical: NO
  anti-sense: NO
aaacgaatcaaaagagggttttttatgcaagaagcgttgttgcgttttcaagagggctttaaggagtggggttatcttattttatttttgtattccttggggggtgggtatgtagggattgtcatcgcttccattttgagcgctaccacgcacgctttggatataaaaataaccattcttgtcgcttttttagggaatttaatagggagtggggctcttgtaatctttgcccgctatcaaaaaagagagtttttaaagtatttccaaaagcatagaagaaagcttgctttggcgagtttgtgggtgaaacgctacgccttgctcatgatttttgtcaataaatatctctatgggattaaaagcgttgtgcctttggcaattggttttagcaaataccctttaaaaaagtttttatggcttaatgttttttccagttttttgtgggcgttaatcgtggggagcgtttcttttcaagcgagcgattgggtgaaaacgctgtatgaaaggctttctcattacacttcgttttttgtcataagttttgttcttatagcgcttttaatatggtttttattgaaacgatattcgcgcaaaatgggtttt

SEQ ID NO: 495 - DNA (genomic), 471 bp, Helicobacter pylori; double-stranded, circular
  misc_feature (B) LOCATION 1...471
  hypothetical: NO
  anti-sense: NO
ttgactaaaaaattcatgtcttggatggtggttatcggggctttaatttgcgtgcttttaggggtgtttatcttcttcactagcatgtcggttaaaaaatctttaaccgcttatcttaacgcttatttagagcaacgcccaaatatcgagggcatggggattataggagttccttttaaatgcgaaaggttttttaaaatcgcatgcgtttctaaagaacttcgttttttagatcctcaaaactctcctattatggattttaaaaatttaaagatcaagctccattctttagataaaagctctcttaccctttctatccattctcaaatccaatcccctattttagaacaatccattcagcaaaaaatcagccaaatccccttaaaaaacttgaatgccttattggaaaaattcaaacccacgcgcttgaattgctctttaacattcaacgctttagatgaaaaaacctaa

SEQ ID NO: 496 - DNA (genomic), 486 bp, Helicobacter pylori; double-stranded, circular
  misc_feature (B) LOCATION 1...486
  hypothetical: NO
  anti-sense: NO
atggaggcgcaagaaaatctctcccttaaaaatatttttaaaaccttgagttctaaagacgctaaagccatagaagagttgcaagacaaactgcgttttttagcgccaaagttgagtgtttctatccaagcacgccattttaaaaacgttttagagtccttttaccaacaaaataaagagagtttgggctttttttccccttattttagtttgcgttctcaaacccctagcgtctcttatgaaagcgcgttagcttctttagaaaactattttatggccttgttccaatcccattttaaagacgataccgcgctccaacagaattttaaaggattgttgcaagcctttgtttctatggctaaagacaaacgatctcaaatcgttcttaacgcccaagctaaagacaacaccaagctgacttttaacgccttgttagaaagcctaagcgtgaatttctttcaatcttacaaaataagccatgagtga

SEQ ID NO: 497 - DNA (genomic), 528 bp, Helicobacter pylori; double-stranded, circular
  misc_feature (B) LOCATION 1...528
  hypothetical: NO
  anti-sense: NO
ctaatgcagagaatctcctgctacactttttttcaagagggtttaatggaggcgcaagaaaatctctcccttaaaaatatttttaaaaccttgagttctaaagacgctaaagccatagaagagttgcaagacaaactgcgttttttagcgccaaagttgagtgtttctatccaagcacgccattttaaaaacgttttagagtccttttaccaacaaaataaagagagtttgggctttttttccccttattttagtttgcgttctcaaacccctagcgtctcttatgaaagcgcgttagcttctttagaaaactattttatggccttgttccaatcccattttaaagacgataccgcgctccaacagaattttaaaggattgttgcaagcctttgtttctatggctaaagacaaacgatctcaaatcgttcttaacgcccaagctaaagacaacaccaagctgacttttaacgccttgttagaaagcctaagcgtgaatttctttcaatcttacaaaataagccatgag

SEQ ID NO: 498 - DNA (genomic), 576 bp, Helicobacter pylori; double-stranded, circular
  misc_feature (B) LOCATION 1...576
  hypothetical: NO
  anti-sense: NO
agggtgtttttgactaaaaaattcatgtcttggatggtggttatcggggctttaatttgcgtgcttttaggggtgtttatcttcttcactagcatgtcggttaaaaaatctttaaccgcttatcttaacgcttatttagagcaacgcccaaatatcgagggcatggggattataggagttccttttaaatgcgaaaggttttttaaaatcgcatgcgtttctaaagaacttcgttttttaaatcctcaaaactctcctattatggattttaaaaatttagagatcaagctccattctttagataaaagctctcttaccctttctatccattctcaaatccaatcccctattttagaacaatccattcagcaaaaaatcagccaaatccccttaaaaaacttgaatgccttattggaaaaattcaaacccacgcgcttgaattgctctttaacattcaacgctttagatgaaaaaaccttaaacgataatttaaaatgcgatttgactaatgcagagaatctcctgctacactttttttcaagagggtttaatggaggcgcaagaaaatctctccct

SEQ ID NO: 499 - DNA (genomic), 1029 bp, Helicobacter pylori; double-stranded, circular
  misc_feature (B) LOCATION 1...1029
  hypothetical: NO
  anti-sense: NO
ttgactaaaaaattcatgtcttggatggtggttatcggggctttaatttgcgtgcttttaggggtgtttatcttcttcactagcatgtcggttaaaaaatctttaaccgcttatcttaacgcttatttagagcaacgcccaaatatcgagggcatggggattataggagttccttttaaatgcgaagggttttttaaaatcgcatgcgtttctaaagaacttcgttttttagatcctcaaaactcccctattatggattttaaaaatttaaagatcaagctccattctttagataaaagctctcttaccctttctatccattctcaaatccaatcccctattttagaacaatccattcagcaaaaaatcagccaaatccccttaaaaaacttgaatgccttattggaaaaattcaaacccacgcgcttgaattgctctttaacattcaacgctttagatgaaaaaaccttaaacgataatttaaaatgcgatttgactaatgcagagaatatccttgcttacactttttttcaagaaggtttaatggaggcgcaagaaaatctctcccttaaaaatatttttaaaaccttgagttctaaagacgctaaagccatagaagagttgcaagacaaactgcgttttttagcgccaaagttgagtgtttctatccaagcacgccattttaaaaacgttttagagtccttttaccaacaaaataaagagagtttgggctttttttccccttattttagtttgcgttctcaaacccctagcgtctcttatgaaagcgcgttagcttctttagaaaactattttatggccttgttccaatcccattttaaagacgataccgcgctccaacagaattttaaaggattgttgcaagcctttgtttctatggctaaagacaaacgatctcaaatcgttcttaacgcccaagctaaagacaacaccaagctgacttttaacgccttgttagaaagcctaagcgtgaatttctttcaatcttacaaaataagccatgagtga

SEQ ID NO: 500 - DNA (genomic), 399 bp, Helicobacter pylori; double-stranded, circular
  misc_feature (B) LOCATION 1...399
  hypothetical: NO
  anti-sense: NO
tggagaaggtctgtgaaggggggggggatttgtgtggataacgccaacgctaatgggaatgcggtgattaagaatgttaatttcagcgataacggcactttgatttataaagggggtgaaaacagcgccggaaattccctgaccttagaaaacaacaccgtcaattcctataatatcaacgccaaagcgcaaaaccttattttcaacaacaactcgtttaacagcggtagctattcgtttaacgacactaaaaatgttacttttaaaggcacgaacacgctcattaacagcgatcctttcagccgccttaaaggatcagtttctattgacaataatagtatctttaacattgaaagggatttgaccgacaaaaccacgttacacgcttttaagtgggga

SEQ ID NO: 501 - DNA (genomic), 468 bp, Helicobacter pylori; double-stranded, circular
  misc_feature (B) LOCATION 1...468
  hypothetical: NO
  anti-sense: NO
ataacgcctttaatgaagacaaatttaatggcggatcgtttaatttcaaccacgcagagcaaacaaacgcttttaataacaactcgtttagtggcggatcgtttagttttaacgccaagcaagtggattttaatgggaattcgtttaatgggggggtgtttaatttcaataaatcccctaaagccagttttactaacaaacacttttaatgtgaataaccaattcaaaataaatggcgctcaaacggattttactttcagtaagggcgttgttttcaacatgcaagggcttttgagcagtttgagcgtaggcacgacttatcaattgcttaacgctaaaagcgtgggttataaggataacaataacgctttgtatcaaatgttgcgctggactagcggagaaaatcctagcggtaaattagtagatgaaaataaaaccgcgccaaacagcgctaaaatttataatgtt

SEQ ID NO: 502 - DNA (genomic), 528 bp, Helicobacter pylori; double-stranded, circular
  misc_feature (B) LOCATION 1...528
  hypothetical: NO
  anti-sense: NO
ccgacaaaaccacgttacacgcttttaagtggggataacatcaaatacaataaccaagctttagcggataatgttttttcaaaaaatttatgggatttgatccattatgacggcgaacaagggactctattaagaacggataacaacacttattttgtgcaattcacgcagagcaacggccaaaaatttgtttttgaagagacttttaatcctggctctatcacctataaatatttcactatccattcttcgcctttccacacagaagctgattctaaggatatttggaatcaggtgaggaagcagtttgattttattccaggaaaaaccccggtgtgcgttggcgtgtgctatatcgcaccctataaaaatcaagatcttatcggctctagcgcttttgcgtggtcgctgaattttggggctacggtggtggggactttgcctttagggagcgcccaagaaaaagccaataacaatggcggcccgatctggtttggtaagaataatttgccgtatttgcatggcaat

SEQ ID NO: 503 - DNA (genomic), 3360 bp, Helicobacter pylori; double-stranded, circular
  misc_feature (B) LOCATION 1...3360
  hypothetical: NO
  anti-sense: NO
aagctttctatggagattaaaaactccaactttagggatttcacatggggaggctttaggttcaattcagggcgtatcacttttgaaaacaccacttttagcggctggactaatattaacggggcgactgaaagcggttcatcgtatgtgaacatggttgcgaatacggatttgattttcactgattccattttaggagggggcattcgctatgatttgaaggctaataacattattttcaataacactcaaatggtggttgatgtgtctaaaaacgtgaatcagtcttcattgaatgggaatgttactttcaatcattccaggctttcagtcaaacccaatgcggctatcaatattgggggggatcagacccaaacgactttagaaaacgcttcaagcctttctttttataacgatagcgtagcgaattttaacggcacgaccgcttttaacggggtgtcttacttgaatttaaaccctaacgctcaagtcagcttcaatcaagcgaatttcaataacgctaatgtaaccttttatggcattccgctatttggtaaaacgcccaattttggcaactctgtgcgccttatcaatttcaaaggggacgcaaagtttaatcaagccacgctcaatttaagggctaaaaatatccatttgaatttccaaggggcttccacttttgaaaataactctacgatgaatttggctgaaagttctcaagcgagctttaacgctcttagcgtggagggggaaacgaatttcaatctcaacggctcaagtttattgagtttcaatggtaacagcgtttttaacgcccctgtgaatttctacgctaataattctcaaatttctttcactcattcggcgacttttaatgcagacgcttcatttgatttaggcaataacagcaccctgaattttcaaagcgttcttttaaacagcgctctaaaccttttaggcaatggcggtaacaatctagcgattaatgctaaagggaattttagttttggatctcaagggattttgaatctgtcttatatgaatctatttggaggggataaaaaagcttccgtttatgatgtgttgcaagcccaaaatattgatggcttaagggggaataacggctatgagaagatccgtttttatggcatacagattgaaaaggccgattactcgttcaataatggcgttcattcttggagcttcactaacccgctcaacacgactgaaaccattaccgaaaccttacataataaccgcttgaaagtgcagatctctcaaaacggtgcttctaataatgcgatgtttaatctcgctcctagcttgtatgattaccaacaaaacccttatgatgaaagcgagaattcctataatcacacaagcgataaagccggcacttattatttgagtagcagtatcaaaggctttggtaagaataatgaaatacccgggacttataacgcgcaaaaccaacccttacaagctttacacatttataatcaggctatcagtaagcaggatttgaacatgatcgccagtttgggtaaggaatttttgcctaaagtggctaaacttatcgcttcaggggctttagacaatctcaatctcaatagcccggatagctttgaaacgatttttagtatcttaaaagaatatggcattactttaaaccaagcgaattggaagagcttattgaagatcatcaataatttttctaacacggctaattatcatttttctcaaggtagtctcgttgtgggggcgatcaaagaagggcaaacgaacacgaatagcgtggtgtggtttgggggcgatgggtataaaaatccatgcgcggttggggataacacttgccagatgttcaggcagactaatttagggcagttgcttaattctagcgtgccttatttgggttacattaacgctaattttaaggctaaaaacatttatatcaccggaaccatcggcagtgggaacgcttgggggagcggagggagtgcgaatgtgtcttttgaaagcgcgacaaatttggtgcttaatcaagccaatattgacgctcaagggaccgataagatcttttcttacttgggcaaagagggcattgataagctttttggagaaaaaggtttagggaatgtgctttctaatattgtttatgaagagagcttgaatgataacgctatccctaaagatttagccaacatgatccctaaagatttgggatctaaaactttaagctctttgcttagccctactgaagtgaataacctcttaggcgtgagtgcttttaaaaacgcgatcatggaaatcttaaattctaaaacggtgggcgatgtttttggtgaaaacgggcttttaaacgcgctagatcctgtaaaaagaaaagaaattgatcaaatgcttttagagcaaatccaagcccattcttcagggtttgaaaaattcatcgttaaaactttagggattgaaaatgtagagaatttcatcaataactggtatggcaagcaaagcttgagttcttttgccaataattttgtgcctggaggcttgaatcaagccctagataaaataggttctagctctgatgccaaagacttacagagtttcttagataaaacgacttttggggatattctcaatcaaatgatcaatcaagcccctttaatcaataagctcatttcttggctcggcccgcaggatttgagcgtgttagtgaatatcgctttaaatagtatcactaaccctagtaaggaattattgggtgcgatttctggcatgggtcaaaaagtgctgaacgatttgctaggcgaaggtgtagtgaataaaatcatgagcaatcaagttttagggcaaatgatcaataaaatcatcgctgataagggctttggaggcgtttatcatcaaggtctaggctcaatactccctaaatccttacaagatgagttgaagaaattgggtatgggctctttactcaaacctaaaggcttgcacaacctctggcaaaaagggaacttcaatttcgtggctaaaaaccatgtgtttgtgaataacagcttgtttagtaacgccacagggggggaattgaattttgtagcgggcaagtccattatttttaatgggaaaaacaccattaatttcacgcagtatcagggcaggctttcttttgtatctaaagatttttctaatatttcattagacactttaaacgctaccaacggcttaacgcttaacgcttctaaaaatgatattagcgttcaaaaaggtcaaatttgcgtgaatgtcttagattgcatgaccgctaaagggaaaaccactcaaactaattcctcttcaaggcgacagccccaactaatgaaacgc

SEQ ID NO: 504 - DNA (genomic), 4731 bp, Helicobacter pylori; double-stranded, circular
  misc_feature (B) LOCATION 1...4731
  hypothetical: NO
  anti-sense: NO
gtgggctatattcaaggcgtttttaaagccaatcaaattgatattaccggcacgattcgctctggtaatggagccaaaaccggtgggggcgcgactttagtgtttaacgctcaagagcgtttgaatatcgctaacgctaatttgaataacgataaagccggtttgcaaaactcatggatgaatttcattgttaataatggcaatttgaacgtaacaaacgcaaattttagcaaccaaaccccgcatggaggctttaaccttaaagccaataatatcacttgggataaaggctctgtgagtgggggggggaattttggtgtggataacgccaacgctaatgggaatgcggtgattaagaatgttaatttcagcgataacggcactttgatttataaagggggtgaaaacagcgccggaaattccctgaccttagaaaacaacaccttcaattcctataatatcaacgccaaagcgcaaaaccttattttcaacaacaactcgtttaacagcggtagctattcgtttaacgacactaaaaatgttacttttaaaggcacgaacacgctcattaacagcgatcctttcagccgccttaaaggatcagtttctattgacaataatagtatctttaacattgaaagggatttgaccgataaaaccacttacacgcttttaagtggggataacatcaaatacaataaccaagctttagcggataatgttttttcaaaaaatttatgggatttgatccattatgacggcgaacaagggactctattaagaacggataacaacacttattttgtgcaattcacgcagagcaacggccaaaaatttgtttttgaagagacttttaatcctggctctatcacctataaatatttcactatccattcttcgcctttccacacagaagctgattctaaggatatttggaatcaggtgaggaagcagtttgattttattccaggaaaaaccccggtgtgcgttggcgtgtgctatatcgcaccctataaaaatcaagatcttatcggctctagcgcttttgcgtggtcgctgaattttggggctacggtggtggggactttgcttttagggagcgctcaagaaaaagccaataacaatggcggctcgatctggtttggtaagaataatttgctgtatttgcatggcaattttaacgcgactaatatctttttaacgaataactttaatgtcggcaaccctaacgccggcggtggggcaacgattaattttaacgctgatgaaaccttgagcgctgacgggttgaattacacgaatttccaaaccgtggctatgggcttacaaactagcgcgagccagcattcatgggcgaattttaattccaagctttctatggagattaaaaactccaactttagggatttcacatggggaggctttaggttcaattcagggcgtatcacttttgaaaacaccacttttagcggctggactaatattaacggggcgactgaaagcggttcatcgtatgtgaacatggttgcgaatacggatttgattttcactgattccattttaggagggggcattcgctatgatttgaaggctaataacattattttcaataacactcaaatggtggttgatgtgtctaaaaacgtgaatcagtcttcattgaatgggaatgttactttcaatcattccaggctttcagtcaaacccaatgcggctatcaatattgggggggatcagacccaaacgactttagaaaacgcttcaagcctttctttttataacgatagcgtagcgaattttaacggcacgaccgcttttaacggggtgtcttacttgaatttaaaccctaacgctcaagtcagcttcaatcaagcgaatttcaataacgctaatgtaaccttttatggcattccgctatttggtaaaacgcccaattttggcaactctgtgcgccttatcaatttcaaaggggacgcaaagtttaatcaagccacgctcaatttaagggctaaaaatatccatttgaatttccaaggggcttccacttttgaaaataactctacgatgaatttggctgaaagttctcaagcgagctttaacgctcttagcgtggagggggaaacgaatttcaatctcaacggctcaagtttattgagtttcaatggtaacagcgtttttaacgcccctgtgaatttctacgctaataattctcaaatttctttcactcattcggcgacttttaatgcagacgcttcatttgatttaggcaataacagcaccctgaattttcaaagcgttcttttaaacagcgctctaaaccttttaggcaatggcggtaacaatctagcgattaatgctaaagggaattttagttttggatctcaagggattttgaatctgtcttatatgaatctatttggaggggataaaaaagcttccgtttatgatgtgttgcaagcccaaaatattgatggcttaagggggaataacggctatgagaagatccgtttttatggcatacagattgaaaaggccgattactcgttcaataatggcgttcattcttggagcttcactaacccgctcaacacgactgaaaccattaccgaaaccttacataataaccgcttgaaagtgcagatctctcaaaacggtgcttctaataatgcgatgtttaatctcgctcctagcttgtatgattaccaacaaaacccttatgatgaaagcgagaattcctataatcacacaagcgataaagccggcacttattatttgagtagcagtatcaaaggctttggtaagaataatgaaatacccgggacttataacgcgcaaaaccaacccttacaagctttacacatttataatcaggctatcagtaagcaggatttgaacatgatcgccagtttgggtaaggaatttttgcctaaagtggctaaacttatcgcttcaggggctttagacaatctcaatctcaatagcccggatagctttgaaacgatttttagtatcttaaaagaatatggcattactttaaaccaagcgaattggaagagcttattgaagatcatcaataatttttctaacacggctaattatcatttttctcaaggtagtctcgttgtgggggcgatcaaagaagggcaaacgaacacgaatagcgtggtgtggtttgggggcgatgggtataaaaatccatgcgcggttggggataacacttgccagatgttcaggcagactaatttagggcagttgcttaattctagcgtgccttatttgggttacattaacgctaattttaaggctaaaaacatttatatcaccggaaccatcggcagtgggaacgcttgggggagcggagggagcgcgaatgtgtcttttgaaagcgcgacaaatttggtgcttaatcaagccaatattgacgctcaagggaccgataagatcttttcttacttgggcaaagagggcattgataagctttttggagaaaaaggtttagggaatgtgctttctaatattgtttatgaagagagcttgaatgataacgctatccctaaagatttagccaacatgatccctaaagatttgggatctaaaactttaagctctttgcttagccctactgaagtgaataacctcttaggcgtgagtgcttttaaaaacgcgatcatggaaatcttaaattctaaaacggtgggcgatgtttttggtgaaaacgggcttttaaacgcgctagatcctgtaaaaagaaaagaaattgatcaaatgcttttagagcaaatccaagcccattcttcagggtttgaaaaattcatcgttaaaactttagggattgaaaatgtagagaatttcatcaataactggtatggcaagcaaagcttgagttcttttgccaataattttgtgcctggaggcttgaatcaagccctagataaaataggttctagctctgatgccaaagacttacagagtttcttagataaaacgacttttggggatattctcaatcaaatgatcaatcaagcccctttaatcaataagctcatttcttggctcggcccgcaggatttgagcgtgttagtgaatatcgctttaaatagtatcactaaccctagtaaggaattattgggtgcgatttctggcatgggtcaaaaagtgctgaacgatttgctaggcgaaggtgtagtgaataaaatcatgagcaatcaagttttagggcaaatgatcaataaaatcatcgctgataagggctttggaggcgtttatcatcaaggtctaggctcaatactccctaaatccttacaagatgagttgaagaaattgggtatgggctctttactcaaacctaaaggcttgcacaacctctggcaaaaagggaacttcaatttcgtggctaaaaaccatgtgtttgtgaataacagcttgtttagtaacgccacagggggggaattgaattttgtagcgggcaagtccattatttttaatgggaaaaacaccattaatttcacgcagtatcagggcaggctttcttttgtatctaaagatttttctaatatttcattagacactttaaacgctaccaacggcttaacgcttaacgcttctaaaaatgatattagcgttcaaaaaggtcaaatttgcgtgaatgtcttagattgcatgaccgctaaagggaaaaccactcaaactaattcctcttcaaggcgacagccccaactaatgaaacgctag

SEQ ID NO: 505 - DNA (genomic), 5328 bp, Helicobacter pylori; double-stranded, circular
  misc_feature (B) LOCATION 1...5328
  hypothetical: NO
  anti-sense: NO
gtgaataaccaattcaaaataaatggcgctcaaacggattttactttcagtaagggcgttgttttcaacatgcaagggcttttgagcagtttgagcgtaggcacgacttatcaattgcttaacgctaaaagcgtgggttataaggataacaataacgctttgtatcaaatgttgcgctggactagcggagaaaatcctagcggtaaattagtagatgaaaataaaaccgcgccaaacagcgctaaaatttataatgttcaattcactgataacggcttgacttactacattaaagaaaattttaataatgggatcacgctcactcgtttatgcactctaggctacacgcattgcgtgaatattgataacgatgcgtttaatcttaaaaatgtcaataataacgctagtaacaccgtgttctatctcaacggcatgacgacttggaagactgctggcacaggagttttcacgcaagattacagcggcactaacagcgttttagtgttcaatcagaccaccccttttcttgctggggcgaatcccacttccaatagcgtggtgggttttgggaaaacttcaggggctgaatgggggctagtgggctatattcaaggcgtttttaaagccaatcaaattgatattaccggcacgattcgctctggtaatggagccaaaaccggtgggggcgcgactttagtgtttaacgctcaagagcgtttgaatatcgctaacgctaatttgaataacgataaagccggtttgcaaaactcatggatgaatttcattgttaataatggcaatttgaacgtaacaaacgcaaattttagcaaccaaaccccgcatggaggctttaaccttaaagccaataatatcacttgggataaaggctctgtgagtgggggggggaattttggtgtggataacgccaacgctaatgggaatgcggtgattaagaatgttaatttcagcgataacggcactttgatttataaagggggtgaaaacagcgccggaaattccctgaccttagaaaacaacaccttcaattcctataatatcaacgccaaagcgcaaaaccttattttcaacaacaactcgtttaacagcggtagctattcgtttaacgacactaaaaatgttacttttaaaggcacgaacacgctcattaacagcgatcctttcagccgccttaaaggatcagtttctattgacaataatagtatctttaacattgaaagggatttgaccgataaaaccacttacacgcttttaagtggggataacatcaaatacaataaccaagctttagcggataatgttttttcaaaaaatttatgggatttgatccattatgacggcgaacaagggactctattaagaacggataacaacacttattttgtgcaattcacgcagagcaacggccaaaaatttgtttttgaagagacttttaatcctggctctatcacctataaatatttcactatccattcttcgcctttccacacagaagctgattctaaggatatttggaatcaggtgaggaagcagtttgattttattccaggaaaaaccccggtgtgcgttggcgtgtgctatatcgcaccctataaaaatcaagatcttatcggctctagcgcttttgcgtggtcgctgaattttggggctacggtggtggggactttgcttttagggagcgctcaagaaaaagccaataacaatggcggctcgatctggtttggtaagaataatttgctgtatttgcatggcaattttaacgcgactaatatctttttaacgaataactttaatgtcggcaaccctaacgccggcggtggggcaacgattaattttaacgctgatgaaaccttgagcgctgacgggttgaattacacgaatttccaaaccgtggctatgggcttacaaactagcgcgagccagcattcatgggcgaattttaattccaagctttctatggagattaaaaactccaactttagggatttcacatggggaggctttaggttcaattcagggcgtatcacttttgaaaacaccacttttagcggctggactaatattaacggggcgactgaaagcggttcatcgtatgtgaacatggttgcgaatacggatttgattttcactgattccattttaggagggggcattcgctatgatttgaaggctaataacattattttcaataacactcaaatggtggttgatgtgtctaaaaacgtgaatcagtcttcattgaatgggaatgttactttcaatcattccaggctttcagtcaaacccaatgcggctatcaatattgggggggatcagacccaaacgactttagaaaacgcttcaagcctttctttttataacgatagcgtagcgaattttaacggcacgaccgcttttaacggggtgtcttacttgaatttaaaccctaacgctcaagtcagcttcaatcaagcgaatttcaataacgctaatgtaaccttttatggcattccgctatttggtaaaacgcccaattttggcaactctgtgcgccttatcaatttcaaaggggacgcaaagtttaatcaagccacgctcaatttaagggctaaaaatatccatttgaatttccaaggggcttccacttttgaaaataactctacgatgaatttggctgaaagttctcaagcgagctttaacgctcttagcgtggagggggaaacgaatttcaatctcaacggctcaagtttattgagtttcaatggtaacagcgtttttaacgcccctgtgaatttctacgctaataattctcaaatttctttcactcattcggcgacttttaatgcagacgcttcatttgatttaggcaataacagcaccctgaattttcaaagcgttcttttaaacagcgctctaaaccttttaggcaatggcggtaacaatctagcgattaatgctaaagggaattttagttttggatctcaagggattttgaatctgtcttatatgaatctatttggaggggataaaaaagcttccgtttatgatgtgttgcaagcccaaaatattgatggcttaagggggaataacggctatgagaagatccgtttttatggcatacagattgaaaaggccgattactcgttcaataatggcgttcattcttggagcttcactaacccgctcaacacgactgaaaccattaccgaaaccttacataataaccgcttgaaagtgcagatctctcaaaacggtgcttctaataatgcgatgtttaatctcgctcctagcttgtatgattaccaacaaaacccttatgatgaaagcgagaattcctataatcacacaagcgataaagccggcacttattatttgagtagcagtatcaaaggctttggtaagaataatgaaatacccgggacttataacgcgcaaaaccaacccttacaagctttacacatttataatcaggctatcagtaagcaggatttgaacatgatcgccagtttgggtaaggaatttttgcctaaagtggctaaacttatcgcttcaggggctttagacaatctcaatctcaatagcccggatagctttgaaacgatttttagtatcttaaaagaatatggcattactttaaaccaagcgaattggaagagcttattgaagatcatcaataatttttctaacacggctaattatcatttttctcaaggtagtctcgttgtgggggcgatcaaagaagggcaaacgaacacgaatagcgtggtgtggtttgggggcgatgggtataaaaatccatgcgcggttggggataacacttgccagatgttcaggcagactaatttagggcagttgcttaattctagcgtgccttatttgggttacattaacgctaattttaaggctaaaaacatttatatcaccggaaccatcggcagtgggaacgcttgggggagcggagggagcgcgaatgtgtcttttgaaagcgcgacaaatttggtgcttaatcaagccaatattgacgctcaagggaccgataagatcttttcttacttgggcaaagagggcattgataagctttttggagaaaaaggtttagggaatgtgctttctaatattgtttatgaagagagcttgaatgataacgctatccctaaagatttagccaacatgatccctaaagatttgggatctaaaactttaagctctttgcttagccctactgaagtgaataacctcttaggcgtgagtgcttttaaaaacgcgatcatggaaatcttaaattctaaaacggtgggcgatgtttttggtgaaaacgggcttttaaacgcgctagatcctgtaaaaagaaaagaaattgatcaaatgcttttagagcaaatccaagcccattcttcagggtttgaaaaattcatcgttaaaactttagggattgaaaatgtagagaatttcatcaataactggtatggcaagcaaagcttgagttcttttgccaataattttgtgcctggaggcttgaatcaagccctagataaaataggttctagctctgatgccaaagacttacagagtttcttagataaaacgacttttggggatattctcaatcaaatgatcaatcaagcccctttaatcaataagctcatttcttggctcggcccgcaggatttgagcgtgttagtgaatatcgctttaaatagtatcactaaccctagtaaggaattattgggtgcgatttctggcatgggtcaaaaagtgctgaacgatttgctaggcgaaggtgtagtgaataaaatcatgagcaatcaagttttagggcaaatgatcaataaaatcatcgctgataagggctttggaggcgtttatcatcaaggtctaggctcaatactccctaaatccttacaagatgagttgaagaaattgggtatgggctctttactcaaacctaaaggcttgcacaacctctggcaaaaagggaacttcaatttcgtggctaaaaaccatgtgtttgtgaataacagcttgtttagtaacgccacagggggggaattgaattttgtagcgggcaagtccattatttttaatgggaaaaacaccattaatttcacgcagtatcagggcaggctttcttttgtatctaaagatttttctaatatttcattagacactttaaacgctaccaacggcttaacgcttaacgcttctaaaaatgatattagcgttcaaaaaggtcaaatttgcgtgaatgtcttagattgcatgaccgctaaagggaaaaccactcaaactaattcctcttcaaggcgacagccccaactaatgaaacgctag

SEQ ID NO: 506 - DNA (genomic), 1872 bp, Helicobacter pylori; double-stranded, circular
  misc_feature (B) LOCATION 1...1872
  hypothetical: NO
  anti-sense: NO
gtggatttttcaaaagtcttacaaaatacgactatcgggactttggatttagggccaaacgctacttttaaagcgaataatttgatcgtgaataacgcttttaataataactctaattacagggctaatatcagcggtaatttcaatgtggccaagggtgcaacttttagcacgaatgaaaatggtttgaatgtgggggggaattttaacagcgaagggccattaatctttaatcttaataaccccacccatcaaacgattatcaatgtaactggcacttctacaatcatgtcttataacaatcaagctttaatcaactttaacacccaactcaagcaaggcgcttatacgcttattaacgctaatcgcatggtttatggctatgataatcaaacgattcttggggggagcttgagcgattacctcaaactttacactctcattgattttaacggcaaacgcatgcaattgaatggcgattcgttaagctatgacaaccaaccggtcagtattaaagatgggggtcttgtggtaagctttaaagacaatcaagggcaaatggtgtattcatctatcctttatgataaaatccaagttaccgtctctgataaacccatgagcattcaagcccctagtttggagtattatgttaaacgcattcaaggtagtgctggtttgaatgcgatcaaatctgcgggcaataattccattatgtggttgagtgagctttttgcggctaaggggggtaatcccttgttcgccccttattatttgcaagacaatcccactgaacacattgttactttaatgaaagatattaccagcgctttaggaatgctctctaactccaatctcaaaaacaactccactgatgttttacagctcaacacttacacgcaacaaatgagccgtttagccaagctttctaatttcgcttcttttgattcaacggattttagcgaacgcttgagcagtcttaaaaaccaaagatttgccgatgctgtccctaatgcgatggatgtgattttaaaatactctcaaagggataaactaaaaaacaacctttgggcgaccggtgttgggggcgtgagctttgtggaaaatggcacaggaacgctctatggtgtcaatgtgggctatgatcgctttgttagaggggtaattgttggagggtatgcggcttatgggtatagcgggttttatgagcgcatcactagttctaaatccgataatgtggacgtgggtttgtatgctagggcttttatcaaaaagagcgagctgacttttagcgttaatgaaacttggggggctaataaaacccaaatcagctccaacgacgctttgctttctatgatcaatcagtcctataaatacagcacatggacaacgaacgcgaaagttaattacgggtatgatttcatgtttaaaaacaaaagcatcattttaaaacctcaaattggtttaaggtattactatattggtatgagcggtttagaaggggtgatgaataacgtgctctataaccagtttaaagcgaacgccgatccgtctaaaaaatccgttttaacgattgattttgctttggagaaccgccattatttcaacacaaactcttatttttatgcgattggtggcgttggtagagacttgttagttaattctatgggggataaattggtgcgttttattggtaacaacactttgagttacaggaaaggcgatctttataacacttttgcgaacatcactacaggcggggaagtgaggttgtttaaaagcttttatgcgaacgctggggtgggggctaggtttggattggattacaaaatgatagatattataggaaatattggaatgcgtttagcgttttaa

SEQ ID NO: 507 - DNA (genomic), 1962 bp, Helicobacter pylori; double-stranded, circular
  misc_feature (B) LOCATION 1...1962
  hypothetical: NO
  anti-sense: NO
ttcctcttcaaggcgacagccccaactaatgaaacgctagaagtgagtgcgaataatttcgctttcttaggcaccattaaggctaatggattagtggatttttcaaaagtcttacaaaatacgactatcgggactttggatttagggccaaacgctacttttaaagcgaataatttgatcgtgaataacgcttttaataataactctaattacagggctaatatcagcggtaatttcaatgtggccaagggtgcaacttttagcacgaatgaaaatggtttgaatgtgggggggaattttaacagcgaagggccattaatctttaatcttaataaccccacccatcaaacgattatcaatgtaactggcacttctacaatcatgtcttataacaatcaagctttaatcaactttaacacccaactcaagcaaggcgcttatacgcttattaacgctaatcgcatggtttatggctatgataatcaaacgattcttggggggagcttgagcgattacctcaaactttacactctcattgattttaacggcaaacgcatgcaattgaatggcgattcgttaagctatgacaaccaaccggtcagtattaaagatgggggtcttgtggtaagctttaaagacaatcaagggcaaatggtgtattcatctatcctttatgataaaatccaagttaccgtctctgataaacccatgagcattcaagcccctagtttggagtattatgttaaacgcattcaaggtagtgctggtttgaatgcgatcaaatctgcgggcaataattccattatgtggttgagtgagctttttgcggctaaggggggtaatcccttgttcgccccttattatttgcaagacaatcccactgaacacattgttactttaatgaaagatattaccagcgctttaggaatgctctctaactccaatctcaaaaacaactccactgatgttttacagctcaacacttacacgcaacaaatgagccgtttagccaagctttctaatttcgcttcttttgattcaacggattttagcgaacgcttgagcagtcttaaaaaccaaagatttgccgatgctgtccctaatgcgatggatgtgattttaaaatactctcaaagggataaactaaaaaacaacctttgggcgaccggtgttgggggcgtgagctttgtggaaaatggcacaggaacgctctatggtgtcaatgtgggctatgatcgctttgttagaggggtaattgttggagggtatgcggcttatgggtatagcgggttttatgagcgcatcactagttctaaatccgataatgtggacgtgggtttgtatgctagggcttttatcaaaaagagcgagctgacttttagcgttaatgaaacttggggggctaataaaacccaaatcagctccaacgacgctttgctttctatgatcaatcagtcctataaatacagcacatggacaacgaacgcgaaagttaattacgggtatgatttcatgtttaaaaacaaaagcatcattttaaaacctcaaattggtttaaggtattactatattggtatgagcggtttagaaggggtgatgaataacgtgctctataaccagtttaaagcgaacgccgatccgtctaaaaaatccgttttaacgattgattttgctttggagaaccgccattatttcaacacaaactcttatttttatgcgattggtggcgttggtagagacttgttagttaattctatgggggataaattggtgcgttttattggtaacaacactttgagttacaggaaaggcgatctttataacacttttgcgaacatcactacaggcggggaagtgaggttgtttaaaagcttttatgcgaacgctggggtgggggctaggtttggattggattacaaaatgatagatattataggaaatattggaatgcgtttagcgttt

SEQ ID NO: 508 - DNA (genomic), 210 bp, Helicobacter pylori; double-stranded, circular
  misc_feature (B) LOCATION 1...210
  hypothetical: NO
  anti-sense: NO
atgaaaacaattaaaaatggtattatgatcggcacactcggtgcgttgttattgagcggttgttctagctttgatgctcagcgtttcgcttgtctccctaaagaccattcttcaaaagacgcttctaccaaaaaagaagcgcaatacattcctaagggcttttttgacccttattcttctaacttaaaccattgggattctacattctag

SEQ ID NO: 509 - DNA (genomic), 207 bp, Helicobacter pylori; double-stranded, circular
  misc_feature (B) LOCATION 1...207
  hypothetical: NO
  anti-sense: NO
atgaaaacaattaaaaatggtattatgatcggcacactcggtgcgttgttattgagcggttgttctagctttgatgctcagcgtttcgcttgtctccctaaagaccattcttcaaaagacgcttctaccaaaaaagaagcgcaatacattcctaagggcttttttgacccttattcttctaacttaaaccattgggattctacattc

SEQ ID NO: 510 - DNA (genomic), 279 bp, Helicobacter pylori; double-stranded, circular
  misc_feature (B) LOCATION 1...279
  hypothetical: NO
  anti-sense: NO
tttaaaaccattgaacgaaacgattttaaattaaacggattgacaaaaattttacaaaacaaaggatataaaatgaaaacaattaaaaatggtattatgatcggcacactcggtgcgttgttattgagcggttgttctagctttgatgctcagcgtttcgcttgtctccctaaagaccattcttcaaaagacgcttctaccaaaaaagaagcgcaatacattcctaagggcttttttgacccttattcttctaacttaaaccattgggattctacattc

SEQ ID NO: 511 - DNA (genomic), 294 bp, Helicobacter pylori; double-stranded, circular
  misc_feature (B) LOCATION 1...294
  hypothetical: NO
  anti-sense: NO
ttgctattgttttttttaggaaatagagttttcagtatttatttgcttttagagtcatttttgtgggtaatattgaccacttggtgttgtttggtcatgcatgaagatcagagacaaaaagacatggaacaacttatcaatgggattgataggattattaaagcaaattccggtaaatctttacaccaagaaacacaacaagcaaataaaaccgataaagcatgggatttggcggctaatgtttttctcattggtctggttgttttggctgtttttcacatgatcaagcgataa

SEQ ID NO: 512 - DNA (genomic), 303 bp, Helicobacter pylori; double-stranded, circular
  misc_feature (B) LOCATION 1...303
  hypothetical: NO
  anti-sense: NO
gttataatatttttgctattgttttttttaggaaataaagttttcagtatttatttgcttttagagtcatttttgtgggtaatattgaccacttggtgttgtttggtcatgcatgaagatcagagacaaaaagacatggaacaacttatcaatgggattgataggattattaaagcaaattccggtaaatctttacaccaagaaacacaacaagcaaataaaaccgataaagcatgggatttggcggctaatgtttttctcattggtctggttgttttggctgtttttcacatgatcaagcga

SEQ ID NO: 513 - DNA (genomic), 816 bp, Helicobacter pylori; double-stranded, circular
  misc_feature (B) LOCATION 1...816
  hypothetical: NO
  anti-sense: NO
atggtagtagaattaaaaaacattgaaaagatttatgaaaacgggtttcatgctctaaaaggcgtgaatttggaattgaaaaaaggcgatattttgggcgtgataggctattcaggggcggggaaatccacgctcattcgcttgatcaattgtttagagcgccccagttctggcgaagttttagtcaatggggtcaatctgttaaacttaaagcctaaagaattgcaaaaagcgcgccaaaaaataggcatgattttccagcatttcaatttattgagcgctaaaaacgtgtttgaaaacgtcgctttcgctctagaaatcgcccgatgggaaaaaactaagattaaatcaagggtgcatgaattgttggaattagtggggttagaagataaagtgcatttttatcctaaacagctcagcggcgggcaaaaacaacgagtggcgatcgctaggagtttagcgaattgccctaatttgttgctttgcgatgaagccacatccgctttggattctaaaaccacgcattctattttaacgcttctaagcggcattcaaaaaaagtttgatttgagcatcgttttcatcacacaccagattgaagtggttaaagaattgtgcaatcaaatgtgtgtgatcagcagcggcgaaatcgtagaaagaggctcggtggaagaaatttttgctaaccctaaacatgctgttactaaagaattgcttggcatcaaaaacgaacatgcggatcaaaaatcgcaagacatttatcgcatcgtgtttttaggggagcatttagacgagccgatcatttctaawttttgw

SEQ ID NO: 514 - DNA (genomic), 840 bp, Helicobacter pylori; double-stranded, circular
  misc_feature (B) LOCATION 1...840
  hypothetical: NO
  anti-sense: NO
atggtagtagaattaaaaaacattgaaaagatttatgaaaacgggtttcatgctctaaaaggcgtgaatttggaattgaaaaaaggcgatattttgggcgtgataggctattcaggggcggggaaatccacgctcattcgcttgatcaattgtttagagcgccccagttctggcgaagttttagtcaatggggtcaatctgttaaacttaaagcctaaagaattgcaaaaagcgcgccaaaaaataggcatgattttccagcatttcaatttattgagcgctaaaaacgtgtttgaaaacgtcgctttcgctctagaaatcgcccgatgggaaaaaactaagattaaatcaagggtgcatgaattgttggaattagtggggttagaagataaagtgcatttttatcctaaacagctcagcggcgggcaaaaacaacgagtggcgatcgctaggagtttagcgaattgccctaatttgttgctttgcgatgaagccacatccgctttggattctaaaaccacgcattctattttaacgcttctaagcggcattcaaaaaaagtttgatttgagcatcgttttcatcacacaccagattgaagtggttaaagaattgtgcaatcaaatgtgtgtgatcagcagcggcgaaatcgtagaaagaggctcggtggaagaaatttttgctaaccctaaacatgctgttactaaagaattgcttggcatcaaaaacgaacatgcggatcaaaaatcgcaagacatttatcgcatcgtgtttttaggggagcatttagacgagccgatcatttctaatttgatcaggcgttttaaaataagacgttga

SEQ ID NO: 515 - DNA (genomic), 855 bp, Helicobacter pylori; double-stranded, circular
  misc_feature (B) LOCATION 1...855
  hypothetical: NO
  anti-sense: NO
gtcaaaaagtcaaataacatggtagtagaattaaaaaacattgaaaagatttatgaaaacgggtttcatgctctaaaaggcgtgaatttggaattgaaaaaaggcgatattttgggcgtgataggctattcaggggcggggaaatccacgctcattcgcttgatcaattgtttagagcgccccagttctggcgaagttttagtcaatggggtcaatctgttaaacttaaagcctaaagaattgcaaaaagcgcgccaaaaaataggcatgattttccagcatttcaatttattgagcgctaaaaacgtgtttgaaaacgtcgctttcgctctagaaatcgcccgatgggaaaaaactaagattaaatcaagggtgcatgaattgttggaattagtggggttagaagataaagtgcatttttatcctaaacagctcagcggcgggcaaaaacaacgagtggcgatcgctaggagtttagcgaattgccctaatttgttgctttgcgatgaagccacatccgctttggattctaaaaccacgcattctattttaacgcttctaagcggcattcaaaaaaagtttgatttgagcatcgttttcatcacacaccagattgaagtggttaaagaattgtgcaatcaaatgtgtgtgatcagcagcggcgaaatcgtagaaagaggctcggtggaagaaatttttgctaaccctaaacatgctgttactaaagaattgcttggcatcaaaaacgaacatgcggatcaaaaatcgcaagacatttatcgcatcgtgtttttaggggagcatttagacgagccgatcatttctaatttgatcaggcgttttaaaataagacgt

SEQ ID NO: 516 - DNA (genomic), 933 bp, Helicobacter pylori; double-stranded, circular
  misc_feature (B) LOCATION 1...933
  hypothetical: NO
  anti-sense: NO
gtgtgctggacggatttgattcaagggcttttgatgatgagcgctttaatcgtggtgccgattgttatgataatccatcttggagggattggagaggggattaaaatcattagagagatcaagcctgaaaacctwtctttctsgcaaggctctagcgtagtcgctattatttcaagccttgcttgggggttaggctattttgggcaaccccatattttagtgcgcttcatgtctatccgctccattagagatgtgcctaaagcgaccactattgggatttcttggatggttatttctttaattggggcatgcgttatggggcttttaggcgttgcttatgtacataaatytgacttgagtttagaagaccctgaaaagattttcattgtaatgagtcaattgctctttaacccttggatcacaggcattttattgagcgcgattttagcggcggtgatgagcacggccagttcgcaactgcttgtaagctcttctaccattgctgaagatttctatgcgacgattttcaataaaaacgccccccaaaaattagtgatgacgatttctaggctttcggttttaggggtggcttgcatcgcttttttcatttcaacggataaaaacgctagcatcctcagcatcgtgagttacgcatgggctggctttggcgcgagttttggctctgtgattttgttttcacttttttggtcaagaatgacgcgcattggcgcgattgctggcatgctctctggggctagcacggtgattttatacgataaatttggcaaaagctttttggatatttatgaaatcgttccgggctttattgtagcgagcgtagctattgttgcgtttagtttgttttctagcgtgcgatcaggcactaaagaggcctttgaaaccatgcttaaagaaattgagagcttaaagcat

SEQ ID NO: 517 - DNA (genomic), 1338 bp, Helicobacter pylori; double-stranded, circular
  misc_feature (B) LOCATION 1...1338
  hypothetical: NO
  anti-sense: NO
cgctttgagtgcggagcgagcgacatgagcgggtggcttttaatgggattaccgggagctttatatgtgggggggcttatcaattcacacatcgccataggcttgagtttgggcgcactcattaactgggtttttgtggctaagcgcttacgcatttatacgagcgtgatcgctaattctattaccatttcagattattttgaaacgcgctttagcgatgataaacacatcttgcgcttgatttcagcttttgtgattttaatcttaaagattttttatttttcttcagggctagtgagtggggctaaactctttgaaccgacctttggcattcaatacacctacgctttaagcattggcacgctgattattgtttcttacacctttttaggaaggtataaggcggtgtgctggacggatttgattcaagggcttttgatgatgagcgctttaatcgtggtgccgatcgttatgataatccatcttggagggattggagaggggattaaaatcattaaagagatcaagcctgaaaacctttctttcttgcaaggctctagcgtagtcgctattatttcaagccttgcttgggggttaggctattttgggcaaccccatattttagtgcgcttcatgtctatccgctccattagagatgtgcctaaagcgaccactattgggatttcttggatggttatttctttaattggggcatgcgttatggggcttttaggcgttgcttatgtacataaatttgacttgagtttagaagaccctgaaaagattttcattgtaatgagtcaattgctctttaacccttggatcacaggcattttattgagcgcgattttagcggcggtgatgagcacggccagttcgcaactgcttgtaagctcttctaccattgctgaagatttctatgcgacgattttcaataaaaacgccccccaaaaattagtgatgacgatttctaggctttcggttttaggggtggcttgcatcgcttttttcatttcaacggataaaaacgctagcatcctcagcatcgtgagttacgcatgggctggctttggcgcgagttttggctctgtgattttgttttcacttttttggtcaagaatgacgcgcattggcgcgattgctggcatgctctctggggctagcacggtgattttatacgataaatttggcaaaagctttttggatatttatgaaatcgttccgggctttattgtagcgagcgtagctattgttgcgtttagtttgttttctagcgtgcgatcaggcactaaagaggcctttgaaaccatgcttaaagaaattgagagcttaaagcat

SEQ ID NO: 518 - DNA (genomic), 1491 bp, Helicobacter pylori; double-stranded, circular
  misc_feature (B) LOCATION 1...1491
  hypothetical: NO
  anti-sense: NO
atgggacatgttgttttaagcacccctattgttacgatgtttgtcgtttattcgctgttaatgctctatattggtttttatttttacaaacaaaatgaaacgactgaagattatttcttaggcgatcgctctatgggccctgtgattagcgctttgagtgcaggagcgagcgacatgagcgggtggcttttaatgggattaccgggagctttatatgtgggggggcttatcaattcacacatcgccataggcttgagtttgggcgcactcattaactgggtttttgtggctaagcgcttacgcatttatacgagcgtgatcgctaattctattaccatttcagattattttgaaacgcgctttagcgatgataaacacatcttgcgcttgatttcagcttttgtgattttaatcttttttattttttacatttcttcagggctagtgagtggggctaaactctttgaagcgacctttggcattcaatacacctacgctttaagcattggcacgctgattattgtttcttacacctttttaggagggtataaggcggtgtgctggacggatttgattcaagggcttttgatgatgagcgctttaatcgtggtgccgatcgttatgataatccatcttggagggattggagaggggattaaaatcattagagagatcaagcctgaaaacctttctttcttgcaaggctctagcgtagtcgctattatttcaagccttgcttgggggttaggctattttgggcaaccccatattttagtgcgcttcatgtctatccgctccattagagatgtgcctaaagcgaccactattgggatttcttggatggttatttctttaattggggcatgcgttatggggcttttaggcgttgcttatgtacataaatttgacttgagtttagaagaccctgaaaagattttcattgtaatgagtcaattgctctttaacccttggatcacaggcattttattgagcgcgattttagcggcggtgatgagcacggccagttcgcaactgcttgtaagctcttctaccattgctgaagatttctatgcgacgattttcaataaaaacgccccccaaaaattagtgatgacgatttctaggctttcggttttaggggtggcttgcatcgcttttttcatttcaacggataaaaacgctagcatcctcagcatcgtgagttacgcatgggctggctttggcgcgagttttggctctgtgattttgttttcacttttttggtcaagaatgacgcgcattggcgcgattgctggcatgctctctggggctagcacggtgattttatacgataaatttggcaaaagctttttggatatttatgaaatcgttccgggctttattgtagcgagcgtagctattgttgcgtttagtttgttttctagcgtgcgatcaggcactaaagaggcctttgaaaccatgcttaaagaaattgagagcttaaagcattaa

SEQ ID NO: 519 - DNA (genomic), 1314 bp, Helicobacter pylori; double-stranded, circular
  misc_feature (B) LOCATION 1...1314
  hypothetical: NO
  anti-sense: NO
atgaacccccagattcaacccgccactaaaaaacccttaaaatcccttttagccgctagttcaggcaatttagtggaatggtatgatttttacgcttatgcgttccttgctccttatttcgctaaggaatttacccacaccaatgaccctactctagcgctcatctcagcttttttagtttttatgctagggtttttcatgcgccctttggggagtttgttttttggtaaattgggggataaaaaggggcgtaaaacttccatggtgtattccattatccttatggcgctaggctctttcatgctcgcattgctccccactaaagaaatcgtaggggaatgggcgttcttgtttttattgttagccaggcttttacagggctttagcgtgggaggagaatatggcgtggtcgccacttatctctctgaattaggcaagaatggtaaaaaaggtttttatggctctttccaatatgtaactttagtgggagggcaactcttagctattttttcgctctttatcgttgaaaacgtttacacgcatgagcaaatcagcgcgtttgcttggcgttatttattcgctttagagggtatattagccctactctcgctctttttgagaaatatcatggaagaaactatggataatgaagcgactcctcaaaaaaagactaatgtaaataatacaaaagaaacccatatcaaagaaacccaaagaggcagtttaaaggaattgctcaaccataaaaaagccttaatgatagtctttgggctaactatgggagggagtttgtgcttttacacttttacggtgtatttaaaaatctttttaaccaacagctcatcgtttagccctaaagaaagcagttttatcatgcttttagcgctctcttatttcatcttcttacaacccttatgcgggatgcttgcggataaaatcaaacgcacccaaatgctgatggtttttgcgatcacagggcttattgtaacgcctattgtcttttatggtatcaagcatgccactagcgtgtatgaagccctattttatgaaatactcgcattgagcagcatgagtttttacacttgcattgctggggttattaaggcggaattattccctgaacatgtgcgagcgcttggcgtgggtttagcctatgcgatcgccaatgcgctttttggagggagcgcgagttatatagcgttagagttcaaacagcatggttttgaagaggggtttgtgggctatgtcatgttgagtattgttatctttatggttatggttatcatattccctaaaaaaacctatttggagtaa

SEQ ID NO: 520 - DNA (genomic), 1311 bp, Helicobacter pylori; double-stranded, circular
  misc_feature (B) LOCATION 1...1311
  hypothetical: NO
  anti-sense: NO
atgaacccccagattcaacccgccactaaaaaacccttaaaatcccttttagccgctagttcaggcaatttagtggaatggtatgatttttacgcttatgcgttccttgctccttatttcgctaaggaatttacccacaccaatgaccctactctagcgctcatctcagcttttttagtttttatgctagggtttttcatgcgccctttggggagtttgttttttggtaaattgggggataaaaaggggcgtaaaacttccatggtgtattccattatccttatggcgctaggctctttcatgctcgcattgctccccactaaagaaatcgtaggggaatgggcgttcttgtttttattgttagccaggcttttacagggctttagcgtgggaggagaatatggcgtggtcgccacttatctctctgaattaggcaagaatggtaaaaaaggtttttatggctctttccaatatgtaactttagtgggagggcaactcttagctattttttcgctctttatcgttgaaaacgtttacacgcatgagcaaatcagcgcgtttgcttggcgttatttattcgctttagagggtatattagccctactctcgctctttttgagaaatatcatggaagaaactatggataatgaagcgactcctcaaaaaaagactaatgtaaataatacaaaagaaacccatatcaaagaaacccaaagaggcagtttaaaggaattgctcaaccataaaaaagccttaatgatagtctttgggctaactatgggagggagtttgtgcttttacacttttacggtgtatttaaaaatctttttaaccaacagctcatcgtttagccctaaagaaagcagttttatcatgcttttagcgctctcttatttcatcttcttacaacccttatgcgggatgcttgcggataaaatcaaacgcacccaaatgctgatggtttttgcgatcacagggcttattgtaacgcctattgtcttttatggtatcaagcatgccactagcgtgtatgaagccctattttatgaaatactcgcattgagcagcatgagtttttacacttgcattgctggggttattaaggcggaattattccctgaacatgtgcgagcgcttggcgtgggtttagcctatgcgatcgccaatgcgctttttggagggagcgcgagttatatagcgttagagttcaaacagcatggttttgaagaggggtttgtgggctatgtcatgttgagtattgttatctttatggttatggttatcatattccctaaaaaaacctatttggag

SEQ ID NO: 521 - DNA (genomic), 1344 bp, Helicobacter pylori; double-stranded, circular
  misc_feature (B) LOCATION 1...1344
  hypothetical: NO
  anti-sense: NO
aattacctaaaaatttcatgttcaaggatagccatgaacccccagattcaacccgccactaaaaaacccttaaaatcccttttagccgctagttcaggcaatttagtggaatggtatgatttttacgcttatgcgttccttgctccttatttcgctaaggaatttacccacaccaatgaccctactctagcgctcatctcagcttttttagtttttatgctagggtttttcatgcgccctttggggagtttgttttttggtaaattgggggataaaaaggggcgtaaaacttccatggtgtattccattatccttatggcgctaggctctttcatgctcgcattgctccccactaaagaaatcgtaggggaatgggcgttcttgtttttattgttagccaggcttttacagggctttagcgtgggaggagaatatggcgtggtcgccacttatctctctgaattaggcaagaatggtaaaaaaggtttttatggctctttccaatatgtaactttagtgggagggcaactcttagctattttttcgctctttatcgttgaaaacgtttacacgcatgagcaaatcagcgcgtttgcttggcgttatttattcgctttagagggtatattagccctactctcgctctttttgagaaatatcatggaagaaactatggataatgaagcgactcctcaaaaaaagactaatgtaaataatacaaaagaaacccatatcaaagaaacccaaagaggcagtttaaaggaattgctcaaccataaaaaagccttaatgatagtctttgggctaactatgggagggagtttgtgcttttacacttttacggtgtatttaaaaatctttttaaccaacagctcatcgtttagccctaaagaaagcagttttatcatgcttttagcgctctcttatttcatcttcttacaacccttatgcgggatgcttgcggataaaatcaaacgcacccaaatgctgatggtttttgcgatcacagggcttattgtaacgcctattgtcttttatggtatcaagcatgccactagcgtgtatgaagccctattttatgaaatactcgcattgagcagcatgagtttttacacttgcattgctggggttattaaggcggaattattccctgaacatgtgcgagcgcttggcgtgggtttagcctatgcgatcgccaatgcgctttttggagggagcgcgagttatatagcgttagagttcaaacagcatggttttgaagaggggtttgtgggctatgtcatgttgagtattgttatctttatggttatggttatcatattccctaaaaaaacctatttggag

SEQ ID NO: 522 - DNA (genomic), 159 bp, Helicobacter pylori; double-stranded, circular
  misc_feature (B) LOCATION 1...159
  hypothetical: NO
  anti-sense: NO
ccaaaaattaaaaaaacttttaatgcggagcattcaaacccaatgaaagaaatcattgtcgcccttgtgggccagcctaatgtggggaaatcgtccttaatcaacgctttgagtaacgcccatttgaaagtggggaattttaccggggttacccgtgga

SEQ ID NO: 523 - DNA (genomic), 162 bp, Helicobacter pylori; double-stranded, circular
  misc_feature (B) LOCATION 1...162
  hypothetical: NO
  anti-sense: NO
atgaaagaaatcattgtcgcccttgtgggccagcctaatgtggggaaatcgtccttaatcaacgctttgagtaacscccatttraaagtggggaattttaccgrggttaccgtggataaaatggaagtgagtttgatccawaaagatcatcaartswytmtc

SEQ ID NO: 524 - DNA (genomic), 420 bp, Helicobacter pylori; double-stranded, circular
  misc_feature (B) LOCATION 1...420
  hypothetical: NO
  anti-sense: NO
ttgctcaacatgtgggatgaagccaagaaagaagggatcaacatcaatacagaaaagctctctcaagaattgggggttgtgtgcgtgccaacaagcgcgagatycaaagaagatcgcttgaacacagagcttttattagacgaaattgtcaggctttattctcaaaacactacaaacaacgaaaacatcaaagtcccatctcaaagttttaaagagtctttaaaatacagccagagcgcccaaagaatcgctaaatcagtgatcagtgaaaacaaacaaaatgcgagttttgaacacacttataagattgataagatttttaatgcaccagcgttatgggattttcatttttttdgggtttatgtttatcatcttttctttgagctttttaataggagggggagtgcraaaagcccttga

SEQ ID NO: 525 - DNA (genomic), 1842 bp, Helicobacter pylori; double-stranded, circular
  misc_feature (B) LOCATION 1...1842
  hypothetical: NO
  anti-sense: NO
aagtggggaattttaccggggttacccgtggataaaatggaagtgagtttgatccataaagatcatcaaatcactatcattgatttaccgggcacttacgcgctcaatgacttcaccactgaagaaaaggtgactaaagattttttagaaaaagggcaatacaatctcattctcaatgtggtggattccaccaatttagagcgtaatttagccttaagcgcgcagttattagacacaaataaaaaaatgctgcttgcgctcaacatgtgggatgaagccaagaaagaagggatcaacatcaatacagaaaagctctctcaagaattgggggttgtgtgcgtgccaacaagcgcgagatccaaagaagatcgcttgaacacagagcttttattagacgaaattgtcaggctttattctcaaaacactacaaacaacgaaaacatcaaagtcccatctcaaagttttaaagagtctttaaaatacagccagagcgcccaaagaatcgctaaatcagtgatcagtgaaaacaaacaaaatgcgagttttgaacacacttataagattgataagattttaatgcaccagcgttatgggattttcatttttttagggtttatgtttatcatcttttctttgagctttttaataggagggggagtgcaaaaagcccttgaagaagggtttaaaattttgagcgatagtattaaagaaaatgtggctaatgaagatttagcgtctttggtgggcgatggcattattgggggagtgggagcgacggtttcattcttgcctttaattgtggtgttgtattttgggatttctttactagagacgacaggctatatgagtagggtagcgtttttactagacgggatcttgcataaatttggtttgcatgggaagagttttatccctttaatcaccggttttggttgctcagtgcctgcttacatggcgacaagaaccttacaaaactataacgaacgattgatcacgctttttgtgatcggctttatgagttgctcggcaagactgcctatttatgtgctgtttgtaggctcgtttttcccctcttcaagtgctgggtttgtgctgttttgcatttatattttgggggcggttgtggcgttagtgatggccaaattactcaaattaagcgtgtttaaaggacagactgaatcctttatcatggaaatgcccaaataccgctttcccagttggagaatggtctatttcagtatttacaccaaatcgctttcttacctcaaaaaagccgggacttatattttagtgggagcgattttgatctggtttatgtcccaataccctaaaaatgatgcggctatgaagacttataaacaagaaagcttgttagtccaaaaaaacgctaatctttcaagcgaagctaaagaagaaaaattaaaagaattaaaaaccgaattggataaaaagaatttaaaaaatagcgttgtaggaagaggcggggcgtatttagaaaaagtctttaaccctatggattttgattggcgtttgagcgtctcgcttgtaaccggttttatggctaaagaggtggtggtttctactttgggggtgttgttttctttaggggatcaaaacgaaaaatctgatgcttttagagagataatcagaaaagaagtcagcgtgcctagcgggatcgcttttatcgtgtttgtgatgttttatatcccttgttttgcagcgaccattacttttggtagggaagctggggggatcaagtttgtagcgtatttattcatcttcacaaccgttgtagcgtatgcgttttccttgatagctttttatgcgactcaaattttggtt

SEQ ID NO: 526 - DNA (genomic), 1929 bp, Helicobacter pylori; double-stranded, circular
  misc_feature (B) LOCATION 1...1929
  hypothetical: NO
  anti-sense: NO
atgaaagaaatcattgtcgcccttgtgggccagcctaatgtggggaaatcgtccttaatcaacgctttgagtaacgcccatttgaaagtggggaattttgccggggttaccgtggataaaatggaagtgagtttgatccataaagatcatcaaatcactatcattgatttaccgggcacttacgcgctcaatgacttcaccactgaagaaaaggtgactaaagattttttagaaaaagggcaatacgatctcattctcaatgtggtggattccaccaatttagagcgtaatttagccttaagcgcgcagttattagacacaaataaaaaaatgctgcttgcgctcaacatgtgggatgaagccaagaaagaagggatcaacatcaatacagaaaagctctctcaagaattgggggttgtgtgcgtgccaacaagcgcgagatccaaagaagatcgcttgaacacagagcttttattagacgaaattgtcaggctttattctcaaaacactacaaacaacgaaaacatcaaagtcccatctcaaagttttaaagagtctttaaaatacagccagagcgcccaaagaatcgctaaatcagtgatcagtgaaaacaaacaaaatgcgagttttgaacacacttataagattgataagattttaatgcaccagcgttatgggattttcatttttttagggtttatgtttatcatcttttctttgagctttttaataggagggggagtgcaaaaagcccttgaagaagggtttaaaattttgagcgatagtattaaagaaaatgtggctaatgaagatttagcgtctttggtgggcgatggcattattgggggagtgggagcgacggtttcattcttgcctttaattgtggtgttgtattttgggatttctttactagagacgacaggctatatgagtagggtagcgtttttactagacgggatcttgcataaatttggtttgcatgggaagagttttatccctttaatcaccggttttggttgctcagtgcctgcttacatggcgacaagaaccttacaaaactataacgaacgattgatcacgctttttgtgatcggctttatgagttgctcggcaagactgcctatttatgtgctgtttgtaggctcgtttttcccctcttcaagtgctgggtttgtgctgttttgcatttatattttgggggcggttgtggcgttagtgatggccaaattactcaaattaagcgtgtttaaaggacagactgaatcctttatcatggaaatgcccaaataccgctttcccagttggagaatggtctatttcagtatttacaccaaatcgctttcttacctcaaaaaagccgggacttatattttagtgggagcgattttgatctggtttatgtcccaataccctaaaaatgatgcggctatgaagacttataaacaagaaagcttgttagtccaaaaaaacgctaatctttcaagcgaagctaaagaagaaaaattaaaagaattaaaaaccgaattggataaaaagaatttaaaaaatagcgttgtaggaagaggcggggcgtatttagaaaaagtctttaaccctatggattttgattggcgtttgagcgtctcgcttgtaaccggttttatggctaaagaggtggtggtttctactttgggggtgttgttttctttaggggatcaaaacgaaaaatctgatgcttttagagagataatcagaaaagaagtcagcgtgcctagcgggatcgcttttatcgtgtttgtgatgttttatatcccttgttttgcagcgaccattacttttggtagggaagctggggggatcaagtttgtagcgtatttattcatcttcacaaccgttgtagcgtatgcgttttccttgatagctttttatgcgactcaaattttggtttaa

SEQ ID NO: 527 - DNA (genomic), 834 bp, Helicobacter pylori; double-stranded, circular
  misc_feature (B) LOCATION 1...834
  hypothetical: NO
  anti-sense: NO
atgaaaacaaacgggctttttaaaatgtgggggctatttttagttttaatcgctttagtctttaacgcatgctctgatagccataaagaaaagaaggacgctttagaagtcattaaacaaaggggggttttaaaggtgggggtttttagcgataagcctccttttggctctgtggattctaaagggaactatcaaggctatgatgtagtcatcgctaaacgcatggcccttgatttattgggcgatgaaaataagattgagtttatccctgtagaagcctcagctagggtggaatttttaaaagccaataaagtggatattatcatggctaatttcacgcgcactaaagaaagagaaaaagtcgtggatttcgctaatccgtatatgaaagtcgctttgggggtgatttctaaagatggggtcattaaaaatatagaagagctgaaagataaagagttgatcgtgaataaaggcacgacagcggatttttatttcactaaaaattaccccaatatcaaacttttgaaatttgaacaaaacacagagacttttttagcccttttaaacaataaggccatcgcattagcccatgataacactttgttgctcgcttgggtgaaacaacaccctgaatttaaattaggcattacaagccttggcgataaggatgtgatcgctccagcgattaaaaaaggcaaccctaagcttttagagtggttgaataacgagattgattccctcatttctagcgactttttaaaagaagcttatcaagagactttagagcctatttatggcgatggaatcaaaccggaagaaattatttttgaatga

SEQ ID NO: 528 - DNA (genomic), 879 bp, Helicobacter pylori; double-stranded, circular
  misc_feature (B) LOCATION 1...879
  hypothetical: NO
  anti-sense: NO
ataaagtttgctaaaaagatagttttaattttaaaaaaaggtggttttatgaaaacaaacgggctttttaaaatgtgggggctatttttagttttaatcgctttagtctttaacgcatgctctgatagccataaagaaaagaaggacgctttagaagtcattaaacaaaggggggttttaaaggtgggggtttttagcgataagcctccttttggctctgtggattctaaagggaactatcaaggctatgatgtagtcatcgctaaacgcatggcccttgatttattgggcgatgaaaataagattgagtttatccctgtagaagcctcagctagggtggaatttttaaaagccaataaagtggatattatcatggctaatttcacgcgcactaaagaaagagaaaaagtcgtggatttcgctaatccgtatatgaaagtcgctttgggggtgatttctaaagatggggtcattaaaaatatagaagagctgaaagataaagagttgatcgtgaataaaggcacgacagcggatttttatttcactaaaaattaccccaatatcaaacttttgaaatttgaacaaaacacagagacttttttagcccttttaaacaataaggccatcgcattagcccatgataacactttgttgctcgcttgggtgaaacaacaccctgaatttaaattaggcattacaagccttggcgataaggatgtgatcgctccagcgattaaaaaaggcaaccctaagcttttagagtggttgaataacgagattgattccctcatttctagcgactttttaaaagaagcttatcaagagactttagagcctatttatggcgatggaatcaaaccggaagaaattatttttgaa

SEQ ID NO: 529 - DNA (genomic), 183 bp, Helicobacter pylori; double-stranded, circular
  misc_feature (B) LOCATION 1...183
  hypothetical: NO
  anti-sense: NO
gcttctggagtgattagcatggcgattgtgggaggggcgttaatcccccccattcaaggcgtggttacagacatgctcacagcaaccgaatcgaatctgctctacgcttatagcgtgccgttgttgtgctatttttatatcctcttctttgcacttaaggggtataaacaagaagaaaactcc

SEQ ID NO: 530 - DNA (genomic), 378 bp, Helicobacter pylori; double-stranded, circular
  misc_feature (B) LOCATION 1...378
  hypothetical: NO
  anti-sense: NO
atgaataaaatcgctcctaataaatacctggctttcggcgccttaagctctatcattcttatcgctttggctattcttattggaggcaagatcgctttattcgctctgacttttgtgggctttttcaactctatcatgttccctacaatcttttctttggctacgctcaatttaggcatctcacttctaatggcttctggagtgattagcatggcgattgtgggaggggcgttaatcccccccattcaaggcgtggttacagacatgctcacagcaaccgaatcgaatctgctctacgcttatagcgtgccgttgttgtgctatttttatatcctcttctttgcacttaaggggtataaacaagaagaaaactcctaa

SEQ ID NO: 531 - DNA (genomic), 939 bp, Helicobacter pylori; double-stranded, circular
  misc_feature (B) LOCATION 1...939
  hypothetical: NO
  anti-sense: NO
ttggcttcttacgggttttttttaggagcgttgtttattttagcgagcgggatcgtgtgcttacagactgccggtaatccctttgtaaccttgctttctaaaggtaaagaagccagaaacttggttttagtccaggcgttcaattcgcttggcacgactttagggcctatttttgggagcttgttgatttttagcgcgaccaaaacgagcgataatttaagcctgatagacaagttagcggacgctaaaagcgttcaaatgccttatttgggtttagcggtgttttcgcttcttttagcgcttgtgatgtatcttttaaaattgcctgatgtggaaaaagaaatgcccaaagaaacgacgcaaaaaagcctgttttcgcacaaacactttgtttttggggctttagggatctttttctatgtggggggagaagtggcgattggatcattcttggtgctaagctttgaaaagcttttgaatttagacgctcaatcaagcgcgcattacttggtgtattattggggcggcgcgatggtagggcgtttcttaggcagcgctttgatgaataaaatcgctcctaataaatacctggctttcaacgccttaagctctatcattcttatcgctttggctattcttattggaggcaagatcgctttattcgctctgacttttgtgggctttttcaactctatcatgttccctacaatcttttctttggctacgctcaatttagggcatctcacttctaaggcttctggagtgattagcatggcgattgtgggaggggcgttaatcccccccattcaaggcgtggttacagacatgctcacagcaaccgaatcgaatctgctctacgcttatagcgtgccgttgttgtgctatttttatatcctcttctttgcacttaaggggtataaacaagaagaaaactcctaa

SEQ ID NO: 532 - DNA (genomic), 1224 bp, Helicobacter pylori; double-stranded, circular
  misc_feature (B) LOCATION 1...1224
  hypothetical: NO
  anti-sense: NO
atgcaaaaaacttctaacactttagcgctggggagtttgacggcgctattctttctaatgggttttatcacggttttaaacgacattttgatcccgcatttaaagcccatttttgacttgacctattttgaagcttcgctcattcaattttgcttttttggggcgtatttcatcatggggggagtctttgggaacgtgatcagtaaaatcggctacccttttggcgtggtgcttggttttgtgatcacagcgagcgggtgcgcgttgttttatccggcggcgcattttggctcttacgggttttttttaggagcgttgtttattttagcgagcgggatcgtgtgcttacagactgccggtaatccctttgtaaccttgctttctaaaggtaaagaagccagaaacttggttttagtccaggcgttcaattcgcttggcacgactttagggcctatttttgggagcttgttgatttttagcgcgaccaaaacgagcgataatttaagcctgatagacaagttagcggacgctaaaagcgttcaaatgccttatttgggtttagcggtgttttcgcttcttttagcgcttgtgatgtatcttttaaaattgcctgatgtggaaaaagaaatgcccaaagaaacgacgcaaaaaagcctgttttcgcacaaacactttgtttttggggctttagggatctttttctatgtggggggagaagtggcgattggatcattcttggtgctaagctttgaaaagcttttgaatttagacgctcaatcaagcgcgcattacttggtgtattattggggcggcgcgatggtagggcgtttcttaggcagcgctttgatgaataaaatcgctcctaataaatacctggctttcaacgccttaagctctatcattcttatcgctttggctattcttattggaggcaagatcgctttattcgctctgacttttgtgggctttttcaactctatcatgttccctacaatcttttctttggctacgctcaatttagggcatctcacttctaaggcttctggagtgattagcatggcgattgtgggaggggcgttaatcccccccattcaaggcgtggttacagacatgctcacagcaaccgaatcgaatctgctctacgcttatagcgtgccgttgttgtgctatttttatatcctcttctttgcacttaaggggtataaacaagaagaaaactcctaa

SEQ ID NO: 533 - DNA (genomic), 306 bp, Helicobacter pylori; double-stranded, circular
  misc_feature (B) LOCATION 1...306
  hypothetical: NO
  anti-sense: NO
atgatggcacattcacttattttggtttcaaaaacatcactctccaacctgcttatttttgtggttcaacctgatgggaaattgagcatgactgatgccgccattgatcctaacatgactaattcaggattgagatggtatagagttaatgaaattgcagagaagtttaagctcattaaagacaaagcccttgtaacagtgatcaataaaggctatgggaaaaatccattgacaaaaaattacaatatcaaaaactatggtgaattggagcgtgtgattaaaaagctccctcttgtcagagataaa

SEQ ID NO: 534 - DNA (genomic), 678 bp, Helicobacter pylori; double-stranded, circular
  misc_feature (B) LOCATION 1...678
  hypothetical: NO
  anti-sense: NO
atggggcaggcattttttaaaaaaattgttggctgtttctgtcttggttatttatttttatctagcgcaatagaagcagtagcacttgacattaagaattttaatcgtggtagggtgaaagtggtgaataagaagattgcttatttgggagatgaaaaacctattacgatttggacttcattagacaatgttaccgtgatccaacttgaaaaagatgaaactatttcttacatcacaacaggtttcaataaaggttggagtattgtgcctaattctaatcatatattcattcaacctaaatcggtaaaaagtaatctcatgtttgaaaaagaagcagtgaattttgccctaatgacaagagattaccaagaatttttaaagacaaaaaaacttatcgtagatgcgcctgaccctaaagaattagaagaacaaaaaaaagctctagaaaaagaaaaagaagctaaagaacaggcgcaaaaggcacaaaaagataaaagagaaaaaagaaaggaggagcgtgcaaaaaatagagccaatttagaaaatctcactaacgctatgagtaacccacaaaatttgagcaataacaaaaatcttagcgaattgatcaagcaacagagagaaaatgaattagaccaaatggaacgaactagaggacatgcaagagcaggctcaagc

SEQ ID NO: 535 - DNA (genomic), 723 bp, Helicobacter pylori; double-stranded, circular
  misc_feature (B) LOCATION 1...723
  hypothetical: NO
  anti-sense: NO
gtgcggaccaataaagccttgtatcaattcattttgaggatagcccaaaaagacaattttgcttcagcgtatctaacagtcaaattagaatacccacaaagacacgaagtctctagcgttattgaagaggaattaaaaaagagagaagaagcaaagaggcagagagaattgatcaagcaagaaaatctcaacaccacagcctacatcaatagagtaatgatggcgagcaatgaacagattatcaacaaagaaaaaataagagaagaaaaacaaaaaattatactagatcaagcaaaggcgctagagacccaatatgtgcataatgcgttaaaaagaaaccctgtgcctagaaactacaattactaccaagcgcctgaaaaacgctctaaacatattatgccctctgaaatttttgatgatggcacattcacttattttggtttcaaaaacatcactctccaacctgctatttttgtggttcaacctgatgggaaattgagcatgactgatgccgccattgatcctaacatgactaattcaggattgagatggtatagagttaatgaaattgcagagaagtttaagctcattaaagacaaagcccttgtaacagtgatcaataaaggctatgggaaaaatccattgacaaaaaattacaatatcaaaaactatggtgaattggagcgtgtgattaaaaagctccctcttgtcagagataaataa

SEQ ID NO: 536 - DNA (genomic), 768 bp, Helicobacter pylori; double-stranded, circular
  misc_feature (B) LOCATION 1...768
  hypothetical: NO
  anti-sense: NO
ctccatagaattatctcctgcgatagcgcttggaggactaatcttgttgtgcggaccaataaagccttgtatcaattcattttgaggatagcccaaaaagacaattttgcttcagcgtatctaacagtcaaattagaatacccacaaagacacgaagtctctagcgttattgaagaggaattaaaaaagagagaagaagcaaagaggcagagagaattgatcaagcaagaaaatctcaacaccacagcctacatcaatagagtaatgatggcgagcaatgaacagattatcaacaaagaaaaaataagagaagaaaaacaaaaaattatactagatcaagcaaaggcgctagagacccaatatgtgcataatgcgttaaaaagaaaccctgtgcctagaaactacaattactaccaagcgcctgaaaaacgctctaaacatattatgccctctgaaatttttgatgatggcacattcacttattttggtttcaaaaacatcactctccaacctgctatttttgtggttcaacctgatgggaaattgagcatgactgatgccgccattgatcctaacatgactaattcaggattgagatggtatagagttaatgaaattgcagagaagtttaagctcattaaagacaaagcccttgtaacagtgatcaataaaggctatgggaaaaatccattgacaaaaaattacaatatcaaaaactatggtgaattggagcgtgtgattaaaaagctccctcttgtcagagataaa

SEQ ID NO: 537 - DNA (genomic), 891 bp, Helicobacter pylori; double-stranded, circular
  misc_feature (B) LOCATION 1...891
  hypothetical: NO
  anti-sense: NO
gaggaattgttgatggggcaggcattttttaaaaaaattgttggctgtttctgtcttggttatttatttttatctagcgcaatagaagcagtagcacttgacattaagaattttaatcgtggtagggtgaaagtggtgaataagaagattgcttatttgggagatgaaaaacctattacgatttggacttcattagacaatgttaccgtgatccaacttgaaaaagatgaaactatttcttacatcacaacaggtttcaataaaggttggagtattgtgcctaattctaatcatatattcattcaacctaaatcggtaaaaagtaatctcatgtttgaaaaagaagcagtgaattttgccctaatgacaagagattaccaagaatttttaaagacaaaaaaacttatcgtagatgcgcctgaccctaaagaattagaagaacaaaaaaaagctctagaaaaagaaaaagaagctaaagaacaggcgcaaaaggcacaaaaagataaaagagaaaaaagaaaggaggagcgtgcaaaaaatagagccaatttagaaaatctcactaacgctatgagtaacccacaaaatttgagcaataacaaaaatcttagcgaattgatcaagcaacagagagaaaatgaattagaccaaatggaacgactagaggacatgcaagagcaggctcaagctaacgcactcaaacaaattgaagagctcaacaagaaacaagctgaagaggcagttaggcaaagagccaaggataaaatcagtattaagacagataaatctcaaaaaagccccgaggataactccatagaattatctcctgcgatagcgcttggaggactaatcttgttgtgcggaccaataaagccttgtatcaattcattt

SEQ ID NO: 538 - DNA (genomic), 1569 bp, Helicobacter pylori; double-stranded, circular
  misc_feature (B) LOCATION 1...1569
  hypothetical: NO
  anti-sense: NO
atggggcaggcattttttaaaaaaattgttggctgtttctgtcttggttatttatttttatctagcgcaatagaagcagtagcacttgacattaagaattttaatcgtggtagggtgaaagtggtgaataagaagattgcttatttgggagatgaaaaacctattacgatttggacttcattagacaatgttaccgtgatccaacttgaaaaagatgaaactatttcttacatcacaacaggtttcaataaaggttggagtattgtgcctaattctaatcatatattcattcaacctaaatcggtaaaaagtaatctcatgtttgaaaaagaagcagtgaattttgccctaatgacaagagattaccaagaatttttaaagacaaaaaaacttatcgtagatgcgcctgaccctaaagaattagaagaacaaaaaaaagctctagaaaaagaaaaagaagctaaagaacaggcgcaaaaggcacaaaaagataaaagagaaaaaagaaaggaggagcgtgcaaaaaatagagccaatttagaaaatctcactaacgctatgagtaacccacaaaatttgagcaataacaaaaatcttagcgaattgatcaagcaacagagagaaaatgaattagaccaaatggaacgactagaggacatgcaagagcaggctcaagctaacgcactcaaacaaattgaagagctcaacaagaaacaagctgaagaggcagttaggcaaagagccaaggataaaatcagtattaagacagataaatctcaaaaaagccccgaggataactccatagaattatctcctagcgatagcgcttggaggactaatcttgttgtgcggaccaataaagccttgtatcaattcattttgaggatagcccaaaaagacaattttgcttcagcgtatctaacagtcaaattagaatacccacaaagacacgaagtctctagcgttattgaagaggaattaaaaaagagagaagaagcaaagaggcagagagaattgatcaagcaagaaaatctcaacaccacagcctacatcaatagagtaatgatggcgagcaatgaacagattatcaacaaagaaaaaataagagaagaaaaacaaaaaattatactagatcaagcaaaggcgctagagacccaatatgtgcataatgcgttaaaaagaaaccctgtgcctagaaactacaattactaccaagcgcctgaaaaacgctctaaacatattatgccctctgaaatttttgatgatggcacattcacttattttggtttcaaaaacatcactctccaacctgctatttttgtggttcaacctgatgggaaattgagcatgactgatgccgccattgatcctaacatgactaattcaggattgagatggtatagagttaatgaaattgcagagaagtttaagctcattaaagacaaagcccttgtaacagtgatcaataaaggctatgggaaaaatccattgacaaaaaattacaatatcaaaaactatggtgaattggagcgtgtgattaaaaagctccctcttgtcagagataaataa

SEQ ID NO: 539 - DNA (genomic), 378 bp, Helicobacter pylori; double-stranded, circular
  misc_feature (B) LOCATION 1...378
  hypothetical: NO
  anti-sense: NO
gtggctttattagagccaagcgtgatgtatcttaccgaaaagtatcaatactctcgttttaaggttacttggggtcttgtagcgttaatctttgtggtaggcgtggtgttgattttctcgctccataaggattataaagactatctcactttctttgaaaaaagtctttttgattggttggattttgcatcaagcaccattatcatscctttaggcgggatgrcaacctttatttttatgggctgggttttgaaaaaagaaaaattgcgtcttttgagcgcgcactttttaggccctaaattgtttgcaacttggtatttcttgcttaaatacatcacccctttaattgtgttttccatttggttgagcaagatttat

SEQ ID NO: 540 - DNA (genomic), 561 bp, Helicobacter pylori; double-stranded, circular
  misc_feature (B) LOCATION 1...561
  hypothetical: NO
  anti-sense: NO
tttctcttgtgggcagggcttatgattttcacttttgtgtttgaatatggggctaatgtctcacaaggcacagggttaatcttcacttctttaccggtggtttttggccaaatgggagcgataggcgttcttgtttcaattcttttcttgctcgcgctcgcttttgctggcatcacttctacggtggctttattagagccaagcgtgatgtatcttaccgaaaagtatcaatactctcgttttaaggttacttggggtcttgtagcgttaatctttgtggtaggcgtggtgttgattttctcgctccataaggattataaagactatctcactttctttgaaaaaagtctttttgattggttggattttgcatcaagcaccattatcatgcctttaggcgggatggcaacctttatttttatgggctgggttttgaaaaaagaaaaattgcgtcttttgagcgcgcactttttaggccctaaattgtttgcaacttggtatttcttgcttaaatacatcacccctttaattgtgttttccatttggttgagcaagatttat

SEQ ID NO: 541 - DNA (genomic), 615 bp, Helicobacter pylori; double-stranded, circular
  misc_feature (B) LOCATION 1...615
  hypothetical: NO
  anti-sense: NO
atgggtaatcatttttctaaattaggatttgttttagcggctttagggagcgcgataggtttagggcatatctggcgcttcccctatatgactggggtgagtggtgggggtgcttttgttttattgtttttatttttatccttaagcgttggtgcggcgatgtttatcgctgaaatgctattaggacaaagcacgcaaaaaaatgtaacagaagcttttaaagagcttgacattaaccctaaaaaacgctggaaatacgcagggatcatgcttatttctggacctttaatactgactttttatggcactattttaggttgggtgctttattatttggtgagtattagttttaatttgcctagcagtatccaagaatctgaacaaatttttactcaaactttgcagtctatagggttacaatccatagggctttttagcgttttattcataaccggatggattgtttctagggggattaaagaaggcattgaaaaactcaatttggttttaatgcccttactctttgccactttttttggtttgcttttttatgcgatgagcatggattctttttctaaagctttccatttcatgttgatttcaagccaaaagatt

SEQ ID NO: 542 - DNA (genomic), 810 bp, Helicobacter pylori; double-stranded, circular
  misc_feature (B) LOCATION 1...810
  hypothetical: NO
  anti-sense: NO
gatatgggtaatcatttttctaaattaggatttgttttagcggctttagggagcgcgataggtttagggcatatctggcgcttcccctatatgactggggtgagtggtgggggtgcttttgttttattgtttttatttttatccttaagcgttggtgcggcgatgtttatcgctgaaatgctattaggacaaagcacgcaaaaaaatgtaacagaagcttttaaagagcttgacattaaccctaaaaaacgctggaaatacgcagggatcatgcttatttctggacctttaatactgactttttatggcactattttaggttgggtgctttattatttggtgagtattagttttaatttgcctagcagtatccaagaatctgaacaaatttttactcaaactttgcagtctatagggttacaatccatagggctttttagcgttttattcataaccggatggattgtttctagggggattaaagaaggcattgaaaaactcaatttggttttaatgcccttactctttgccactttttttggtttgcttttttatgcgatgagcatggattctttttctaaagctttccatttcatgtttgatttcaagccaaaagatttgacctctcaagtgttcacttattccttggggcaggttttcttttctctaagtatcggtttagggatcaatatcacttatgctgccgttacggataaaacgcagaatttgcttaaaagcacgatttgggtggttttatcagggattttaatttctcttgtgggcagggcttatgattttcacttttgtgtt

SEQ ID NO: 543 - DNA (genomic), 1329 bp, Helicobacter pylori; double-stranded, circular
  misc_feature (B) LOCATION 1...1329
  hypothetical: NO
  anti-sense: NO
atgggtaatcatttttctaaattaggatttgttttagcggctttagggagcgcgataggtttagggcatatctggcgcttcccctatatgactggggtgagtggtgggggtgcttttgttttattgtttttatttttatccttaagcgttggtgcggcgatgtttatcgctgaaatgctattaggacaaagcacgcaaaaaaatgtaacagaagcttttaaagagcttgacattaaccctaaaaaacgctggaaatacgcagggatcatgcttatttctggacctttaatactgactttttatggcactattttaggttgggtgctttattatttggtgagtattagttttaatttgcctagcagtatccaagaatctgaacaaatttttactcaaactttgcagtctatagggttacaatccatagggctttttagcgttttattcataaccggatggattgtttctagggggattaaagaaggcattgaaaaactcaatttggttttaatgcccttactctttgccactttttttggtttgcttttttatgcgatgagcatggattctttttctaaagctttccatttcatgtttgatttcaagccaaaagatttgacctctcaagtgttcacttattccttggggcaggttttcttttctctaagtatcggtttagggatcaatatcacttatgctgccgttacggataaaacgcagaatttgcttaaaagcacgatttgggtggttttatcagggattttaatttctcttgtggcagggcttatgattttcacttttgtgtttgaatatggggctaatgtctcacaaggcacagggttaatcttcacttctttaccggtggtttttggccaaatgggagcgataggcgttcttgtttcaattcttttcttgctcgcgctcgcttttgctggcatcacttctacggtggctttattagagccaagcgtgatgtatcttaccgaaaagtatcaatactctcgttttaaggttacttggggtcttgtagcgttaatctttgtggtaggcgtggtgttgattttctcgctccataaggattataaagactatctcactttctttgaaaaaagtctttttgattggttggattttgcatcaagcaccattatcatgcctttaggcgggatggcaacctttatttttatgggctgggttttgaaaaaagaaaaattgcgtcttttgagcgcgcactttttaggccctaaattgtttgcaacttggtatttcttgcttaaatacatcacccctttaattgtgttttccatttggttgagcaagatttattaa

SEQ ID NO: 544 - DNA (genomic), 328 bp, Helicobacter pylori; double-stranded, circular
  misc_feature (B) LOCATION 1...328
  hypothetical: NO
  anti-sense: NO
gtgcytttatacctagcactaaccttgagtttaggcattgctatgcttttagtggaaatgctgattggaaatttgggtaaaaaagacgttgtttccaattatcaaatcttagatcctaaaaggaaaaaatattaccctttcacttctttttttattttaggcggccctctcattctatctttttatgcggtggtgttaggctgggtgctttactatctttttgtagtaacttttgatttgcctaaagatttagmgcaggctaaaatgcarttcmgmatgcttcaaaatggcagtttgatctggcctgttattgactttagcgcatgct

SEQ ID NO: 545 - DNA (genomic), 879 bp, Helicobacter pylori; double-stranded, circular
  misc_feature (B) LOCATION 1...879
  hypothetical: NO
  anti-sense: NO
atgggaaaattttctaaattaggctttattttagccactttgggtagctctatcggtttagggcatatttggcgctttccttatatggtaggtcataatggggggagcgcgtttgtgcttttatacctagcactaaccttgagtttaggcattgctatgcttttagtggaaatgctgattggaaatttgggtaaaaaagacgttgtttccaattatcaaatcttagatcctaaaaggaaaaaatattaccctttcacttctttttttattttaggcggccctctcattctatctttttatgcggtggtgttaggctgggtgctttactatctttttgtagtaacttttgatttgcctaaagatttagagcaggctaaaatgcaattcagcatgcttcaaaatggcagtttgatctggcctgttattggctttagcgcatgcttgttgccgacaatatggtttgtttctagggggattgaaaaggggattgaaaaattaaatgtcgtgctgatgcccttattgtttgtgattttcatagggcttttaatctatgcgatgactttagaaagcatgcctaaagctttgcgttttttatttaattttgagattcaaaagattgattttaaggttgtgatggacgctttagggcagatgtttttttctttgagtttaggggtaggcacgatcattacttattcggcttttacgcctaaaaaagaaaacctactcaaaagctctctgtttattgttttaccgggtattttaatttctttgattgccggggtgatgatttttacctttgtgtttgaataccatgcagacgtgtctcaagggccagggcttgtttttatttccttacctttaactttcgctaaaatg

SEQ ID NO: 546 - DNA (genomic), 909 bp, Helicobacter pylori; double-stranded, circular
  misc_feature (B) LOCATION 1...909
  hypothetical: NO
  anti-sense: NO
gcaagatttattaaaatatttggcatgggaaaattttctaaattaggctttattttagccactttgggtagctctatcggtttagggcatatttggcgctttccttatatggtaggtcataatggggggagcgcgtttgtgcttttatacctagcactaaccttgagtttaggcattgctatgcttttagtggaaatgctgattggaaatttgggtaaaaaagacgttgtttccaattatcaaatcttagatcctaaaaggaaaaaatattaccctttcacttctttttttattttaggcggccctctcattctatctttttatgcggtggtgttaggctgggtgctttactatctttttgtagtaacttttgatttgcctaaagatttagagcaggctaaaatgcaattcagcatgcttcaaaatggcagtttgatctggcctgttattggctttagcgcatgcttgttgccgacaatatggtttgtttctagggggattgaagaggggattgaaaaattaaatgtcgtgctgatgcccttattgtttgtgattttcatagggcttttaatctatgcgatgactttagaaagcatgcctaaagctttgcgttttttatttaattttgagattcaaaagattgattttaaggttgtgatggacgctttagggcagatgtttttttctttgagtttaggggtaggcacgatcattacttattcggcttttacgcctaaaaaagaaaacctactcaaaagctctctgtttattgttttaccgggtattttaatttctttgattgccggggtgatgatttttacctttgtgtttgaataccatgcagacgtgtctcaagggccagggcttgtttttatttccttacctttaactttcgctaaaatgggatca

SEQ ID NO: 547 - DNA (genomic), 906 bp, Helicobacter pylori; double-stranded, circular
  misc_feature (B) LOCATION 1...906
  hypothetical: NO
  anti-sense: NO
gcaagatttattaaaatatttggcatgggaaaattttctaaattaggctttattttagccactttgggtagctctatcggtttagggcatatttggcgctttccttatatggtaggtcataatggggggagcgcgtttgtgcttttatacctagcactaaccttgagtttaggcattgctatgcttttagtggaaatgctgattggaaatttgggtaaaaaagacgttgtttccaattatcaaatcttagatcctaaaaggaaaaaatattaccctttcacttctttttttattttaggcggccctctcattctatctttttatgcggtggtgttaggctgggtgctttactatctttttgtagtaacttttgatttgcctaaagatttagagcaggctaaaatgcaattcagcatgcttcaaaatggcagtttgatctggcctgttattggctttagcgcatgcttgttgccgacaatatggtttgtttctagggggattgaagaggggattgaaaaattaaatgtcgtgctgatgcccttattgtttgtgattttcatagggcttttaatctatgcgatgactttagaaagcatgcctaaagctttgcgttttttatttaattttgagattcaaaagattgattttaaggttgtgatggacgctttagggcagatgtttttttctttgagtttaggggtaggcacgatcattacttattcggcttttacgcctaaaaaagaaaacctactcaaaagctctctgtttattgttttaccgggtattttaatttctttgattgccggggtgatgatttttacctttgtgtttgaataccatgcagacgtgtctcaagggccagggcttgtttttatttccttacctttaactttcgctaaaatggga

SEQ ID NO: 548 - DNA (genomic), 1329 bp, Helicobacter pylori; double-stranded, circular
  misc_feature (B) LOCATION 1...1329
  hypothetical: NO
  anti-sense: NO
atgggaaaattttctaaattaggctttattttagccactttgggtagctctatcggtttagggcatatttggcgctttccttatatggtaggtcataatggggggagcgcgtttgtgcttttatacctagcactaaccttgagtttaggcattgctatgcttttagtggaaatgctgattggaaatttgggtaaaaaagacgttgtttccaattatcaaatcttagatcctaaaaggaaaaaatattaccctttcacttctttttttattttaggcggccctctcattctatctttttatgcggtggtgttaggctgggtgctttactatctttttgtagtaacttttgatttgcctaaagatttagagcaggctaaaatgcaattcagcatgcttcaaaatggcagtttgatctggcctgttattggctttagcgcatgcttgttgccgacaatatggtttgtttctagggggattgaaaaggggattgaaaaattaaatgtcgtgctgatgcccttattgtttgtgattttcatagggcttttaatctatgcgatgactttagaaagcatgcctaaagctttgcgttttttatttaattttgagattcaaaagattgattttaaggttgtgatggacgctttagggcagatgtttttttctttgagtttaggggtaggcacgatcattacttattcggcttttacgcctaaaaaagaaaacctactcaaaagctctctgtttattgttttaccgggtattttaatttctttgattgccggggtgatgatttttacctttgtgtttgaataccatgcagacgtgtctcaagggccagggcttgtttttatttccttacctttaactttcgctaaaatgggaatcagtgggcagatcgtttcgctctttttctttatggcgcttgtttttgccgggatcacttccacggtttctttaatagagcctttagcgctttatctcatcaatcgttttaatttctcacgccttaaggcgtcgctatggataggggttgttgtgtatgttttaggcgttttagtcattctttccatgaatgaacgatacgctaagtttttgagctttgctcataagagcgtgtttgggtggctggatttcatcacttcttcatttttaatgcctttgggaggcttgttttcagtcttgtttataggatggattttaaataaaaagcgctcttttttagccacgaagcatttctttagtgcaaacgcttttaaagcgtggcattttagcgttcgttttatcgcgcctgtagtgattttagcgattttcatcttgcaatttaagtga

SEQ ID NO: 549 - DNA (genomic), 564 bp, Helicobacter pylori; double-stranded, circular
  misc_feature (B) LOCATION 1...564
  hypothetical: NO
  anti-sense: NO
atgttaaaaacccacttaagcagcgctaggggcgttgtggtgttgtctaagattttaccggtgaacgtggtgttaatggtgagcgtgcgcttgtttgaaaaggaattaaaacgcaaaccttactacatcattgcgagcgcacacagcgatgaaggtttagaaaaattaaaaaaattwggggytgatatggtggkttyccctacaaaactyatggcgcagagagtgagcgcgaatkgmtggtgyktcctggatatggaaaatatcttagagcgttttatcaacaaaaaagacacgcttttagacttagaggaagtgattgtccccaaaaccagctggcttgtgttaaggaaattaaaagaagcccattttagagagatcgctaaagcctttgtgattggtatcactcaaaaagatggcaaatacatccccatgcctgacggggaaacgattattgcaagcgaatccaagctattgatggttggcacttcagaaggcgttgcgacctgtaagcaactcattactagccaccaaaaaccaaaagaagtggattacatttcattgtga

SEQ ID NO: 550 - DNA (genomic), 1047 bp, Helicobacter pylori; double-stranded, circular
  misc_feature (B) LOCATION 1...1047
  hypothetical: NO
  anti-sense: NO
ttgtttgaaaagttgaaattttttaaaatcaaaaaagacgatgaaaatcagccagaagtcaatttaaattctgaaatctatgagcaatttaaggtctttagactcccgcttattttaatccaattgctcgtgcttttaggcactctgggatacttcgccctagaaaattatagccttatgcaagctttctttcaaacgacttacaccatgacagctacagggtttggcgctttaaatgaaagccagtttgggcctataagtatttttttaacttccattttaatgttttgtgggacgggaattattgcttttagcgtggctattttagttagcgtggtcaataaaggcacgcttaccagattgattaaggagaaaggtatgatttataaaatcgcgcgccttaaggatcattatgtgatttgttaccataatgaatacaccattgagttgagcaagcagtttcgctccgctcaaatcccctttgtggtcgtggataatgatcctaattttgaagaagaagccattaagcacaaatacccctactatatcataggcgatccgcacaccaatttagccatgctaaaaacccacttaagcagcgctaggggcgttgtggcgttgtctaagattttaccggtgaacgtggcgttaatggtgagcgtgcgcttgtttgaaaaggaattaaaacgcaaaccttactacatcattgcgagcgcacacagcgatgaaggtttagaaaaattaaaaaaattaggggctgatatggtggtttcccctacaaaactcatggcgcagagagtgagcgcgatggcggtgcgtccggatatggaaaatatcttagagcgttttatcaacaaaaaagacacgcttttagacttagaggaagtgattgtccccaaaaccagctggcttgtgttaaggaaattaaaagaagcccattttagagagatcgctaaagcctttgtgattggtatcactcaaaaagatggcaaatacatccccatgcctgacgggaaacgattattgcaagcgaatccaagctattga

SEQ ID NO: 551 - DNA (genomic), 1053 bp, Helicobacter pylori; double-stranded, circular
  misc_feature (B) LOCATION 1...1053
  hypothetical: NO
  anti-sense: NO
gaattggttttgtttgaaaagttgaaattttttaaaatcaaaaaagacgatgaaaatcagccagaagtcaatttaaattctgaaatctatgagcaatttaaggtctttagactcccgcttattttaatccaattgctcgtgcttttaggcactctgggatacttcgccctagaaaattatagccttatgcaagctttctttcaaacgacttacaccatgacagctacagggtttggcgctttaaatgaaagccagtttgggcctataagtatttttttaacttccattttaatgttttgtgggacgggaattattgcttttagcgtggctattttagttagcgtggtcaataaaggcacgcttaccagattgattaaggagaaaggtatgatttataaaatcgcgcgccttaaggatcattatgtgatttgttaccataatgaatacaccattgagttgagcaagcagtttcgctccgctcaaatcccctttgtggtcgtggataatgatcctaattttgaagaagaagccattaagcacaaatacccctactatatcataggcgatccgcacaccaatttagccatgctaaaaacccacttaagcagcgctaggggcgttgtggcgttgtctaagattttaccggtgaacgtggcgttaatggtgagcgtgcgcttgtttgaaaaggaattaaaacgcaaaccttactacatcattgcgagcgcacacagcgatgaaggtttagaaaaattaaaaaaattaggggctgatatggtggtttcccctacaaaactcatggcgcagagagtgagcgcgatggcggtgcgtccggatatggaaaatatcttagagcgttttatcaacaaaaaagacacgcttttagacttagaggaagtgattgtccccaaaaccagctggcttgtgttaaggaaattaaaagaagcccattttagagagatcgctaaagcctttgtgattggtatcactcaaaaagatggcaaatacatccccatgcctgacgggaaacgattattgcaagcgaatccaagctat

SEQ ID NO: 552 - DNA (genomic), 675 bp, Helicobacter pylori; double-stranded, circular
  misc_feature (B) LOCATION 1...675
  hypothetical: NO
  anti-sense: NO
atggatcatgagtttttgattaccatgcgtttgagcttttctttagctttgattaccacccttattttactccctatagggatttttttaggctattttttaagccttaaacgcaatcttttaacgagcttaacagaaacgcttgtgtatatgcctttagttttacccccaagcgtgctagggttttatcttcttttaatcttttcgccttcttcttttttgggagcgtttttacaagatgtgttaaatgtgaaactcgtttttagtttccaagggcttatcttagggagcgtgattttttccttgccctttatggtaagccctattaaaagcgcgttaatttccttgcccacttctttaaaagaagccagttatagcttgggtaaaggggaatactacacccttttttttgtcctactccctaacatcaaacccagtgtgttgatggctatcattacaacttttatgcacactataggtgaatttggcgtggtgatgatgcttgggggtgatatattaggggaaacaagagtggctagcattacgatctttaacgaagctgaagcactcaattattctaaagcccatcaatacgccttaacgctcacgcttattagttttagcctcttgtttgttaccctatttttaaataaaaaacaaagctcgtttttatga

SEQ ID NO: 553 - DNA (genomic), 672 bp, Helicobacter pylori; double-stranded, circular
  misc_feature (B) LOCATION 1...672
  hypothetical: NO
  anti-sense: NO
atggatcatgagtttttgattaccatgcgtttgagcttttctttagctttgattaccacccttattttactccctatagggatttttttaggctattttttaagccttaaacgcaatcttttaacgagcttaacagaaacgcttgtgtatatgcctttagttttacccccaagcgtgctagggttttatcttcttttaatcttttcgccttcttcttttttgggagcgtttttacaagatgtgttaaatgtgaaactcgtttttagtttccaagggcttatcttagggagcgtgattttttccttgccctttatggtaagccctattaaaagcgcgttaatttccttgcccacttctttaaaagaagccagttatagcttgggtaaaggggaatactacacccttttttttgtcctactccctaacatcaaacccagtgtgttgatggctatcattacaacttttatgcacactataggtgaatttggcgtggtgatgatgcttgggggtgatatattaggggaaacaagagtggctagcattacgatctttaacgaagctgaagcactcaattattctaaagcccatcaatacgccttaacgctcacgcttattagttttagcctcttgtttgttaccctatttttaaataaaaaacaaagctcgttttta

SEQ ID NO: 554 - DNA (genomic), 684 bp, Helicobacter pylori; double-stranded, circular
  misc_feature (B) LOCATION 1...684
  hypothetical: NO
  anti-sense: NO
aaaaggcgaacaatggatcatgagtttttgattaccatgcgtttgagcttttctttagctttgattaccacccttattttactccctatagggatttttttaggctattttttaagccttaaacgcaatcttttaacgagcttaacagaaacgcttgtgtatatgcctttagttttacccccaagcgtgctagggttttatcttcttttaatcttttcgccttcttcttttttgggagcgtttttacaagatgtgttaaatgtgaaactcgtttttagtttccaagggcttatcttagggagcgtgattttttccttgccctttatggtaagccctattaaaagcgcgttaatttccttgcccacttctttaaaagaagccagttatagcttgggtaaaggggaatactacacccttttttttgtcctactccctaacatcaaacccagtgtgttgatggctatcattacaacttttatgcacactataggtgaatttggcgtggtgatgatgcttgggggtgatatattaggggaaacaagagtggctagcattacgatctttaacgaagctgaagcactcaattattctaaagcccatcaatacgccttaacgctcacgcttattagttttagcctcttgtttgttaccctatttttaaataaaaaacaaagctcgttttta

SEQ ID NO: 555 - DNA (genomic), 225 bp, Helicobacter pylori; double-stranded, circular
  misc_feature (B) LOCATION 1...225
  hypothetical: NO
  anti-sense: NO
attcagcgctcgcaccagctctttaatttgcaagaaaaaaaagggattcttggttttttacaccaaaaaaatatcttaaatattgctcaaaatgacatccaccagctccttattctcatggtggtcttttctatgttagcaaccccttttattttaaaatacctagaatctatcgctcaatttattttgcaccaaaagagccaagaaaacgagccggctaaaaaa

SEQ ID NO: 556 - DNA (genomic), 369 bp, Helicobacter pylori; double-stranded, circular
  misc_feature (B) LOCATION 1...369
  hypothetical: NO
  anti-sense: NO
gtgttgaaattctttgaagattccaaacagcttagcacgcctatgggaaagagcgcggtggggattttgattttccaagatattgcagccattcccatgcttttaattttgacgattctaggcagtaaggattctcatgtcaatttgctcattcttaaaacccttatttcagcggggattattttaattcttttattattgcctggaaaaaaaggggctaatctcatcttagagcaagcgaaagacacgcgcttgcctgaaatctttataggcacggattttagtgattgtttgcagcgcggcggggttgagccatttttttgggttttctatgtctttgggggcgttcattgtgggcatggcgatttc

SEQ ID NO: 557 - DNA (genomic), 582 bp, Helicobacter pylori; double-stranded, circular
  misc_feature (B) LOCATION 1...582
  hypothetical: NO
  anti-sense: NO
gtgattgtttgcagcgcggcggggttgagccatttttttgggttttctatgtctttgggggcgttcattgtgggcatggcgatttctaaatcgcgctataaaatcaatgtccaagaagaattcgcgcaattaaaaaacctctttttggccctttttttcattacgatagggatgcagattaatgtgagtttcttcatggagaaattctttgtcgtcatctttttactcattttagtgatgagttttaagacttttatcatttatgcgctattgcgtttttttagagacgctaaaaccgccatcaaaaccgctctttctttggcgcaaattggggagttttctttcgtgatctttttaaattcaggctcgcaccagctctttaatttgcaagaaaaaaaagggattcttggttttttacaccaaaaaaatatcttaaatattgctcaaaatgacatccaccagctccttattctcatggtggtcttttctatgttagcaaccccttttattttaaaatacctagaatctatcgctcaatttattttgcaccaaaagagccaagaaaacgagccggctaaaaaa

SEQ ID NO: 558 - DNA (genomic), 1098 bp, Helicobacter pylori; double-stranded, circular
  misc_feature (B) LOCATION 1...1098
  hypothetical: NO
  anti-sense: NO
tttcgcttttatttctttaaagcaaatcgatcctactggggaaaggtttttatggtaaacagcacactttatattgttattgccggcttatggcttgctgtaggctttggaatctttttaaagaaattagacatgcccgttatcattggctacatttgcacaggaacggtcttagcggctttttttaaaattaatgattttaatttgttgtctgatattggtgaatttggtatcgtctttttaatgtttatgataggcattgagtttaattttgacaagctcaagtccatcaaacaagaagtgctcgtttttgggcttttacaggttgttttatgcgctttaatcgcttttttattggggtattttgttctgggtctttcgcccattttttcccttgttttaggcatggggctttcactctcttcaaccgccattgtgttgaaattctttgaagattccaaacagcttagcacgcctatgggaaagagcgcggtggggattttgattttccaagatattgcagccattcccatgcttttaattttgacgattctaggcagtaaggattctcatgtcaatttgctcattcttaaaacccttatttcagcggggattattttaattcttttattattgcctgaaaaaaaaggggctaatctcatcttagagcaagcgaaagacacgcgcttgcctgaaatctttataggcacggttttagtgattgtttgcagcgcggcggggttgagccatttttttgggttttctatgtctttgggggcgttcattgtgggcatggcgatttctaaatcgcgctataaaatcaatgtccaagaagaattcgcgcaattaaaaaacctctttttggccctttttttcattacgatagggatgcagattaatgtgagtttcttcatggagaaattctttgtcgtcatctttttactcattttagtgatgagttttaagacttttatcatttatgcgctattgcgtttttttagagacgctaaaaccgccatcaaaaccgctctttctttggcgcaaattggggagttttctttcgtgatctttttaaattcagcgctcgcaccagctctt

SEQ ID NO: 559 - DNA (genomic), 1251 bp, Helicobacter pylori; double-stranded, circular
  misc_feature (B) LOCATION 1...1251
  hypothetical: NO
  anti-sense: NO
atggaaaacagcacactttatattgttattgccggcttatggcttgctgtaggctttggaatctttttaaagaaattagacatgcccgttatcattggctacatttgcacaggaacggtcttagcggctttttttaaaattaatgattttaatttgttgtctgatattggtgaatttggtatcgtctttttaatgtttatgataggcattgagtttaattttgacaagctcaagtccatcaaacaagaagtgctcgtttttgggcttttacaggttgttttatgcgctttaatcgcttttttattggggtattttgttctgggtctttcgcccattttttcccttgttttaggcatggggctttcactctcttcaaccgccattgtgttgaaattctttgaagattccaaacagcttagcacgcctatgggaaagagcgcggtggggattttgattttccaagatattgcagccattcccatgcttttaattttgacgattctaggcagtaaggattctcatgtcaatttgctcattcttaaaacccttatttcagcggggattattttaattcttttattattgcctggaaaaaaaggggctaatctcatcttagagcaagcgaaagacacgcgcttgcctgaaatctttataggcacggttttagtgattgtttgcagcgcggcggggttgagccatttttttgggttttctatgtctttgggggcgttcattgtgggcatggcgatttctaaatcgcgctataaaatcaatgtccaagaagaattcgcgcaattaaaaaacctctttttggccctttttttcattacgatagggatgcagattaatgtgagtttcttcatggagaaattctttgtcgtcatctttttactcattttagtgatgagttttaagacttttatcatttatgcgctattgcgtttttttagagacgctaaaaccgccatcaaaaccgctctttctttggcgcaaattggggagttttctttcgtgatctttttaaattcaggctcgcaccagctctttaatttgcaagaaaaaaaagggattcttggttttttacaccaaaaaaatatcttaaatattgctcaaaatgacatccaccagctccttattctcatggtggtcttttctatgttagcaaccccttttattttaaaatacctagaatctatcgctcaatttattttgcaccaaaagagccaagaaaacgagccggctaaaaaataa

SEQ ID NO: 560 - DNA (genomic), 798 bp, Helicobacter pylori; double-stranded, circular
  misc_feature (B) LOCATION 1...798
  hypothetical: NO
  anti-sense: NO
atgataaaagcgcggtttaaaaaacgccttttaggatctaggggcgcgtttgatttgaatatagacttagaaattaaagaagcagaagttgtcgctttattaggagaatcgggagcgggtaaaagcacgatcttacgcattttagcagggcttgaagcggtgagtagcggctatattgaagccaatcattcagtatggttagacactcaaaaaaagatttttttaaaaccacaacagcgaaaaatcggctttgtgtttcaagattacgccctattccctcatttaaacgtgtatcaaaacatcgcctttgctcaccctaaagataaaaataaaatccacgaagtgttacgcttaatgcgtttagaaaacctaagccagcaaaaaattcccaaactctctggcgggcaagcccaacgagtcgctttagcaagagctttaatcgcagccaaaaatctattgcttttagatgagcctttaaacgccctagataacgccttaaaaaacgaggtgcaacaaggtttgcttgattttatcaagcgtgaaaatttaagcgtgttattggtaagtcatgatccaaacgaaataaccaaactcgcgcgaactttcctctttttaaacaatggcgttattgatcctaatcaagaaaatcggcttttttcaaaccgcttattggtaaaacctctctttgaagatgaaaattattgccattatgaggtcattcctcaaacgatcagtttgcccaaagattgtctgaacccaacttttaagcttgatttcattcaaaacaaaaaattttag

SEQ ID NO: 561 - DNA (genomic), 798 bp, Helicobacter pylori; double-stranded, circular; identical to SEQ ID NO: 560
  misc_feature (B) LOCATION 1...798
  hypothetical: NO
  anti-sense: NO

SEQ ID NO: 562 - DNA (genomic), 813 bp, Helicobacter pylori; double-stranded, circular
  misc_feature (B) LOCATION 1...813
  hypothetical: NO
  anti-sense: NO
aaaacaaagctcgtttttatgataaaagcgcggtttaaaaaacgccttttaggatctaggggcgcgtttgatttgaatatagacttagaaattaaagaagcagaagttgtcgctttattaggagaatcgggagcgggtaaaagcacgatcttacgcattttagcagggcttgaagcggtgagtagcggctatattgaagccaatcattcagtatggttagacactcaaaaaaagatttttttaaaaccacaacagcgaaaaatcggctttgtgtttcaagattacgccctattccctcatttaaacgtgtatcaaaacatcgcctttgctcaccctaaagataaaaataaaatccacgaagtgttacgcttaatgcgtttagaaaacctaagccagcaaaaaattcccaaactctctggcgggcaagcccaacgagtcgctttagcaagagctttaatcgcagccaaaaatctattgcttttagatgagcctttaaacgccctagataacgccttaaaaaacgaggtgcaacaaggtttgcttgattttatcaagcgtgaaaatttaagcgtgttattggtaagtcatgatccaaacgaaataaccaaactcgcgcgaactttcctctttttaaacaatggcgttattgatcctaatcaagaaaatcggcttttttcaaaccgcttattggtaaaacctctctttgaagatgaaaattattgccattatgaggtcattcctcaaacgatcagtttgcccaaagattgtctgaacccaacttttaagcttgatttcattcaaaacaaaaaattt

SEQ ID NO: 563 - DNA (genomic), 885 bp, Helicobacter pylori; double-stranded, circular
  misc_feature (B) LOCATION 1...885
  hypothetical: NO
  anti-sense: NO
atgagggttttagagtggaaatattggttaaatactgataagtgggatacgcccaccaacaaaccgcctcaaacttttaaaatacaaatttttaagatacaaataggtataatcaataacttcaatcatttaatcaaagggagttctatgaaaaacgctttcaaagcgtttgccttgttaatcgtatttttctcaaacgctctattagcgcaggatttaaaaatcgctgctgctgctaatctcacgcgcgctttaaaagcccttgttaaagaatttcaaaaagaacacccaaaagacgctattaacattagctttaattcttcaggcaaactctacgctcaaatcgctcaaaacgccccttttgatttattcatttcagcggatattgctagacccaaaaaactttatgatgaaaaaataaccccttttaaagaagaagtctatgctaaaggcgtgttggttttatggagtgaaaatctaaaaatggattctttagaaattcttaaagaccctaaaattaaacgtatcgctatggctaatcctaaactagccccttatggaaaagccagcatggaagtcttggatcgtttaaaactcactcctagtcttaaatctaaaatcatttatggcgcttctatttctcaagcccatcaattcatcgccaccaaaaacgctcaaataggctttggagcgttatctttgatcgataaaaaagacaaaaacctctcttatttcatcattgataaaaccctttataaccctattgaacaagccttaatcatcactaaaaatggggctaataaccctttagccaaagtttttaaagattttttattcagccctaaagctagagctatctttaaagaatacggctatattgtggat

SEQ ID NO: 564 - DNA (genomic), 888 bp, Helicobacter pylori; double-stranded, circular
  misc_feature (B) LOCATION 1...888
  hypothetical: NO
  anti-sense: NO
atgagggttttagagtggaaatattggttaaatactgataagtgggatacgcccaccaacaaaccgcctcaaacttttaaaatacaaatttttaagatacaaataggtataatcaataacttcaatcatttaatcaaagggagttctatgaaaaacgctttcaaagcgtttgccttgttaatcgtatttttctcaaacgctctattagcgcaggatttaaaaatcgctgctgctgctaatctcacgcgcgctttaaaagcccttgttaaagaatttcaaaaagaacacccaaaagacgctattaacattagctttaattcttcaggcaaactctacgctcaaatcgctcaaaacgccccttttgatttattcatttcagcggatattgctagacccaaaaaactttatgatgaaaaaataaccccttttaaagaagaagtctatgctaaaggcgtgttggttttatggagtgaaaatctaaaaatggattctttagaaattcttaaagaccctaaaattaaacgtatcgctatggctaatcctaaactagccccttatggaaaagccagcatggaagtcttggatcgtttaaaactcactcctagtcttaaatctaaaatcatttatggcgcttctatttctcaagcccatcaattcatcgccaccaaaaacgctcaaataggctttggagcgttatctttgatcgataaaaaagacaaaaacctctcttatttcatcattgataaaaccctttataaccctattgaacaagccttaatcatcactaaaaatggggctaataaccctttagccaaagtttttaaagattttttattcagccctaaagctagagctatctttaaagaatacggctatattgtggattga

SEQ ID NO: 565 - DNA (genomic), 957 bp, Helicobacter pylori; double-stranded, circular
  misc_feature (B) LOCATION 1...957
  hypothetical: NO
  anti-sense: NO
atccttcttgttgaattaaagttacaccctaagatcggttatttttctaaaagatttaattttttatcaaagatgagggttttagagtggaaatattggttaaatactgataagtgggatacgcccaccaacaaaccgcctcaaacttttaaaatacaaatttttaagatacaaataggtataatcaataacttcaatcatttaatcaaagggagttctatgaaaaacgctttcaaagcgtttgccttgttaatcgtatttttctcaaacgctctattagcgcaggatttaaaaatcgctgctgctgctaatctcacgcgcgctttaaaagcccttgttaaagaatttcaaaaagaacacccaaaagacgctattaacattagctttaattcttcaggcaaactctacgctcaaatcgctcaaaacgccccttttgatttattcatttcagcggatattgctagacccaaaaaactttatgatgaaaaaataaccccttttaaagaagaagtctatgctaaaggcgtgttggttttatggagtgaaaatctaaaaatggattctttagaaattcttaaagaccctaaaattaaacgtatcgctatggctaatcctaaactagccccttatggaaaagccagcatggaagtcttggatcgtttaaaactcactcctagtcttaaatctaaaatcatttatggcgcttctatttctcaagcccatcaattcatcgccaccaaaaacgctcaaataggctttggagcgttatctttgatcgataaaaaagacaaaaacctctcttatttcatcattgataaaaccctttataaccctattgaacaagccttaatcatcactaaaaatggggctaataaccctttagccaaagtttttaaagattttttattcagccctaaagctagagctatctttaaagaatacggctatattgtggat

SEQ ID NO: 566 - DNA (genomic), 1470 bp, Helicobacter pylori; double-stranded, circular
  misc_feature (B) LOCATION 1...1470
  hypothetical: NO
  anti-sense: NO
ttgcaagataaagcgactcttttagctgagattttaaataagatgagttccatactaacagactttgagcctaaatttttaagttcagacgatctattgaatttatacgctgaatattgtaatggtcattattgtgatttcaaatacaaacaaagacgattgagcgatgggaatatccaatctcatttatattttaaaaaagaccactttatacatgactataatggaatagagacttttaagcgttttattgctgtgaaagcttatgatgtggataatatcacttctttggctttatctaatcttttgtgtgaaaagttcaacttagacattttgcttaccatagaagctatggataaagaaagagctttgttttttattagagagcgtaaaaaacgctctaaagatattagctatcaaaatatagaatatttagagcaaatggtttctactgacagagcgcaaatacaaaaagttagtttgtcaatcatggtttttgccaattctaaaaaagaattagataaaaaatcaattattgtatataacactttgaaaaaagaaggcttttcagcggttttagaaagcatcaatatgcgtcctatatttttttcattttttcctgaaagaaactttttaaattcacgcctaagacctcaaactagccaaaatattgccagtttgatcatgtttgaaaaatatcaagaaggctttaaagaaaatagttggggagattgtcctgtcagcgtgtttaaaaatcaaaatggatcagcccactttttcaattttcaagctaaacagggcaaagataaaaatgataatgttgtagggcataccatgataattggtagcacagggagcggtaaatccacttttattagttttttaatcgccaatttactgactaaatacgatatgagcgtggtagctcttgacagaatgaatggtttagaaattatgactgacttttttgaaggtcaatacaataccgctaatacagatggtggtttttacatcaaccctttcagtttaaaagactcagaagaaaataggcaatttctggcaaactggattaaattcatgctcaatattgatagcgataaccaacaagataataaggcttctcagtctatagataaggttattagagatacttataattatatgggcgaccagaaaaatcaaatcaacttattagaaattgccaaaaatttaggatctagcgaacaagattttaatgagattttaaaatcacaaggggaaaagatctattttaaaaattttcaagattgtttggatttttctaatagccctttaagcgtgatcaatatggatgcttttgctaatgataaaaaacttatggggctaattgctatgtatttgttccacaaattgttttttgaagcaaaagaacacaacaaaccttttttctattcattgatgaaactaaagactacattatgcatcctataa

SEQ ID NO: 567 - DNA (genomic), 1512 bp, Helicobacter pylori; double-stranded, circular
  misc_feature (B) LOCATION 1...1512
  hypothetical: NO
  anti-sense: NO
cctactccttcctttttctcaaagaatgcaatagaaaataaagaattgcaagataaagcgactcttttagctgagattttaaataagatgagttccatactaacagactttgagcctaaatttttaagttcagacgatctattgaatttatacgctgaatattgtaatggtcattattgtgatttcaaatacaaacaaagacgattgagcgatgggaatatccaatctcatttatattttaaaaaagaccactttatacatgactataatggaatagagacttttaagcgttttattgctgtgaaagcttatgatgtggataatatcacttctttggctttatctaatcttttgtgtgaaaagttcaacttagacattttgcttaccatagaagctatggataaagaaagagctttgttttttattagagagcgtaaaaaacgctctaaagatattagctatcaaaatatagaatatttagagcaaatggtttctactgacagagcgcaaatacaaaaagttagtttgtcaatcatggtttttgccaattctaaaaaagaattagataaaaaatcaattattgtatataacactttgaaaaaagaaggcttttcagcggttttagaaagcatcaatatgcgtcctatatttttttcattttttcctgaaagaaactttttaaattcacgcctaagacctcaaactagccaaaatattgccagtttgatcatgtttgaaaaatatcaagaaggctttaaagaaaatagttggggagattgtcctgtcagcgtgtttaaaaatcaaaatggatcagcccactttttcaattttcaagctaaacagggcaaagataaaaatgataatgttgtagggcataccatgataattggtagcacagggagcggtaaatccacttttattagttttttaatcgccaatttactgactaaatacgatatgagcgtggtagctcttgacagaatgaatggtttagaaattatgactgacttttttgaaggtcaatacaataccgctaatacagatggtggtttttacatcaaccctttcagtttaaaagactcagaagaaaataggcaatttctggcaaactggattaaattcatgctcaatattgatagcgataaccaacaagataataaggcttctcagtctatagataaggttattagagatacttataattatatgggcgaccagaaaaatcaaatcaacttattagaaattgccaaaaatttaggatctagcgaacaagattttaatgagattttaaaatcacaaggggaaaagatctattttaaaaattttcaagattgtttggatttttctaatagccctttaagcgtgatcaatatggatgcttttgctaatgataaaaaacttatggggctaattgctatgtatttgttccacaaattgttttttgaagcaaaagaacacaacaaaccttttttctattcattgatgaaactaaagactacattatgcatccta

SEQ ID NO: 568 - DNA (genomic), 279 bp, Helicobacter pylori; double-stranded, circular
  misc_feature (B) LOCATION 1...279
  hypothetical: NO
  anti-sense: NO
gtcaataacatcagcaaccatatctttaaaagcccgccttttgtagaagccaatcaaagcgtgaattttcctgtggtgtttaaactcctcttaatcaacacggttggcacttccatttttttagccgctcttgttagcatgctcgttttaagggtgcgagtgagcgatgcgctgagcgtctttggcgagactttgaaagaaatgcgctaccccattctcaccattggtttagtcttaagttttgcctatgtgttaaataaaaaggggatttcttccatc

SEQ ID NO: 569 - DNA (genomic), 507 bp, Helicobacter pylori; double-stranded, circular
  misc_feature (B) LOCATION 1...507
  hypothetical: NO
  anti-sense: NO
aatcttaaaagaaagcgttcagtccatcactttagatcaccgcattttagtgattttgattggcttttgtttggctcatttttagaaggggcgatcggctttggagggcctattgccatcacagcggcgattttagtggggttggggttaagccctttgtattctgctgggttatgtttgatcgctaacaccgctcctgtggcctttggcgcggtgggtatccctataagcgcgatggcgagcgcggtaggggtgccagcgatcttaatttcagccatgacgggtaaaatcctcttttttgtgagcttgttagtgccgttttttattgtgtttttaatggatggttttaaggggattaaagagacttttccggccgtttttatcgcggctttttctttcgctggcgcgcaatttttaagctctaattatttagggccagaattgcccggcattatttcagcccttgtttcactcgttgcgacagcgctctttttgtattttgcagcc

SEQ ID NO: 570 - DNA (genomic), 636 bp, Helicobacter pylori; double-stranded, circular
  misc_feature (B) LOCATION 1...636
  hypothetical: NO
  anti-sense: NO
gtgtcagaatttcatcaagtttatgaccctttgggtaatatttggctgagcgctcttgtggccttattgccgattttgttatttttcttatctttaatggtttttaaactcaaaggttatacagcggcctttttgagcgtggccttatcagccattattgcggttttagtgtataaaatgcctgttagcatggtgggttcaagcttcctttatggctttctttatggcctatggctattcgcttggatcattattgccgcgatttttttatacaaactcagcgttaaatccggctattttgaaatcttaaaagaaagcgttcagtccatcactttagatcaccgcattttagtgattttgattggcttttgttttggctcatttttagaaggggcgatcggctttggagggcctattgccatcacagcggcgattttagtggggttggggttaagccctttgtattctgctgggttatgtttgatcgctaacaccgctcctgtggcctttggcgcggtgggtatccctataagcgcgatggcgagcgcggtaggggtgccagcgatcttaatttcagccatgacgggtaaaatcctcttttttgtgagcttgttagtgccgttttttattgtgtkt

SEQ ID NO: 571 - DNA (genomic), 1284 bp, Helicobacter pylori; double-stranded, circular
  misc_feature (B) LOCATION 1...1284
  hypothetical: NO
  anti-sense: NO
gtgtcagaatttcatcaagtttatgaccctttgggtaatatttggctgagcgctcttgtggccttattgccgattttgttatttttcttatctttaatggtttttaaactcaaaggttatacagcggcctttttgagcgtggccttatcagccattattgcggttttagtgtataaaatgcctgttagcatggtgggttcaagcttcctttatggctttctttatggcctatggccgatcgcttggatcattattgccgcgatttttttatacaaactcagcgttaaatccggctattttgaaatcttaaaagaaagcgttcagtccatcactttagatcaccgcattttagtgattttgattggcttttgttttggctcatttttagaaggggcgatcggctttggagggcctattgccatcacagcggcgattttagtggggttggggttaagccctttgtattctgctgggttatgtttgatcgctaacaccgctcctgtggcctttggcgcggtgggtatccctataagcgcgatggcgagcgcggtaggggtgccagcgatcttaatttcagccatgacgggtaaaatcctcttttttgtgagcttgttagtgccgttttttattgtgtttttaatggatggttttaaggggattaaagagacttttccggccgtttttatcgcggctttttctttcgctggcgcgcaatttttaagctctaattatttagggccagaattgcccggcattatttcagcccttgtttcactcgttgcgacagcgctctttttgaaattttggcagcctaaaacgatttttagaagcgacggcaaagcgatctcattcactaaaactaaccatcatatctgtaaaatctatgtcgcttggtctccttttgtgattttagttttagtcattgtgctatggatacagcctttttttaaagccttgtttgaaaaagacggcttgttagctttttctaatttttattttgagttcaataacatcagcaaccatatctttaaaagcccgccttttgtagaagccaatcaaagcgtgaattttcctgtggtgtttaaactcctcttaatcaacacggttggcacttccatttttttagccgctcttgttagcatgctcgttttaagggtgcgagtgagcgatgcgctgagcgtctttggcgagactttgaaagaaatgcgctaccccattctcaccattggtttagtcttaagttttgcctatgtgtcaaataacaagcggatttcttccatctag

SEQ ID NO: 572 - DNA (genomic), 348 bp, Helicobacter pylori; double-stranded, circular
  misc_feature (B) LOCATION 1...348
  hypothetical: NO
  anti-sense: NO
ttggctttcacttttttctcgcccttgatcgggtgggtaggcgtgtttttaaccggaagcgatacgagttctaatcttttgtttggctctttacagcaactcaccgcccaacgattgcatctccctgaggttttaaccctaacggctaataccgtgggaggcactttgggcaagatgataagccctcaaagcatcgctatcgcttgtgcggcggtgggattagccgggaaagagagtgatttgttcaaattcacggttaaatactcccttatttttgtagcgatcatgggagtcgtgatcagcgcgatcgcgtattggatccctgaagtggtgcctgcgataaagtag

SEQ ID NO: 573 - DNA (genomic), 348 bp, Helicobacter pylori; double-stranded, circular; identical to SEQ ID NO: 572
  misc_feature (B) LOCATION 1...348
  hypothetical: NO
  anti-sense: NO

SEQ ID NO: 574 - DNA (genomic), 390 bp, Helicobacter pylori; double-stranded, circular
  misc_feature (B) LOCATION 1...390
  hypothetical: NO
  anti-sense: NO
aaaggggatttcttccatctagccttagcgctcacgcataccggtttggctttcacttttttctcgcccttgatcgggtgggtaggcgtgtttttaaccggaagcgatacgagttctaatcttttgtttggctctttacagcaactcaccgcccaacgattgcatctccctgaggttttaaccctaacggctaataccgtgggaggcactttgggcaagatgataagccctcaaagcatcgctatcgcttgtgcggcggtgggattagccgggaaagagagtgatttgttcaaattcacggttaaatactcccttatttttgtagcgatcatgggagtcgtgatcagcgcgatcgcgtattggatccctgaagtggtgcctgcgataaag

SEQ ID NO: 575 - DNA (genomic), 309 bp, Helicobacter pylori; double-stranded, circular
  misc_feature (B) LOCATION 1...309
  hypothetical: NO
  anti-sense: NO
tggggtgttttaaccggaagcgatacgagttctaatctcttatttggatctttacaaatgctcatcgctacacagcttggattgcctgaagtgcttttcttagcggccaacacttccgggggcgttgtgggcaaaatgataagccctcaaagtatcgctatcgcttgcgcggcggtggggttagtggggaaagagagcgaattgttcagatttacagtaaaatattctatcgctttggcgatcattatggggattgtcttcactcttatcgcttatgttttctcctttattattccagttactcctact

SEQ ID NO: 576 - DNA (genomic), 306 bp, Helicobacter pylori; double-stranded, circular
  misc_feature (B) LOCATION 1...306
  hypothetical: NO
  anti-sense: NO
ggtgttttaaccggaagcgatacgagttctaatctcttatttggatctttacaaatgctcatcgctacacagcttggattgcctgaagtgcttttcttagcggccaacacttccgggggcgttgtgggcaaaatgataagccctcaaagtatcgctatcgcttgcgcggcggtggggttagtggggaaagagagcgaattgttcagatttacagtaaaatattctatcgctttggcgatcattatggggattgtcttcactcttatcgcttatgttttctcctttattattccagttactcctact

SEQ ID NO: 577 - DNA (genomic), 327 bp, Helicobacter pylori; double-stranded, circular
  misc_feature (B) LOCATION 1...327
  hypothetical: NO
  anti-sense: NO
atggtaggctggcttggggtgtttttaaccggaagcgatacgagttctaatctcttatttggatctttacaaatgctcatcgctacacagcttggattgcctgaagtgcttttcttagcggccaacacttccgggggcgttgtgggcaaaatgataagccctcaaagtatcgctatcgcttgcgcggcggtggggttagtggggaaagagagcgaattgttcagatttacagtaaaatattctatcgctttggcgatcattatggggattgtcttcactcttatcgcttatgttttcccctttattattccagttactcctacttaa

SEQ ID NO: 578 - DNA (genomic), 459 bp, Helicobacter pylori; double-stranded, circular
  misc_feature (B) LOCATION 1...459
  hypothetical: NO
  anti-sense: NO
gtgtttaaatccggcatgcaagcgtgcgtgtgcgtgttgggcgtggcgtggttaggcgatacttttgtgagcaatcatatagatgaaatcaagcgatacgcttcttttttgatcgcagattacccgtttttattggccgtagcgctttttttggcttccatgcttttgtattcacaggctgccacctctaaagcgctcatcccaagcgtgatcaccgccttaggcattagcgctaatcataccgagcatttgtatattatcgtggcttcgtttgcgagcgtttcggcgttgtttgtgttacccacttaccccactttactgggagcgattgctatggatcataccggtaccaccaaaatgggtcgttatgtgtttgatcatgcgtttttgatccctggggttttagtcgtgtttttgagcgtggcgttagggtttgttgtcgcaccactagttttgtag

SEQ ID NO: 579 - DNA (genomic), 459 bp, Helicobacter pylori; double-stranded, circular; identical to SEQ ID NO: 578
  misc_feature (B) LOCATION 1...459
  hypothetical: NO
  anti-sense: NO

SEQ ID NO: 580 - DNA (genomic), 246 bp, Helicobacter pylori; double-stranded, circular
  misc_feature (B) LOCATION 1...246
  hypothetical: NO
  anti-sense: NO
gggggtgctagattatggcgattagcgcctgtgattacaacgcccatagcccctttaaaaagaggtttgattgatgaggtttttagcgtgggggtgaagagcattgatgggcttttgacttgcggtaaggggcaaaaactgggcatttttgccggctctggggtgggtaaatccacgctaatgggcatgatcactaggggttgcttagcgcccattaaagtgatcgctttgattggggaaaggggc

SEQ ID NO: 581 - DNA (genomic), 243 bp, Helicobacter pylori; double-stranded, circular
  misc_feature (B) LOCATION 1...243
  hypothetical: NO
  anti-sense: NO
gggggtgctagattatggcgattagcgcctgtgattacaacgcccatagcccctttaaaaagaggtttgattgatgaggtttttagcgtgggggtgaagagcattgatgggcttttgacttgcggtaaggggcaaaaactgggcatttttgccggctctggggtgggtaaatccacgctaatgggcatgatcactaggggttgcttagcgcccattaaagtgatcgctttgattggggaaagg

SEQ ID NO: 582 - DNA (genomic), 255 bp, Helicobacter pylori; double-stranded, circular
  misc_feature (B) LOCATION 1...255
  hypothetical: NO
  anti-sense: NO
acttccgcatcaagggtggctaaagacatcatcagcgagtctcaaaacctttgcgcaagaaaattccgccgtttgtatgcgttattgaaagaaaatgaaatgctcattcgcatcggatcttatcaaatggggaacgataaagagcttgatgaagcgattaagaaaaaggctctaatggagcaatttttagtgcaagatgaaaacgctttacagccttttgaacaaagctttcagcaattagaagaaatcttaaga

SEQ ID NO: 583 - DNA (genomic), 450 bp, Helicobacter pylori; double-stranded, circular
  misc_feature (B) LOCATION 1...450
  hypothetical: NO
  anti-sense: NO
ttgcctcaattaatggagagagcgggcaaggaagaaaataaggggagcattacggctttttttagcgtgctggtagagggcgatgatttgagcgatcccatagccgatcaggccaggagtattttagatgggcatattgtcttaagcagggaattaaccgattatgggatctacccacccatcaatattttaaactccgcatcaagggtggctaaagacatcatcagcgagtctcaaaacctttgcgcaagaaaattccgccgtttgtatgcgttattgaaagaaaatgaaatgctcattcgcatcggatcttatcaaatggggaacgataaagagcttgatgaagcgattaagaaaaaggctctaatggagcaatttttagtgcaagatgaaaacgctttacagccttttgaacaaagctttcagcaattagaagaaatcttaagataa

SEQ ID NO: 584 - DNA (genomic), 936 bp, Helicobacter pylori; double-stranded, circular
  misc_feature (B) LOCATION 1...936
  hypothetical: NO
  anti-sense: NO
gtgattacaacgcccatagcccctttaaaaagaggtttgattgatgaggtttttagcgtgggggtgaagagcattgatgggcttttgacttgcggtaaggggcaaaaactgggcatttttgccggctctggggtgggtaaatccacgctaatgggcatgatcactaggggttgcttagcgcccattaaagtgatcgctttgattggggaaaggggcagagaaatccctgaatttatagagaaaaacttgaaaggggatttaagctcttgcgtgttggtggtcgctacgagcgatgatagccctttaatgcgcaaatacggggccttttgcgcgatgagcgtggcggagtattttaaaaaccaagggctagacgtgttattcatcatggattcagtgactcgtttcgctatggctcaaagagaaatcggtttggccttaggcgaaccgcccacttccaaaggctaccccccatccgcgctttccttattgcctcaattaatggagagagcgggcaaggaagaaaataaggggagcattacggctttttttagcgtgctggtagagggcgatgatttgagcgatcccatagccgatcaggccaggagtattttagatgggcatattgtcttaagcagggaattaaccgattatgggatctacccacccatcaatattttaaactccgcatcaagggtggctaaagacatcatcagcgagtctcaaaacctttgcgcaagaaaattccgccgtttgtatgcgttattgaaagaaaatgaaatgctcattcgcatcggatcttatcaaatggggaacgataaagagcttgatgaagcgattaagaaaaaggctctaatggagcaatttttagtgcaagatgaaaacgctttacagccttttgaacaaagctttcagcaattagaagaaatcttaagataa

SEQ ID NO: 585 - DNA (genomic), 219 bp, Helicobacter pylori; double-stranded, circular
  misc_feature (B) LOCATION 1...219
  hypothetical: NO
  anti-sense: NO
gcacgcatattttggatttggattttcacagcgtgcgcgaagtttagcgggaattatgacgattggtatatcgcttccactctgatcgctaaacagcaagaggccgaacgcaataaaaaactcaaagaaaaagaagagctagaaaaattcatcgctcgttttagcgctaacgctctaaagccaagcaagccaccagccgccaaaaacaactggataaat

SEQ ID NO: 586 - DNA (genomic), 216 bp, Helicobacter pylori; double-stranded, circular
  misc_feature (B) LOCATION 1...216
  hypothetical: NO
  anti-sense: NO
cgcatattttggatttggattttcacagcgtgcgcgaagtttagcgggaattatgacgattggtatatcgcttccactctgatcgctaaacagcaagaggccgaacgcaataaaaaactcaaagaaaaagaagagctagaaaaattcatcgctcgttttagcgctaacgctctaaagccaagcaagccaccagccgccaaaaacaactggataaat

SEQ ID NO: 587 - DNA (genomic), 588 bp, Helicobacter pylori; double-stranded, circular
  misc_feature (B) LOCATION 1...588
  hypothetical: NO
  anti-sense: NO
atgctgcaaaccatcaacttaacgcaacgctatgcgactaaaaaattgtttgaaaacgtgaatatcaagctggataaaaacaagcgctacgggctgattggggctaatggcgcagggaagtccacttttttaaagattttaagcaagagcattgattgcagcagtggggaagttatcatcacaagcgggatgaggatgggggttttagggcaggatcaatacgcttttgaagatttgagccttaaagatgcggttttgataggcaataggcgtttgtatgacgctatcaaagaaaaagagcgcttatacaccgaaggcgatttgagcgatgataaagtgaatgccagattaggggagttagaaaccatttgcgtggaagaagatcccatgtatgaatgcgaagtggtgattgaaaaaatcctagaagatttaggcattcctagctctaaacacaacgatttgatgaaaaccttgccaagcagcgataaatttaaaatccttctcgctcaagtcttgttccctaaaccggatatattgcttttagatgagccgactaacaatttggatttaacgccattgaatggctag

SEQ ID NO: 588 - DNA (genomic), 951 bp, Helicobacter pylori; double-stranded, circular
  misc_feature (B) LOCATION 1...951
  hypothetical: NO
  anti-sense: NO
atgctgcaaaccatcaacttaacgcaacgctatgcgactaaaaaattgtttgaaaacgtgaatatcaagctggataaaaacaagcgctacgggctgattggggctaatggcgcagggaagtccacttttttaaagattttaagcaagagcattgattgcagcagtggggaagttatcatcacaagcgggatgaggatgggggttttagggcaggatcaatacgcttttgaagatttgagccttaaagatgcggttttgataggcaataggcgtttgtatgacgctatcaaagaaaaagagcgcttatacaccgaaggcgatttgagcgatgataaagtgaatgccagattaggggagttagaaaccatttgcgtggaagaagatcccatgtatgaatgcgaagtggtgattgaaaaaatcctagaagatttaggcattcctagctctaaacacaacgatttgatgaaaaccttgccaagcagcgataaatttaaaatccttctcgctcaagtcttgttccctaaaccggatattttgcttttagatgagccgactaacaatttggatttaaacgccattgaatggctagaaaacaacctcaaacgccatgaaggcacgatggtagtcatcagccatgacaggcattttttaaatgcggtatgcacgcatattttggatttggattttcacagcgtgcgcgagtttagcgggaattatgacgattggtatatcgcttccactctgatcgctaaacagcaagaggccgaacgcaataaaaaactcaaagaaaaagaagagctagaaaaattcatcgctcgttttagcgctaacgcttctaaagccaagcaagccaccagccgccaaaaacaactggataaattagacattcaaagcttagcaatatccagcaggagggatcctagcattatttttaaacccaaacgcaccatt

SEQ ID NO: 589 - DNA (genomic), 291 bp, Helicobacter pylori; double-stranded, circular
  misc_feature (B) LOCATION 1...291
  hypothetical: NO
  anti-sense: NO
ctgttgcgatcgctttgtttggtgtgcgtgagcgttgcgagcgctttagcggtgagcgtgtccggcacgattggctggattgggttagtgatcccgcatgtggctaggttgttttttggggcgaatttacaaaaactgcttttaagctctttattaatgggggcgtttttcttgcttttggcggatgtggtggctaaaaccattaccccctatgatttaccggtaggcattgcgacaagcgttttaggagcgccttttttcctgtggcttttattcaggactaggggggtg

SEQ ID NO: 590 - DNA (genomic), 288 bp, Helicobacter pylori; double-stranded, circular
  misc_feature (B) LOCATION 1...288
  hypothetical: NO
  anti-sense: NO
ttgcgatcgctttgtttggtgtgcgtgagcgttgcgagcgctttagcggtgagcgtgtccggcacgattggctggattgggttagtgatcccgcatgtggctaggttgttttttggggcgaatttacaaaaactgcttttaagctctttattaatgggggcgtttttcttgcttttggcggatgtggtggctaaaaccattaccccctatgatttaccggtaggcattgcgacaagcgttttaggagcgccttttttcctgtggcttttattcaggactaggggggtg

SEQ ID NO: 591 - DNA (genomic), 297 bp, Helicobacter pylori; double-stranded, circular
  misc_feature (B) LOCATION 1...297
  hypothetical: NO
  anti-sense: NO
gtgctgttgcgatcgctttgtttggtgtgcgtgagcgttgcgagcgctttagcggtgagcgtgtccggcacgattggctggattgggttagtgatcccgcatgtggctaggttgttttttggggcgaatttacaaaaactgcttttaagctctttattaatgggggcgtttttcttgcttttggcggatgtggtggctaaaaccattaccccctatgatttaccggtaggcattgcgacaagcgttttaggagcgccttttttcctgtggcttttattcaggactaggggggtgtga

SEQ ID NO: 592 - DNA (genomic), 513 bp, Helicobacter pylori; double-stranded, circular
  misc_feature (B) LOCATION 1...513
  hypothetical: NO
  anti-sense: NO
gtggaatattatgcgtttaatttcagcgtgttggattttgtcttaatggggaaagcgacgcatttgaatctgttcgctatgcctaaagctaagcacattaaagaagccacgagcgttttagagcgcttggatttagagtccttaaaagatcaaggcattaacgatttgtccggcggtcaaaggcagatggtacttttagccagaagcttgttgcaaagaacgcccttattgttactggatgagcctacgagtgcgttagatttaaaaaaccaagcccttttttttgatgcgattaaagatgagatgaaaaaacgagaattgagcgttttagtcaatatccatgatcccaatttggttgccaggcactccacgcatgtggtcatgctcaaagataaaaaactttttttgcaagcttccacgccaatcgctatgacttcacacaatttaagcgcgctttatgacacgcccctaraagcgatctggcatgatgataagcttgtggtgtatgcgttg

SEQ ID NO: 593 - DNA (genomic), 618 bp, Helicobacter pylori; double-stranded, circular
  misc_feature (B) LOCATION 1...618
  hypothetical: NO
  anti-sense: NO
gggcttttgaagcctttagaagaaaccgaaatcaaggcgtgtaacaaagatattttacccttaaagccttatgaaaaagccaaattgattgcttatatcccccaagtggaatattatgcgtttaatttcagcgtgttggattttgtcttaatggggaaagcgacgcatttgaatctgttcgctatgcctaaagctaagcacattaaagaagccacgagcgttttagagcgcttggatttagagtccttaaaagatcaaggcattaacgatttgtccggcggtcaaaggcagatggtacttttagccagaagcttgttgcaaagaacgcccttattgttactggatgagcctacgagtgcgttagatttaaaaaaccaagcccttttttttgatgcgattaaagatgagatgaaaaaacgagaattgagcgttttagtcaatatccatgatcccaatttggttgccaggcactccacgcatgtggtcatgctcaaagataaaaaactttttttgcaagcttccacgccaatcgctatgacttcacacaatttaagcgcgctttatgacacgcccctagaagcgatctggcatgatgataagcttgtggtgtatgcgttg

SEQ ID NO: 594 - DNA (genomic), 615 bp, Helicobacter pylori; double-stranded, circular
  misc_feature (B) LOCATION 1...615
  hypothetical: NO
  anti-sense: NO
cttttgaagcctttagaagaaaccgaaatcaaggcgtgtaacaaagatattttacccttaaagccttatgaaaaagccaaattgattgcttatatcccccaagtggaatattatgcgtttaatttcagcgtgttggattttgtcttaatggggaaagcgacgcatttgaatctgttcgctatgcctaaagctaagcacattaaagaagccacgagcgttttagagcgcttggatttagagtccttaaaagatcaaggcattaacgatttgtccggcggtcaaaggcagatggtacttttagccagaagcttgttgcaaagaacgcccttattgttactggatgagcctacgagtgcgttagatttaaaaaaccaagcccttttttttgatgcgattaaagatgagatgaaaaaacgagaattgagcgttttagtcaatatccatgatcccaatttggttgccaggcactccacgcatgtggtcatgctcaaagataaaaaactttttttgcaagcttccacgccaatcgctatgacttcacacaatttaagcgcgctttatgacacgcccctagaagcgatctggcatgatgataagcttgtggtgtatgcgttg

SEQ ID NO: 595 - DNA (genomic), 771 bp, Helicobacter pylori; double-stranded, circular
  misc_feature (B) LOCATION 1...771
  hypothetical: NO
  anti-sense: NO
gtgatggtcttagaagttaaaaacctgtcctttaaatattctcaaaaactcattttagacaaattgagttttagcgtgccaaaaaacagcatcacaagcattttagcgcctaatggctcgggtaaaaccacgcttttaaaatgccttttagggcttttgaagcctttagaagaaaccgaaatcaaggcgtgtaacaaagatattttacccttaaagccttatgaaaaagccaaattgatcgcttatatcccccaagtggaatattatgcgtttaatttcagcgtgttggattttgtcttaatggggaaagcgacgcatttgaatctgttcgctatgcctaaagctaagcacattaaagaagccacgagcgttttagagcgcttggatttagagtccttaaaagatcaaggcattaacgatttgtccggcggtcaaaggcagatggtacttttagccagaagcttgttgcaaagaacgcccttattgttactggatgagcctacgagtgcgttagatttaaaaaaccaagcccttttttttgatgcgattaaagatgagatgaaaaaacgagaattgagcgttttagtcaatatccatgatcccaatttggttgccaggcactccacgcatgtggtcatgctcaaagataaaaaactttttttgcaagcttccacgccaatcgctatgacttcacacaatttaagcgcgctttatgacacgcccctagaagcgatctggcatgatgataagcttgtggtgtatgcgttgtag

SEQ ID NO: 596 - DNA (genomic), 177 bp, Helicobacter pylori; double-stranded, circular
  misc_feature (B) LOCATION 1...177
  hypothetical: NO
  anti-sense: NO
gtggtgatttgcgatgagcctgtgtctgcactagacgtgtccattcaagcgcaagtgttgaatttgctcttggatttgcaaaaagaaatggggctgacttatatttttatcagccatgatttaggggtggtggagcatattagcgataaaatcatcgtaatgaatcaaggcaaatcg

SEQ ID NO: 597 - DNA (genomic), 807 bp, Helicobacter pylori; double-stranded, circular
  misc_feature (B) LOCATION 1...807
  hypothetical: NO
  anti-sense: NO
atgaagctcttagaaattaaagaattgaaaaaatcctatgcgatagacagggggttattcaagcctaaaagagtgatccatgcgctcaatgggatcagttttgaagtggaacaaaatgaagttttaagcatcgtgggggagagcggttgtgggaaaagcacgacagccaaaattttagccgggattgaaaggcaagatagcggggcgatttatttcaatggcaagcgtcatttgcattttagcaaacaggattggtttgattaccgcaaaaaggtgcaaatgattttccaagacccttattctagcctgaacccaaggtggaaagtgggcgagatcatcgctgaacccttgctgttaaattctcacttttcaaaaaaagaaatcaaaacaaaagtgctagagatcatgcaaaaagtgggcttgaaattagaatggatcgatcgttaccctcaccaattttcaggcggtcaaaggcaacgaatcggcattgctagggcgctcattttgcatcctagcgtggtgatttgcgatgagcctgtgtctgcactagacgtgtccattcaagcgcaagtgttgaatttgctcttggatttgcaaaaagaaatggggctgacttatatttttatcagccatgatttaggggtggtggagcatattagcgataaaatcatcgtaatgaatcaagggcaaatcgtagaaaccggggatgtggatagtgtgataagcgctccaaagcacccttatacgcagaagttactcaatgcggtgccgcatttggaaaaatccatgcaaaggtttgctgaataa

SEQ ID NO: 598 - DNA (genomic), 516 bp, Helicobacter pylori; double-stranded, circular
  misc_feature (B) LOCATION 1...516
  hypothetical: NO
  anti-sense: NO
gcgtggtggcgcaaatcgctgcatgaagtggtggtgatgtataaagggcatgtggtggagcaagcgagcgccaaagagctttttgctgacccaagacacccctataccaaggctcttttaaacgccatccctaaaccgggcaaagaataccgcaaaaaacgcttagaaaccgtggatgaaaatgtagattatttaagttttcaaaaggaggttacgatgaagctcttagaaattaaagaattgaaaaaattccatgcgatagacaggggttatttcaagcctaaaagagtgatccatgcgctcaatgggatcagttttgaagtggaacaaaatgaagttttaagcatcgtgggggagagcggttgtgggaaaagcacgacagccaaaattttagccgggattgaaaggcaagatagcggggcgatttatttcaatggcaagcgtcatttgcattttagcaaacaggattggtttgattaccgcaaaaaggtgcaaatgattttccaagatccttat

SEQ ID NO: 599 - DNA (genomic), 588 bp, Helicobacter pylori; double-stranded, circular
  misc_feature (B) LOCATION 1...588
  hypothetical: NO
  anti-sense: NO
atgatctttcaagagcctatgacgagcctaaacccttcgtacacggtggggtttcaaatcaatgaagtgttgaaaatccaccacccaagccttaataaaaaagaacgattagaaagggtggtctatgagttagagcgcgtgggcattccccatgccggggataaataccatgaataccctttcaatctcagcggagggcagcgccaaagggtgatgatcgctatggctatggtgtgtgagcctgaaatcttgatcgctgatgagccgacgacggcgttagatgtaaccattcaagcacaaattttagaattgatgaaagaattgcaacaaaaaaaaggcacttctattttgtttatcacccacgatttaggcgtggtggcgcaaatcgctgatgaagtggtggtgatgtataaagggcatgtggtggagcaagcgagcgccaaagagctttttgctgacccaagacacccctataccaaggctcttttaaacgccatccctaaaccgggcaaagaataccgcaaaaaacgcttagaaaccgtggatgaaaatgtagattatttaagttttcaaaaggagttacgatga

SEQ ID NO: 600 - DNA (genomic), 864 bp, Helicobacter pylori; double-stranded, circular
  misc_feature (B) LOCATION 1...864
  hypothetical: NO
  anti-sense: NO
atgattttagaagttaaagacttaaaaacttattttttcaccgataagggcgtgaataaagcggtggatggcgtgagttttggcttgaaaaagtctcaaacgctctgcattgtaggggagagcgggagcgggaaaagcatcacttcgctttctattttagggttgattgaaaaacccgggaaaattgttggggggagcattcaatttttagggcaggatttgttgcaactcaaagaaaaacagatgcaaaaagaaatcaggggcaagaaaattggcatgatctttcaagagcctatgacgagcctaaacccttcctacacggtggggtttcaaatcaatgaagtgttgaaaatccaccacccaagccttaataaaaaagaacgattagaaagggtggtctatgagttagagcgcgtgggcattccccatgccggggataaataccatgaataccctttcaatctcagcggagggcagcgccaaagggtgatgatcgctatggctatggtgtgtgagcctgaaatcttgatcgctgatgagccgacgacggcgttagatgtaaccattcaagcacaaattttagaattgatgaaagaattgcaacaaaaaaaaggcacttctattttgtttatcacccacgatttaggcgtggtggcgcaaatcgctgatgaagtggtggtgatgtataaagggcatgtggtggagcaagcgagcgccaaagagctttttgctgacccaagacacccctataccaaggctcttttaaacgccatccctaaaccgggcaaagaataccgcaaaaaacgcttagaaaccgtggatgaaaatgtagattatttaagttttcaaaaggagttacgatga

SEQ ID NO: 601 - DNA (genomic), 120 bp, Helicobacter pylori; double-stranded, circular
  misc_feature (B) LOCATION 1...120
  hypothetical: NO
  anti-sense: NO
atgagtgaagcctattttttacaccataaaaacgcttctcaagtgtctcttaatgaacaagttttaaacgttatgaaacaagttcaattggatgaaaatttttggaatgtttctcttatg

SEQ ID NO: 602 - DNA (genomic), 1551 bp, Helicobacter pylori; double-stranded, circular
  misc_feature (B) LOCATION 1...1551
  hypothetical: NO
  anti-sense: NO
atgctagaaatcaagaatttaaactgcgttttaaactctcatttttcgctccaaaacatcaatatttctttaagttatagtgaaagggtggcgatcgtgggcgaaagcgggagcgggaaaagctctatcgctaatctcgtcatgcgattaaaccctagattcaagccccataatggcgaaatcctgtttgaaacaaccaatcttttaaaggaaagcgaagcgttcatgcagcatttaagggggaatattatcgcttacatcgcccaagaccccctatccagcctaaaccccttgcataaaatcggcaagcaaatgagtgaagcctattttttacaccataaaaacgcttctcaagtgctccttaaagaacaagttttaaacgccatgaaacaagtccaattggatgaaaaatttttggatcgttacccttatgagctcagcggtgggcaacgccaaagggtgtgtatcgctatgggcattattaacgcgccaaaactgctcatttgcgatgagcctaccaccgcgctagatgcgcaaatccaaaaccagattttagacttgctcaagcaattgagcgtggaaaaaaacatcgcccttttattcattagccatgatttaaaggcggttaaacgattggctgatagggtttatgtgttaaaaaaaggcgagatagtagaaaccaatttgactaaagagctttttaatgaccccaagcacgaatattcaaaactcttgattcaggcttcaaacttgcccgctaaaaatttaaaagcgctagatgagacgcttttagaggtgaaagattttagcgtttattacttgcaaaaacgcttctttaggccttctttaaaaaaaccccttatcgcatcggtggatttttccctcaaagctaaagaaaacatcggcatcattggcgaaagcgggagcgggaaaagctctctagcgttagggcttttaaaactcgctttaaacagcggggaagaaaagattttaggccaaagcgtggggcttttaaattctaaggcgttcaaaccctaccgcaagattttgcaaatggtgtttcaagacccctacgcatcattaaaccctcgcttaagcattcaaagcattttaatagaagctttgcgctttgcttaccctaaagcttcacaacaagaatggcaccatttagctgaactttgcttagaagaagtgtgtttaaaccctgaattgcttaacttttacgcttatgagctcagcggaggggagcgccaaagagtggcgatcgctagagcgattgccttaaaacctagaatcattcttttagatgagccaacctctgctttagacaaaagcattcaaaaaagcgtgttggaattattgttgaatttacaagaaaagcaggatttgagctatttgtttatcagccatgatttagatgtgatcaaagctttttgcgatagggtgttagtggtgagtgaggggaaaatcgtggaaacaggcgctattgaagaggtgtttgacaaccccaaacacgcttataccaagcgtttgttggaatccaggctttaa

SEQ ID NO: 603 - DNA (genomic), 1557 bp, Helicobacter pylori; double-stranded, circular
  misc_feature (B) LOCATION 1...1557
  hypothetical: NO
  anti-sense: NO
aggggttacatgctagaaatcaagaatttaaactgcgttttaaactctcatttttcgctccaaaacatcaatatttctttaagttatagtgaaagggtggcgatcgtgggcgaaagcgggagcgggaaaagctctatcgctaatctcgtcatgcgattaaaccctagattcaagccccataatggcgaaatcctgtttgaaacaaccaatcttttaaaggaaagcgaagcgttcatgcagcatttaagggggaatattatcgcttacatcgcccaagaccccctatccagcctaaaccccttgcataaaatcggcaagcaaatgagtgaagcctattttttacaccataaaaacgcttctcaagtgctccttaaagaacaagttttaaacgccatgaaacaagtccaattggatgaaaaatttttggatcgttacccttatgagctcagcggtgggcaacgccaaagggtgtgtatcgctatgggcattattaacgcgccaaaactgctcatttgcgatgagcctaccaccgcgctagatgcgcaaatccaaaaccagattttagacttgctcaagcaattgagcgtggaaaaaaacatcgcccttttattcattagccatgatttaaaggcggttaaacgattggctgatagggtttatgtgttaaaaaaaggcgagatagtagaaaccaatttgactaaagagctttttaatgaccccaagcacgaatattcaaaactcttgattcaggcttcaaacttgcccgctaaaaatttaaaagcgctagatgagacgcttttagaggtgaaagattttagcgtttattacttgcaaaaacgcttctttaggccttctttaaaaaaaccccttatcgcatcggtggatttttccctcaaagctaaagaaaacatcggcatcattggcgaaagcgggagcgggaaaagctctctagcgttagggcttttaaaactcgctttaaacagcggggaagaaaagattttaggccaaagcgtggggcttttaaattctaaggcgttcaaaccctaccgcaagattttgcaaatggtgtttcaagacccctacgcatcattaaaccctcgcttaagcattcaaagcattttaatagaagctttgcgctttgcttaccctaaagcttcacaacaagaatggcaccatttagctgaactttgcttagaagaagtgtgtttaaaccctgaattgcttaacttttacgcttatgagctcagcggaggggagcgccaaagagtggcgatcgctagagcgattgccttaaaacctagaatcattcttttagatgagccaacctctgctttagacaaaagcattcaaaaaagcgtgttggaattattgttgaatttacaagaaaagcaggatttgagctatttgtttatcagccatgatttagatgtgatcaaagctttttgcgatagggtgttagtggtgagtgaggggaaaatcgtggaaacaggcgctattgaagaggtgtttgacaaccccaaacacgcttataccaagcgtttgttggaatccaggctt

SEQ ID NO: 604 - DNA (genomic), 234 bp, Helicobacter pylori; double-stranded, circular
  misc_feature (B) LOCATION 1...234
  hypothetical: NO
  anti-sense: NO
ttcttacgcgcgttatgtggcttattagggacggtgttagggatcatggtgattctctatgacatgggcgtgagcggcgggatggacgctaaaacgatcatggtaggtttgtctttagctttaaaagcgaccgctttagggcttgctgtggcgatccctactttgatcgcttataatagcttgttgagaaaatccgatgttttgagtgaaaaattcaggatcatgaaaacatga

SEQ ID NO: 605 - DNA (genomic), 228 bp, Helicobacter pylori; double-stranded, circular
  misc_feature (B) LOCATION 1...228
  hypothetical: NO
  anti-sense: NO
ttacgcgcgttatgtggcttattagggacggtgttagggatcatggtgattctctatgacatgggcgtgagcggcgggatggacgctaaaacgatcatggtaggtttgtctttagctttaaaagcgaccgctttagggcttgctgtggcgatccctactttgatcgcttataatagcttgttgagaaaatccgatgttttgagtgaaaaattcaggatcatgaaaaca

SEQ ID NO: 606 - DNA (genomic), 279 bp, Helicobacter pylori; double-stranded, circular
  misc_feature (B) LOCATION 1...279
  hypothetical: NO
  anti-sense: NO
tcaacaaacacacattcttttatcattttggagcgtttatgcgaacgaatgcttcttaaagagcacatgctctttagtgtggatgtatcgcatgttgctttaatcttaagggaattgttttatcatagacaaggagtttttatgggcggtttttcaatggcaatgttgaaagattatgtggacgtgtttgtttttgcggtgcttggcgtggccagttttttagccttgtggtttgtgattgaaagggttattttttattctaaagtcgatttgaaagct

SEQ ID NO: 607 - DNA (genomic), 438 bp, Helicobacter pylori; double-stranded, circular
  misc_feature (B) LOCATION 1...438
  hypothetical: NO
  anti-sense: NO
atgggcggtttttcaatggcaatgttgaaagattatgtggacgtgtttgtttttgcggtgcttggcgtggccagttttttagccttgtggtttgtgattgaaagggttattttttattctaaagtcgatttgaaagcttacgatgatatagatgccctgaatttggatttaaccaagaatctaaccattctctatgtgattttttctaacgcgccttatgtgggcttattagggacggttttagggatcatggtgattttctatgacatgggcgtgagcggcgggatggacgctaaaacgatcatggtaggtttgtctttagctttaaaagcgaccgctttagggcttgctgtggcgatccctactttgatcgcttataatagcttgttgagaaaatccgatgttttgagtgaaaaattcaggatcatgaaaacatga

SEQ ID NO: 608 - DNA (genomic), 207 bp, Helicobacter pylori; double-stranded, circular
  misc_feature (B) LOCATION 1...207
  hypothetical: NO
  anti-sense: NO
gcgttttttatcatttttattttaattgtctttgcgttaaagaatctcactaattccttattgtgctttttcactctgccttttgcgtttttgggggggctgatttttatgaatctcatgggttttaacatgagcgtggcggcgttagtgggctttttggcccttttaggggtggcgagcgaaacggctattgtgatgatcatttat

SEQ ID NO: 609 - DNA (genomic), 489 bp, Helicobacter pylori; double-stranded, circular
  misc_feature (B) LOCATION 1...489
  hypothetical: NO
  anti-sense: NO
aaatctggcctcgttatggcatcaacaaaaacgccgtgttggacacgattaaattcgctctgggcggagacgctcactaccatgattaaaggcgtagaaagctaccctatttctttacgattagaagacaccgaaagaaacaccattgaaaaattaaaaaacctctatattaaaaccgcttacaattacatgcctttaagggaattagcccatgtgtattatgacaattcgccggcggtattaaaaagcgaaaagggcttgaatgtgaattttatttatattgtgccgcaaaatggtatcagctctgacacttacaggcaactggctcaaaaaacgctagaaaaaatccaattgcccagcgggtattattatgaatttagcggcgaaagccagtatttagaagaagcgtttaagaccttacaatacatcgtgccggtgagcgttttttatcatttttattttaattgtctttgcgttaaagaatctcac

SEQ ID NO: 610 - DNA (genomic), 708 bp, Helicobacter pylori; double-stranded, circular
  misc_feature (B) LOCATION 1...708
  hypothetical: NO
  anti-sense: NO
gtgagtgaggtcgcgagcgtggggggctttgtgaaggattatgaagtaacgcttcaaaacgattctttgatccgttataacttgagtttagaacaagtcgctaacgcgattaaaaattccaataacgataccggtgggggcgttattttagaaaacgggtttgaaaaaattataagatcgcatggctatatccaatctttaaacgatttagaagaaattgtggttaaaaaagaaggggctatccctttaaaaatcaaagatatagcgagcgttaggctagcgcccaaaccgcgcagaggggcggctaatctcaacggcgataaggaagtggtgggcgggattgttatggtgcgctatcacgctgacacttataaggtgcttaaagccattaaagaaaaaatcgccaccttacaagcgagtaaccctgatgtgaaaatcaccagcgtgtatgacaggagcgaattgattgaaaaaggcattgacaatttgattcacacgctcatagaagaaagcgtcattgtgctagtcattattgcgattttcttactgcatttcaggagcgctttagtggtgattatcactctgcctttaagygtgtgcatcagtttcttgctcatgsgttatttcratattgaagcgagcatcatgagtttggggggcattgcaatcgctataggggcgatggtgaatgcggcgattgtgatggtg

SEQ ID NO: 611 - DNA (genomic), 2001 bp, Helicobacter pylori; double-stranded, circular
  misc_feature (B) LOCATION 1...2001
  hypothetical: NO
  anti-sense: NO
accccaaccaaagcccctaaaatcgtgcaagagcaggttacttacccgttggtttctactttcatgagtatcgctaacattgacacggttagagggatttctagctatgaaagcggcttgatttacatcatttttaaagacggcgtcaatttgtattgggctagagatagggttttagagcaattaaacagagtaagcaatctgcctaaggacgctaaagtggaaatagggagcgattccacttctattggctgggcgtatcaatacgctttatctagcgatagcaagaatttaagcgatttgaaagtcttgcaagatttctattaccgctatgcgcttttgggggttgatggggtgagtgaggtcgcgagcgtggggggctttgtgaaggattatgaagtaacgcttcaaaacgattctttgatccgttataacttgagtttagaacaagtcgctaacgcgattaaaaattccaataacgataccggtgggggcgttattttagaaaacgggtttgaaaaaattataagatcgcatggctatatccaatctttaaacgatttagaagaaattgtggttaaaaaagaaggggctatccctttaaaaatcaaagatatagcgagcgttaggctagcgcccaaaccgcgcagaggggcggctaatctcaacggcgataaggaagtggtgggcgggattgttatggtgcgctatcacgctgacacttataaggtgcttaaagccattaaagaaaaaatcgccaccttacaagcgagtaaccctgatgtgaaaatcaccagcgtgtatgacaggagcgaattgattgaaaaaggcattgacaatttgattcacacgctcatagaagaaagcgtcattgtgctagtcattattgcgattttcttactgcatttcaggagcgctttagtggtgattatcactctgcctttaagcgtgtgcatcagtttcttgctcatgcgttatttcaatattgaagcgagcatcatgagtttggggggcattgcgatcgctatacgggcgatggtggatgcggcgatagtgatggtggagaacgctcacaagcatttgcaacacattgacacgagagacaacactcaaagggttaatgccatcatgcaaggggttaagcatgtggggggcgcgatattttttgccttaatgatcatcgtggtttctttcttgcctattttcgcgctcaccggtcaagaagaaaagctttttgcccctttagcttacaccaaaacctttgccatgctagtgggagcgctgctttctattacgatagtccctgttttaatggtatggctcattaaagggcggattttagaagagtccgaaagccccgttaacgcttttttcatgaaaatttatggcgtgagtttgagggttgtgcttaagttcagatacgcttttttaatagcgagcgtcttaggtttagggggtttagttgtagcgtataaaaaactcaactgggaatttatcccccaaatcaatgaaggggtaatcatgtatatgcctgtaactattaatggcgtgggtattgataccgctttagaatatttgaaaaaaagtaacgctgctatcaagcaactggattttgtcaaacaggtttttggtaaagtggggcgcgctaacaccagcaccgatgccgccggtttaggaatgatagaaacctacattgaattaaagccgcaaaacgaatggaaagaaaagctcagctataaagaagttagggacaaattggaaaaaaccctgcaattaaagggcttgactaattcatggacttaccccattcgtggcagaacggacatgctcttaaccggcattagaacgcccctaggcatcaagctctatggtaacgacacggacaaattacaagaattggcgatccttatggagcaacagctcaaaaccctcaaagagagtttgtccggctttgccgagcgatccaataacggctactacatcacgctggatttggaacga

SEQ ID NO: 612 - DNA (genomic), 1998 bp, Helicobacter pylori; double-stranded, circular
  misc_feature (B) LOCATION 1...1998
  hypothetical: NO
  anti-sense: NO
ccaaccaaagcccctaaaatcgtgcaagagcaggttacttacccgttggtttctactttcatgagtatcgctaacattgacacggttagagggatttctagctatgaaagcggcttgatttacatcatttttaaagacggcgtcaatttgtattgggctagagatagggttttagagcaattaaacagagtaagcaatctgcctaaggacgctaaagtggaaatagggagcgattccacttctattggctgggcgtatcaatacgctttatctagcgatagcaagaatttaagcgatttgaaagtcttgcaagatttctattaccgctatgcgcttttgggggttgatggggtgagtgaggtcgcgagcgtggggggctttgtgaaggattatgaagtaacgcttcaaaacgattctttgatccgttataacttgagtttagaacaagtcgctaacgcgattaaaaattccaataacgataccggtgggggcgttattttagaaaacgggtttgaaaaaattataagatcgcatggctatatccaatctttaaacgatttagaagaaattgtggttaaaaaagaaggggctatccctttaaaaatcaaagatatagcgagcgttaggctagcgcccaaaccgcgcagaggggcggctaatctcaacggcgataaggaagtggtgggcgggattgttatggtgcgctatcacgctgacacttataaggtgcttaaagccattaaagaaaaaatcgccaccttacaagcgagtaaccctgatgtgaaaatcaccagcgtgtatgacaggagcgaattgattgaaaaaggcattgacaatttgattcacacgctcatagaagaaagcgtcattgtgctagtcattattgcgattttcttactgcatttcaggagcgctttagtggtgattatcactctgcctttaagcgtgtgcatcagtttcttgctcatgcgttatttcaatattgaagcgagcatcatgagtttggggggcattgcgatcgctatacgggcgatggtggatgcggcgatagtgatggtggagaacgctcacaagcatttgcaacacattgacacgagagacaacactcaaagggttaatgccatcatgcaaggggttaagcatgtggggggcgcgatattttttgccttaatgatcatcgtggtttctttcttgcctattttcgcgctcaccggtcaagaagaaaagctttttgcccctttagcttacaccaaaacctttgccatgctagtgggagcgctgctttctattacgatagtccctgttttaatggtatggctcattaaagggcggattttagaagagtccgaaagccccgttaacgcttttttcatgaaaatttatggcgtgagtttgagggttgtgcttaagttcagatacgcttttttaatagcgagcgtcttaggtttagggggtttagttgtagcgtataaaaaactcaactgggaatttatcccccaaatcaatgaaggggtaatcatgtatatgcctgtaactattaatggcgtgggtattgataccgctttagaatatttgaaaaaaagtaacgctgctatcaagcaactggattttgtcaaacaggtttttggtaaagtggggcgcgctaacaccagcaccgatgccgccggtttaggaatgatagaaacctacattgaattaaagccgcaaaacgaatggaaagaaaagctcagctataaagaagttagggacaaattggaaaaaaccctgcaattaaagggcttgactaattcatggacttaccccattcgtggcagaacggacatgctcttaaccggcattagaacgcccctaggcatcaagctctatggtaacgacacggacaaattacaagaattggcgatccttatggagcaacagctcaaaaccctcaaagagagtttgtccggctttgccgagcgatccaataacggctactacatcacgctggatttggaacga

SEQ ID NO: 613 - DNA (genomic), 3108 bp, Helicobacter pylori; double-stranded, circular
  misc_feature (B) LOCATION 1...3108
  hypothetical: NO
  anti-sense: NO
atgatagaaaaaatcattgatttaagcgttaaaaacaaactccttaccactttagtcactctgctcatttttttagcctctttgtgggcaataaaaagcgttcgtttagacgctttgccggatttaagccccgctcaagtggtcgtgcaaatcacttaccccaaccaaagccctaaaatcgtgcaagagcaggttacttacccgttggtttctactttcatgagtatcgctaacattgacacggttagagggatttctagctatgaaagcggcttgatttacatcatttttaaagacggcgtcaatttgtattgggctagagatagggttttagagcaattaaacagagtaagcaatctgcctaaggacgctaaagtggaaatagggagcgattccacttctattggctgggcgtatcaatacgctttatctagcgatagcaagaatttaagcgatttgaaagtcttgcaagatttctattaccgctatgcgcttttgggggttgatggggtgagtgaggtcgcgagcgtggggggctttgtgaaggattatgaagtaacgcttcaaaacgattctttgatccgttataacttgagtttagaacaagtcgctaacgcgattaaaaattccaataacgataccggtgggggcgttattttagaaaacgggtttgaaaaaattataagatcgcatggctatatccaatctttaaacgatttagaagaaattgtggttaaaaaagaaggggctatccctttaaaaatcaaagatatagcgagcgttaggctagcgcccaaaccgcgcagaggggcggctaatctcaacggcgataaggaagtggtgggcgggattgttatggtgcgctatcacgctgacacttataaggtgcttaaagccattaaagaaaaaatcgccaccttacaagcgagtaaccctgatgtgaaaatcaccagcgtgtatgacaggagcgaattgattgaaaaaggcattgacaatttgattcacacgctcatagaagaaagcgtcattgtgctagtcattattgcgattttcttactgcatttcaggagcgctttagtggtgattatcactctgcctttaagcgtgtgcatcagtttcttgctcatgcgttatttcaatattgaagcgagcatcatgagtttggggggcattgcgatcgctataggggcgatggtggatgcggcgatagtgatggtggagaacgctcacaagcatttgcaacacattgacacgagagacaacactcaaagggttaatgccatcatgcaaggggttaagcatgtggggggcgcgatattttttgccttaatgatcatcgtggtttctttcttgcctattttcgcgctcaccggtcaagaagaaaagctttttgcccctttagcttacaccaaaacctttgccatgctagtgggagcgctgctttctattacgatagtccctgttttaatggtatggctcattaaagggcggattttagaagagtccgaaagccccgttaacgcttttttcatgaaaatttatggcgtgagtttgagggttgtgcttaagttcagatacgcttttttaatagcgagcgtcttaggtttagggggtttagttgtagcgtataaaaaactcaactgggaatttatcccccaaatcaatgaaggggtaatcatgtatatgcctgtaactattaatggcgtgggtattgataccgctttagaatatttgaaaaaaagtaacgctgctatcaagcaactggattttgtcaaacaggtttttggtaaagtggggcgcgctaacaccagcaccgatgccgccggtttaggaatgatagaaacctacattgaattaaagccgcaaaacgaatggaaagaaaagctcagctataaagaagttagggacaaattggaaaaaaccctgcaattaaagggcttgactaattcatggacttaccccattcgtggcagaacggacatgctcttaaccggcattagaacgcccctaggcatcaagctctatggtaacgacacggacaaattacaagaattggcgatccttatggagcaacagctcaaaaccctcaaagagagtttgtccgtctttgccgagcgatccaataacggctactacatcacgctggatttgaacgatgaaaatctggctcgttatggcatcaacaaaaacgccgtgttggacacgattaaattcgctctgggcggagccacgctcactaccatgattaaaggcgtagaaagctaccctatttctttacgattagaagacaccgaaagaaacaccattgaaaaattaaaaaacctctatattaaaaccgcttacaattacatgcctttaagggaattagcccatgtgtattatgacaattcgccggcggtattaaaaagcgaaaagggcttgaatgtgaattttatttatattgtgccgcaaaatggtatcagctctgacacttacaggcaactggctcaaaaaacgctagaaaaaatccaattgcccagcgggtattattatgaatttagcggcgaaagccagtatttagaagaagcgtttaagaccttacaatacatcgtgccggtgagcgtttttatcatttttattttaattgtctttgcgttaaagaatctcactaattccttattgtgctttttcactctgccttttgcgtttttgggggggctgatttttatgaatctcatgggttttaacatgagcgtggcggcgttagtgggctttttggcccttttaggggtggcgagcgaaacggctattgtgatgatcatttatttagaggatgcgtttcaaaaattcattaaaacccctttaaaagagcgaacgactgccgccttaaaagagactatcatgcatggggcggtgcttagggtaaggcccaagctgatgaccttttttagcattttagcttcgctcattcctatcatgtatagccatggcacgggtagtgagatcatgaaatccatcgctgcgcccatgctagggggcatgatgagtagcgttgttttaacgctttttattatccctacggcgtattttgtgattaaaaacgctaggatcaggaaacgtgaatattaa

SEQ ID NO: 614 - DNA (genomic), 225 bp, Helicobacter pylori; double-stranded, circular
  misc_feature (B) LOCATION 1...225
  hypothetical: NO
  anti-sense: NO
atgctcgtcttactagcgattgtgttgagtatttctacttttatcgcgcaaggtaagattaaagtcagtctccctaacgctaaaaatgcggaaaaatcccgaccaaacgatcaaaaagtggtggtcatctctgtggatgagcatgacaatattttcgtagatgacaaaccgacgaatttagaagctttgagcgctgtagtcaagcaaacagaccctaaaaccctt

SEQ ID NO: 615 - DNA (genomic), 390 bp, Helicobacter pylori; double-stranded, circular
  misc_feature (B) LOCATION 1...390
  hypothetical: NO
  anti-sense: NO
atgaaaagcatcagaagaggcgatgggctgaatgttgtccctttcattgatattatgctcgtcttactagcgattgtgttgagtatttctacttttatcgcgcaaggtaagattaaagtcagtctccctaacgctaaaaatgcggaaaaatcccagccaaacgatcaaaaagtggtggtcatctctgtggatgagcatgacaatattttcgtagatgacaaaccgacgaatttagaagctttgagcgctgtagtcaagcaaacagaccctaaaacccttatagatttaaaaagcgacaagagctctcgttttgaaacttttatcagcattatggatattttaaaagagcataatcatgaaaatttctccatctccacgcaagctcagtaa

SEQ ID NO: 616 - DNA (genomic), 159 bp, Helicobacter pylori; double-stranded, circular
  misc_feature (B) LOCATION 1...159
  hypothetical: NO
  anti-sense: NO
agtgaatctgatcgtcaataccgggaaagtcaggcaacctttatcatgggtttgcgtttcatgaccaccacttttttacaacgccaatacttaaacaccaatgaatgcgccactaaaacgagcggtgaggggcaggcttcttgtgtgagggccctaacg

SEQ ID NO: 617 - DNA (genomic), 585 bp, Helicobacter pylori; double-stranded, circular
  misc_feature (B) LOCATION 1...585
  hypothetical: NO
  anti-sense: NO
gtgggggctatgcctactatccaaatccgtgrctttggagcggggggttcagggcatagcgatgcgacgctcatgttagttaatggtattcctgtttatatggccccttacgctcacattgagctagacattttccctgttacctttcaagccattgatcgcattgatgtgatcaaaggtggaggcagcgtgcaatatgggcctaacacttatgggggtattgtcaatatcatcactaaacctatccctaatcaatgggaaaaccaagcggctgaaaggaycacttattgggctaaggctagaaacgctgggtttgccgctccccytgataaaaccggcgatccttctttcatcaagtctttaggcaacaacctcctctataacacttatgtgaggagcggagggatgatcaataagcatgtgggtatccagcgcaagctaactgggttagaggccaaggctttagggacaatagcccctctagtatttcaaactattggctggatggggtctatgacatcaatgaaagcaatgggattaaagcctattaccaatactacgattttggctatcgsccaaccggga

SEQ ID NO: 618 - DNA (genomic), 900 bp, Helicobacter pylori; double-stranded, circular
  misc_feature (B) LOCATION 1...900
  hypothetical: NO
  anti-sense: NO
tttgcgttgcataaaaaagttctgttggctttaactgccagcttgatttgccaagagtctttgttcgctaaggataaagactacactttgggcaaggtttctactgccggtaaaaaggatagatctgactattctgggcaggtcaatttgggttatagcgggattaccgcgcctaagagttggcaagatgaagaagtgaaaaaatacacaggaagccgcacggtgatctctaacaaagcgctcacccaacaagctaaccaaagcattgaagaagctttacagaatgtccccggtctgcaaattaggaatgccacaggtgtgggggctatgcctactatccaaatccgtggctttggagcggggggttcagggcatagcgatgcgacgctcatgttagttaatggtattcctgtttatatggccccttacgctcacattgagctagacattttccctgttacctttcaagccattgatcgcattgatgtgatcaaaggtggaggcagcgtgcaatatgggcctaacacttatgggggtattgtcaatatcatcactaaacctatccctaatcaatgggaaaaccaagcggctgaaaggatcacttattgggctaaggctagaaacgctgggtttgccgctccccctgataaaaccggcgatccttctttcatcaagtctttaggcaacaacctcctctataacacttatgtgaggagcggagggatgatcaataagcatgtgggtatccaagcgcaagctaactgggttagaggccaaggctttagggacaatagcccctctagtatttcaaactattggctggatggggtctatgacatcaatgaaagcaatgggattaaagcctattaccaatactacgattttgctatcgcccaaccg

SEQ ID NO: 619 - DNA (genomic), 1416 bp, Helicobacter pylori; double-stranded, circular
  misc_feature (B) LOCATION 1...1416
  hypothetical: NO
  anti-sense: NO
ttgcataaaaaagttctgttggctttaactgccagcttgatttgccaagagtctttgttcgctaaggataaagactacactttgggcaaggtttctactgccggtaaaaaggatagatctgactattctgggcaggtcaatttgggttatagcgggattaccgcgcctaagagttggcaagatgaagaagtgaaaaaatacacaggaagccgcacggtgatctctaacaaagcgctcacccaacaagctaaccaaagcattgaagaagctttacagaatgtccccggtctgcaaattaggaatgccacaggtgtgggggctatgcctactatccaaatccgtggctttggagcggggggttcagggcatagcgatgcgacgctcatgttagttaatggtattcctgtttatatggccccttacgctcacattgagctagacattttccctgttacctttcaagccattgatcgcattgatgtgatcaaaggtggaggcagcgtgcaatatgggcctaacacttatgggggtattgtcaatatcatcactaaacctatccctaatcaatgggaaaaccaagcggctgaaaggatcacttattgggctaaggctagaaacgctgggtttgccgctccccctgataaaaccggcgatccttctttcatcaagtctttaggcaacaacctcctctataacacttatgtgaggagcggagggatgatcaataagcatgtgggtatccaagcgcaagctaactgggttagaggccaaggctttagggacaatagcccctctagtatttcaaactattggctggatggggtctatgacatcaatgaaagcaatgggattaaagcctattaccaatactacgattttgctatcgcccaaccgggatcactcagcgagcaagattacaaaataaaccgcttcgctaatttgcgccccttaaaccaaaaaggcgggcgctcacaacgctttggggctgtgtatgaaaaccgcttcggggatttagacagagtgggcgggactttcagcttcacttactacgggcagttgatgactagggactttcaggtgagctctagctacaatagcgctaacatggttacttgttttagcgaagcggcatgcagggcggcagggcttccggcagggtataacttggctgtgccttattatgccactaactacaatggttgggcggaggtagaaaaccctgtgcgttccattaacaacgcttttgagcctaaagtgaatctgatcgtcaataccgggaaagtcaggcaaacctttatcatgggtttgcgtttcatgaccaccacttttttacaacgccaatacttaaacaccaatgaatgcgccactaaaacgagcggtgaggggcaggcttcttgtgtgagggccctaacgtga

SEQ ID NO: 620 - DNA (genomic), 156 bp, Helicobacter pylori; double-stranded, circular
  misc_feature (B) LOCATION 1...156
  hypothetical: NO
  anti-sense: NO
atgtctatgttcatttctaatctggctttcacgagcgaacataaggacgctatggaagtggcaaaaattgcgattttactcggatctttgatttctgggatcataggggctttatatttattcgcactagataaaagagcggctttaaagaaatag

SEQ ID NO: 621 - DNA (genomic), 243 bp, Helicobacter pylori; double-stranded, circular
  misc_feature (B) LOCATION 1...243
  hypothetical: NO
  anti-sense: NO
gcgaaaagcttaaaatcactgcgcgccctaaaggcatcggctggatggcatattttaggggctgggcttttagcagggattggctttaccatgtctatgttcatttctaatctggctttcacgagcgaacataaggacgctatggaagtggcaaaaattgcgattttactcggatctttgatttctgggatcataggggctttatatttattcgcactagataaaagagcggctttaaagaaa

SEQ ID NO: 622 - DNA (genomic), 1002 bp, Helicobacter pylori; double-stranded, circular
  misc_feature (B) LOCATION 1...1002
  hypothetical: NO
  anti-sense: NO
aaaattatgggtttgaaaataaaaattttaaggttgtctatgaatctcaaaaaaacagaaaacgcgctcagtttgacgcttaaaaacttcattaaaagcgagtcttttggagggattttcctctttttgaacgccgttttagcgatggtggtggctaattcgtttttaaaagaaagttattttgcgctatggcacaccccttttgggtttcaagtaggggatttttttatcggctttagtttgcacaactggattgatgatgtcttaatggcgttattctttttaatgataggcttagagatcaagcgagaattgttgtttggggaattatccagttttaaaaaagcttctttccctgtgatcgcagccatagggggcatgatagctccaggattgatttatttttttcttaacgccaacacgccctctcagcatggttttgggatccctatggcaacggatattgcgttcgctttaggcgtgatcatgcttttaggcaagagggtgccaaccgccttaaaggtttttttaatcactctagcggtggctgatgacttaggggctattgtggtgatcgcgctcttttataccacgaatttaaaattcgcatggcttttaggggctttaggggtggttcttgttttagccatattgaaccgcctgaatatccgatcgctcatcccttacttgcttttaggggtgttgctttggttttgcgtgcatcaaagcggtatccatgcgacgatcgctgcggtggttctagcttttatgataccggtgaaaatccctaaagattctaaaaatgtagagcttttggaattaggcaaacgatacgcagagacgagttcaggagtgcttttaaccaaagagcagcaagaaatcttgcattctattgaagaaaaagcgagtgctttacaaagccccttagaaagattggagcattttctagcccccatcagcgggtatttcatcatgcccttattcgcgtttgcaacgctgggg

SEQ ID NO: 623 - DNA (genomic), 1182 bp, Helicobacter pylori; double-stranded, circular
  misc_feature (B) LOCATION 1...1182
  hypothetical: NO
  anti-sense: NO
atgaatctcaaaaaaacagaaaacgcgctcagtttgacgcttaaaaacttcattaaaagcgagtcttttggagggattttcctctttttgaacgccgttttagcgatggtggtggctaattcgtttttaaaagaaagttattttgcgctatggcacaccccttttgggtttcaagtaggggatttttttatcggctttagtttgcacaactggattgatgatgtcttaatggcgttattctttttaatgataggcttagagatcaagcgagaattgttgtttggggaattatccagttttaaaaaagcttctttccctgtgatcgcagccatagggggcatgatagctccaggattgatttatttttttcttaacgccaacacgccctctcagcatggttttgggatccctatggcaacggatattgcgttcgctttaggcgtgatcatgcttttaggcaagagggtgccaaccgccttaaaggtttttttaatcactctagcggtggctgatgacttaggggctattgtggtgatcgcgctcttttataccacgaatttaaaattcgcatggcttttaggggctttaggggtggttcttgttttagccatattgaaccgcctgaatatccgatcgctcatcccttacttgcttttaggggtgttgctttggttttgcgtgcatcaaagcggtatccatgcgacgatcgctgcggtggttctagcttttatgataccggtgaaaatccctaaagattctaaaaatgtagagcttttggaattaggcaaacgatacgcagagacgagttcaggagtgcttttaaccaaagagcagcaagaaatcttgcattctattgaagaaaaagcgagtgctttacaaagccccttagaaagattggagcattttctagcccccatcagcgggtatttcatcatgcccttattcgcgtttgcaaacgctggggtgagcggtgattctagcatcaatttagaagtggataaggtgcttttaggggttattttaggactttgtttgggcaagcctttagggattttcttaatcactttcataagcgaaaagcttaaaatcactgcgcgccctaaaggcatcggctggatggcatattttaggggctgggcttttagcagggattggctttaccatgtctatgttcatttctaa

SEQ ID NO: 624 - DNA (genomic), 1215 bp, Helicobacter pylori; double-stranded, circular
  misc_feature (B) LOCATION 1...1215
  hypothetical: NO
  anti-sense: NO
atgggtttgaaaataaaaattttaaggttgtctatgaatctcaaaaaaacagaaaacgcgctcagtttgacgcttaaaaacttcattaaaagcgagtcttttggagggattttcctctttttgaacgccgttttagcgatggtggtggctaattcgtttttaaaagaaagttattttgcgctatggcacaccccttttgggtttcaagtaggggatttttttatcggctttagtttgcacaactggattgatgatgtcttaatggcgttattctttttaatgataggcttagagatcaagcgagaattgttgtttggggaattatccagttttaaaaaagcttctttccctgtgatcgcagccatagggggcatgatagctccaggattgatttatttttttcttaacgccaacacgccctctcagcatggttttgggatccctatggcaacggatattgcgttcgctttaggcgtgatcatgcttttaggcaagagggtgccaaccgccttaaaggtttttttaatcactctagcggtggctgatgacttaggggctattgtggtgatcgcgctcttttataccacgaatttaaaattcgcatggcttttaggggctttaggggtggttcttgttttagccatattgaaccgcctgaatatccgatcgctcatcccttacttgcttttaggggtgttgctttggttttgcgtgcatcaaagcggtatccatgcgacgatcgctgcggtggttctagcttttatgataccggtgaaaatccctaaagattctaaaaatgtagagcttttggaattaggcaaacgatacgcagagacgagttcaggagtgcttttaaccaaagagcagcaagaaatcttgcattctattgaagaaaaagcgagtgctttacaaagccccttagaaagattggagcattttctagcccccatcagcgggtatttcatcatgcccttattcgcgtttgcaaacgctggggtgagcggtgattctagcatcaatttagaagtggataaggtgcttttaggggttattttaggactttgtttgggcaagcctttagggattttcttaatcactttcataagcgaaaagcttaaaatcactgcgcgccctaaaggcatcggctggatggcatattttaggggctgggcttttagcagggattggctttaccatgtctatgttcatttctaa

SEQ ID NO: 625 - DNA (genomic), 1350 bp, Helicobacter pylori; double-stranded, circular
  misc_feature (B) LOCATION 1...1350
  hypothetical: NO
  anti-sense: NO
atgggtttgaaaataaaaattttaaggttgtctatgaatctcaaaaaaacagaaaacgcgctcagtttgacgcttaaaaacttcattaaaagcgagtcttttggagggattttcctctttttgaacgccgttttagcgatggtggtggctaattcgtttttaaaagaaagttattttgcgctatggcacaccccttttgggtttcaagtaggggatttttttatcggctttagtttgcacaactggattgatgatgtcttaatggcgttattctttttaatgataggcttagagatcaagcgagaattgttgtttggggaattatccagttttaaaaaagcttctttccctgtgatcgcagccatagggggcatgatagctccaggattgatttatttttttcttaacgccaacacgccctctcagcatggttttgggatccctatggcaacggatattgcgttcgctttaggcgtgatcatgcttttaggcaagagggtgccaaccgccttaaaggtttttttaatcactctagcggtggctgatgacttaggggctattgtggtgatcgcgctcttttataccacgaatttaaaattcgcatggcttttaggggctttaggggtggttcttgttttagccatattgaaccgcctgaatatccgatcgctcatcccttacttgcttttaggggtgttgctttggttttgcgtgcatcaaagcggtatccatgcgacgatcgctgcggtggttctagcttttatgataccggtgaaaatccctaaagattctaaaaatgtagagcttttggaattaggcaaacgatacgcagagacgagttcaggagtgcttttaaccaaagagcagcaagaaatcttgcattctattgaagaaaaagcgagtgctttacaaagccccttagaaagattggagcattttctagcccccatcagcgggtatttcatcatgcccttattcgcgtttgcaaacgctggggtgagcgttgattctagcatcaatttagaagtggataaggtgcttttaggggttattttagggctttgtttgggcaagcctttagggattttcttaatcactttcataagcgaaaagcttaaaatcactgcgcgccctaaaggcatcggctggtggcatattttaggggctgggcttttagcagggattggctttaccatgtctatgttcatttctaatctggctttcacgagcgaacataaggacgctatggaagtggcaaaaattgcgattttactcggatctttgatttctgggatcataggggctttatatttattcgcactagataaaagagcggctttaaagaaatag

SEQ ID NO: 626 - DNA (genomic), 627 bp, Helicobacter pylori; double-stranded, circular
  misc_feature (B) LOCATION 1...627
  hypothetical: NO
  anti-sense: NO
atggggtttaaccgcttggtggatagagacattgataaggataacccaaggacgaaaaaccgcccgagcgtggatggtaggatcagcgttaaaggcatggtcatttttagcgtttcaaacgctcttttgttcgtgggagtgagttatttcatcaaccctttagctttcaagctttcgttaccttttttaatcattttagggggttattcgtatttcaagcgcttttcttctttggcgcattttgtcgtgggtttggctttgggtttagcccccattgcaggaagcgtggcggttttaggggatattcctttatggaatgtctttttggcyttaggggtgatgttgtgggtggctgggtttgatttgctctattctttacaggatatggagtttgataaagaaaggggcttgttttccattcctagccaattaggggaaaaatggtgcttgaatctttcaaggctctcgcaccttgtggcactgatctgctggctttgttttgtgaaatgctatcatggggggctttttgcgtatttgggcttaggggtttcagccttgatcttactctatgagcagattttagtggccagagattataaaaacattcctaaaagccttttttgtgag

SEQ ID NO: 627 - DNA (genomic), 693 bp, Helicobacter pylori; double-stranded, circular
  misc_feature (B) LOCATION 1...693
  hypothetical: NO
  anti-sense: NO
atggggtttaaccgcttggtggatagagacattgataaggataacccaaggacgaaaaaccgcccgagcgtggatggtaggatcagcgttaaaggcatggtcatttttagcgtttcaaacgctcttttgttcgtgggagtgagttatttcatcaaccctttagctttcaagctttcgttaccttttttaatcattttaggggggtattcgtatttcaagcgcttttcttctttggcgcattttgtcgtgggtttggctttgggtttagcccccattgcaggaagcgtggcggttttaggggatattcctttatggaatgtctttttggctttaggggtgatgttgtgggtggctgggtttgatttgctctattctttacaggatatggagtttgataaagaaaggggcttgttttccattcctagccaattaggggaaaaatggtgcttgaatctttcaaggctctcgcaccttgtggcactgatctgctggctttgttttgtgaaatgctatcatggggggctttttgcgtatttgggcttaggggtttcagccttgatcttactctatgagcagattttagtggccagagattataaaaacattcctaaagccttttttgtgagtaatggctatttgggggtggtgttttttatttttatcgtccttgatgtggggttcaagcatgcatga

SEQ ID NO: 628 - DNA (genomic), 720 bp, Helicobacter pylori; double-stranded, circular
  misc_feature (B) LOCATION 1...720
  hypothetical: NO
  anti-sense: NO
aaccataataaaggggcggaaatttcgctatggggtttaacccgcttggtggatagagacattgataaggataacccaaggacgaaaaaccgcccgagcgtggatggtaggatcagcgttaaaggcatggtcatttttagcgtttcaaacgctattttgtttgtgggatggagtaatttcatcaaccctttagctttcaagctttcgttaccttttttaatcattttaggggggtattcgtatttcaagcgcttttcttctttggcgcattttgtcgtgggtttggctttgggtttagcccccattgcaggaagcgtggcggttttaggggatattcctttatggaatgtctttttggctttaggggtgatgttgtgggtggctgggtttgatttgctctattctttacaggatatggagtttgataaagaaaggggcttgttttccattcctagccaattaggggaaaaatggtgcttgaatctttcaaggctctcgcaccttgtggcactgatctgctggctttgttttgtgaaatgctatcatggggggctttttgcgtatttgggcttaggggtttcagccttgatcttactctatgagcagattttagtggccagagattataaaaacattcctaaagccttttttgtgagtaatggctatttgggggtggtgttttttatttttatcgtccttgatgtggggttcaagcatgca

SEQ ID NO: 629 - DNA (genomic), 885 bp, Helicobacter pylori; double-stranded, circular
  misc_feature (B) LOCATION 1...885
  hypothetical: NO
  anti-sense: NO
ttgcttaaaaaaatcacgcaccaaatcaaagctttaagcgaattggtcgcattagagcatacgatattttctagcatgtttttactcatggctatggtcataagctcctatcaaaaaaatcaaacgctcttttttgggttagaaaccttaatcctttgttttttagccttattaggggcgagaaatttcgctatggggtttaaccgcttggtggatagagacattgataaggataacccaaggacgaaaaaccgcccgagcgtggatggtaggatcagcgttaaaggcatggtcatttttagcgtttcaaacgctcttttgttcgtgggagtgagttatttcatcaaccctttagctttcaagctttcgttaccttttttaatcattttaggggggtattcgtatttcaagcgcttttcttctttggcgcattttgtcgtgggtttggctttgggtttagcccccattgcaggaagcgtggcggttttaggggatattcctttatggaatgtctttttggctttaggggtgatgttgtgggtggctgggtttgatttgctctattctttacaggatatggagtttgataaagaaaggggcttgttttccattcctagccaattaggggaaaaatggtgcttgaatctttcaaggctctcgcaccttgtggcactgatctgctggctttgttttgtgaaatgctatcatggggggctttttgcgtatttgggcttaggggtttcagccttgatcttactctatgagcagattttagtggccagagattataaaaacattcctaaagccttttttgtgagtaatggctatttgggggtggtgttttttatttttatcgtccttgatgtggggttcaagcatgcatga

SEQ ID NO: 630 - DNA (genomic), 711 bp, Helicobacter pylori; double-stranded, circular
  misc_feature (B) LOCATION 1...711
  hypothetical: NO
  anti-sense: NO
gtgaaaaccttaggattgtcttcgcttggtgggactttagaattttacgattttatcatctttgtattttttacaagtatcattgccaaacactttttcccaaacacgcttagccctatctggtctgaaatcaacacttatgggatctttgctgcaggttatctggcgcgcccgcttggtggcatagtgatggcccactttggggataaattcggtcgtaaaaacatgttcatgctctctattttattaatggtaatcccaacctttgcgctagctttgatgccaacttttaatgatttggtgggttttggcgtggatagcatggggcttacccctaaaaacgctcattatcttggttacatagctcctgtttttttrgtrcttgttaggatttgtcaaggcgtcgctgtgggtggtgaattgcctggcgcttgggtttttgtccatgaacatgccccacaaggacaaaaaaacacttatatcggttttttaaccgcttccgtagtttctgggattttgcttgggagtttggtttatatcgggatttacatggtttttgacaagcctgttgttgaagattgggcttggcgggttgcctttgggcttggaggaatttttggtatcatttctgtgtatttgaggcgctttttagaagaaactcccgtttttcagcaaatgaagcagggacgatgccttagtcaaattcccgct

SEQ ID NO: 631 - DNA (genomic), 1359 bp, Helicobacter pylori; double-stranded, circular
  misc_feature (B) LOCATION 1...1359
  hypothetical: NO
  anti-sense: NO
gtgaaaaccttaggattgtcttcgcttggtgggactttagaattttacgattttatcatctttgtattttttacaagtatcattgccaaacactttttcccaaacacgcttagccctatctggtctgaaatcaacacttatgggatctttgctgcaggttatctggcgcgcccgcttggtggcatagtgatggcccactttggggataaattcggtcgtaaaaacatgttcatgctctctattttattaatggtaatcccaacctttgcgctagctttgatgccaacttttaatgatttggtgggttttggcgtggatagcatggggcttacccctaaaaacgctcattatcttggttacatagctcctgtttttttggtgcttgttaggatttgtcaaggcgtcgctgtgggtggtgaattgcctggcgcttgggtttttgtccatgaacatgccccacaaggacaaaaaaacacttatatcggttttttaaccgcttccgtagtttctgggattttgcttgggagtttggtttatatcgggatttacatggtttttgacaagcctgttgttgaagattgggcttggcgggttgcctttgggcttggaggaatttttggtatcatttctgtgtatttgaggcgctttttagaagaaactcccgtttttcagcaaatgaagcaggacgatgccttagtcaaattcccgcttaaagaggtgtttaaaaattccctctttggtatatcaatctccatgcttatcacttgggttttaaccgcttgtattttgatttttatcctttttgtcccgaattttacccttacgcatcccaattttcatttcactccgtttgaaaaaacctattttcaaattctaggacttgttggtattgtaagttctattattttcaccgggtttttggctgataaaatcaaaccgcacaaagtttgcatggcttttagcgcggcctttgggttttttggctttttattctttaaggaattttattctaacgcgccaagtttagtcaatactataattttatactttttagcttgcttttgcgcgggcattatgaatttttgccccattttcatgagcgatgtgtttagcgctagaatccgttttagcgggatttcctttgcttataacatagcctatgctataaccgctggctttacccctcaactttcaagctggttaaacgcaaaagctatagcagtgcctgaaagtttgcaaagttatggtttaagcttttatatccttatagtttctttaattgcttttattacatcgcttttaatggcgccaatttatcacaaatctaatacccaacacgaagtgtcgcccacggcatga

SEQ ID NO: 632 - DNA (genomic), 1383 bp, Helicobacter pylori; double-stranded, circular
  misc_feature (B) LOCATION 1...1383
  hypothetical: NO
  anti-sense: NO
tcaataaaacatttaggcaaaaaagaggtgaaaaccttaggattgtcttcgcttggtgggactttagaattttacgattttatcatctttgtattttttacaagtatcattgccaaacactttttcccaaacacgcttagccctatctggtctgaaatcaacacttatgggatctttgctgcaggttatctggcgcgcccgcttggtggcatagtgatggcccactttggggataaattcggtcgtaaaaacatgttcatgctctctattttattaatggtaatcccaacctttgcgctagctttgatgccaacttttaatgatttggtgggttttggcgtggatagcatggggcttacccctaaaaacgctcattatcttggttacatagctcctgtttttttggtgcttgttaggatttgtcaaggcgtcgctgtgggtggtgaattgcctggcgcttgggtttttgtccatgaacatgccccacaaggacaaaaaaacacttatatcggttttttaaccgcttccgtagtttctgggattttgcttgggagtttggtttatatcgggatttacatggtttttgacaagcctgttgttgaagattgggcttggcgggttgcctttgggcttggaggaatttttggtatcatttctgtgtatttgaggcgctttttagaagaaactcccgtttttcagcaaatgaagcaggacgatgccttagtcaaattcccgcttaaagaggtgtttaaaaattccctctttggtatatcaatctccatgcttatcacttgggttttaaccgcttgtattttgatttttatcctttttgtcccgaattttacccttacgcatcccaattttcatttcactccgtttgaaaaaacctattttcaaattctaggacttgttggtattgtaagttctattattttcaccgggtttttggctgataaaatcaaaccgcacaaagtttgcatggcttttagcgcggcctttgggttttttggctttttattctttaaggaattttattctaacgcgccaagtttagtcaatactataattttatactttttagcttgcttttgcgcgggcattatgaatttttgccccattttcatgagcgatgtgtttagcgctagaatccgttttagcgggatttcctttgcttataacatagcctatgctataaccgctggctttacccctcaactttcaagctggttaaacgcaaaagctatagcagtgcctgaaagtttgcaaagttatggtttaagcttttatatccttatagtttctttaattgcttttattacatcgcttttaatggcgccaatttatcacaaatctaatacccaacacgaagtgtcgcccacggca

SEQ ID NO: 633 - DNA (genomic), 1353 bp, Helicobacter pylori; double-stranded, circular
  misc_feature (B) LOCATION 1...1353
  hypothetical: NO
  anti-sense: NO
atggaaacgattgattcggtggtgcgtttattatctaatttggtgtgggggattcccatgcaaattttattagtaggcaccggtttgtttttaaccttctatcttaggggtttgcaattcagtaaaatcttttatgcgatcaaaatcctttttgacaaagagtcccaatctaagggcgatatttcgcaattttccgccctcatgctttctttaggagcaaccgtaggcattgggagtatcgtaggcgtagcgaccgctatcagcatcgcagggccaggagcggtgttttggatgtgggttactgggcttgttggcatggcgactaagtattctgaggggattttagcggtgaaatacagggaaaaaggggcgtttggatacaacggagggcccatgtattacatcaaaaacggccttaacatgcccaaactcgccatggcgtttgcgatttttacgattattgcgagcattggcaccggtaacatgacgcaatccaatgcggtttcttccattttaagcgaacaagcgaacttgcctaattgggtttcaggtttattgctcacccttttaaccgctgttattgtcataggggggatcaaatccattggtaaattcacttcttacttagctcctgtcatggtgcttttatatttaattgctattatttatattattgttagccattttgatttagcccttcaagcgatcaaactcatttttgaagaagcttttaaccctaaacccgttgtaggcggagcgagcggcacgttggtagcgacaatgataaaaacgggcgtagctagggggttgtattctaatgaagcggggttagggagctcagccattattgccgcaagcgctcaaacacaccacccggtgcgccaagccttagtgtccatgctccaaacttttatcgtgactttagtggtgtgttcggcgacagcgagcgtgattttaatggcgccagaatacaacaccttgctccctaatggggaaaaattgagcgctaatttgctcactttaaaaagcacggagtattttctaggctcattagggacggtggtgatttttacaaccatgatcttttttgcttactctacgatcattggttgggcttattatggggaaaaatgcgctgaatacgcctttggtgaaaaaaaagtgaaatattaccgcttgatctttttagcgagtgtgatggtgggggctatggctaaaattgattttgtgtggaatttagcggatctttctaacgggcttatggctatccctaatttaatcgctttaatcttattgcataaagtggtttattctgaaactcgttggtattttagcaagcattctaacaagtaa

SEQ ID NO: 634 - DNA (genomic), 474 bp, Helicobacter pylori; double-stranded, circular
  misc_feature (B) LOCATION 1...474
  hypothetical: NO
  anti-sense: NO
ttgtggcttccaattcccgaatgtcttcttggcctaaaacaatacaagaggggtattgtaatcattaaatcggagttaaaaaaactaggtcgtttgagtcaggcggaaatctctgtgggcgttatttttattttagcgtctttagggtggatttttttagacacgattttaaaatcttggggcattaaaatagataaaattgattccgtgatcgctatgggggtttctgcgcttttattcattttgcccgctaaccatcagggcgataggctcattgattggggtgtcgctaaaaaactcccttgggatgtgttgcttttatttggcggcgggttatccttgagcgcgcaattttctaaaaccgggttgagtttgtggattgggcatttagtctctggcttttccagtttaccgattttattcatcattgtcatggtaactttaatggtcattttcttaaaccgaaattacttc

SEQ ID NO: 635 - DNA (genomic), 705 bp, Helicobacter pylori; double-stranded, circular
  misc_feature (B) LOCATION 1...705
  hypothetical: NO
  anti-sense: NO
ttgggtaaggaagtcgttaaatcggagttaaaaaaactacgtcgtttgagtcaggcggaaatctctgtgggcgttatttttattttagcgtctttagggtggatttttttagacacgattttaaaatcttggggcattaaaatagataaaattgattccgtgatcgctatgggggtttctgcgcttttattcattttgcccgctaaccatcagggcgataggctcattgattggggtgtcgctaaaaaactcccttgggatgtgttgcttttatttggcggcgggttagccttgagcgcgcaattttctaaaaccgggttgagtttgtggattgggcatttagtctctggcttttcgcatttaccgattttattcatcattgtcatggtaactttaatggtcattttcttaaccgaaatcacttctaacaccgccactgctgcggcgtttttaccggtgattggaggggttgcgatgggcatgggctatgaaagccatcagagcttgttattgaccattcctgtagccttgagtgcgacttgcgcgttcatgctccctgtggccaccccacccaatgcgatagcttatggctctgggtatgttaaaataacggacatgattaaagccggtttgtggcttaatttggtgggagtcgttttgattagcgcgtttagctattgtttagtttcgttaatatttaattga

SEQ ID NO: 636 - DNA (genomic), 306 bp, Helicobacter pylori; double-stranded, circular
  misc_feature (B) LOCATION 1...306
  hypothetical: NO
  anti-sense: NO
ggttttgcaagccttacgcttttagtgaaaaactcttttttagatgaaatgggaaaactttatgtggtgagcgctaaggctaagggctgttcagtggggcgtattttttatgcgcatgtgtttcgtaatgcgattttattagtggtggcgggtttcccgcaggcttttttgggcatgttttttagctcaagtttattgatagagattgttttcagtttagacgggttagggcttttagggtatgaaagcattgtgatagggattattccgttgtgtttggttcgctttatattttcacgcttttag

SEQ ID NO: 637 - DNA (genomic), 300 bp, Helicobacter pylori; double-stranded, circular
  misc_feature (B) LOCATION 1...300
  hypothetical: NO
  anti-sense: NO
tttgcaagccttacgcttttagtgaaaaactcttttttagatgaaatgggaaaactttatgtggtgagcgctaaggctaagggctgttcagtggggcgtattttttatgcgcatgtgtttcgtaatgcgattttattagtggtggcgggtttcccgcaggcttttttgggcatgttttttagctcaagtttattgatagagattgttttcagtttagacgggttagggcttttagggtatgaaagcattgtgatagggattattccgttgtgtttggttcgctttatattttcacgcttt

SEQ ID NO: 638 - DNA (genomic), 555 bp, Helicobacter pylori; double-stranded, circular
  misc_feature (B) LOCATION 1...555
  hypothetical: NO
  anti-sense: NO
atgattgcttacatcctcaaacgcttgcttttgattatccctactttattagccatcatgacgattaatttttttctgatccaatccgccccaggaggccctattgagcaaatgatggctaaaatcaataacacgcagtccaaagagattcaaggcgttgttaaagagcgttcgtatagggcgtctcaagggttggagagtgatttgttagaaaatttaaaaaaactctatggttttgacaagcccataggggagcgctacctcctcatgctcaaaaaatatctgcaatttgattttggggagagtttttaccgccagattaaggtgatagatttgattaaggaaaaattgccggtatccatttcgttagggttttttagcacgcttttgatttatcttatttctatccctttagggattttcaaggccaaacgcaataacgagcctttagacgtgctaagcagcgtggtgatcattgtcgctaacgctatcccggcctttttatttgcggtggtgttgatcgtgttttttgctggagggaattattggcattgg

SEQ ID NO: 639 - DNA (genomic), 1047 bp, Helicobacter pylori; double-stranded, circular
  misc_feature (B) LOCATION 1...1047
  hypothetical: NO
  anti-sense: NO
atgattgcttacatcctcaaacgcttgcttttgattatccctactttattagccatcatgacgattaatttttttctgatccaatccgccccaggaggccctattgagcaaatgatggctaaaatcaataacacgcagtccaaagagattcaaggcgttgttaaagagcgttcgtatagggcgtctcaagggttggagagtgatttgttagaaaatttaaaaaaactctatggttttgacaagcccataggggagcgctacctcctcatgctcaaaaaatatctgcaatttgattttggggagagtttttaccgccagattaaggtgatagatttgattaaggaaaaattgccggtatccatttcgttagggttttttagcacgcttttgatttatcttatttctatccctttagggattttcaaggccaaacgcaataacgagcctttagacgtgctaagcagcgtggtgatcattgtcgctaacgctatcccggcctttttatttgcggtggtgttgatcgtgttttttgctggagggaattattggcattggtttcctttaaaagggctagtgagcgataattttgaaagtttgagcgcgttaggtaaaatcaaggattatttatggcatatcactttgcccgttctttgcatttctttagggggttttgcaagccttacgcttttagtgaaaaactcttttttagatgaaatgggaaaactttatgtggtgagcgctaaggctaagggctgttcagtggggcgtattttttatgcgcatgtgtttcgtaatgcgattttattagtggtggcgggtttcccgcaggcttttttgggcatgttttttagctcaagtttattgatagagattgttttcagtttagacgggttagggcttttagggtatgaaagcattgtgagtagggattatcctgttgtgtttggttcgctttatattttcacgcttttaggcttggtggcgagtttgataagcgatttgctctgcgtggtgattgaccctaggattgattttgaaaagcgttga

SEQ ID NO: 640 - DNA (genomic), 504 bp, Helicobacter pylori; double-stranded, circular
  misc_feature (B) LOCATION 1...504
  hypothetical: NO
  anti-sense: NO
attatggcgaaaaaaaaacataaaattcctactttaaaatattttttacgttctttaaagcaaatctataggctcatcactttcaaggaaaaaatgatttttttcctgcttgtgttgatggcggttttttcttcttttgtggaagtgatgtccctaactcttctgatgccttttatcactctcgcttccgatcccagtagggctttagacgataaagattggaaaatggtctatgattttttccatttttcatctcccgttcgtctcatgtatttctttagtttctgtttggtggggatttatttgtttaggatgttttatggggtgttttttacctatttaagagggcgtttttcaaacaagaaggcttatcaaatcaaacaacaactcttcttgcaacacatcaaaaacaactatttatcgcacctcaaccacaactttggattctttaagagacattatcaacacgtaaagcggagggcatgttatgagttcacgcttttg

SEQ ID NO: 641 - DNA (genomic), 1131 bp, Helicobacter pylori; double-stranded, circular
  misc_feature (B) LOCATION 1...1131
  hypothetical: NO
  anti-sense: NO
aaaggttttttaggtgttaaaaaagttattgtttttattaaaaaaaagggtgagatggtcgtcaactccaaagtgcaaacgcttaaagtcttttcaaaatttttcagcaatttcaaaatcactaaactcaaagacaaccacgaagaagcccacaaactttttggagaaaatagccgtaaagcccatgacactgagatcatttactccactttgcaagtggtccccaggtattcaatagaaaccgtgggctttagtttgttgattttagcggtcgcttacatcttattcaaatacggcgaagctagaatggtactccctaccatttctatgtatgccctagcgctttatcgcatactcccttctgtaactggagtgatcagctattataatgaaatcgcttacaaccagcttgcaaccaatgttgtttttaaaagcctttctaagaccatcgttgaagaggatttagtccctttagactttaatgaaaaaatcactctccaaaacatttcattcgcttataagtcaaaacacccggttttaaaaaatttcaacctcaccattcaaaaaggtcaaaaaatcgctctcataggccatagcgggtgcggaaaatccacgctggcggatattattatggggcttacctaccctaaaagtggggaaatttttattgataacacccttttaaccagcgaaaacaggcgctcatggcgtaaaaaaataggctatatcccccaaaatatttacctttttgatggcactgtgggggataatatcgcttttgggagtgctatagatgaaaaacgcttgattaaggtgtgcaaaatggctcatatctatgattttttatgcgagcatgagggccttaaaacccaagtgggcgaagggggcgctaagcttagcggcggtcaaaaacagcgcataggcatcgcaagagccttatacgataaccctgaaattttggttttagatgaagccacttcagccctagacaatgaaaccgagagtaaaatcatggatgaaatctatcaaatcgctaaaaataaaaccctaatcgttatcgcccaccgcttaagcacgattgaacgctgtgaagtcatcattgacatgagccaacacaaagacaatctcggc

SEQ ID NO: 642 - DNA (genomic), 1128 bp, Helicobacter pylori; double-stranded, circular
  misc_feature (B) LOCATION 1...1128
  hypothetical: NO
  anti-sense: NO
ggttttttaggtgttaaaaaagttattgtttttattaaaaaaaagggtgagatggtcgtcaactccaaagtgcaaacgcttaaagtcttttcaaaatttttcagcaatttcaaaatcactaaactcaaagacaaccacgaagaagcccacaaactttttggagaaaatagccgtaaagcccatgacactgagatcatttactccactttgcaagtggtccccaggtattcaatagaaaccgtgggctttagtttgttgattttagcggtcgcttacatcttattcaaatacggcgaagctagaatggtactccctaccatttctatgtatgccctagcgctttatcgcatactcccttctgtaactggagtgatcagctattataatgaaatcgcttacaaccagcttgcaaccaatgttgtttttaaaagcctttctaagaccatcgttgaagaggatttagtccctttagactttaatgaaaaaatcactctccaaaacatttcattcgcttataagtcaaaacacccggttttaaaaaatttcaacctcaccattcaaaaaggtcaaaaaatcgctctcataggccatagcgggtgcggaaaatccacgctggcggatattattatggggcttacctaccctaaaagtggggaaatttttattgataacacccttttaaccagcgaaaacaggcgctcatggcgtaaaaaaataggctatatcccccaaaatatttacctttttgatggcactgtgggggataatatcgcttttgggagtgctatagatgaaaaacgcttgattaaggtgtgcaaaatggctcatatctatgattttttatgcgagcatgagggccttaaaacccaagtgggcgaagggggcgctaagcttagcggcggtcaaaaacagcgcataggcatcgcaagagccttatacgataaccctgaaattttggttttagatgaagccacttcagccctagacaatgaaaccgagagtaaaatcatggatgaaatctatcaaatcgctaaaaataaaaccctaatcgttatcgcccaccgcttaagcacgattgaacgctgtgaagtcatcattgacatgagccaacacaaagacaatctcggc

SEQ ID NO: 643 - DNA (genomic), 1647 bp, Helicobacter pylori; double-stranded, circular
  misc_feature (B) LOCATION 1...1647
  hypothetical: NO
  anti-sense: NO
atgatttttttcctgcttgtgttgatggcggttttttcttcttttgtggaagtgatgtccctaactcttctgatgccttttatcactctcgcttccgatcccagtagggctttagacgataaagattggaaaatggtctatgattttttccatttttcatctcccgttcgtctcatgtatttctttagtttctgtttggtggggatttatttgtttaggatgttttatggggtgttttttacctatttaagagggcgtttttcaaacaagaaggcttatcaaatcaaacaacaactcttcttgcaacacatcaaaaacaactatttatcgcacctcaaccacaacttggattctttaagagacattatcaacaataaagcggagggcatgtttatgagctttaacgcttttttgagtttattgaccgaaataaccgtgatcgtttttttctattccacgctcatattgaccaattggaaaataacgctcgtttttaccacgattctcgccttgcaaattttttttattgtcaaaaaagttaccgtccttatcaaaaaaaagggtgagatggccgccaaatccaaagcgcaaacgcttaaagtcttttcaaaatttttcagcaatttcaaaatcactaaactcaaagacaaccacgaagaagcccacaaactttttggagaaaatagccgtaaagcccatgacactgagatcatttactccactttgcaagtggtccccaggtattcaatagaaaccgtgggctttagtttgttgattttagcggtcgcttacatcttattcaaatacggcgaagctagaatggtactccctaccatttctatgtatgccctagcgctttatcgcatactcccttctgtaactggagtgatcagctattataatgaaatcgcttacaaccagcttgcaaccaatgttgtttttaaaagcctttctaagaccatcgttgaagaggatttagtccctttagactttaatgaaaaaatcactctccaaaacatttcattcgcttataagtcaaaacacccggttttaaaaaatttcaacctcaccattcaaaaaggtcaaaaaatcgctctcataggccatagcgggtgcggaaaatccacgctggcggatattattatggggcttacctaccctaaaagtggggaaatttttattgataacacccttttaaccagcgaaaacaggcgctcatggcgtaaaaaaataggctatatcccccaaaatatttacctttttgatggcactgtgggggataatatcgcttttgggagtgctatagatgaaaaacgcttgattaaggtgtgcaaaatggctcatatctatgattttttatgcgagcatgagggccttaaaacccaagtgggcgaagggggcgctaagcttagcggcggtcaaaaacagcgcataggcatcgcaagagccttatacgataaccctgaaattttggttttagatgaagccacttcagccctagacaatgaaaccgagagtaaaatcatggatgaaatctatcaaatcgctaaaaataaaaccctaatcgttatcgcccaccgcttaagcacgattgaacgctgtgaagtcatcattgacatgagccaacacaaagacaatctcggctaa

SEQ ID NO: 644 - DNA (genomic), 1737 bp, Helicobacter pylori; double-stranded, circular
  misc_feature (B) LOCATION 1...1737
  hypothetical: NO
  anti-sense: NO
atggcgaaaaaaaaacataaaattcctactttaaaatattttttacgttctttaaagcaaatctataggctcatcactttcaaggaaaaaatgatttttttcctgcttgtgttgatggcggttttttcttcttttgtggaagtgatgtccctaactcttctgatgccttttatcactctcgcttccgatcccagtagggctttagacgataaagattggaaaatggtctatgattttttccatttttcatctcccgttcgtctcatgtatttctttagtttctgtttggtggggatttatttgtttaggatgttttatggggtgttttttacctatttaagagggcgtttttcaaacaagaaggcttatcaaatcaaacaacaactcttcttgcaacacatcaaaaacaactatttatcgcacctcaaccacaacttggattctttaagagacattatcaacaataaagcggagggcatgtttatgagctttaacgcttttttgagtttattgaccgaaataaccgtgatcgtttttttctattccacgctcatattgaccaattggaaaataacgctcgtttttaccacgattctcgccttgcaaattttttttattgtcaaaaaagttaccgtccttatcaaaaaaaagggtgagatggccgccaaatccaaagcgcaaacgcttaaagtcttttcaaaatttttcagcaatttcaaaatcactaaactcaaagacaaccacgaagaagcccacaaactttttggagaaaatagccgtaaagcccatgacactgagatcatttactccactttgcaagtggtccccaggtattcaatagaaaccgtgggctttagtttgttgattttagcggtcgcttacatcttattcaaatacggcgaagctagaatggtactccctaccatttctatgtatgccctagcgctttatcgcatactcccttctgtaactggagtgatcagctattataatgaaatcgcttacaaccagcttgcaaccaatgttgtttttaaaagcctttctaagaccatcgttgaagaggatttagtccctttagactttaatgaaaaaatcactctccaaaacatttcattcgcttataagtcaaaacacccggttttaaaaaatttcaacctcaccattcaaaaaggtcaaaaaatcgctctcataggccatagcgggtgcggaaaatccacgctggcggatattattatggggcttacctaccctaaaagtggggaaatttttattgataacacccttttaaccagcgaaaacaggcgctcatggcgtaaaaaaataggctatatcccccaaaatatttacctttttgatggcactgtgggggataatatcgcttttgggagtgctatagatgaaaaacgcttgattaaggtgtgcaaaatggctcatatctatgattttttatgcgagcatgagggccttaaaacccaagtgggcgaagggggcgctaagcttagcggcggtcaaaaacagcgcataggcatcgcaagagccttatacgataaccctgaaattttggttttagatgaagccacttcagccctagacaatgaaaccgagagtaaaatcatggatgaaatctatcaaatcgctaaaaataaaaccctaatcgttatcgcccaccgcttaagcacgattgaacgctgtgaagtcatcattgacatgagccaacacaaagacaatctcggctaa

SEQ ID NO: 645 - DNA (genomic), 585 bp, Helicobacter pylori; double-stranded, circular
  misc_feature (B) LOCATION 1...585
  hypothetical: NO
  anti-sense: NO
gtgagcttgaaagtgatgcctaaagacaagatcgccctcatagggccaaacggcgtgggtaaatccacgctttgtaagattttagtagaagagttaaagccggatacgggcgtggtgaaatggggagcgacggttttaaaaggctatttccctcaaaatgtgagcgaagaaattagcggcgaagagaccttgtatcaatggctttttaatttcaataaaaagattgaaagcgcagaggttaggaacgctttagggaggatgctttttaatggcgaagagcaagaaaaatgcgtgaacgctttaagcgggggcgaaaaacaccgaatggttttatccaagctcatgctagagggggggaatttcttagtcttagatgagccaaccaaccacctggatttagaagccattatcgcactaggtgaagcactctttaaatttgatggggcgctgatttgcgtaagccatgacagagagctcattgatgcgtatgcgaaccggatcattgaattagtcccaagccctaaaggcgcttcaatcattgattttaaaggcagttatgaagagtatttagcgagcaaaaaatga

SEQ ID NO: 646 - DNA (genomic), 930 bp, Helicobacter pylori; double-stranded, circular
  misc_feature (B) LOCATION 1...930
  hypothetical: NO
  anti-sense: NO
ttggatttggattttcacagcgtgcgcgagtttagcgggaattatgacgattggtatatcgcttccactctgatcgctaaacagcaagaggccgaacgcaataaaaaactcaaagaaaaagaagagctagaaaaattcatcgctcgttttagcgctaacgcttctaaagccaagcaagccaccagccgccaaaaacaactggataaattagacattcaaagcttagcaatatccagcaggagggatcctagcattatttttaaacccaaacgcaccattggtaatgaagctttagaatgcgaaaacatctctaaaagttatgacgaccaaatcgttttaaatcaagtgagcttgaaagtgatgcctaaagacaagatcgccctcatagggccaaacggcgtgggtaaatccacgctttgtaagattttagtagaagagttaaagccggatacgggcgtggtgaaatggggagcgacggttttaaaaggctatttccctcaaaatgtgagcgaagaaattagcggcgaagagaccttgtatcaatggctttttaatttcaataaaaagattgaaagcgcagaggttaggaacgctttagggaggatgctttttaatggcgaagagcaagaaaaatgcgtgaacgctttaagcgggggcgaaaaacaccgaatggttttatccaagctcatgctagagggggggaatttcttagtcttagatgagccaaccaaccacctggatttagaagccattatcgcactaggtgaagcactctttaaatttgatggggcgctgatttgcgtaagccatgacagagagctcattgatgcgtatgcgaaccggatcattgaattagtcccaagccctaaaggcgcttcaatcattgattttaaaggcagttatgaagagtatttagcgagcaaaaaatga

SEQ ID NO: 647 - DNA (genomic), 867 bp, Helicobacter pylori; double-stranded, circular
  misc_feature (B) LOCATION 1...867
  hypothetical: NO
  anti-sense: NO
atgctggcgtttttaaaaacccctagaaacagcgcttttgctttgggtyttttcgtgggggcgttattgttttactggtgcgctttaaggctttcgcattcggatttcacytatttattgcccttaatcattgttttagtagcgttagtttatggggttttattttatttgttgctctattttgaaaacccctacttcaggcttttgagttttttaggctctagttttatccacccttttggatttgattggttagtcccggatagctttttttcttatagcgtgtttagggtggataaattatctttagggcttatttttttagcttgcatttttttgagcgctcaaaatcttaaaaaatacagaatgataggggttttattgctgcttggcgcgttggattttcatttttttaaaataagcgatttaaaagaggttggaaatattgaattagtctctacaagaacgccccaagatttgaaatttgactcaaattaccttaataatattgaaaacaacattcttaaagaaatcaaactcgctcaaagcaagcaaaaaaccttgattgtttttccagagaccgcttaccctatcgctttagaaaactccccttttaaaacccaactagaagatttaagcgacaagatcgccattttaatagggacattgcgcgctcarggctatagcctttataacagctcgtttttattttctaaaaaaagcgttcaaatcgctgataaagtgatcttagccccctttggcgagataatgcctttaccggagtttcttcaaaaaccccttgaaaagctcttttttgcgagagcgcttatttataccgcaacgctccccatttcagcgattttacat

SEQ ID NO: 648 - DNA (genomic), 1185 bp, Helicobacter pylori; double-stranded, circular
  misc_feature (B) LOCATION 1...1185
  hypothetical: NO
  anti-sense: NO
agcttatgggttgaaaaccctatattactatcacactcacaagtctatagccccccaagatgctgggtttttaaaacccctagaaacagcgcttttgctttgggttttttcgtgggggcgttattgttttactggtgcgctttaaggctttcgcattcggatttcacttatttattgcccttaatcattgttttagtagcgttagtttatggggttttattttatttgttgctctattttgaaaacccctacttcaggcttttgagttttttaggctctagttttatccacccttttggatttgattggttagtcccggatagctttttttcttatagcgtgtttagggtggataaattatctttagggcttatttttttagcttgcatttttttgagcgctcaaaatcttaaaaaatacagaatgataggggttttattgctgcttggcgcgttggattttcatttttttaaaataagcgatttaaaagaggttggaaatattgaattagtctctacaagaacgccccaagatttgaaatttgactcaaattaccttaataatattgaaaacaacattcttaaagaaatcaaactcgctcaaagcaagcaaaaaaccttgattgtttttccagagaccgcttaccctatcgctttagaaaactccccttttaaaacccaactagaagatttaagcgccaagatcgccattttaatagggacattgcgcgctcaaggctatagcctttataacagctcgtttttattttctaaaaaaagcgttcaaatcgctgataaagtgatcttagccccctttggcgagataatgcctttaccggagtttcttcaaaaaccccttgaaaagctcttttttggcgagagcgcttatttataccgcaacgctccccatttcagcgattttacattagacgatttcacttttcgccccttgatttgctatgaaggcacttccaaacccgcttattcaagcagcccttcaaaagtttttatcctaatgagcaataacgcatggtttagcccaagcattgaacccaccttacaaagaacgcttttaaaatactacgcaaggcgttatgataaaatcatcttgcacagcgcgaacttttcaacttcttacattttaagccctagcttattgggcgatattctttttaggaaacgatca

SEQ ID NO: 649 - DNA (genomic), 1278 bp, Helicobacter pylori; double-stranded, circular
  misc_feature (B) LOCATION 1...1278
  hypothetical: NO
  anti-sense: NO
atgcgtcttattctgttcaatcgaaacgcttttttattggcatgcatgtttgtttcaagcgtgtatgcgaacgctgttttagacgcttatgcggttgaaaacccttatattactatcacactcacaagtctattagcccctttaagcatgctggcgtttttaaaaacccctagaaacagcgcttttgctttgggttttttcgtgggggcgttattgttttactggtgcgctttaagctttcgctattcggatttcacttatttattgcccttaatcattgttttagtagcgttagtttatggggttttattttatttgttgctctattttgaaaacccctacttcaggcttttgagttttttaggctctagttttatccacccttttggatttgattggttagtcccggatagctttttttcttatagcgtgtttagggtggataaattatctttagggcttatttttttagcttgcatttttttgagcgctcaaaatcttaaaaaatacagaatgataggggttttattgctgcttggcgcgttggattttcatttttttaaaataagcgatttaaaagaggttggaaatattgaattagtctctacaagaacgccccaagatttgaaatttgactcaaattaccttaataatattgaaaacaacattcttaaagaaatcaaactcgctcaaagcaagcaaaaaaccttgattgtttttccagagaccgcttaccctatcgctttagaaaactccccttttaaaacccaactagaagatttaagcgacaagatcgccattttaatagggacattgcgcgctcaaggctatagcctttataacagctcgtttttattttctaaaaaaagcgttcaaatcgctgataaagtgatcttagccccctttggcgagataatgcctttaccggagtttcttcaaaaaccccttgaaaagctcttttttggcgagagcgcttatttataccgcaacgctccccatttcagcgattttacattagacgatttcacttttcgccccttgatttgctatgaaggcacttccaaacccgcttattcaagcagcccttcaaaagtttttatcctaatgagcaataacgcatggtttagcccaagcattgaacccaccttacaaagaacgcttttaaaatactacgcaaggcgttatgataaaatcatcttgcacagcgcgaacttttcaacttcttacattttaagccctagcttattgggcgatattctttttaggaaacgatcatga

SEQ ID NO: 650 - DNA (genomic), 642 bp, Helicobacter pylori; double-stranded, circular
  misc_feature (B) LOCATION 1...642
  hypothetical: NO
  anti-sense: NO
atgattaaagcgattgatatttctcatgcttttgaaaaacctctttataatggcgtgaatttgcgcattaaacccaaagaaagcctggcgattttaggcgtgagcgggagcggtaaaagcacgcttttaagccatttggccaccatgctaaaaccggatagcggaacagtcagtttgttagaacaccaagatatttatgccctaaattccaaaaagcttttggaattgcggcgcttaaaagtgggcatcgtttttcaatcgcattacctttttaagggttttagcgctttagaaaacttgcaagtcgcttcaatcctagccaagcaagaaataaatcattcccttttagaacaattaggcatagcccacaccctaaaacaaggcgtgggcgaattgagcggcggccagcaacaacgcttaagcatcgccagagtgctttctaaaaaaccccaaatcattatcgctgatgaacccaccgggaatttagacaccactagcgctaatcaagtcatcagcatgctgcaaaattacattacagaaaacgaaggggcgttagtcttagccacgcatgatgagcatttagccttcacttgctctcaagtctatcgcctagaaaaagaatctttgattaaggaaaaataa

SEQ ID NO: 651 - DNA (genomic), 639 bp, Helicobacter pylori; double-stranded, circular
  misc_feature (B) LOCATION 1...639
  hypothetical: NO
  anti-sense: NO
atgattaaagcgattgatatttctcatgsttttgaaaarcctctttrtratggcgtgaatttgcgcattaaacccaaagaaagcytggygattttaggcgtgagcgggagcggtaaaagcacgcttytaagccatttggccaccatgctaaaaccggatagcggaacagtcagtttgttagaacaccaagatatttatgccctaaattccaaaaagcttttggaattgcggcgcttaaaagtgggcatcgtttttcaatcgcattacctttttaagggttttagcgctttagaaaacttgcaagtcgcttcaatcctagccaagcaagaaataaatcattcccttttagaacaattaggcatagcccacaccctaaaacaaggcgtgggcgaattgagcggcggccagcaacaacgcttaagcatcgccagagtgctttctaaaaaaccccaaatcattatcgctgatgaacccaccgggaatttagacaccactagcgctaatcaagtcatcagcatgctgcaaaattacattacagaaaacgaaggggcgttagtcttagccacgcatgatgagcatttagccttcacttgctctcaagtctatcgcctagaaaaagaatctttgattaaggaaaaa

SEQ ID NO: 652 - DNA (genomic), 648 bp, Helicobacter pylori; double-stranded, circular
  misc_feature (B) LOCATION 1...648
  hypothetical: NO
  anti-sense: NO
gaaacgatcatgattaaagcgattgatatttctcatgcttttgaaaaacctctttataatggcgtgaatttgcgcattaaacccaaagaaagcctggcgattttaggcgtgagcgggagcggtaaaagcacgcttttaagccatttggccaccatgctaaaaccggatagcggaacagtcagtttgttagaacaccaagatatttatgccctaaattccaaaaagcttttggaattgcggcgcttaaaagtgggcatcgtttttcaatcgcattacctttttaagggttttagcgctttagaaaacttgcaagtcgcttcaatcctagccaagcaagaaataaatcattcccttttagaacaattaggcatagcccacaccctaaaacaaggcgtgggcgaattgagcggcggccagcaacaacgcttaagcatcgccagagtgctttctaaaaaaccccaaatcattatcgctgatgaacccaccgggaatttagacaccactagcgctaatcaagtcatcagcatgctgcaaaattacattacagaaaacgaaggggcgttagtcttagccacgcatgatgagcatttagccttcacttgctctcaagtctatcgcctagaaaaagaatctttgattaaggaaaaa

SEQ ID NO: 653 - DNA (genomic), 954 bp, Helicobacter pylori; double-stranded, circular
  misc_feature (B) LOCATION 1...954
  hypothetical: NO
  anti-sense: NO
ttgctttatttcttggcgatttatcctatttgtttggcttatggggtgggtatcactaacgtgtttgatcattttttcactaaccagttgcatttagcgccttttcatcggggcttactggctgtagcgttagtctctttaatgatgttggtgatggtttttaacgctacgattgttacgcgcatttgtaacgctttagtgtatcctttatgcttgattttattgcttttttctttgtatcttatcccttattggcaaggcgctaacctttttgtggtgccgagttttaaagaatttgtgctagccatttggctaaccttaccggtgcttgtgttttcattcaaccatagccccattatttcaaccttcacccaaaatgtgggaaaagaatacggcgctttcaaagaatacaaactcaatcaaattgaattagggacatcgctgatgcttttagggtttgtgatgttttttgtgttttcgtgtgttatgtgcttgaatgctgatgattttgtgaaagcaagggaacaaaatatccccattttaagctattttgctaacaccctaaacaaccccttaatcaattatgcggggcctgtggtggcttttttagcgattttttcatctttttttgggcattattatggggctaaagagggtttagaaggcattatcattcaaagtttaaaattgaaacaagcttctaaaaccttgagcgttggcgtaacgatttttttatggctgactatcacgctggtggcttatattaaccctaatatcttggattttattgaaaatttaggcggccccattatcgcgctcattctgtttgtgatgcccatgatagctttttatagcgtttctagtttgaagcgttttagaaacttcaaagtggatatttttgtgtttgtctttgggagcttgacggctttgagcgtgtttttaggactattttaa

SEQ ID NO: 654 - DNA (genomic), 522 bp, Helicobacter pylori; double-stranded, circular
  misc_feature (B) LOCATION 1...522
  hypothetical: NO
  anti-sense: NO
caggggcttagtggggttttgtatgcgttttttgccggagaaaggcaaacgatttgctttatatttggtcttgtttataatttgagttacgcttatgtcgcttatcaatggaaattaaacgctgatgtgattttatgcctttttttgtatatgccagtaacgatttatgggctgttcgcatggaaaaaaacagagcagcatgagggcgttatcaaggctcaaaaacttcccaaaaattggcgttttgcgctcgttttaggcgtaggggttttaacttatgcgagcgctttgttttttaaagagattaaaacgaattttttatgggcagagagttttaatttcgtcatttttatcatcgcttttattttacaggttttgcgctatgtggagaattatgcgctagtaactttggagaatatcgtgtccattatcgtgtggttttgtatttttcagatttctacagagcagtttggtgcaactcttcacaacgattctatacctttttattggcttgtattattt

SEQ ID NO: 655 - DNA (genomic), 663 bp, Helicobacter pylori; double-stranded, circular
  misc_feature (B) LOCATION 1...663
  hypothetical: NO
  anti-sense: NO
atgttaataaccacccaattatccaaacgattttacgccacgctcattctcgcttgcgtgtttttaaccatcactaacatccttgtcaaaggctcgtttatcaacctactagcagggcttagtggggttttgtatgcgttttttgccggagaaaggcaaacgatttgctttatatttggtcttgtttataatttgagttacgcttatgtcgcttatcaatggaaattaaacgctgatgtgattttatgcctttttttgtatatgccagtaacgatttatgggctgttcgcatggaaaaaaacagagcagcatgagggcgttatcaaggctcaaaaacttcccaaaaattggcgttttgcgctcgttttaggcgtaggggttttaacttatgcgagcgctttgttttttaaagagattaaaacgaattttttatgggcagagagttttaatttcgtcatttttatcatcgcttttattttacaggttttgcgctatgtggagaattatgcgctagtaactttggggaatatcgtgtccattatcgtgtggttttgtatttttcagatttctacagagagtttggtgcaactcttcacaacgattctatacctttttattggcttgtattattttaaccgctggaaccaatcatgcaagcagtga

SEQ ID NO: 656 - DNA (genomic), 294 bp, Helicobacter pylori; double-stranded, circular
  misc_feature (B) LOCATION 1...294
  hypothetical: NO
  anti-sense: NO
gtgaaaaaagtagaatccatgaatgtggtgcctttcattgacatcatgcttgtgttgttagtgatcgtgctcacaacggcgtcttttgtgcaaacttcaaagcttcctattagcattcctcaagtggataaggatagcactgattctaaagatgtgttggacaaaaaacaagttacgatcgctatttctaataagggttctttttattttgacgataaagaaatcagctttgaaaatttaaaacacaaggtttccactttggctaaagacacccctattgtctttgcaaggcga

SEQ ID NO: 657 - DNA (genomic), 354 bp, Helicobacter pylori; double-stranded, circular
  misc_feature (B) LOCATION 1...354
  hypothetical: NO
  anti-sense: NO
gcggtgaaaaaagtagaatccatgaatgtggtgcctttcattgacatcatgcttgtgttgttagtgatcgtgctcacaacggcgtcttttgtgcaaacttcaaagcttcctattagcattcctcaagtggataaggatagcactgattctaaagatgtgttggacaaaaaacaagttacgatcgctatttctaataagggttctttttattttgacgataaagaaatcagctttgaaaatttaaaacacaaggtttccactttggctaaagacacccctattgtcttgcaaggcgataagaaaagcaatttggacaactttatcaaagtggtggatttattgcaactaacaatc

SEQ ID NO: 658 - DNA (genomic), 402 bp, Helicobacter pylori; double-stranded, circular
  misc_feature (B) LOCATION 1...402
  hypothetical: NO
  anti-sense: NO
gtgaaaaaagtagaatccatgaatgtggtgcctttcattgacatcatgcttgtgttgttagtgatcgtgctcacaacggcgtcttttgtgcaaacttcaaagcttcctattagcattcctcaagtggataaggatagcactgattctaaagatgtgttggacaaaaaacaagttacgatcgctatttctaataagggttctttttattttgacgataaagaaatcagctttgaaaatttaaaacacaaggtttccactttggctaaagacacccctattgtcttgcaaggcgataagaaaagcaatttggacaactttatcaaagtggtggatttattgcaaactaacaatctgaagcaactttacattcttgttgaagataaaaagaatcaaaaaaattag

SEQ ID NO: 659 - DNA (genomic), 345 bp, Helicobacter pylori; double-stranded, circular
  misc_feature (B) LOCATION 1...345
  hypothetical: NO
  anti-sense: NO
attgacggggggatgacaaagcgcgtgggtatagccagggctatggcgactaacccagaaatcttatttttagatgagccaacaagcgggctggatccttatagcgcgggcaaatttgacgaactcatcatgacgcttaaagagagcttacagcttacggtggtgatgatcacgcatgatttagactctgtgcatgattgcgtggatcgattcatcatgctcaaagacgggctattagagtttaatggggatttaaaggattttattaaaaaggctcaaactcaagggctagatgaaggcaatttattcaattcaacacgaggagagaaattttggaaaggcatg

SEQ ID NO: 660 - DNA (genomic), 786 bp, Helicobacter pylori; double-stranded, circular
  misc_feature (B) LOCATION 1...786
  hypothetical: NO
  anti-sense: NO
atgaacgctactaacaaccaagtcttaattgaagtgaaggatctccatagcgcttttgggagcaccattatccataggggcgtgagttttagcgtgcataagggcgaagtgatggcgattttaggggggtcagggagcggtaaaagcacgcttttaaggtgcatgatcttgctcaatcgccctacaaagggggaagtgttgctttttggggaagatatatggaaactcaaagaagcagagcagcaaaagatttttaaccgctgtgggatttgcttccagtttggcgcgctctatagctctctaaccgttttagaaaatgtgggcgtgatgctagagcaatacggcgcttattctaaaaaaattgttgaagaaatttctaaaatgtggattgaaagagtgggtttgccccctagggcttaccacctttacccctatgaattgagcggggggatgacaaagcgcgtgggtatagccagggctatggcgactaacccagaaatcttatttttagatgagccaacaagcgggctggatccttatagcgcgggcaaatttgacgaactcatcatgacgcttaaagagagcttacagcttacggtggtgatgatcacgcatgatttagactctgtgcatgattgcgtggatcgattcatcatgctcaaagacgggctattagagtttaatggggatttaaaggattttattaaaaaggctcaaactcaagggctagatgaaggcaatttattcaattcaacacgaggagagaaattttggaaaggcatgtga

SEQ ID NO: 661 - DNA (genomic), 336 bp, Helicobacter pylori; double-stranded, circular
  misc_feature (B) LOCATION 1...336
  hypothetical: NO
  anti-sense: NO
ctacacagacaggcgcaagttagaattagccttacacaaacgacgactttagtggccactattggctcaaacgccccttatatcggtcttttagggacggttatggggatcatgctcacctttatggatttaggctcagcttctggcattgacactaaggcgatcatgactaatttagcccttgctttaaaagcgaccggcatggggttattggtagcgatccctgcgattgtgatttataacttgttagtgagaaaaagcgagattttagttaccaaatgggatattttccaccatccggttgatacgcaatcccatgaggtttatagcaaagcc

SEQ ID NO: 662 - DNA (genomic), 345 bp, Helicobacter pylori; double-stranded, circular
  misc_feature (B) LOCATION 1...345
  hypothetical: NO
  anti-sense: NO
atgsacacacacgacaggcgcaagttaagaattarccttacacaaacgacgactttagtggccactattggctcaaacgccccttatatcggtcttttagggacggttatggggatcatgctcacctttatggatttaggctcagcttctggcattgacactaaggcgatcatgactaatttagcccttgctttaaaagcgaccggcatggggttattggtagcgatccctgcgattgtgatttataacttgttagtgagaaaaagcgagattttagttaccaaatgggatattttccaccatccggttgatacgcaatcccatgaggtttatagcaaagcctaa

SEQ ID NO: 663 - DNA (genomic), 453 bp, Helicobacter pylori; double-stranded, circular
  misc_feature (B) LOCATION 1...453
  hypothetical: NO
  anti-sense: NO
atgaaagaaatggtagattatgggatcatagggtttttaatcttcttatccgtcatcgttatagcgatcgcaatagaaaggttgtggttttttgccactcttcgtgtagatgactacacagacaggcgcaagttagaattagcattacacaaacgactgactttagtggccactattggctcaaacgccccttatatcggtcttttagggacggttatggggatcatgctcacctttatggatttaggctcagcttctggcattgacactaaggcgatcatgactaatttagcccttgctttaaaagcgaccggcatggggttattggtagcgatccctgcgattgtgatttataacttgttagtgagaaaaagcgagattttagttaccaaatgggatattttccaccatccggttgatacgcaatcccatgaggtttatagcaaagcctaa

SEQ ID NO: 664 - DNA (genomic), 267 bp, Helicobacter pylori; double-stranded, circular
  misc_feature (B) LOCATION 1...267
  hypothetical: NO
  anti-sense: NO
accttaaaagggattgttttgttcagattgataagcgcatgggttttacaagacaagttcttgtttgtcgtgtgttttatattgcctttttgtttaggggttttaggcacgcaaatctttaaacaagagaccccaagacagctccctatcgtggtggtggatttggataagaccactacaagccatcaagtggcgtttgaattaggcgcaacgagtgcggttgaaatcaaataccaagtgactagcctttcagaagctaaacgcttt

SEQ ID NO: 665 - DNA (genomic), 852 bp, Helicobacter pylori; double-stranded, circular
  misc_feature (B) LOCATION 1...852
  hypothetical: NO
  anti-sense: NO
acgcttttaaactccgctgaagtgtatggggcgttaattttgcctaaggatttggagagaaaaatcaaaatggggcgaaaagtggatttgtccttttattataacgctgaatacgttttagtgggcaaaacgctcaaaaacgcctttttgcaaaccgctttgaccttagacgctaaaaccttagccaccaaagctttagtgcgagattccaatttgatttccgctaaagcccaagcgatgcctattgttttgcaattgcatgccctatacaatgaagaaaacaattatacgcaataccttttaagcgtgatgctgccttgcatgtggcttattttcattgcgattggcatgctcaatttcattcaaaaaacctctaacatgcgagagcttttaatcagtattgtagcgaatgtgtgcgtgtttagcttttggggaatgggcatggcgttttattttaatctcattggcatggaggggaattatgcgcatttgtcattggtctttttagcggtagtcttgatgacgctcattatgagcgggtttgtggtgttggtttatggcgtttcaaaaagcgctattgaaaccgctggtgcgattggggtctataccgctccaagctttgcgtttgctggggtgacttacccgcaaaacaacatggaaatttttgggagtttttggagccattgcttgcccattagccattttatgagattctttttacaagaggcctattataagatggattttaccgagtctttaaattctttaatgccccttttgttctttttaatctttttagccttagggcttttggttttttatttttcttttaaaaaagacaaggctagcgca

SEQ ID NO: 666 - DNA (genomic), 1098 bp, Helicobacter pylori; double-stranded, circular
  misc_feature (B) LOCATION 1...1098
  hypothetical: NO
  anti-sense: NO
ttgttcagattgataagcgcatgggttttacaagacaagttcttgtttgtcgtgtgttttatattgcctttttgtttaggggttttaggcacgcaaatctttaaacaagagaccccaagacagctccctatcgtggtggtggatttggataagaccactacaagccatcaagtggcgtttgaattaggcgcaacgagtgcggttgaaatcaaataccaagtgactagcctttcagaagctaaacgctttttaaactccgctgaagtgtatggggcgttaattttgcctaaggatttggagagaaaaatcaaaatggggcgaaaagtggatttgcccttttattataacgctgaatacgttttagtgggcaaaacgctcaaaaacgcctttttgcaaaccgctttgaccttagacgctaaaaccttagccaccaaagctttagtgcgagattccaatttgatttccgctaaagcccaagcgatgcctattgttttgcaattgcatgccctatacaatgaagaaaacaattatacgcaataccttttaagcgtgatgctgccttgcatgtggcttattttcattgcgattggcatgctcaatttcattcaaaaaacctctaacatgcgagagcttttaatcagtattgtagcgaatgtgtgcgtgtttagcttttggggaatgggcatggcgttttattttaatctcattggcatggaggggaattatgcgcatttgtcattggtctttttagcggtagtcttgatgacgctcattatgagcgggtttgtggtgttggtttatggcgtttcaaaaagcgctattgaaaccgctggtgcgattggggtctataccgctccaagctttgcgtttgctggggtgacttacccgcaaaacaacatggaaatttttgggagtttttggagccattgcttgcccattagccattttatgagattctttttacaagaggcctattataagatggattttaccgagtctttaaattctttaatgccccttttgttctttttaatctttttagccttagggcttttggttttttatttttcttttaaaaaagacaaggctagcgcatga

SEQ ID NO: 667 - DNA (genomic), 399 bp, Helicobacter pylori; double-stranded, circular
  misc_feature (B) LOCATION 1...399
  hypothetical: NO
  anti-sense: NO
atggagcgcaagacgctccagagcattttatgtttaataaaaaaagaaatgatgagaccaaaaggtattctaatgaattgttgcaggscttggaaacaccaggttcttaagcaaagcacgacaggtttagtggtgttgagcattatctcttctacagccccctttattggtttgtttgggacggtagttgaaattttagaagcgtttaacaatttgggcgcgttaggtcaagcttcttttggagtgatcgcacccattatttctaaggcgcttatcgccaccgctgcagggattttagcagccattccagcctattctttttacttgatcttaaagcgcaaggtgtatgatttatcggtttatgtgcagatgcaagtggatattttgtcttctaaaaaa

SEQ ID NO: 668 - DNA (genomic), 570 bp, Helicobacter pylori; double-stranded, circular
  misc_feature (B) LOCATION 1...570
  hypothetical: NO
  anti-sense: NO
atgttcgattcaatcgtttattttttcaataagagcgggtttgttaccacgcttgttttagtttggatttcgctttatttggtgatgactttatgggtctttttgtataaaagcattgtattaaagattgaactcaggcgcgagatgcaatctttgtctaacattcttaatggagcgcaagacgctccagagcattttatgtttaataaaaaaagaaatgatgagaccaaaaggtattctaatgaattgttgcaggcttggaaacaccaggttcttaagcaaagcacgacaggtttagtggtgttgagcattatctcttctacagccccctttattggtttgtttgggacggtagttgaaattttagaagcgtttaacaatttgggcgcgttaggtcaagcttcttttggagtgatcgcacccattatttctaaggctcttatcgccaccgctgcagggattttagcagccattccagcctattctttttacttgatcttaaagcgcaaggtgtatgatttatcggtttatgtgcagatgcaagtggatattttgtcttctaaaaaataa

SEQ ID NO: 669 - DNA (genomic), 615 bp, Helicobacter pylori; double-stranded, circular
  misc_feature (B) LOCATION 1...615
  hypothetical: NO
  anti-sense: NO
cggtctctagcgtgctggctaagattgagtctctttaaggggataatcatgttcgattcaatcgtttattttttcaataagagcgggtttgttaccacgcttgttttagtttggatttcgctttatttggtgatgactttatgggtctttttgtataaaagcattgtattaaagattgaactcaggcgcgagatgcaatctttgtctaacattcttaatggagcgcaagacgctcagagcattttatgtttaataaaaaaagaaatgatgagaccaaaaggtattctaatgaattgttgcagggcttggaaacaccaggttcttaagcaaagcacgacaggtttagtggtgttgagcattatctcttctacagccccctttattggtttgtttgggacggtagttgaaattttagaagcgtttaacaatttgggcgcgttaggtcaagcttcttttggagtgatcgcacccattatttctaaggcgcttatcgccaccgctgcagggattttagcagccattccagcctattctttttacttgatcttaaagcgcaaggtgtatgatttatcggtttatgtgcagatgcaagtggatattttgtcttctaaaaaa

SEQ ID NO: 670 - DNA (genomic), 417 bp, Helicobacter pylori; double-stranded, circular
  misc_feature (B) LOCATION 1...417
  hypothetical: NO
  anti-sense: NO
gataaaaaaatacttttaattattcaaggaaaatttatggaatttcatcaagtttatgacccattaggccatatttggctgagcgctttagtcgcactttcgcctattgcgctcttttttatctctcttattgtctttaaacttaaagggtatagcgctgggtttttaagcttagcgctttcaatccttattgcgttatttgtgtataaaatgcctgttcaaatggtgagcgcgagttttttctatggctttctttatggcttgtggccgatcgcatggattgtgatcgctgcgatttttctttacaacctttcagtgaagtccgggtattttgaaatcttaaaagaaagcgttcagtccatcactttagatcaccgcattttagtgattttgattggcttttgtttggctcatttt

SEQ ID NO: 671 - DNA (genomic), 927 bp, Helicobacter pylori; double-stranded, circular
  misc_feature (B) LOCATION 1...927
  hypothetical: NO
  anti-sense: NO
atggaattttatcaagtctatgacccattaggccatatttggctgagcgctttagtcgcactttcgcctattgcgctcttttttatctctcttattgtctttaaacttaaagggtatagcgctgggtttttaagcttagcgctttcaatccttattgcgttatttgtgtataaaatgcctgttcaaatggtgagcgcgagttttttctatggctttctttatggcttgtggccgatcgcatggattgtgatcgctgcgatttttctttacaacctttcagtgaagtccgggtattttgagattttaaaagaaagcattttaagcttgacgccggatcatcgcattttagtgattttgatcgggttttgttttggctcgtttttagaaggcgcgattggttttggaggcccggtagcgatcacagcggcgattttagtgggccttgggctaaaccccttatacgctgctgggttgtgtttgatcgctaacaccgctcctgtagcttttggcgcggtgggtatccctattacggcgatggctagcgtggtgggtatccctgagttagagatttctcaaatggtgggtagggtgttacccattttttctattggcattccttttttcatcgtatttttaatggatggttttagagggattagagaaacctttcctgcagtggccgttacgggctttagcttcgctatcgcgcaatttttaagctctaattatctagggccgcagcttccggatattatttcagctttagtgtctttagtcgctaccactttatttttaaaattctggcagcccaaacacattttcaccagcaatggcaaagaaccaacgatcagcacagaaaaacaccatatttgtaaagtacttgtggcgtggatgccttttgtgttgctcacgaattacgattatcat

SEQ ID NO: 672 - DNA (genomic), 1374 bp, Helicobacter pylori; double-stranded, circular
  misc_feature (B) LOCATION 1...1374
  hypothetical: NO
  anti-sense: NO
atggaattttatcaagtctatgacccattaggccatatttggctgagcgctttagtcgcactttcgcctattgcgctcttttttatctctcttattgtctttaaacttaaagggtatagcgctgggtttttaagcttagcgctttcaatccttattgcgttatttgtgtataaaatgcctgttcaaatggtgagcgcgagttttttctatggctttctttatggcttgtggccgatcgcatggattgtgatcgctgcgatttttctttacaacctttcagtgaagtccgggtattttgagattttaaaagaaagcattttaagcttgacgccggatcatcgcattttagtgattttgatcgggttttgttttggctcgtttttagaaggcgcgattggttttggaggcccggtagcgatcacagcggcgattttagtgggccttgggctaaaccccttatacgctgctgggttgtgtttgatcgctaacaccgctcctgtagcttttggcgcggtgggtatccctattacggcgatggctagcgtggtgggtatccctgagttagagatttctcaaatggtgggtagggtgttacccattttttctattggcattccttttttcatcgtatttttaatggatggttttagagggattagagaaacctttcctgcagtggccgttacgggctttagcttcgctatcgcgcaatttttaagctctaattatctagggccgcagcttccggatattatttcagctttagtgtctttagtcgctaccactttatttttaaaattctggcagcccaaacacattttcaccagcaatggcaaagagccaacgatcagcacagaaaaacaccatatttgtaaggtagttgtggcgtggatgccttttgtgttgctcacgattacgattatcatatggacgcaaccctggtttaaagcgctctttaaagaaggtggggctttggcgttttctaactttgcgtttgaattcaattctatcagtcaaaagatttttaaaaccgttcccattgttactgaagcgaccaattttcctgtggtgttcaaactccctttgattttaacgacaggcacttccatttttttagccgcccttttaagcgtgtttttgttgcgcgtgaaaatcagcgatgcgataggggtgtttggggccactttaaaagaaatgcgtttgccgattttaaccattggcgtggttttagcgtttgcgtatgtggctaattatagcggcatgagcgctacgctcgctttagcgttagcggataccgggcatgttttcactttcttttcgcctgtggtaggctggcttggggtgtttttaaccggaagcgatacgaagttctaa

SEQ ID NO: 673 - DNA (genomic), 474 bp, Helicobacter pylori; double-stranded, circular
  misc_feature (B) LOCATION 1...474
  hypothetical: NO
  anti-sense: NO
atgaaagaaatcgttacaatagagaatgtgtcttttaactaccacaatcgcgctatttttaaggattttaatttaagcattcaagaaggggattttttatgcgttttaggggagagcgggagcggtaaaagcacgcttttaggcttgattttagggcttttaaaacccagtctggggagcgttaaaatctttaatgagaccctttcaaacaacgcttttttacgccaaaaaataggctatatcgctcagggcaattccttattccctcatttaaacgccttacaaaacatgactttttgccttaatttacaaggcataaacaaacaagccgctcaaaaagaagccaaagccttagcgttaaaaatggggttagacgagagccttatggataaattccctaatgaattgagtggggggcaagccaaagagtgggcattattagggggattatccacaggccagaactcattttat

SEQ ID NO: 674 - DNA (genomic), 651 bp, Helicobacter pylori; double-stranded, circular
  misc_feature (B) LOCATION 1...651
  hypothetical: NO
  anti-sense: NO
atgaaagaaatcgttacaatagagaatgtgtcttttaactaccacaatcgcgctatttttaaggattttaatttaagcattcaagaaggggattttttatgcgttttaggggagagcgggagcggtaaaagcacgcttttaggcttgattttagggcttttaaaacccagtctggggagcgttaaaatctttaatgagaccctttcaaacaacgcttttttacgccaaaaaataggctatatcgctcagggcaattccttattccctcatttaaacgccttacaaaacatgactttttgccttaatttacaaggcataaacaaacaagccgctcaaaaagaagccaaagccttagcgttaaaaatggggttagacgagagccttatggataaattccctaatgaattgagtggggggcaagcccaaagagtgggcattattagggggattatccacaggccagaactcattttattagatgagccttttagcgctttagatagtttgaatcgtaagaatttacaggatctcatcaaagaaatacaccaaaattcttgcgctactttcattatggtaacgcatgatgaaaacgaggcgcaaaagttagccacaaaaaccctagaaatcaaagcccttaaacaagagcagtga

SEQ ID NO: 675 - DNA (genomic), 678 bp, Helicobacter pylori; double-stranded, circular
  misc_feature (B) LOCATION 1...678
  hypothetical: NO
  anti-sense: NO
agattttttagaaagcatagggttataagcatgaaagaaatcgttacaatagagaatgtgtcttttaactaccacaatcgcgctatttttaaggattttaatttaagcattcaagaaggggattttttatgcgttttaggggagagcgggagcggtaaaagcacgcttttaggcttgattttagggcttttaaaacccagtctggggagcgttaaaatctttaatgagaccctttcaaacaacgcttttttacgccaaaaaataggctatatcgctcagggcaattccttattccctcatttaaacgccttacaaaacatgactttttgccttaatttacaaggcataaacaaacaagccgctcaaaaagaagccaaagccttagcgttaaaaatggggttagacgagagccttatggataaattccctaatgaattgagtggggggcaagcccaaagagtgggcattattagggggattatccacaggccagaactcattttattagatgagccttttagcgctttagatagtttgaatcgtaagaatttacaggatctcatcaaagaaatacaccaaaattcttgcgctactttcattatggtaacgcatgatgaaaacgaggcgcaaaagttagccacaaaaaccctagaaatcaaagcccttaaacaagagcag

SEQ ID NO: 676 - DNA (genomic), 525 bp, Helicobacter pylori; double-stranded, circular
  misc_feature (B) LOCATION 1...525
  hypothetical: NO
  anti-sense: NO
atggcgttattagagattatccattacccttctaaaattttaagaacgatttctaaagaagtcgtttcttttgattcaaaactccaccagcaattagacgatatgcatgaaaccatgatcgctagtgaggggataggcttagccgctattcaagtgggcttgcccttaaggatgctcattatcaatctcccgcaagaagacggcgtgcaacacaaagaagactgcttggaaatcattaaccctaaatggatagaaactaagggttcaataatgtatagagaagggtgcttgtctgtgccgggattttatgaagaggtggagcgttttgaaaaggttaagatagagtatcaaaaccgcttcgctgaagtgaaaattttagaagcgagcgaacttttagcggtagccattcagcatgagatagatcaccttaatggcgtgttattcgtggataaattatccattttgaagcgtaagaaatttgaaaaagaactcaaagagctgcaaaaaaaacaaaaacacaagtaa

SEQ ID NO: 677 - DNA (genomic), 531 bp, Helicobacter pylori; double-stranded, circular
  misc_feature (B) LOCATION 1...531
  hypothetical: NO
  anti-sense: NO
agtgattgcatggcgttattagagattatccattacccttctaaaattttaagaacgatttctaaagaagtcgtttcttttgattcaaaactccaccagcaattagacgatatgcatgaaaccatgatcgctagtgaggggataggcttagccgctattcaagtgggcttgcccttaaggatgctcattatcaatctcccgcaagaagacggcgtgcaacacaaagaagactgcttggaaatcattaaccctaaatggatagaaactaagggttcaataatgtatagagaagggtgcttgtctgtgccgggattttatgaagaggtggagcgttttgaaaaggttaagatagagtatcaaaaccgcttcgctgaagtgaaaattttagaagcgagcgaacttttagcggtagccattcagcatgagatagatcaccttaatggcgtgttattcgtggataaattatccattttgaagcgtaagaaatttgaaaaagaactcaaagagctgcaaaaaaaacaaaaacacaag

SEQ ID NO: 678 - DNA (genomic), 615 bp, Helicobacter pylori; double-stranded, circular
  misc_feature (B) LOCATION 1...615
  hypothetical: NO
  anti-sense: NO
gtggtgagcggggtggtgatcattattgtgttttttgtgccgattctaaccttacaggggttagagggcaagatgtttaggcctttagcgcaaagcattgtgtatgcgcttttaggcactttagttctatccatcactatcattcctgtagtgagctctcttgtcttaaaagccacgccccatagcgaaacctttttaacgaggtttttaaacagaatctacgcccctttattggaattttttgtgcataaccctaaaaaagtgattttaggagcgtttgtttttttaatcgcaagcctttctttattcccttttgtggggaagaatttcatgcctgctttagatgagggcgatgtggttttgagcgtggaaaccaccccctctatttccttagatcaatctaaagatctcatgttaaacattgaaagcgcgattaaaaagcatgtcaaagaagttaaaagcattgtcgcgcgcacagggagcgatgaattggggctggatttagggggtttgaatcaaaccgatacttttatttctttcatccctaaaaaagaatggagcgttaaaaccaaagatgaattggttagaaaaaatcatggattctttaaaagactt

SEQ ID NO: 679 - DNA (genomic), 663 bp, Helicobacter pylori; double-stranded, circular
  misc_feature (B) LOCATION 1...663
  hypothetical: NO
  anti-sense: NO
atcaaaccgatacttttatttctttcatccctaaaaaagaatggagcgttaaaaccaaagatgaattggttagaaaaaatcatggattctttaaaagactttaaggggattaacttttctttcacccaacccattgaaatgcggatttctgaaatgctgacaggggttaggggggatttagcggttaagatttttggagatgatattagcgaattgaatgaattgagttttcaaatcgcgcaagctctaaaagggattaaaggatctagtgaagttttaaccacgcttaatgagggcgtgaattatttgtatgtaacccctaataaagaatcgatggcggatgtggggatcactagcaatgaattttccaagtttttaaaatccgctttagagggcttggttgtggatgtgatccctacagggatttcacgaaccccagtgatgatccgccaagagagcgattttgcaagctctatcactaaagtcaaaagtttagccttgacttcaaaatatggcgttttagtgcctatcacttccatcgcccaaatcgaagatatggatggcccttgttctattgtgcgtgaacattcaatgcgcatgagcgtggttcccactaccgtggtgtggctctatttatctcttttgtacaacacgctatcaaag

SEQ ID NO: 680 - DNA (genomic), 762 bp, Helicobacter pylori; double-stranded, circular
  misc_feature (B) LOCATION 1...762
  hypothetical: NO
  anti-sense: NO
gtttacgcggggttggctatcgctataggcatgctcattgactcatctgtggtagtggtggaaaacgcttttgaaaaattgagcgctaacactaaaaccactaaactccatgcaatctatcgttcatgcaaagaaatcgccgtttcagtggtgagcggggtggtgatcattattgtgttttttgtgccgattctaaccttacaggggttagagggcaagatgtttaggcctttagcgcaaagcattgtgtatgcgcttttaggcactttagttctatccatcactatcattcctgtagtgagctctcttgtcttaaaagccacgccccatagcgaaacctttttaacgaggtttttaaacagaatctacgcccctttattggaattttttgtgcataaccctaaaaaagtgattttaggagcgtttgtttttttaatcgcaagcctttctttattcccttttgtggggaagaatttcatgcctgctttagatgagggcgatgtggttttgagcgtggaaaccaccccctctatttccttagatcaatctaaagatctcatgttaaacattgaaagcgcgattaaaaagcatgtcaaagaagttaaaagcattgtcgcgcgcacagggagcgatgaattggggctggatttagggggtttgaatcaaaccgatacttttatttctttcatccctaaaaaagaatggagcgttaaaaccaaagatgaattggttagaaaaaatcatggattctttaaaagactt

SEQ ID NO: 681 - DNA (genomic), 1065 bp, Helicobacter pylori; double-stranded, circular
  misc_feature (B) LOCATION 1...1065
  hypothetical: NO
  anti-sense: NO
cagcgtggcagtggggtcattgatagggttaaaaggcatgatcaacaatttaggggaagaataatgctcgcttccattattgaattttccttgcgccagcgaataatcgtgattgttggcgcgattcttgttttgttttttgggacttatagttttatcaacacgccagtagacgctttcccggatatttcgcccactcaagttaaaatcattttaaaactccctggctctagccctgaagaaatggaaaacaacatcgtgcgccctttagaattggagcttttagggctaaaagggcaaaaatctttaagaagtatttcaaaatattctatttcagacatcacgatagattttgatgacagcgtggatatttatttagcgagaaacattgttaatgagcgcttgagcagcgtgatgaaagatttgcctgtgggggttgaagggggcatggcgcccattgttacgccgttgtcagacatctttatgttcaccattgatggcaatatcaccgaaatagaaaaacgacagcttttagactttgtgatccgcccgcaattaagaatgattagcggcgtagcggatgtcaattccattggaggctttagcagagcgtttgtgatcgtgccggattttaatgacatggcaaggcttggggtgagtatttctgatttagaagcggctgtaagagtgaatttaagaaacagcggagcggggcgcgtggatagagatggcgaaacctttttagtcaaaatccaaaccgcttctttgagtttagaagacattggcaaaatcaccatttccactaatttagggcatttgcacattaaggattttgcaaaagtcatcagccagtctcgcacccgtttggggtttgttactaaagatggcgtgggcgagaccacagagggcttggtgctttctttaaaagacgctaacaccaaagaaatcatcactcaagtgtatcaaaaactagaggaattaaaaccctttttaccgagcggcgtttccattaatgttttttatgatcctcagaaatcacgccaaaaagccagtgcccccgtttct

SEQ ID NO: 682 - DNA (genomic), 3060 bp, Helicobacter pylori; double-stranded, circular
  misc_feature (B) LOCATION 1...3060
  hypothetical: NO
  anti-sense: NO
atgctcgcttccattattgaattttccttgcgccagcgaataatcgtgattgttggcgcgattcttgttttgttttttgggacttatagttttatcaacacgccagtagacgctttcccggatatttcgcccactcaagttaaaatcattttaaaactccctggctctagccctgaagaaatggaaaacaacatcgtgcgccctttagaattggagcttttagggctaaaagggcaaaaatctttaagaagtatttcaaaatattctatttcagacatcacgatagattttgatgacagcgtggatatttatttagcgagaaacattgttaatgagcgcttgagcagcgtgatgaaagatttgcctgtgggggttgaagggggcatggcgcccattgttacgccgttgtcagacatctttatgttcaccattgatggcaatatcaccgaaatagaaaaacgacagcttttagactttgtgatccgcccgcaattaagaatgattagcggcgtagcggatgtcaattccattggaggctttagcagagcgtttgtgatcgtgccggattttaatgacatggcaaggcttggggtgagtatttctgatttagaagcggctgtaagagtgaatttaagaaacagcggagcggggcgcgtggatagagatggcgaaacctttttagtcaaaatccaaaccgcttctttgagtttagaagacattggcaaaatcaccatttccactaatttagggcatttgcacattaaggattttgcaaaagtcatcagccagtctcgcacccgtttggggtttgttactaaagatggcgtgggcgagaccacagagggcttggtgctttctttaaaagacgctaacaccaaagaaatcatcactcaagtgtatcaaaaactagaggaattaaaaccctttttaccgagcggcgtttccattaatgttttttatgatcgctcagaattcacgcaaaaagccattgccaccgtttctaaaaccctcattgaagccgttgttttaatcatcatcacgctttttttatttttagggaatttgagagcgagcgtggctgtgggggtgattttacccttaagcttgtccgtggcgtttatttttatcaagattagcgatctgactttaaacttaatgagtttaggggggttggttatcgctataggcatgctcattgactcatctgtggtagtggtggaaaacgcttttgaaaaattgagcgctaacactaaaaccactaaactccatgcaatctatcgttcatgcaaagaaatcgccgtttcagtggtgagcggggtggtgatcattattgtgttttttgtgccgattctaaccttacaggggttagagggcaagatgtttaggcctttagcgcaaagcattgtgtatgcgcttttaggcactttagttctatccatcactatcattcctgtagtgagctctcttgtcttaaaagccacgccccatagcgaaacctttttaacgaggtttttaaacagaatctacgcccctttattggaattttttgtgcataaccctaaaaaagtgattttaggagcgtttgtttttttaatcgcaagcctttctttattcccttttgtggggaagaatttcatgcctgctttagatgagggcgatgtggttttgagcgtggaaaccaccccctctatttccttagatcaatctaaagatctcatgttaaacattgaaagcgcgattaaaaagcatgtcaaagaagttaaaagcattgtcgcgcgcacagggagcgatgaattggggctggatttagggggtttgaatcaaaccgatacttttatttctttcatccctaaaaaagaatggagcgttaaaaccaaagatgaattgttagaaaaaatcatggattctttaaaagactttaaggggattaacttttctttcacccaacccattgaaatgcggatttctgaaatgctgacaggggttaggggggatttagcggttaagatttttggagatgatattagcgaattgaatgaattgagttttcaaatcgcgcaagctctaaaagggattaaaggatctagtgaagttttaaccacgcttaatgagggcgtgaattatttgtatgtaacccctaataaagaatcgatggcggatgtggggatcactagcaatgaattttccaagtttttaaaatccgctttagagggcttggttgtggatgtgatccctacagggatttcacgaaccccagtgatgatccgccaagagagcgattttgcaagctctatcactaaaatcaaaagtttagccttgacttcaaaatatggcgttttagtgcctatcacttctatcgccaaaattgaagaagtggatggccctgtttctattgtgcgtgaaaattcaatgcgcatgagcgtggttcgcagtaatgtggtggggcgcgatttgaactcttttgtagaagaggctaaaaaagtgatcgctcaaaacatcaaactccctcctagttactatatcacttatggggggcagtttgaaaaccagcaacgggccaataaaaggctttctaccgttatccctttaagcatcttagcgatttttttcattctttttttcacttttaaaagcattcctttagccttgcttattcttttgaatatcccttttgcggttaccggagggcttattgcgttgtttgcggtaggggagtatatttcagtgccagcgagcgtgggctttatcgctctttttgggattgcggttttaaacggcgtggtgatgataggctattttaaagagcttctcttacaagggaaaagcgtggaagaatgcgttttattgggtgctaaaaggcgtttgaggccggttttaatgaccgcttgcattgccggtttgggtttgctccctttattattttctcatagcgtgggatccgaagtccaaaaacccttagcgatcgtggtgcttggaggtttggttacctcaagcgctttaaccttactcttactgccgcccatgttcatgctcatcgctaaaaagattaaaatcgtttga

SEQ ID NO: 683 - DNA (genomic), 180 bp, Helicobacter pylori; double-stranded, circular
  misc_feature (B) LOCATION 1...180
  hypothetical: NO
  anti-sense: NO
atgcctattaaccctctctatcttttccccaatctttttaccgctagcagtatttttttaggcatgatgagtattttttacgcttccagttaccaatttgtcatggcgtgttggttagtggtggcgagtcttattttagatgggcttgatgggcgtgtcgcaaggcttaccaaacaccac

SEQ ID NO: 684 - DNA (genomic), 714 bp, Helicobacter pylori; double-stranded, circular
  misc_feature (B) LOCATION 1...714
  hypothetical: NO
  anti-sense: NO
atgcctattaaccctctctatcttttccccaatctttttaccgctagcagtatttttttaggcatgatgagtattttttacgcttccagttaccaatttgtcatggcgtgttggttagtggtggcgagtcttattttagatgggcttgatgggcgtgtcgcaaggcttaccaacaccactagcaagtttggtattgaatttgactctttagctgatgtggtcgcttttggagtcgccccaagccttattacttacttttatgtggggtataactttgggcgtataggcatggcggtgagcgcgttgtttgtgatttttggagcgatacgattagcgcgattcaatatcagcaccaacacaagcgatccctattctttcatcggtatccccattcctgcggcggcggtattggtggtgctttgcgtgttattagataataaataccatttcttagaaggcaataccgaaaagttatttttaggctttattgtcttattaggggtgcttatggtgagcaatatccgctaccctaattttaaaaaagtcaagtggaatctcaagcttttcatcttagtgttgatctttttatcgttagtgtttgtgcgccctttagaggctttgagcgtgtttatggggttgtatttgatctatggcatcattcggtggatctttttaatggtaaaaattatttttaataaaaataaaagcgcatga

SEQ ID NO: 685 - DNA (genomic), 723 bp, Helicobacter pylori; double-stranded, circular
  misc_feature (B) LOCATION 1...723
  hypothetical: NO
  anti-sense: NO
aaagagtctctaatgcctattaaccctctctatcttttccccaatctttttaccgctagcagtatttttttaggcatgatgagtattttttacgcttccagttaccaatttgtcatggcgtgttggttagtggtggcgagtcttattttagatgggcttgatgggcgtgtcgcaaggcttaccaacaccactagcaagtttggtattgaatttgactctttagctgatgtggtcgcttttggagtcgccccaagccttattacttacttttatgtggggtataactttgggcgtataggcatggcggtgagcgcgttgtttgtgatttttggagcgatacgattagcgcgattcaatatcagcaccaacacaagcgatccctattctttcatcggtatccccattcctgcggcggcggtattggtggtgctttgcgtgttattagataataaataccatttcttagaaggcaataccgaaaagttatttttaggctttattgtcttattaggggtgcttatggtgagcaatatccgctaccctaattttaaaaaagtcaagtggaatctcaagcttttcatcttagtgttgatctttttatcgttagtgtttgtgcgccctttagaggctttgagcgtgtttatggggttgtatttgatctatggcatcattcggtggatctttttaatggtaaaaattacttttaataaaaataaaagcgca

SEQ ID NO: 686 - DNA (genomic), 366 bp, Helicobacter pylori; double-stranded, circular
  misc_feature (B) LOCATION 1...366
  hypothetical: NO
  anti-sense: NO
gtactggggggtaatattgcgagtgctggccctttagggaccttgatcgcttattgttttgaagggcttgtggtctattgcatcatgctctctttaggcgagttggctagcgtttaccccactacgggaagttttggggattatgcggctaaattcatagcccttggcacgggctatatggttttttggatgtattggcttggctgggtaatcacggttgcgttagaatacatcgctataggcatgctcatgcaacgctggtttgtaaatattcccatccattattgggtcatttcatgcattgcgttggtttttttattgaactttttttcggttaaaatttttgccgagggcgagtttttatgc

SEQ ID NO: 687 - DNA (genomic), 456 bp, Helicobacter pylori; double-stranded, circular
  misc_feature (B) LOCATION 1...456
  hypothetical: NO
  anti-sense: NO
tttatgggctgtccaaacaaaagatgttttttaaagttttttcccaactcaaccgacaaggcaacgcccacttatgcgatgtttttttccctttctttttccctcatagggcttttagtccaaatttatgccaaagaaaatgtcgtggaagctttgattaatgtgatcagtttcacggtgattatcgtgtgggttagcgtgtccatttcgcaatattctttccgcaagcaatatttaaaagccgggcattctttagaggatttgccttataaagcccctttcctgccctttttgcaactcatagggatcactgggtgtattatcggtgtgattggttcggctatggataaggatcaacgcatcgggatgattttaacgattgtttttgctgttgtgtgttacattggatactattttacacaaaaagctaatgaaaataacaaaaaagatttgata

SEQ ID NO: 688 - DNA (genomic), 678 bp, Helicobacter pylori; double-stranded, circular
  misc_feature (B) LOCATION 1...678
  hypothetical: NO
  anti-sense: NO
ttgtgctttttctttttaagctctgtgtttgtcatttctgtttttttacccatgagcgattcttctatcgcgcaaagcccctttgtgagcgttttagaacgcatcaacttgccctttattggcatgggtatcccttatgtggctgatataatgaacgctgttatcattacggcgatgttttctaccgctaattcagggctttatggagcgagccgcatgatttatgggctgtccaaacaaaagatgttttttaaagttttttcccaactcaaccgacaaggcacgcccacttatgcgatgtttttttccctttctttttccctcatagggcttttagtccaaatttatgccaaagaaaatgtcgtggaagctttgattaatgtgatcagtttcacggtgattatcgtgtgggttagcgtgtccatttcgcaatattctttccgcaagcaatatttaaaagccgggcattctttagaggatttgccttataaagcccctttcctgccctttttgcaactcatagggatcactgggtgtattatcggtgtgattggttcggctatggataaggatcaacgcatcgggatgattttaacgattgtttttgctgttgtgtgttacattggatactattttacacaaaaagctaatgaaaataacaaaaaagatttgatataa

SEQ ID NO: 689 - DNA (genomic), 714 bp, Helicobacter pylori; double-stranded, circular
  misc_feature (B) LOCATION 1...714
  hypothetical: NO
  anti-sense: NO
atggaacatcaaaataccacgcaaaaacaaggcgagcttaaaagagacatgaaaatgcgccatctcttgatgattgcctttgggggagcgatcggcacagggctttttgtaggcactgggggtaatattgcgagtgctggccctttagggaccttgatcgcttattgttttggagggcttgtggtctattgcatcatgctctctttaggcgagttggctagcgtttaccccactacgggaagttttggggattatgcggctaaattcataggccctggcacgggctatatggttttttggatgtattggcttggctgggtaatcacggttgcgttagaatacatcgctataggcatgctcatgcaacgctggtttgtaaatattcccatccattattgggtcatttcatgcattgcgttggtttttttattgaactttttttcggttaaaatttttgccgagggcgagtttttctttagcctgattaaagttttagcggtgatcgcttttataagcattggcgtaattgggatcatttatcaaatctatttgcatgggtttagttctatttttgataacttccattttggcgataaggggtttttccctaacgggagcgaggcggtttttaacgcgatgctcgctgtaatttttgctttcactggcacagaagtcattggagtggatgtacgcgaaaggcaagacgcgggctaa

SEQ ID NO: 690 - DNA (genomic), 1428 bp, Helicobacter pylori; double-stranded, circular
  misc_feature (B) LOCATION 1...1428
  hypothetical: NO
  anti-sense: NO
atggaacatcaaaataccacgcaaaaacaaggcgagcttaaaagagacatgaaaatgcgccatctcttgatgattgcctttgggggagcgatcggcacagggctttttgtaggcactgggggtaatattgcgagtgctggccctttagggaccttgatcgcttattgttttggagggcttgtggtctattgcatcatgctctctttaggcgagttggctagcgtttaccccactacgggaagttttggggattatgcggctaaattcataggccctggcacgggctatatggttttttggatgtattggcttggctgggtaatcacggttgcgttagaatacatcgctataggcatgctcatgcaacgctggtttgtaaatattcccatccattattgggtcatttcatgcattgcgttggtttttttattgaactttttttcggttaaaatttttgccgagggcgagtttttctttagcctgattaaagttttagcggtgatcgcttttataagcattggcgtaattgggatcatttatcaaatctatttgcatgggtttagttctatttttgataacttccattttggcgataaggggtttttccctaacgggagcgaggcggtttttagcgcgatgctcgctgttatttttgctttcactggcacagaagtcattggagtggctgtaggcgagactaaaaacgctagcgaagtgatgcccaaagcgattaaagcgactttgtggcggattgtctttttctttttaggctctgtgtttgtcatttctgtttttttacccatgagcgattcttctatcgcgcaaagcccctttgtgagcgttttagaacgcatcaacttgccctttattggcatgggtatcccttatgtggctgatataatgaacgctgttatcattacggcgatgttttctaccgctaattcagggctttatggagcgagccgcatgatttatgggctgtccaaacaaaagatgttttttaaagttttttcccaactcaaccgacaaggcacgcccacttatgcgatgtttttttccctttctttttccctcatagggcttttagtccaaatttatgccaaagaaaatgtcgtggaagctttgattaatgtgatcagtttcacggtgattatcgtgtgggttagcgtgtccatttcgcaatattctttccgcaagcaatatttaaaagccgggcattctttagaggatttgccttataaagcccctttcctgccctttttgcaactcatagggatcactgggtgtattatcggtgtgattggttcggctatggataaggatcaacgcatcgggatgattttaacgattgtttttgctgttgtgtgttacattggatactattttacacaaaaagctaatgaaaataacaaaaaagatttgatataa

SEQ ID NO: 691 - DNA (genomic), 219 bp, Helicobacter pylori; double-stranded, circular
  misc_feature (B) LOCATION 1...219
  hypothetical: NO
  anti-sense: NO
tttgtcacgcgcatgattaaaaccacggccttagtctctctcattggagcggttgatttgttaaaagtgggccagcaaatcatagagcttaacctcttacgcatgcctaatgcgagctttgtggtttatggcgttatcttaatgttttattttactttatgctatagtttgagcctgtatagttcctatttagaaaaaaaattccaatacattagaggg

SEQ ID NO: 692 - DNA (genomic), 492 bp, Helicobacter pylori; double-stranded, circular
  misc_feature (B) LOCATION 1...492
  hypothetical: NO
  anti-sense: NO
agcgttcttttaaaaagaaagtggcttaaaatgggagttttattagagttagacaatctcaagcgtttgttagaagggtttgaaaccactcttttaatcgctcttagctctgcgattatttcaatcgttgttggaatgcttttggggagtttgatggcgtttggttctaaaataatggttttggcgtgtcgtgtgtatttagaaagcattcgcattatcccgcttttagcatggctttttattgtgtattttgggttagcgagctggtttgatttgcatattagcgcggttttagcgagcgttattgtttttagcttgtgggggggcgctgaaatgatggatttaactagaggggttttaacttccgtgagcaaacaccaagtagaaagcgctctagccttaggcttagattcaaaaaaggtgatttttaatgttattttccctcaaagctttttgtctttactgccctcaagccttaatttgtcacgcgca

SEQ ID NO: 693 - DNA (genomic), 672 bp, Helicobacter pylori; double-stranded, circular
  misc_feature (B) LOCATION 1...672
  hypothetical: NO
  anti-sense: NO
atgggagttttattagagttagacaatctcaagcgtttgttagaagggtttgaaaccactcttttaatcgctcttagctctgcgattatttcaatcgttgttggaatgcttttggggagtttgatggcgtttggttctaaaataatggttttggcgtgtcgtgtgtatttagaaagcattcgcattatcccgcttttagcatggctttttattgtgtattttgggttagcgagctggtttgatttgcatattagcgcggttttagcgagcgttattgtttttagcttgtgggggggcgctgaaatgatggatttaaccagaggggttttaacttccgtgagcaaacaccaagtagaaagcgctctagccttaggcttagattcaaaaaaggtgatttttaatgttattttccctcaaagctttttgtctttactgccctcaagccttaatttattcacgcgcatgattaaaaccacggccttagtctctctcattggagcggttgatttgttaaaagtgggccagcaaatcatagagcttaacctcttacgcatgcctaatgcgagctttgtggtttatggcgttatcttaatgttttattttactttatgctatagtttgagcctgtatagttcctatttagaaaaaaaattccaatacattagagggtaa

SEQ ID NO: 694 - DNA (genomic), 675 bp, Helicobacter pylori; double-stranded, circular
  misc_feature (B) LOCATION 1...675
  hypothetical: NO
  anti-sense: NO
aaaaaaaattccaatacattagagggtaaaatgagcgcgattttagaaaccaaagggttaaaaaaaacctatcaaaaccatttggttttagacggcattaatttcactttaaataagggtgaagtggcagtgattttagggcctagcgggtgcgggaaaagcacttttttaaaatgcctaaacgggcttgaaaagattgatgagggtgaaatcctttttgaaaacactaatcttaatacaccatctactaactggaatcaaatgcgccaaaaaataggcatggtgtttcaaaattatgaattgttcccgcatttaaatgtgctagataatatcttactcgcccccttaaaagtgcaaaaacgatccaaagatgaggtcctttctcaagccgtagagcttttaaagcgagtgggtttggagcataaacaacaagcttaccctaaagaattgagcggcgggcaaaaacaacgagtagcgatcgtgcgttctttatgcatgcggccaaaaatcatgctctttgatgaagtaaccgcctcattagatcctgaaatggttaaagaagttttagaagtgattttagagttagccaaaacgggcatgagcatggtaattgtaacgcatgaaatgaaattcgcgcaaaaaatcgctagcaaaatcgtgttttttgatagcggg

SEQ ID NO: 695 - DNA (genomic), 747 bp, Helicobacter pylori; double-stranded, circular
  misc_feature (B) LOCATION 1...747
  hypothetical: NO
  anti-sense: NO
atgagcgcgattttagaaaccaaagggttaaaaaaaacctatcaaaaccatttggttttagacggcattaatttcactttaaataagggtgaagtggcagtgattttagggcctagcgggtgcgggaaaagcacttttttaaaatgcctaaacgggcttgaaaagattgatgagggtgaaatcctttttgaaaacactaatcttaatacaccatctactaactggaatcaaatgcgccaaaaaataggcatggtgtttcaaaattatgaattgttcccgcatttaaatgtgctagataatatcttactcgcccccttaaaagtgcaaaaacgatccaaagatgaggtcctttctcaagccgtagagcttttaaagcgagtgggtttggagcataaacaacaagcttaccctaaagaattgagcggcgggcaaaaacaacgagtagcgatcgtgcgttctttatgcatgcggccaaaaatcatgctctttgatgaagtaaccgcctcattagatcctgaaatggttaaagaagttttagaagtgattttagagttagccaaaacgggcatgagcatggtaattgtaacgcatgaaatgaaattcgcgcaaaaaatcgctagcaaaatcgtgttttttgatagcggtaagatcgctgaagaaaacagcgctaaagaattttttaaccaccctaaatctcaaagagcgcaaaaatttttagaaactttccattttttagggagctgttaa

SEQ ID NO: 696 - DNA (genomic), 156 bp, Helicobacter pylori; double-stranded, circular
  misc_feature (B) LOCATION 1...156
  hypothetical: NO
  anti-sense: NO
atgcctaaaagtttcaccttaccgactttcgtgtggtgtttgtttgtgggggttatcttaaggaacgctttgtcgttttttaaaatccatagcgtgtttgacagagaggtttcagttatagggaatgtgagcttgagcctgtttttagcttacgct

SEQ ID NO: 697 - DNA (genomic), 1227 bp, Helicobacter pylori; double-stranded, circular
  misc_feature (B) LOCATION 1...1227
  hypothetical: NO
  anti-sense: NO
ttgcaagaaattaaattagacatttatgccactttagtgtgcatggttttggtgttgcttttggggcgttatgtgatttctaaagtcaagtttttaagagattatgatattccagagcctgttgtgggtggggttttagtcgctttttttatcatgttagcgcgtcaattttatcattttggcttgcagtttgattcttctttaaaagatcctttaatgctgactttcttcatcaccattggtttgagcgcggatttcaaatctttacaaaaaggcgggaaaatgcttgcggtttttttgctggctgtagcggggtttgtggtgtgccaaaatgcagtggggatttctatcgctagccttttaggggtcaatcctttaatggggcttttagggggatcgatcgctttagtgggtgggcatggcactagtgcggcatgggctaattttttcacccaaccaccttatcattttagctctagcttggaagtgggcatggcgtgcgcgacttttggcttggtgagcggggggattattggagggcctgtcgctaaatatttgatttctaaatacaaactagaacctaaagacactaaagaaaaagacactttagagggcgtggtgtctaaaggttttgaaacccctaaagagcagcgcctaatcactgcatccagttttgtagaaactttagctctcattgcaatagctttattagtggggacttttttatcgcatttgatgcctaaaagtttcaccttaccgactttcgtgtggtgtttgtttgtgggggttatcttaaggaacgctttgtcgttttttaaaatccatagcgtgtttgacagagaggtttcagttatagggaatgtgagcttgagcctgtttttagcttacgctttaatgagcgtgaatttattggaattgttaaaactcgctgtgcctttagcggttattttgagcgttcaagtggcggttatgatcctttatgtggtgcttgtaacctttagggtatgcgggaaggattatgatgcggcggtgttgtgcgcggggcattgcggttttgggcttggagcgaccccaacggctatggtgaatatgcaaaccatcaccaaccactatgggccatcgcatgtggcgtttatcgtcgtgcctttagtgggagcgttttttgttgatattattaacgctttagcgattaaaggctttttgcttttgccttttttccctagttaa

SEQ ID NO: 698 - DNA (genomic), 1248 bp, Helicobacter pylori; double-stranded, circular
  misc_feature (B) LOCATION 1...1248
  hypothetical: NO
  anti-sense: NO
ttgattaataaggatacaggcttgcaagaaattaaattagacatttatgccactttagtgtgcatggttttggtgttgcttttggggcgttatgtgatttctaaagtcaagtttttaagagattatgatattccagagcctgttgtgggtggggttttagtcgctttttttatcatgttagcgcgtcaattttatcattttggcttgcagtttgattcttctttaaaagatcctttaatgctgactttcttcatcaccattggtttgagcgcggatttcaaatctttacaaaaaggcgggaaaatgcttgcggtttttttgctggctgtagcggggtttgtggtgtgccaaaatgcagtggggatttctatcgctagccttttaggggtcaatcctttaatggggcttttagggggatcgatcgctttagtgggtgggcatggcactagtgcggcatgggctaattttttcacccaaccaccttatcattttagctctagcttggaagtgggcatggcgtgcgcgacttttggcttggtgagcggggggattattggagggcctgtcgctaaatatttgatttctaaatacaaactagaacctaaagacactaaagaaaaagacactttagagggcgtggtgtctaaaggttttgaaacccctaaagagcagcgcctaatcactgcatccagttttgtagaaactttagctctcattgcaatagctttattagtggggacttttttatcgcatttgatgcctaaaagtttcaccttaccgactttcgtgtggtgtttgtttgtgggggttatcttaaggaacgctttgtcgttttttaaaatccatagcgtgtttgacagagaggtttcagttatagggaatgtgagcttgagcctgtttttagcttacgctttaatgagcgtgaatttattggaattgttaaaactcgctgtgcctttagcggttattttgagcgttcaagtggcggttatgatcctttatgtggtgcttgtaacctttagggtatgcgggaaggattatgatgcggcggtgttgtgcgcggggcattgcggttttgggcttggagcgaccccaacggctatggtgaatatgcaaaccatcaccaaccactatgggccatcgcatgtggcgtttatcgtcgtgcctttagtgggagcgttttttgttgatattattaacgctttagcgattaaaggctttttgcttttgccttttttccctagttaa

SEQ ID NO: 699 - DNA (genomic), 1287 bp, Helicobacter pylori; double-stranded, circular
  misc_feature (B) LOCATION 1...1287
  hypothetical: NO
  anti-sense: NO
tctcgttcttttagggggctattatattataataagataaatttgattaataaggatacaggcttgcaagaaattaaattagacatttatgccactttagtgtgcatggttttggtgttgcttttggggcgttatgtgatttctaaagtcaagtttttaagagattatgatattccagagcctgttgtgggtggggttttagtcgctttttttatcatgttagcgcgtcaattttatcattttggcttgcagtttgattcttctttaaaagatcctttaatgctgactttcttcatcaccattggtttgagcgcggatttcaaatctttacaaaaaggcgggaaaatgcttgcggtttttttgctggctgtagcggggtttgtggtgtgccaaaatgcagtggggatttctatcgctagccttttaggggtcaatcctttaatggggcttttagggggatcgatcgctttagtgggtgggcatggcactagtgcggcatgggctaattttttcacccaaccaccttatcattttagctctagcttggaagtgggcatggcgtgcgcgacttttggcttggtgagcggggggattattggagggcctgtcgctaaatatttgatttctaaatacaaactagaacctaaagacactaaagaaaaagacactttagagggcgtggtgtctaaaggttttgaaacccctaaagagcagcgcctaatcactgcatccagttttgtagaaactttagctctcattgcaatagctttattagtggggacttttttatcgcatttgatgcctaaaagtttcaccttaccgactttcgtgtggtgtttgtttgtgggggttatcttaaggaacgctttgtcgttttttaaaatccatagcgtgtttgacagagaggtttcagttatagggaatgtgagcttgagcctgtttttagcttacgctttaatgagcgtgaatttattggaattgttaaaactcgctgtgcctttagcggttattttgagcgttcaagtggcggttatgatcctttatgtggtgcttgtaacctttagggtatgcgggaaggattatgatgcggcggtgttgtgcgcggggcattgcggttttgggcttggagcgaccccaacggctatggtgaatatgcaaaccatcaccaaccactatgggccatcgcatgtggcgtttatcgtcgtgcctttagtgggagcgttttttgttgatattattaacgctttagcgattaaaggctttttgcttttgccttttttccctagt

SEQ ID NO: 700 - DNA (genomic), 420 bp, Helicobacter pylori; double-stranded, circular
  misc_feature (B) LOCATION 1...420
  hypothetical: NO
  anti-sense: NO
aatacagggaaaaaggggcgtttggttacaacggagggcccatgtattacatcaaaaacggccttaacatgcccaaactcgccattggcgtttgcgatttttacgattattgcgagcattggcaccggtaacatgacgcaatccaatgcggtttcttccattttaagcgaacaagcgaacttgcctaattgggtttcaggtttattgctcacccttttaaccgctgttattgtcataggggggatcaaatccattggtaaattcacttcttacttagctcctgtcatggtgcttttatatttaattgctattatttatattattgttagccattttgatttagcccttcaagcgatcaaactcatttttgaagaagcttttaaccctaaacccgttgtagcggagcgagcggcacgttgg

SEQ ID NO: 701 - DNA (genomic), 447 bp, Helicobacter pylori; double-stranded, circular
  misc_feature (B) LOCATION 1...447
  hypothetical: NO
  anti-sense: NO
tctaatctggtatgggagtttcccatacaaattatattagcaggcaccgtgttgtttttaactttgtattttaggggtcagcaattaagtaaaatctcttatgcgatcaaaatcctttttgacaaagagtcccattctaagggcgatatttcgcaattttccgccctcatgctttctttaggagcaaccgtaggcattgggagtatcgtaggcgtagcgaccgctatcagcatcgcagggccaggagcggtgttttggatgtgggttactgggcttgttggcatggcgactaagtattctgaggggattttagcggtgaaatacagggaaaaaggggcgtttggttacaacggagggcccatgtattacatcaaaaacggccttaacatgcccaaactcgccattggcgtttgcgatttttacgattattgcgagcattggcaccgg

SEQ ID NO: 702 - DNA (genomic), 483 bp, Helicobacter pylori; double-stranded, circular
  misc_feature (B) LOCATION 1...483
  hypothetical: NO
  anti-sense: NO
atggaaacgattgattcggtggtgcgtttattatctaatttggtgtgggggattcccatgcaaattttattagtaggcaccggtttgtttttaaccttctatcttaggggtttgcaattcagtaaaatcttttatgcgatcaaaatcctttttgacaaagagtcccattctaagggcgatatttcgcaattttccgccctcatgctttctttaggagcaaccgtaggcattgggagtatcgtaggcgtagcgaccgctatcagcatcgcagggccaggagcggtgttttggatgtgggttactgggcttgttggcatggcgactaagtattctgaggggattttagcggtgaaatacagggaaaaaggggcgtttggatacaacggagggcccatgtattacatcaaaaacggccttaacatgcccaaactcgccattggcgtttgcgatttttacgattattgcgagcattggcaccggtaa

SEQ ID NO: 703 - DNA (genomic), 774 bp, Helicobacter pylori; double-stranded, circular
  misc_feature (B) LOCATION 1...774
  hypothetical: NO
  anti-sense: NO
atggaaacgattgattcggtggtgcgtttattatctaatttggtgtgggggattcccatgcaaattttattagtaggcaccggtttgtttttaaccttctatcttaggggtttgcaattcagtaaaatcttttatgcgatcaaaatcctttttgacaaagagtcccattctaagggcgatatttcgcaattttccgccctcatgctttctttaggagcaaccgtaggcattgggagtatcgtaggcgtagcgaccgctatcagcatcgcagggccaggagcggtgttttggatgtgggttactgggcttgttggcatggcgactaagtattctgaggggattttagcggtgaaatacagggaaaaaggggcgtttggatacaacggagggcccatgtattacatcaaaaacggccttaacatgcccaaactcgccatggcgtttgcgatttttacgattattgcgagcattggcaccggtaacatgacgcaatccaatgcggtttcttccattttaagcgaacaagcgaacttgcctaattgggtttcaggtttattgctcacccttttaaccgctgttattgtcataggggggatcaaatccattggtaaattcacttcttacttagctcctgtcatggtgcttttatatttaattgctattatttatattattgttagccattttgatttagcccttcaagcgatcaaactcatttttgaagaagcttttaaccctaaacccgttgtagcggagcgagcggcacgttggtag

SEQ ID NO: 704 - DNA (genomic), 267 bp, Helicobacter pylori; double-stranded, circular
  misc_feature (B) LOCATION 1...267
  hypothetical: NO
  anti-sense: NO
atgggtgtggtgattggcgagaccacagagattggagatgatgttaccatttatcatggcgtaactctggggggtacgggcaagtttaagggcaaacgccaccctactttaggcaaccgagtggtagttggggcaggggctaaggtcttgggcgcgatttgcgtgggcgatgatgtgaggattggggctaatgcggtggtgctttcagatttacccacgggttctacggctgtaggtgctaaagccaaaaccatcacaaaggatcgt

SEQ ID NO: 705 - DNA (genomic), 333 bp, Helicobacter pylori; double-stranded, circular
  misc_feature (B) LOCATION 1...333
  hypothetical: NO
  anti-sense: NO
tttatcactgggatagaaatccacccgggcgctaagattgggagagggctttttattgatcatggcatgggtgtggtgattggcgagaccacagagattggagatgatgttaccatttatcatggcgtaactctggggggtacgggcaagtttaagggcaaacgccaccctactttaggcaaccgagtggtagttggggcaggggctaaggtcttgggcgcgatttgcgtgggcgatgatgtgaggattggggctaatgcggtggtgctttcagatttacccacgggttctacggctgtaggtgctaaagccaaaaccatcacaaaggatcgt

SEQ ID NO: 706 - DNA (genomic), 330 bp, Helicobacter pylori; double-stranded, circular
  misc_feature (B) LOCATION 1...330
  hypothetical: NO
  anti-sense: NO
atcactgggatagaaatccacccgggcgctaagattgggagagggctttttattgatcatggcatgggtgtggtgattggcgagaccacagagattggagatgatgttaccatttatcatggcgtaactctggggggtacgggcaagtttaagggcaaacgccaccctactttaggcaaccgagtggtagttggggcaggggctaaggtcttgggcgcgatttgcgtgggcgatgatgtgaggattggggctaatgcggtggtgctttcagatttacccacgggttctacggctgtaggtgctaaagccaaaaccatcacaaaggatcgt

SEQ ID NO: 707 - DNA (genomic), 441 bp, Helicobacter pylori; double-stranded, circular
  misc_feature (B) LOCATION 1...441
  hypothetical: NO
  anti-sense: NO
ttgctttatccgggcattcatgcactgctttgttaccgcctagcgcatgcgttgcacaagcggaggttttacttcatcgctcgcgcgctttctcagttggcgcgttttatcactgggatagaaatccacccgggcgctaagattgggagagggctttttattgatcatggcatgggtgtggtgattggcgagaccacagagattggagatgatgttaccatttatcatggcgtaactctggggggtacgggcaagtttaagggcaaacgccaccctactttaggcaaccgagtggtagttggggcaggggctaaggtcttgggcgcgatttgcgtgggcgatgatgtgaggattggggctaatgcggtggtgctttcagatttacccacgggttctacggctgtaggtgctaaagccaaaaccatcacaaaggatcgttaa

SEQ ID NO: 708 - DNA (genomic), 516 bp, Helicobacter pylori; double-stranded, circular
  misc_feature (B) LOCATION 1...516
  hypothetical: NO
  anti-sense: NO
atgttggattgttcttatagcctggagcgtgtcttgcaagaagacccggcagctaggaataagtgggaggttctcttgctttatccgggcattcatgcactgctttgttaccgcctagcgcatgcgttgcacaagcggaggttttacttcatcgctcgcgcgctttctcagttggcgcgttttatcactgggatagaaatccacccgggcgctaagattgggagagggctttttattgatcatggcatgggtgtggtgattggcgagaccacagagattggagatgatgttaccatttatcatggcgtaactctggggggtacgggcaagtttaagggcaaacgccaccctactttaggcaaccgagtggtagttggggcaggggctaaggtcttgggcgcgatttgcgtgggcgatgatgtgaggattggggctaatgcggtggtgctttcagatttacccacgggttctacggctgtaggtgctaaagccaaaaccatcacaaaggatcgttaa

SEQ ID NO: 709 - DNA (genomic), 516 bp, Helicobacter pylori; double-stranded, circular
  misc_feature (B) LOCATION 1...516
  hypothetical: NO
  anti-sense: NO
atgttggatttgtcttatagcctggagcgtgtcttgcaagaagacccggcagctaggaataagtgggaggttctcttgctttatccgggcattcatgcactgctttgttaccgcctagcgcatgcgttgcacaagcggaggttttacttcatcgctcgcgcgctttctcagttggcgcgttttatcactgggatagaaatccacccgggcgctaagattgggagagggctttttattgatcatggcatgggtgtggtgattggcgagaccacagagattggagatgatgttaccatttatcatggcgtaactctggggggtacgggcaagtttaagggcaaacgccaccctactttaggcaaccgagtggtagttggggcaggggctaaggtcttgggcgcgatttgcgtgggcgatgatgtgaggattggggctaatgcggtggtgctttcagatttacccacgggttctacggctgtaggtgctaaagccaaaaccatcacaaaggatcgttaa

SEQ ID NO: 710 - DNA (genomic), 174 bp, Helicobacter pylori; double-stranded, circular
  misc_feature (B) LOCATION 1...174
  hypothetical: NO
  anti-sense: NO
ttggattttattgaaaatttaggcggccccattatcgcgctcattctgtttgtgatgcccatgatagctttttatagcgtttctagtttgaagcgttttagaaacttcaaagtggatatttttgtgtttgtctttgggagcttgacggctttgagcgtgtttttaggactattt

SEQ ID NO: 711 - DNA (genomic), 444 bp, Helicobacter pylori; double-stranded, circular
  misc_feature (B) LOCATION 1...444
  hypothetical: NO
  anti-sense: NO
tggggttttcttatcactttgctttatttcttggcgatttatcctatttgtttggcttatggggtgggtatcactaacgtgtttgatcattttttcactaaccagttgcatttagcgccttttcatcggggcttactggctgtagcgttagtctctttaatgatgttggtgatggtttttaacgctacgattgttacgcgcatttgtaacgctttagtgtatcctttatgcttgattttattgcttttttctttgtatcttatcccttattggcaaggcgctaacctttttgtggtgccgagttttaaagaatttgtgctagccatttggctaaccttaccggtgcttgtgttttcattcaaccatagccccattatttcaaccttcacccaaaatgtgggaaaagaatacggcgctttcaaagaagtacaaactcaatcaaat

SEQ ID NO: 712 - DNA (genomic), 441 bp, Helicobacter pylori; double-stranded, circular
  misc_feature (B) LOCATION 1...441
  hypothetical: NO
  anti-sense: NO
ggttttcttatcactttgctttatttcttggcgatttatcctatttgtttggcttatggggtgggtatcactaacgtgtttgatcattttttcactaaccagttgcatttagcgccttttcatcggggcttactggctgtagcgttagtctctttaatgatgttggtgatggtttttaacgctacgattgttacgcgcatttgtaacgctttagtgtatcctttatgcttgattttattgcttttttctttgtatcttatcccttattggcaaggcgctaacctttttgtggtgccgagttttaaagaatttgtgctagccatttggctaaccttaccggtgcttgtgttttcattcaaccatagccccattatttcaaccttcacccaaaatgtgggaaaagaatacggcgctttcaaagaagtacaaactcaatcaaat

SEQ ID NO: 713 - DNA (genomic), 954 bp, Helicobacter pylori; double-stranded, circular; identical to SEQ ID NO: 653
  misc_feature (B) LOCATION 1...954
  hypothetical: NO
  anti-sense: NO

SEQ ID NO: 714 - DNA (genomic), 312 bp, Helicobacter pylori; double-stranded, circular
  misc_feature (B) LOCATION 1...312
  hypothetical: NO
  anti-sense: NO
tccacctggcagcaggccaatattggtggggggggttttgcggttatccatttggctaatggtgaaaatgttgccttagattttagagaaaaagcccccttaaaagccactaaaaacatgtttttagacaagcaaggcaatgtggtccctaaactcagcgaagatggctatttggcggctggggttcctggaacggtggcgggcatggaagcgatgctgaaaaaatacggcaccaaaaaactatcgcaactcattgatcctgccattaaattggctgaaaatggttatgcgatttcacaaagacaagcagaa

SEQ ID NO: 715 - DNA (genomic), 675 bp, Helicobacter pylori; double-stranded, circular
  misc_feature (B) LOCATION 1...675
  hypothetical: NO
  anti-sense: NO
atgagacggagttttttaaaaacgattggcttgggcgtgatagcgctctctttggggttgttaaaccctttgagcgcggcgagttacccccccattaaaaacactaaagtggggttagccctttctagccacccgctagccactgagatcgggcaaaaggttttagaagagggaggcaatgcgattgatgcggccgtagcgataggattcgctctagcagtagtccatccggcagcaggcaatattggtggggggggttttgcggttatccatttggctaatggtgaaaatgttgccttagattttagagaaaaagcccccttaaaagccactaaaaacatgtttttagacaagcaaggcaatgtggtccctaaactcagcgaagatggctatttggcggctggggttcctggaacggtggcgggcatggaagcgatgctgaaaaaatacggcaccaaaaaactatcgcaactcattgatcctgccattaaattggctgaaaatggttatgcgatttcacaaagacaagcagaaaccttaaaagaagcaagggagcggtttttaaaatacagttctagcaaaaagtatttttttaaaaaaggacaccttgattatcaagaaggggatttgtttgtccaaaaagatttagccaagactttgaatcctcttccccac

SEQ ID NO: 716 - DNA (genomic), 243 bp, Helicobacter pylori; double-stranded, circular
  misc_feature (B) LOCATION 1...243
  hypothetical: NO
  anti-sense: NO
gcgaacaattttttggaaaagatgtcagccagccctaatctgtctttgttttttgaatctttagatttaagcaaggagcgtttagaattattattagaagctttctaccccatgttaaaagccgctttttgcatttctttgcctttagcgatcatttcttttattttaggattattgattgctattgtggtggctctcattaaaatcgcaccccctaaacatttcatgcataaggctttatta

SEQ ID NO: 717 - DNA (genomic), 264 bp, Helicobacter pylori; double-stranded, circular
  misc_feature (B) LOCATION 1...264
  hypothetical: NO
  anti-sense: NO
attacttgcaaaccttttggcatgtcatcttttttcaagcgctcaaagtcgccacggccaagcctaagtaacactttcatcagcctttttaaagaaacttctttagcgtctgtggtcactatcgcagaggtttttagaatcgcacagcaaaaagcgaacgccagctatgactttctgcctatttatttggaagccgctttgatttactggcttttttgcttggttttagaagtgattcaaaagcgcgtggaaaaaatcttaaat

SEQ ID NO: 718 - DNA (genomic), 282 bp, Helicobacter pylori; double-stranded, circular
  misc_feature (B) LOCATION 1...282
  hypothetical: NO
  anti-sense: NO
ttctatgtctcgatcattaaatgcacgcctttattggtccaaatcgtaatcgtgttttatggtttgcccgcccttggggtctatatggatccaatcccggcaggcattattgcgttttcttttaatgtgggggcatacgcttcagagactttgagggcgagctttctttctgtccctaaagatcaatgggattcaagcttgagtttgggcttgaattacttgcaaaccttttggcatgtcatcttttttcaagcgctcaaagtcgccacggccaagcctaag

SEQ ID NO: 719 - DNA (genomic), 447 bp, Helicobacter pylori; double-stranded, circular
  misc_feature (B) LOCATION 1...447
  hypothetical: NO
  anti-sense: NO
ttggtccaaatcgtagtcgtgttttatggtttgcccgcccttggggtctatatggatccaatcccggcaggcattattgcgttttcttttaatgtgggggcatacgcttcagagactttgagggcgagctttctttctgtccctaaagatcaatgggattcaagcttgagtttgggcttgaattacttgcaaaccttttggcatgtcatcttttttcaagcgctcaaagtcgccacgccaagcctaagtaacactttcatcagcctttttaaagaaacttctttagcgtctgtggtcactatcgcagaggkttttagaatcgcacagcaaaaagygaacgtcagctatgactttyygcctatttatttggaagkcgctttgatttactggcttttttgcttggttttagaagtgattcaaaagcgcgtggaaaaaatcttaaattaa

SEQ ID NO: 720 - DNA (genomic), 723 bp, Helicobacter pylori; double-stranded, circular
  misc_feature (B) LOCATION 1...723
  hypothetical: NO
  anti-sense: NO
ttggaaaagatgtcagccagccctaatctgtctttgttttttgaatctttagatttaagcaaggagcgtttagaattattattagaggctttctaccccatgttaaaagccgctttttgcatttctttgcctttagcgatcatttcttttattttaggattattgattgctattgtggtggctctcattaaaatcgcaccccctaaacatttcatgcacaaggctttattagcgggcgtgaatttctatgtctcgatcattagaggcacgcctttattggtccaaatcgtagtcgtgttttatggtttgcccgcccttggggtctatatggatccaatcccggcaggcattattgcgttttcttttaatgtgggggcatacgcttcagagactttgagggcgagctttctttctgtccctaaagatcaatgggattcaagcttgagtttgggcttgaattacttgcaaaccttttggcatgtcatcttttttcaagcgctcaaagtcgccacgccaagcctaagtaacactttcatcagcctttttaaagaaacttctttagcgtctgtggtcactatcgcagaggtttttagaatcgcacagcaaaaagcgaacgccagctatgactttctgcctatttatttggaagccgctttgatttactggcttttttgcttggttttagaagtgatccaaaagcgcgtggaaaaaatcttaaattaa

SEQ ID NO: 721 - DNA (genomic), 570 bp, Helicobacter pylori; double-stranded, circular
  misc_feature (B) LOCATION 1...570
  hypothetical: NO
  anti-sense: NO
atgaaaaagattttatttttcatttttgttgttttgttttcggtagggatttatttaacttggcatgttttgttggaaaaatctctagaattgaaattagtaacttcggctaacgatttgcttttaaaattgttcgcgcttcttggcgttttttcaatattagtgctttttcaaggcgttatttcttcgtataaagagcgccaactcaaacgcattctacaaaaaatagacgccatgaacggctttgaatttgaagaatattccaaaatctttttcacttcaaagggttttgaagtcacaatcactcaaaaaagcggcgattatggagcggatttgattgcagaaaaagacggcgtcaaatgggcggttcaagccaaacgctactcgcacaaagtttcgcccaaagccattcaagaggtggtttcttctaaagcttactacgcttgcgaaaaagcctgcgtaatcaccaatagctacttcacgcaagcggctcaaaaactggctcaagctaatgaagtgattttgattgatagagacgaatgggtcaaatttttgggtgggaaaaactaa

SEQ ID NO: 722 - DNA (genomic), 570 bp, Helicobacter pylori; double-stranded, circular
  misc_feature (B) LOCATION 1...570
  hypothetical: NO
  anti-sense: NO
ggcatgaaaaagattttatttttcatttttgttgttttgttttcggtagggatttatttaacttggcatgttttgttggaaaaatctctagaattgaaattagtaacttcggctaacgatttgcttttaaaattgttcgcgcttcttggcgttttttcaatattagtgctttttcaaggcgttatttcttcgtataaagagcgccaactcaaacgcattctacaaaaaatagacgccatgaacggctttgaatttgaagaatattccaaaatctttttcacttcaaagggttttgaagtcacaatcactcaaaaaagcggcgattatggagcggatttgattgcagaaaaagacggcgtcaaatgggcggttcaagccaaacgctactcgcacaaagtttcgcccaaagccattcaagaggtggtttcttctaaagcttactacgcttgcgaaaaagcctgcgtaatcaccaatagctacttcacgcaagcggctcaaaaactggctcaagctaatgaagtgattttgattgatagagacgaatgggtcaaatttttgggtgggaaaaac

SEQ ID NO: 723 - DNA (genomic), 333 bp, Helicobacter pylori; double-stranded, circular
  misc_feature (B) LOCATION 1...333
  hypothetical: NO
  anti-sense: NO
atggcgatctatttagattttgaaaatcatattaaagagattcaaaatgaaattgaattagctctcattagaggcgatgaggacgctaaagaaatcttagaaaaaagattggataaggaagttaaaagcatttattccaatctcactgattttcaaaaactccagttagcaagacaccctgacagaccctacgctatggattacattgatctcatcttaaaagataaatatgaagtctttggcgataggcactataacgatgataaagcgatcgtgtgttttatagggaaaattgataatgttccggttgtggtgatcggatatcaaaatggc

SEQ ID NO: 724 - DNA (genomic), 600 bp, Helicobacter pylori; double-stranded, circular
  misc_feature (B) LOCATION 1...600
  hypothetical: NO
  anti-sense: NO
gggactaaaaacaagcccttaagaaatttttgcatccctaacccttgtggctatcgtaaagctttgaaaatggcaaagtttgctgaaaagtttaatttgcctattttaatgcttgtggatacagccggggcgtatccggggattggcgcagaagaaagggggcaaagtgaagcgatcgctaaaaacctccaagagttcgcctctttaaaagtccctactatttctatcattatcggtgaagggggcagtggtggcgcgttagcgattgcggtggctgacaagttggctatgatggaatattccatttttagcgttatatccccagaaggttgtgcggcgattctttgggatgaccctagcaagactgaagtggctattaaagcgatgaaaatcacgcctagagatttaaaggaggcggggcttattgatgatattatcttagagcctagcaaaggggctcatagagacaaattttcagccgccaacacgatcaaagagtattttttagacgctctaaggactatccaacaagaccctcatttccttgacaaccgctatcaaaaattgatgtcgcttggctcgtttgtggagagcatgaat

SEQ ID NO: 725 - DNA (genomic), 939 bp, Helicobacter pylori; double-stranded, circular
  misc_feature (B) LOCATION 1...939
  hypothetical: NO
  anti-sense: NO
atggcgatctatttagattttgaaaatcatattaaagagattcaaaatgaaattgaattagctctcattagaggcgatgaggacgctaaagaaatcttagaaaaaagattggataaggaagttaaaagcatttattccaatctcactgattttcaaaaactccagttagcaagacaccctgacagaccctacgctatggattacattgatctcatcttaaaagataaatatgaagtctttggcgataggcactataacgatgataaagcgatcgtgtgttttatagggaaaattgataatgttccggttgtggtgatcggagaagaaaagggcagagggactaaaaacaagctcttaaggaattttggcatgcctaacccttgtggctatcgtaaagctttgaaaatggcaaagtttgctgaaaagtttaatttgcctattttaatgcttgtggatacagccggggcgtatccggggattggcgcagaagaaagggggcaaagtgaagcgatcgctaaaaacctccaagagttcgcctctttaaaagtccctactatttctatcattatcggtgaagggggcagtggtggcgcgttagcgattgcggtggctgacaagttggctatgatggaatattccatttttagcgttatatccccagaaggttgtgcggcgattctttgggatgaccctagcaagactgaagtggctattaaagcgatgaaaatcacgcctagagatttaaaggaggcggggcttattgatgatattatcttagagcctagcaaaggggctcatagagacaaattttcagccgccaacacgatcaaagagtattttttagacgctctaaggactatccaacaagaccctcatttccttgacaaccgctatcaaaaattgatgtcgcttggctcgtttgtggagagcatgaattaa

SEQ ID NO: 726 - DNA (genomic), 228 bp, Helicobacter pylori; double-stranded, circular
  misc_feature (B) LOCATION 1...228
  hypothetical: NO
  anti-sense: NO
tgggcgaaaggcgctggggctttagtgcttgaagaatacgagagcgcgaaaaaaagaggggctaaaatttatgcagaatttgccgggtatggcgagagcggcgatgctaaccacatcacagccccagcccctgagggtgaaagggcttttaaagccatgaaaatggctttagaaatggcgaaagtggaagtatgctatgtgaacgcccatggggacaagcacgcatta

SEQ ID NO: 727 - DNA (genomic), 333 bp, Helicobacter pylori; double-stranded, circular
  misc_feature (B) LOCATION 1...333
  hypothetical: NO
  anti-sense: NO
acgcccatggggacaagcacgcattataacgattggtatgaaagcattgcgttaaaaaatgtgtttggctctaaagaaaaagtccctcctgttagctccactaaagggcagattgggcattgcttgggtgctgcgggcgcgttagtagccgttatttctatcatggccatgaatcaagggatcttacctcctaccattaatcaagaaacgcctgacccagaatgcgatctggattatatccctaatacagccagagaaaagcaagtgaatgcggtgatgagtaactcatttggttttggtggcactaatggtgttgtgattttcaaaaaagcc

SEQ ID NO: 728 - DNA (genomic), 447 bp, Helicobacter pylori; double-stranded, circular
  misc_feature (B) LOCATION 1...447
  hypothetical: NO
  anti-sense: NO
cctgaagaattggcaaatcgcatgggtgtaagttctggctctgggattggcgggttaggcaatattgaagcgaattctattttttgttttgaaaaaggccctagaaaagtcaatccctttttcatcacttctgcgttagtgaacatgattggaggtttcacttccattgagtttggcattaaagggcctaacctctctagcgtaacggcttgtgcagcaggcactcatgcgattattgaagccgttaaaaccattttgctcaatggggctgatagaatgctggtcgtgggagcggaatccaccatttgtcctgtagggattggagggtttgcgagcattaaagccctttctacaaggaatgatgatcctaaaaaagcttcaagaccttttgataaggatcgcaatggctttgtgatgggcgaaaggcgctggggctttagtgcttga

SEQ ID NO: 729 - DNA (genomic), 441 bp, Helicobacter pylori; double-stranded, circular
  misc_feature (B) LOCATION 1...441
  hypothetical: NO
  anti-sense: NO
gaagaattggcaaatcgcatgggtgtaagttctggctctgggattggcgggttaggcaatattgaagcgaattctattttttgttttgaaaaaggccctagaaaagtcaatccctttttcatcacttctgcgttagtgaacatgattggaggtttcacttccattgagtttggcattaaagggcctaacctctctagcgtaacggcttgtgcagcaggcactcatgcgattattgaagccgttaaaaccattttgctcaatggggctgatagaatgctggtcgtgggagcggaatccaccatttgtcctgtagggattggagggtttgcgagcattaaagccctttctacaaggaatgatgatcctaaaaaagcttcaagaccttttgataaggatcgcaatggctttgtgatgggcgaaaggcgctggggctttagtgct

SEQ ID NO: 730 - DNA (genomic), 930 bp, Helicobacter pylori; double-stranded, circular
  misc_feature (B) LOCATION 1...930
  hypothetical: NO
  anti-sense: NO
atgggtgtaagttctggctctgggattggcgggttaggcaatattgaagcgaattctattttttgttttgaaaaaggccctagaaaagtcaatccctttttcatcacttctgcgttagtgaacatgattggaggtttcacttccattgagtttggcattaaagggcctaacctctctagcgtaacggcttgtgcagcaggcactcatgcgattattgaagccgttaaaaccattttgctcaatggggctgatagaatgctggtcgtgggagcggaatccaccatttgtcctgtagggattggagggtttgcgagcattaaagccctttctacaaggaatgatgatcctaaaaaagcttcaagaccttttgataaggatcgcaatggctttgtgatgggcgaaggcgctggggctttagtgcttgaagaatacgagagcgcgaaaaaaagaggggctaaaatttatgcagaatttgccgggtatggcgagagcggcgatgctaaccacatcacagccccagcccctgagggtgaaggggcttttagagccatgaaaatggctttagaaatggcgaaagtggaagtaggctatgtgaacgcccatgggacaagcacgcattataacgattggtatgaaagcattgcgttaaaaaatgtgtttggctctaaagaaaaagtccctcctgttagctccactaaagggcagattgggcattgcttgggtgctgcgggcgcgttagaagccgttatttctatcatggccatgaatcaagggatcttacctcctaccattaatcaagaaacgcctgacccagaatgcgatctggattatatccctaatacagccagagaaaagcaagtgaatgcggtgatgagtaactcatttggttttggtggcactaatggtgttgtgattttcaaaaaagcctag

SEQ ID NO: 731 - DNA (genomic), 942 bp, Helicobacter pylori; double-stranded, circular
  misc_feature (B) LOCATION 1...942
  hypothetical: NO
  anti-sense: NO
ttggcaaatcgcatgggtgtaagttctggctctgggattggcgggttaggcaatattgaagcgaattctattttttgttttgaaaaaggccctagaaaagtcaatccctttttcatcacttctgcgttagtgaacatgattggaggtttcacttccattgagtttggcattaaagggcctaacctctctagcgtaacggcttgtgcagcaggcactcatgcgattattgaagccgttaaaaccattttgctcaatggggctgatagaatgctggtcgtgggagcggaatccaccatttgtcctgtagggattggagggtttgcgagcattaaagccctttctacaaggaatgatgatcctaaaaaagcttcaagaccttttgataaggatcgcaatggctttgtgatgggcgaaggcgctggggctttagtgcttgaagaatacgagagcgcgaaaaaaagaggggctaaaatttatgcagaatttgccgggtatggcgagagcggcgatgctaaccacatcacagccccagcccctgagggtgaaggggcttttagagccatgaaaatggctttagaaatggcgaaagtggaagtaggctatgtgaacgcccatgggacaagcacgcattataacgattggtatgaaagcattgcgttaaaaaatgtgtttggctctaaagaaaaagtccctcctgttagctccactaaagggcagattgggcattgcttgggtgctgcgggcgcgttagaagccgttatttctatcatggccatgaatcaagggatcttacctcctaccattaatcaagaaacgcctgacccagaatgcgatctggattatatccctaatacagccagagaaaagcaagtgaatgcggtgatgagtaactcatttggttttggtggcactaatggtgttgtgattttcaaaaaagcctag

SEQ ID NO: 732 - DNA (genomic), 237 bp, Helicobacter pylori; double-stranded, circular
  misc_feature (B) LOCATION 1...237
  hypothetical: NO
  anti-sense: NO
ttttattacaggagaagaaaaatcaccacgatgccaaccgccgccttgcaagaaacaccggtgatagaattgatcaacaaagtccaaaaatattacgccaaagccgatgtttcagcggcagccttgttcaattttggggcaaatttgaaaaaggggcctttcaaaaggaaagatgtcgcctacatttacaagttcgctaatacgctcattggggtgcgtatcacgggtgaaacttgt

SEQ ID NO: 733 - DNA (genomic), 309 bp, Helicobacter pylori; double-stranded, circular
  misc_feature (B) LOCATION 1...309
  hypothetical: NO
  anti-sense: NO
tataacaccaaagtgggaaaggtgcataccattgagcctggagcgtatggggcttatctggcaaaaggcgtggtggtatttgacactaagacgaagaaaaaaatcataacgactgaaaatttacccacaaaagatgcgccagaagatgaagagttagcgaaaaaacacgaatatgtggataaaaaatcaaaagaatacgctaatgaagtggttggcgaagtgacaaaaacctttattgacaggcctgattttattacaggagaagaaaaatcaccacgatgccaaccgccgccttgcaagaaacaccgg

SEQ ID NO: 734 - DNA (genomic), 306 bp, Helicobacter pylori; double-stranded, circular
  misc_feature (B) LOCATION 1...306
  hypothetical: NO
  anti-sense: NO
aacaccaaagtgggaaaggtgcataccattgagcctggagcgtatggggcttatctggcaaaaggcgtggtggtatttgacactaagacgaagaaaaaaatcataacgactgaaaatttacccacaaaagatgcgccagaagatgaagagttagcgaaaaaacacgaatatgtggataaaaaatcaaaagaatacgctaatgaagtggttggcgaagtgacaaaaacctttattgacaggcctgattttattacaggagaagaaaaatcaccacgatgccaaccgccgccttgcaagaaacaccgg

SEQ ID NO: 735 - DNA (genomic), 402 bp, Helicobacter pylori; double-stranded, circular
  misc_feature (B) LOCATION 1...402
  hypothetical: NO
  anti-sense: NO
cttgacatgttttctggcgtgaaataccaagttgatgttaccaaacccgccgggcaaaggattattaatccgacaattaacggaaaacccattaaccctaaagcggtctataagttagcgatcaacaattaccgattcgggacattatccacgactttaaaattggttacggacgctgataggtattatgattcttacgatgcattgcaagataacgggcaaatacgggatttgattattaaatacatcactgaagaaaaaaacgcaaaagtaacgcctgaactggaacataactgggaaatcatcaactacgatttcaaaaacccgttgttggaaaaactggcagaaaaattaaaagaggggagcgtcaaaatccccacttcgaaaagacgggaggacctt

SEQ ID NO: 736 - DNA (genomic), 1005 bp, Helicobacter pylori; double-stranded, circular
  misc_feature (B) LOCATION 1...1005
  hypothetical: NO
  anti-sense: NO
gtgggaaaggtgcataccattgagcctggagcgtatggggcttatctggcaaaaggcgtggtggtatttgacactaagacgaagaaaaaaatcataacgactgaaaatttacccacaaaagatgcgccagaagatgaagagttagcgaaaaaacacgaatatgtggataaaaaatcaaaagaatacgctaatgaagtggttggcgaagtgacaaaaacctttattgacaggcctgattttattacaggagaagaaaaaatcaccacgatgccaaccgccgccttgcaagaaacaccggtgatagaattgatcaacaaagtccaaaaatattacgccaaagccgatgtttcagcggcagccttgttcaattttggggcaaatttgaaaaaggggcctttcaaaaggaaagatgtcgcctacatttacaagttcgctaatacgctcattggggtgcgtatcacgggtgaaaacttgttgaaatacatggaatggtcgtataaattttacaaccagttgcaaccgggcgatttgacgatcagttttaatgaaaatgttcgcggctataactttgacatgttttctggcgtgaaataccaagttgatgttaccaaacccgccgggcaaaggattattaatccgacaattaacggaaaacccattaaccctaaagcggtctataagttagcgatcaacaattaccgattcgggacattatccacgactttaaaattggttacggacgctgataggtattatgattcttacgatgcattgcaagataacgggcaaatacgggatttgattattaaatacatcactgaagaaaaaaacgcaaaagtaacgcctgaactggaacataactgggaaatcatcaactacgatttcaaaaacccgttgttggaaaaactggcagaaaaattaaaagaggggagcgtcaaaatccccacttcaaaagacgggaggactttgaatgtcaaatccattaaggaaagtgaagttgaataa

SEQ ID NO: 737 - DNA (genomic), 1746 bp, Helicobacter pylori; double-stranded, circular
  misc_feature (B) LOCATION 1...1746
  hypothetical: NO
  anti-sense: NO
atgaaaaaattaattttagccgtctttttcacgctgacgctttcagtatctgcaaaagaagtcaaaatcgtgtttttggaaacttcagacattcatgggcggcttttttcgtatgattatgcggtgggggagcaaaaacccaataacggcttgacaaggattgcgactttaatcaaaaagcagagggctgaaaataaaaacgtggttttgattgacagcggggatttgttgcaaggcaatagcgcggagttgtttaacgatgagcctatccacccattagttcgagccgaaaacgatttgaaatttgacattcgtgtgcttgggaatcatgagtttaatttcagtaaagattttttagagaaaaatattaaggggtttaatggcgatgtcgtgaatgcgaatattatcaaaattgcggacaataagccgtttgtgaaaccttatattattaaaaaaattgatggcgtgagggtggcggttgtggggtttttggtgccgcatgtcccaacttgggaggcctctacgcctgaacattttgcagggttggagtttttggacgctgaagaagcgctaaaaaagaccttgagtgagctaaaagggaagtatgacattttgattggcgcttttcatttggggcgagaagatgagaaaggtggcgacgggataccggatttggcgaaaaaattcccgcaatttgacatcatttttgccgggcatgagcatgcggtttataacaccaaagtgggaaaggtgcataccattgagcctggagcgtatggggcttatctggcaaaaggcgtggtggtatttgacactaagacgaagaaaaaaatcataacgactgaaaatttacccacaaaagatgcgccagaagatgaagagttagcgaaaaaatacgaatatgtggataaaaaatcaaaagaatacgctaatgaagtggttggcgaagtgacaaaaacctttattgacaggcctgattttattacaggagaagaaaaaatcaccacgatgccaaccgccgccttgcaagaaacaccggtgatagaattgatcaacaaagtccaaaaatattacgccaaagccgatgtttcagcggcagccttgttcaattttggggcaaatttgaaaaaggggcctttcaaaaggaaagatgtcgcctacatttacaagttcgctaatacgctcattggggtgcgtatcacgggtgaaaacttgttgaaatacatggaatggtcgtataaattttacaaccagttgcaaccgggcgatttgacgatcagttttaatgaaaatgttcgcggctataactttgacatgttttctggcgtgaaataccaagttgatgttaccaaacccgccgggcaaaggattattaatccgacaattaacggaaaacccattaaccctaaagcggtctataagttagcgatcaacaattaccgattcgggacattatccacgactttaaaattggttacggacgctgataggtattatgattcttacgatgcattgcaagataacgggcaaatacgggatttgattattaaatacatcactgaagaaaaaaacgcaaaagtaacgcctgaactggaacataactgggaaatcatcaactacgatttcaaaaacccgttgttggaaaaactggcagaaaaattaaaagaggggagcgtcaaaatccccacttcaaaagacgggaggactttgaatgtcaaatccattaaggaaagtgaagttgaataa

SEQ ID NO: 738 - DNA (genomic), 708 bp, Helicobacter pylori; double-stranded, circular
  misc_feature (B) LOCATION 1...708
  hypothetical: NO
  anti-sense: NO
ttgtctgaacccatagatagattcacacgcataaggtggttgtttaaaaacgattttgaaaaaatccgccaacaaagggttttaatctgtggcgtggggggcgttggaggctttgcactagattctttgtatcgtgtggggatagggcaaatcactatcattgataaagacatgtttgatgttaccaatcaaaaccgccagattggatcagaaaggataggagaatctaaagtgttggtgttgcaagatctctataaaggcatccaagctttaaattgtcgcatagatgaagcgtttttaaattcatttaattttagagattatgattacattttagattgcatggacgatttgcctattaaaacaagcctagcgataaaatgtcaaaatttcgcttacgggaagtttatcagctctatggggagcgcgaagcgtttgaatcctaaacacatccaagtggggagcgtgtgggaaagctatggcgataaattcgggcgtaaatttagggattttttaaaaaaacgccgttttaagggggattttaaggtggtttttagccctgaagtcccgcattgcatagagcttggaagctttaatgcggttacggcgagttttggtttgcaaatagcgagtgaagtcgtgcaagatattatcaaaaatgaaaggcaatggaatgaaagattacgaagacgaattggaagattttga

SEQ ID NO: 739 - DNA (genomic), 708 bp, Helicobacter pylori; double-stranded, circular
  misc_feature (B) LOCATION 1...708
  hypothetical: NO
  anti-sense: NO
agattgtctgaacccatagatagattcacacgcataaggtggttgtttaaaaacgattttgaaaaaatccgccaacaaagggttttaatctgtggcgtggggggcgttggaggctttgcactagattctttgtatcgtgtggggatagggcaaatcactatcattgataaagacatgtttgatgttaccaatcaaaaccgccagattggatcagaaaggataggagaatctaaagtgttggtgttgcaagatctctataaaggcatccaagctttaaattgtcgcatagatgaagcgtttttaaattcatttaattttagagattatgattacattttagattgcatggacgatttgcctattaaaacaagcctagcgataaaatgtcaaaatttcgcttacgggaagtttatcagctctatggggagcgcgaagcgtttgaatcctaaacacatccaagtggggagcgtgtgggaaagctatggcgataaattcgggcgtaaatttagggattttttaaaaaaacgccgttttaagggggattttaaggtggtttttagccctgaagtcccgcattgcatagagcttggaagctttaatgcggttacggcgagttttggtttgcaaatagcgagtgaagtcgtgcaagatattatcaaaaatgaaaggcaatggaatgaaagattacgaagacgaattggaagattt

SEQ ID NO: 740 - DNA (genomic), 180 bp, Helicobacter pylori; double-stranded, circular
  misc_feature (B) LOCATION 1...180
  hypothetical: NO
  anti-sense: NO
ttaaatagcggcacggaagcgaccatgagcgcgatacgactcgctagggcttatagccaaaaagacgatttgatcaagtttgaagggtgctatcatgggcatagcgactctttattggtgaaagcgggtagcggtggtgccacttttggattctccttcttctcaggcgtgccaaatgat

SEQ ID NO: 741 - DNA (genomic), 543 bp, Helicobacter pylori; double-stranded, circular
  misc_feature (B) LOCATION 1...543
  hypothetical: NO
  anti-sense: NO
tcttctctaggcgtgccaaatgattttagcaaacacactttagtggctcgctataacgacttaaattccacagaagaatgctttaaaaaaggcgatgtgggttgcgtcatcattgaacccattgccgggaatatggggttagtgccggctcaaaaagagtttttattgggcttaaaggctttgtgtgaaaaataccaagcggtgctgattttagatgaagtgatgagcgggtttagagcgagtttgagcggttcgcaagaattttatggcgtcgtgccggatttggtaacctttggtaaagtgataggcgcggggcttcctttggcgtgttttggagggcgtgcggaaattatggacttgctctcacccattggaggcgtgtatcaagcaggcactttaagcggtaaccccctagcggtgtgcgcggggttgagcgcactttataaaatcacaagagatcaaacgcttcatactcgcttaaacgctttagccgcccgtttgactcatcgcgtacaaaaaagcgctcacaactataacttcgcg

SEQ ID NO: 742 - DNA (genomic), 546 bp, Helicobacter pylori; double-stranded, circular
  misc_feature (B) LOCATION 1...546
  hypothetical: NO
  anti-sense: NO
ccttcttctctaggcgtgccaaatgattttagcaaacacactttagtggctcgctataacgacttaaattccacagaagaatgctttaaaaaaggcgatgtgggttgcgtcatcattgaacccattgccgggaatatggggttagtgccggctcaaaaagagtttttattgggcttaaaggctttgtgtgaaaaataccaagcggtgctgattttagatgaagtgatgagcgggtttagagcgagtttgagcggttcgcaagaattttatggcgtcgtgccggatttggtaacctttggtaaagtgataggcgcggggcttcctttggcgtgttttggagggcgtgcggaaattatggacttgctctcacccattggaggcgtgtatcaagcaggcactttaagcggtaaccccctagcggtgtgcgcggggttgagcgcactttataaaatcacaagagatcaaacgcttcatactcgcttaaacgctttagccgcccgtttgactcatcgcgtacaaaaaagcgctcacaactataacttcgcg

SEQ ID NO: 743 - DNA (genomic), 1293 bp, Helicobacter pylori; double-stranded, circular
  misc_feature (B) LOCATION 1...1293
  hypothetical: NO
  anti-sense: NO
atggagttgttgcacagcattaatgattttaatgaagccaagcaggtgatcgctgggggggtcaattcgcctgtgagagcgtttaagagcgttaaaggcactccgccctttatcttaaaaggcaagggggcgtatctttatgatgtggataacaatcattatatagattttgtgcaaagttgggggcctttgatttttgggcatgctgatgaagagattgaagaaaatattattaatgtcttaaaaaaaggcacttcttttggcgctcccacagagttagaaaccactttagctaaggaaatcatttcttgttatgaaggcttagataaggtgcgtttagtcaatagcggcacggaagcgaccatgagcgcgatacgactcgctagggcttatagccaaaaagacgatttgatcaagtttgaagggtgctatcatgggcatagcgactctttattggtgaaagcgggtagcgggtgtgccacttttggatctccttcttctctaggcgtgccaaatgattttagcaaacacactttagtggctcgctataacgacttaaattccacagaagaatgctttaaaaaaggcgatgtgggttgcgtcatcattgaacccattgccgggaatatggggttagtgccggctcaaaaagagtttttattgggcttaaaggctttgtgtgaaaaataccaagcggtgctgattttagatgaagtgatgagcgggtttagagcgagtttgagcggttcgcaagaattttatggcgtcgtgccggatttggtaacctttggtaaagtgataggcgcggggcttcctttggcgtgttttggagggcgtgcggaaattatggacttgctctcacccattggaggcgtgtatcaagcaggcactttaagcggtaaccccctagcggtgtgcgcggggttgagcgcactttataaaatcaaaagagacaaaacgctttatactcgcttaaacgctttagccgttcgtttgactcaaggcttacaaaagagcgctcaaaactataacatcgctttagagacgctcaacatggggagcatgtttggctttttctttaacgaaaatgcggtgcgtgattttgatgacgctttaaaaagcgataccgaaatgtttgcaaaattccatcaaaaaatgctctttaaaggcgtgtatttggcatgttcaagctttgaaaccggctttatttgtgagcctatgactgaagagatgattgatttagcgatctcaaaagccgatgaaagttttgatgaaatcataaatggcgtgtga

SEQ ID NO: 744 - DNA (genomic), 1245 bp, Helicobacter pylori; double-stranded, circular
  misc_feature (B) LOCATION 1...1245
  hypothetical: NO
  anti-sense: NO
ttgattcaaaagaacaagagcttatcaatctttttaatctcaaattcggtcgtttttcttgggaaaattatcttgcataaagtttttatcatggaagctttggagtgtttgaaaagaatagaaaaagaaagcatccaaacaatctatatagaccccccttataacaccaagagttctaactttgaatatgaagacgctcatgctgactatgaaaaatggattgaagaacatttgattttagcaaaagctgtgttaaaacaaagtggttgtatttttatttctatggacgataataaaatggctgaagttaaaatcattgccaatgaaatttttggaacgcgcaattttttaggcacttttatcaccaaacaagccacaagatctaacgctaaacacatcaatattactcatgaatatgttttaagctacgctaaaaataaagcgttcgctcctggttttaaaatcttacgaacgcttttgcccatttatgctaaagcattaaaagatttaatgcgaacgattaagaatgtttttaaacaaaaaggacaagctcaagcccaacttattttaaaagaacaaatcaaagagttatcccaaaaagaacattttaattttttaaaaaattataatttagtggatgaaaaaggtgagatctatttcgctaaagatttatccacgccttcaaacccgcgcagtgtagcgatacaagaaatcaatctttttttagaacccttaaaaagcagagggtggagcagcgatgaaaagcttaaggagttatattatcaaaatagacttatttttaagaataatcgcccttatgaaaaatattacctaaaagaatcgcaagataattgtttgagcgtgttagatttttatagccgacaaggcacaaaagatttagaaaaattaggcttaaaggggctttttaaaacgccaaaacctgtagcattgattaaatatttattattatgctccacccctaaagattctattattttagatttttttgcaggcagcgggacaacagcgcaagcggttatagaagttaataaggattattatttgaattggtctttttatttgtgccaaaaagaagaaaaaattaaaaataacccgcaagctgttagcattttaaaaaacaaggggtataaaaacacgatttcagacatcatgctgttgcgtttagaaaagatcatcaaaagaagtgaatacgaaattttaaaaacaaaatctattttattttaa

SEQ ID NO: 745 - DNA (genomic), 1248 bp, Helicobacter pylori; double-stranded, circular
  misc_feature (B) LOCATION 1...1248
  hypothetical: NO
  anti-sense: NO
aacccattgattcaaaagaacaagagcttatcaatctttttaatctcaaattcggtcgtttttcttgggaaaattatcttgcataaagtttttatcatggaagctttggagtgtttgaaaagaatagaaaaagaaagcatccaaacaatctatatagaccccccttataacaccaagagttctaactttgaatatgaagacgctcatgctgactatgaaaaatggattgaagaacatttgattttagcaaaagctgtgttaaaacaaagtggttgtatttttatttctatggacgataataaaatggctgaagttaaaatcattgccaatgaaatttttggaacgcgcaattttttaggcacttttatcaccaaacaagccacaagatctaacgctaaacacatcaatattactcatgaatatgttttaagctacgctaaaaataaagcgttcgctcctggttttaaaatcttacgaacgcttttgcccatttatgctaaagcattaaaagatttaatgcgaacgattaagaatgtttttaaacaaaaaggacaagctcaagcccaacttattttaaaagaacaaatcaaagagttatcccaaaaagaacattttaattttttaaaaaattataatttagtggatgaaaaaggtgagatctatttcgctaaagatttatccacgccttcaaacccgcgcagtgtagcgatacaagaaatcaatctttttttagaacccttaaaaagcagagggtggagcagcgatgaaaagcttaaggagttatattatcaaaatagacttatttttaagaataatcgcccttatgaaaaatattacctaaaagaatcgcaagataattgtttgagcgtgttagatttttatagccgacaaggcacaaaagatttagaaaaattaggcttaaaggggctttttaaaacgccaaaacctgtagcattgattaaatatttattattatgctccacccctaaagattctattattttagatttttttgcaggcagcgggacaacagcgcaagcggttatagaagttaataaggattattatttgaattggtctttttatttgtgccaaaaagaagaaaaaattaaaaataacccgcaagctgttagcattttaaaaaacaaggggtataaaaacacgatttcagacatcatgctgttgcgtttagaaaagatcatcaaaagaagtgaatacgaaattttaaaaacaaaatctattttattt

SEQ ID NO: 746 - DNA (genomic), 408 bp, Helicobacter pylori; double-stranded, circular
  misc_feature (B) LOCATION 1...408
  hypothetical: NO
  anti-sense: NO
aaaatccctaaattcatccagctttatgataatgccacttctaaaatccaagccctagattttgatgcgattaaagataaggttcatgtcttattgaatggttatgaagaaatgccggcggagtttttttatttcaggttggacagcaagattgcgcacattttgattgatgaatttcaagacacgagcttgaacgattataagattttagccccttttattgatgagattaaagccgggatagggcaagcgaaatggcacaggagcgtgttttttgtgggcgatgtcaagcagagcatttatgcctttagggggagtacagctctttacgcgaacgctattgaaaggattgttatcacgattatttggagtgtaaccacgggagcgcgccgccaatcattggtatcg

SEQ ID NO: 747 - DNA (genomic), 531 bp, Helicobacter pylori; double-stranded, circular
  misc_feature (B) LOCATION 1...531
  hypothetical: NO
  anti-sense: NO
atgacaagcgttgtcatcaagccccatgcctatggcgagcaagtccaagaaatagaagaagagtcagatagcgattatgaaaagaataacgaccaggaagcgatcaattttggtatcgccttgcataagggattggaataccaatacgcttacaacattcctaaacaaagcgttttagaatatttaaactaccactatggtttttatggtttggattaccaagcgttagaagaaagtttagagctttttgaaaacgatgcagggatacaagccctttttaaaaatcatgccttaaagggtgaagcggcttttttattccaaggggttgtgtctaggattgatgttttattgtgggatagagggcaaaatttgtatgttttagattataaaagctctcaaaattaccagcaaagccataaagcgcaagtgtctcattacgctgagtttttgcgaactcaagscccccattttaagatacaagcgggcattatttacgctcataaaagactgcttgaaaaatyatgggkttga

SEQ ID NO: 748 - DNA (genomic), 918 bp, Helicobacter pylori; double-stranded, circular
  misc_feature (B) LOCATION 1...918
  hypothetical: NO
  anti-sense: NO
gttataataaagacaaaacagaattttaggatagctatcatggatacaaaaagacaatgcatggctttaaaggcttcagcagggagcgggaagactttcgctttgagcgtgcggtttttggctctattgtttaagggtgctaatcctagcgagattttaacgctcactttcactaaaaaagccaccgccgaaatgaaagaacgcattttagactatttaaaaatcttgcaaaaagaaaaccttgagagcgaaaaagaaaaatcccaaaatatcctaaaagaattagaagaaaaataccatttagaccctagcttggtgcgaaataacgctcaaaaaatctaccaacgctttttaaacgctgaagttaggattagcactattgatgcgtttttccaaagcattttaaggaaattttgctggtttgtggggttgagcgcgaattttgaagtcaatgaagacacagaagcgcaccagcgacagcttaatgagggttttttgagtgctttaaataacaaacagcttgaagaattgagcgcttttatcgtccaatgcttaagttatgataattacacaagcgattctattttagagcggctgcgttttttaaaaaacaagctctatttatttgatcctaacaagaaagatcctgtatttgatgaagagggttttttagaaaaactaaggagcttaaacaaccaaattcaaagcatagagacagcgtcaaatgaggctaaaaaagccattaaatgcgatagttttaggggatttttaaacagctctttaacatggcttgaaaaaaagagtgaatatcgctatttcaaaaaactcaaaaatgaaatccccactttagagagcgaatgcgaagagattgaaaacgatttaaaacgctattatagaagccaagtaaaccgcaatatt

SEQ ID NO: 749 - DNA (genomic), 1593 bp, Helicobacter pylori; double-stranded, circular
  misc_feature (B) LOCATION 1...1593
  hypothetical: NO
  anti-sense: NO
atttcggagtttaaccaccgcagtgcgcctttaatcattaattatgtgaataccatttttaaaaaagcttatcaaaattcacccaccgcttacttggagcaaaaataccctaaaacttccaacaataaacatgttacagagggctatgttaaagtctctttagtggctgatgaaaaagaattgttattagaacaaatcttacaagaagctcaaaaccttttagaacatcgtattgatcctaaagacattaccattttgtgcgccaccaataaggacgctttagaaatcaaaaattatttgcaagagtatttgagcgcaattcgcccaagcacggaatctagcgcgaaattgtctcaattggtagagtctaaaatcattaagaacgctttagaatacgctttagcggaagaaccttacaagcccttttataaacacagtgttttaaaactcgctggatacttgcatgatgatgtgatcgctttacctggttttaaccctaaaaaagagagcgtggcaagctttgtgtggaaaattatggagcagtttaaactttatgaagagcctgcgcaaagctgtttggaattagcggttgggtgcgaagacgccgatggatttttagaaaaattagaggctaaagagatcgcttctttcaatccaaaaggcgcgcagatcatgaccattcataaatctaaaggcatgcaattcccttatgtgattgtgtgcgaacgcttgggcaatcctaattcaagccatgccaatcaactccttgaagaatatgacggcacagagcttgcgcgcctttattacagaatgaaaaatcgtgaggtggtggataaagattacgccagggctttagacaaagaagaagcggctaaagatcacgaagaaattaatgtgtattatgtcgcattcactagggctgagttagggctgattgtcgtggccaaagacaagaaagaaagcaaaaaagaaagcaaaaacaaaaaaatgcacgaacaattggaactcgcacctttagaagagggagaaatcgcgccggttatttctcctcaaaaagagcctttaatgacaagcgttgtcatcaagccccatgcctatggcgagcaagtccaagaaatagaagaagagtcagatagcgattatgaaaagaataacgaccaggaagcgatcaattttggtatcgccttgcataagggattggaataccaatacgcttacaacattcctaaacaaagcgttttagaatatttaaactaccactatggtttttatggtttggattaccaagcgttagaagaaagtttagagctttttgaaaacgatgcagggatacaagccctttttaaaaatcatgccttaaagggtgaagcggcttttttattccaaggggttgtgtctaggattgatgttttattgtgggatagagggcaaaatttgtatgttttagattataaaagctctcaaaattaccagcaaagccataaagcgcaagtgtctcattacgctgagtttttgcgaactcaagccccccattttaagatacaagcgggcattatttacgctcataaaagactgcttgaaaaattatgggtt

SEQ ID NO: 750 - DNA (genomic), 1866 bp, Helicobacter pylori; double-stranded, circular
  misc_feature (B) LOCATION 1...1866
  hypothetical: NO
  anti-sense: NO
ttgaatggttatgaagaaatgccggcggagtttttttatttcaggttggacagcaagattgcgcacattttgattgatgaatttcaagacacgagcttgaacgattataagattttagccccttttattgatgagattaaagccgggatagggcaagcgaaatggcacaggagcgtgttttttgtgggcgatgtcaagcagagcatttatgcctttagggggagttttagctccttatttgaaagcgtttctaaggatttttaccacgataatttggagtttaaccaccgcagtgcgcctttaatcattaattatgtgaataccatttttaaaaaagcttatcaaaattcacccaccgcttacttggagcaaaaataccctaaaacttccaacaataaacatgttacagagggctatgttaaagtctctttagtggctgatgaaaaagaattgttattagaacaaatcttacaagaagctcaaaaccttttagaacatcgtattgatcctaaagacattaccattttgtgcgccaccaataaggacgctttagaaatcaaaaattatttgcaagagtatttgagcgcaattcgcccaagcacggaatctagcgcgaaattgtctcaattggtagagtctaaaatcattaagaacgctttagaatacgctttagcggaagaaccttacaagcccttttataaacacagtgttttaaaactcgctggatacttgcatgatgatgtgatcgctttacctggttttaaccctaaaaaagagagcgtggcaagctttgtgtggaaaattatggagcagtttaaactttatgaagagcctgcgcaaagctgtttggaattagcggttgggtgcgaagacgccgatggatttttagaaaaattagaggctaaagagatcgcttctttcaatccaaaaggcgcgcagatcatgaccattcataaatctaaaggcatgcaattcccttatgtgattgtgtgcgaacgcttgggcaatcctaattcaagccatgccaatcaactccttgaagaatatgacggcacagagcttgcgcgcctttattacagaatgaaaaatcgtgaggtggtggataaagattacgccagggctttagacaaagaagaagcggctaaagatcacgaagaaattaatgtgtattatgtcgcattcactagggctgagttagggctgattgtcgtggccaaagacaagaaagaaagcaaaaaagaaagcaaaaacaaaaaaatgcacgaacaattggaactcgcacctttagaagagggagaaatcgcgccggttatttctcctcaaaaagagcctttaatgacaagcgttgtcatcaagccccatgcctatggcgagcaagtccaagaaatagaagaagagtcagatagcgattatgaaaagaataacgaccaggaagcgatcaattttggtatcgccttgcataagggattggaataccaatacgcttacaacattcctaaacaaagcgttttagaatatttaaactaccactatggtttttatggtttggattaccaagcgttagaagaaagtttagagctttttgaaaacgatgcagggatacaagccctttttaaaaatcatgccttaaagggtgaagcggcttttttattccaaggggttgtgtctaggattgatgttttattgtgggatagagggcaaaatttgtatgttttagattataaaagctctcaaaattaccagcaaagccataaagcgcaagtgtctcattacgctgagtttttgcgaactcaagccccccattttaagatacaagcgggcattatttacgctcataaaagactgcttgaaaaattatgggtttga

SEQ ID NO: 751 - DNA (genomic), 2841 bp, Helicobacter pylori; double-stranded, circular
  misc_feature (B) LOCATION 1...2841
  hypothetical: NO
  anti-sense: NO
atggatacaaaaagacaatgcatggctttaaaggcttcagcagggagcgggaagactttcgctttgagcgtgcggtttttggctctattgtttaagggtgctaatcctagcgagattttaacgctcactttcactaaaaaagccaccgccgaaatgaaagaacgcattttagactatttaaaaatcttgcaaaaagaaaaccttgagagcgaaaaagaaaaatcccaaaatatcctaaaagaattagaagaaaaataccatttagaccctagcttggtgcgaaataacgctcaaaaaatctaccaacgctttttaaacgctgaagttaggattagcactattgatgcgtttttccaaagcattttaaggaaattttgctggtttgtggggttgagcgcgaattttgaagtcaatgaagacacagaagcgcaccagcgacagcttaatgagggttttttgagtgctttaaataacaaacagcttgaagaattgagcgcttttatcgtccaatgcttaagttatgataattacacaagcgattctattttagagcggctgcgttttttaaaaaacaagctctatttatttgatcctaacaagaaagatcctgtatttgatgaagagggttttttagaaaaactaaggagcttaaacaaccaaattcaaagcatagagacagcgtcaaatgaggctaaaaaagccattaaatgcgatagttttaggggatttttaaacagctctttaacatggcttgaaaaaaagagtgaatatcgctatttcaaaaaactcaaaaatgaaatccccactttagagagcgaatgcgaagagattgaaaacgatttaaaacgctattatgaagcccaagaaaccgcaatatttaaaaaattccctaaattcatccagctttatgataatgccacttctaaaatccaagccctagattttgatgcgattaaagataaggttcatgtcttattgaatggttatgaagaaatgccggcggagtttttttatttcaggttggacagcaagattgcgcacattttgattgatgaatttcaagacacgagcttgaacgattataagattttagccccttttattgatgagattaaagccgggatagggcaagcgaaatggcacaggagcgtgttttttgtgggcgatgtcaagcagagcatttatgcctttagggggagttttagctccttatttgaaagcgtttctaaggatttttaccacgataatttggagtttaaccaccgcagtgcgcctttaatcattaattatgtgaataccatttttaaaaaagcttatcaaaattcacccaccgcttacttggagcaaaaataccctaaaacttccaacaataaacatgttacagagggctatgttaaagtctctttagtggctgatgaaaaagaattgttattagaacaaatcttacaagaagctcaaaaccttttagaacatcgtattgatcctaaagacattaccattttgtgcgccaccaataaggacgctttagaaatcaaaaattatttgcaagagtatttgagcgcaattcgcccaagcacggaatctagcgcgaaattgtctcaattggtagagtctaaaatcattaagaacgctttagaatacgctttagcggaagaaccttacaagcccttttataaacacagtgttttaaaactcgctggatacttgcatgatgatgtgatcgctttacctggttttaaccctaaaaaagagagcgtggcaagctttgtgtggaaaattatggagcagtttaaactttatgaagagcctgcgcaaagctgtttggaattagcggttgggtgcgaagacgccgatggatttttagaaaaattagaggctaaagagatcgcttctttcaatccaaaaggcgcgcagatcatgaccattcataaatctaaaggcatgcaattcccttatgtgattgtgtgcgaacgcttgggcaatcctaattcaagccatgccaatcaactccttgaagaatatgacggcacagagcttgcgcgcctttattacagaatgaaaaatcgtgaggtggtggataaagattacgccagggctttagacaaagaagaagcggctaaagatcacgaagaaattaatgtgtattatgtcgcattcactagggctgagttagggctgattgtcgtggccaaagacaagaaagaaagcaaaaaagaaagcaaaaacaaaaaaatgcacgaacaattggaactcgcacctttagaagagggagaaatcgcgccggttatttctcctcaaaaagagcctttaatgacaagcgttgtcatcaagccccatgcctatggcgagcaagtccaagaaatagaagaagagtcagatagcgattatgaaaagaataacgaccaggaagcgatcaattttggtatcgccttgcataagggattggaataccaatacgcttacaacattcctaaacaaagcgttttagaatatttaaactaccactatggtttttatggtttggattaccaagcgttagaagaaagtttagagctttttgaaaacgatgcagggatacaagccctttttaaaaatcatgccttaaagggtgaagcggcttttttattccaaggggttgtgtctaggattgatgttttattgtgggatagagggcaaaatttgtatgttttagattataaaagctctcaaaattaccagcaaagccataaagcgcaagtgtctcattacgctgagtttttgcgaactcaagccccccattttaagatacaagcgggcattatttacgctcataaaagactgcttgaaaaattatgggtttga

SEQ ID NO: 752 - DNA (genomic), 519 bp, Helicobacter pylori; double-stranded, circular
  misc_feature (B) LOCATION 1...519
  hypothetical: NO
  anti-sense: NO
gcttatcaaaaagcgcaccatagcgaagccattttaccctttttgtatccgggcgttgggttttttgcgctttttggggtttataaggattttggcgcagtggcgatcatttggcttttagtggtggtggtcgcaagcgatgtgggggcgttttttggaggcaagcttttaggcaaaacccctttcacagccacttcaccgaataaaaccttagagggcgcgttgattggcgttgttttggcgagcgttttgggatcgtttgtgggcatggggaaattgagcggaggctttcttatggcgcttttattcagtttcttaatcgcgcttatggcggtgtttggggatttgtatgaaagctatttgaaaagaaaagttggggtcaaggatagcggtaagattttacccgggcatgggggcgttttagaccgattggattccatgctttttggggctttaagcttgcatgtgttgttgtattttttggaaatttggaaagagacggcggtgtttttaggggat

SEQ ID NO: 753 - DNA (genomic), 516 bp, Helicobacter pylori; double-stranded, circular
  misc_feature (B) LOCATION 1...516
  hypothetical: NO
  anti-sense: NO
tatcaaaaagcgcaccatagcgaagccattttaccctttttgtatccgggcgttgggttttttgcgctttttggggtttataaggattttggcgcagtggcgatcatttggcttttagtggtggtggtcgcaagcgatgtgggggcgttttttggaggcaagcttttaggcaaaacccctttcacagccacttcaccgaataaaaccttagagggcgcgttgattggcgttgttttggcgagcgttttgggatcgtttgtgggcatggggaaattgagcggaggctttcttatggcgcttttattcagtttcttaatcgcgcttatggcggtgtttggggatttgtatgaaagctatttgaaaagaaaagttggggtcaaggatagcggtaagattttacccgggcatgggggcgttttagaccgattggattccatgctttttggggctttaagcttgcatgtgttgttgtattttttggaaatttggaaagagacggcggtgtttttaggggat

SEQ ID NO: 754 - DNA (genomic), 801 bp, Helicobacter pylori; double-stranded, circular
  misc_feature (B) LOCATION 1...801
  hypothetical: NO
  anti-sense: NO
gtgaaagaagagttatttaaagaaaagtctcgttacattacaggggttgttttaatcgttgtggcgggcttgattttgtatgcggacaatttgttgttgttttgggctgttttgggggggatttatgcggtagggttttttgaagcgttaaggttgttccaggtcaaagcgagctttagcttgtatctcattttagtgttgtcatgggtggcggcgtattttaacgggcatcctgtagaatgtgctcttatcagcgcgatggtcatggctagcgtcatcgcttatcaaaaagcgcaccatagcgaagccattttaccctttttgtatccgggcgttgggttttttgcgctttttggggtttataaggattttggcgcagtggcgatcatttggcttttagtggtggtggtcgcaagcgatgtgggggcgttttttggaggcaagcttttaggcaaaacccctttcacagccacttcaccgaataaaaccttagagggcgcgttgattggcgttgttttggcgagcgttttgggatcgtttgtgggcatggggaaattgagcggaggctttcttatggcgcttttattcagtttcttaatcgcgcttatggcggtgtttggggatttgtatgaaagctatttgaaaagaaaagttggggtcaaggatagcggtaagattttacccgggcatgggggcgttttagaccgattggattccatgctttttggggctttaagcttgcatgtgttgttgtattttttggaaatttggaaagagacggcggtgtttttaggggattga

SEQ ID NO: 755 - DNA (genomic), 1275 bp, Helicobacter pylori; double-stranded, circular
  misc_feature (B) LOCATION 1...1275
  hypothetical: NO
  anti-sense: NO
atgaaagataacaataactataatgttttaattgtggggaataaggggcgagagtatgctttggctcaaaggcttcagcaagatgagcgagtgaatgctttgtatttttgtttgggtaatggtggcactcaagatttaggcgagaatctggaatgcgaacattacgagcatatcgtggaattggcccttaaaaaacagatccatttagctatcatttcagaagaagagcctttgattttagggcttacagagatgctagaaaaagcggggattttagtgtttggggcttctaaagaagcggcgaaattagaggcttccaaaagctacatgaaagcttttgttaaagagtgcggtatcaaaagcgcgtcttactttgaaacaaacgacttaaaagaggccctcaattacattcaaaacgcttccttccccttagtcattaaagcgttgaataaaaacacaagcattgtccatcatcaagaagaagcgttaaaaatccttgaagacgctttaaaacaaagcaatgagcctgtgatcatagagccttttttagaggggtttgagctttcagttacagcgctcatagccaatgatgattttatcttgttgcccttttgccaaaactacaaacgcttattagagggggataatggggtcaatacaggaggtatgggggccatcgctcctgcaaactttttctctaatgaattagaagagaaaataaaaaatcatatctttaaacccactttagagaaacttcaggctgacaacacgccttttaaaggggttttactcgctgaaattgtaatcatagaagaaaagggcgttttagagccgtatttattggattttagcgtgcgttttaaagacattgaatgccagacgattttaccccttgtagaaaatccgctattagatttgtttttggctacagccaaaggggaattgcattctcttgaattggtgttttctaaagaatttgtgatgagtgtcgcacttgtttctaggaattaccccactagctcttcgcccaagcaaaccctttatattgatccggttgatgaaaaaaagggccatttgattttaggggaggtggagcaggataatggcgtgtttgaaagcagtggggggagggtgatctttgccattggcagaggaaaatcgttattagaagccagaaaccatgcttacgagatcgctcaaaaggtgcattttgaaggcatgttttatcgcaaggatattggttttaaggtgttggatttgaaagaatattcttaa

SEQ ID NO: 756 - DNA (genomic), 1296 bp, Helicobacter pylori; double-stranded, circular
  misc_feature (B) LOCATION 1...1296
  hypothetical: NO
  anti-sense: NO
aaacaaccacattttagggaagacatgaaagataacaataactataatgttttaattgtggggaataaggggcgagagtatgctttggctcaaaggcttcagcaagatgagcgagtgaatgctttgtatttttgtttgggtaatggtggcactcaagatttaggcgagaatctggaatgcgaacattacgagcatatcgtggaattggcccttaaaaaacagatccatttagctatcatttcagaagaagagcctttgattttagggcttacagagatgctagaaaaagcggggattttagtgtttggggcttctaaagaagcggcgaaattagaggcttccaaaagctacatgaaagcttttgttaaagagtgcggtatcaaaagcgcgtcttactttgaaacaaacgacttaaaagaggccctcaattacattcaaaacgcttccttccccttagtcattaaagcgttgaataaaaacacaagcattgtccatcatcaagaagaagcgttaaaaatccttgaagacgctttaaaacaaagcaatgagcctgtgatcatagagccttttttagaggggtttgagctttcagttacagcgctcatagccaatgatgattttatcttgttgcccttttgccaaaactacaaacgcttattagagggggataatggggtcaatacaggaggtatgggggccatcgctcctgcaaactttttctctaatgaattagaagagaaaataaaaaatcatatctttaaacccactttagagaaacttcaggctgacaacacgccttttaaaggggttttactcgctgaaattgtaatcatagaagaaaagggcgttttagagccgtatttattggattttagcgtgcgttttaaagacattgaatgccagacgattttaccccttgtagaaaatccgctattagatttgtttttggctacagccaaaggggaattgcattctcttgaattggtgttttctaaagaatttgtgatgagtgtcgcacttgtttctaggaattaccccactagctcttcgcccaagcaaaccctttatattgatccggttgatgaaaaaaagggccatttgattttaggggaggtggagcaggataatggcgtgtttgaaagcagtggggggagggtgatctttgccattggcagaggaaaatcgttattagaagccagaaaccatgcttacgagatcgctcaaaaggtgcattttgaaggcatgttttatcgcaaggatattggttttaaggtgttggatttgaaagaatattct

SEQ ID NO: 757 - DNA (genomic), 357 bp, Helicobacter pylori; double-stranded, circular
  misc_feature (B) LOCATION 1...357
  hypothetical: NO
  anti-sense: NO
attattattaattttttagaagatttattttaccccttaaggatgttagaaaacaaacgcgttttattgctcgtgagcggatctattgcggcgtataaatccctacaattagtgcgcttgttgtttaaaagcggggctagtatccaagtggtgatgagtaatggcgcgcaaaaattcatcaagcccttaagctttgaagctttgagccaccataaagtcctgcatgatcgtaatgaaaaatggtattacaaccaccaaaacaaattgcaccacaacctatcgcatgcgctgcctagtgctgatttactcatctttgcccctttaagcgctaacagcttgtctaaaatcgctcacgct

SEQ ID NO: 758 - DNA (genomic), 912 bp, Helicobacter pylori; double-stranded, circular
  misc_feature (B) LOCATION 1...912
  hypothetical: NO
  anti-sense: NO
taccatcagcgcgacttttttagcttgcgctcccctaaaatcctagccccaagcatgaacactaacatgctcaattcccctatcattcaaagtaatttaaaacgcttgaaagattccaatcacatcattttagacacccaaaacgcccttttggcatgcaacactaaaggcgacggggcgatggctgagcctttagaaatcctttttaaagccacccaaacgctcttaaaagacgcttattttgaaaacagagaagtcatagtcatgggcggcgcgagcgtggaaaagattgacagcgttagagttattagcaatctttctagcgggattcaagcgagcgctttggctctagcgttatattttaagggagcgaaagtgactttgattgcgttcaacttccctacccctttgcctaaagaaatcgcaagcgttttagttagcgacaccgcctcttatgaaaacgccttgaatgaagccgctaaaaacttgcaaaaacatgccttaaaacccctactcttcaatttagccgccattagcgattatttgcctaaaacttctttcaaccataagcttaaaaaaagcgaactgggcgaaaccctaaacgttgaatgcgttcaaaataaggatttactggcttctgtcaatcctaatcaattcgttaaaatcggttttaaagctgaagatgatcaacaaaacgccattaaaaacgctcaaaatcttttaaaaccttctcaagataacggcaaggattgctccgtggccgctttgaatctcattaaagattcacgcccttttggctcattagacaatgaattgtggctttttagccataaaaaaacccaaaaaatcccttccatgaacaaattagaagcgagctttaaaatccttgattttatcaaagacaacgccctt

SEQ ID NO: 759 - DNA (genomic), 1278 bp, Helicobacter pylori; double-stranded, circular
  misc_feature (B) LOCATION 1...1278
  hypothetical: NO
  anti-sense: NO
atgaattttttagaagatttattttaccccttaagattgttagaaaacaagcgcgttttattgctcgtgagcggatctattgcggcgtataaatccctagaattagtgcgcttgttgtttaaaagcggggctagtatccaagtggtgatgagtaagggcgcgcaaaaattcatcaagcccttaagctttgaagctttgagccaccataaagtcctgcatgatcgtaatgaaaaatggtattacaaccaccaaaacaaattgcaccacaaccacatcgcatgcgctgctagtgctgatttactcatctttgcccctttaagcgctaacagcttgtctaaaatcgctcacgctttagcggataataccatcagcgcgacttttttagcttgcgcttcccctaaaatcctagccccaagcatgaacactaacatgctcaattcccctatcattcaaagtaatttaaaacgcttgaaagattccaatcacatcattttagacacccaaaacgcccttttggcatgcaacactaaaggcgacggggcgatggctgagcctttagaaatcctttttaaagccacccaaacgctcttaaaagacgcttattttgaaaacagagaagtcatagtcatgggcggcgcgagcgtggaaaagattgacagcgttagagttattagcaatctttctagcgggattcaagcgagcgctttggctctagcgttatattttaagggagcgaaagtgactttgattgcgtccaacttccctacccctttgcctaaagaaatcgcaagcgttttagttagcgacaccgcttcttatgaaaacgccttgaatgaagccgctaaaaacttgcaaaaacatgccttaaaacccctactcttcaatttagccgccattagcgattatttgcctaaaacttctttcaaccataagcttaaaaaaagcgaactgggcgaaaccctaaacgttgaatgcgttcaaaataaggatttactggcttctgtcaatcctaatcaattcgttaaaatcggttttaaagctgaagatgatcaacaaaacgccattaaaaacgctcaaaatcttttaaaaccttctcaagataacggcaaggattgctccgtggccgctttgaatctcattaaagattcacgcccttttggctcattagacaatgaattgtggctttttagccataaaaaaacccaaaaaatcccttccatgaacaaattagaagcgagctttaaaatccttgattttatcaaagacaacgccctttaa

SEQ ID NO: 760 - DNA (genomic), 315 bp, Helicobacter pylori; double-stranded, circular
  misc_feature (B) LOCATION 1...315
  hypothetical: NO
  anti-sense: NO
ggatgtggcgattatcggggcgagcaatatcattggaaaacctttaagcatgctcatgttaaacgctggggctgcgtgagcgtgtgccatattttgactaaagacattagtttttacaccaaaaacgctgatattgtctgcgtgggcgtgggtaagcctgatttgattaaagcgagcatgttaaaaaaaggggctgtagtggtggatattgggatcaatcatttgaacgatgggcgtatcgtgggcgatgtggattttatcaacgctcaaaaaatcgccgggtttatcacccctgtgcctaaagcgtggggccta

SEQ ID NO: 761 - DNA (genomic), 618 bp, Helicobacter pylori; double-stranded, circular
  misc_feature (B) LOCATION 1...618
  hypothetical: NO
  anti-sense: NO
acgcatgatttttgctacaataataggattttaatggataaaggacaaataagcatgccaaataggggcgttgttttattagacgggcaagcgctagcttataatatagaaaaagatttgaaaaataaaatccaaataataaccgcacaaacgcataaacgccccaaactagccgtgattttagtggggaaagatcccgctagtatcacttatgtcaatatgaagatcaaagcatgccaaagggtgggcatggattttgatttgaaaaccctcaaagagaacattaccgaagccgaattgctgtccttgattaaagattacaataccgatcaaaacatttcagggattttagtccagctccctttgcctagaagcattgatactaaaatgattttagaagccattgacccaaacaaagatgtggatggtttccacccccttaatatcggcaagctctgcacccaaaaggaatcgtttctgccagctacccctatgggcgtgatgcgtcttttagaacattatcacattgaaatcaagggtaaggatgtggcgattatcggggcgagcaatatcattggaaaacctttaagcatgctcatgttaaacgctggggctgcg

SEQ ID NO: 762 - DNA (genomic), 1026 bp, Helicobacter pylori; double-stranded, circular
  misc_feature (B) LOCATION 1...1026
  hypothetical: NO
  anti-sense: NO
atggataaaggacaaataagcatgccaaataggggcgttgttttattagacgggcaagcgctagcttataatatagaaaaagatttgaaaaataaaatccaaataataaccgcacaaacgcataaacgccccaaactagccgtgattttagtggggaaagatcccgctagtatcacttatgtcaatatgaagatcaaagcatgccaaagggtgggcatggattttgatttgaaaaccctcaaagagaacattaccgaagccgaattgctgtccttgattaaagattacaataccgatcaaaacatttcagggattttagtccagctccctttgcctagaagcattgatactaaaatgattttagaagccattgacccaaacaaagatgtggatggtttccacccccttaatatcggcaagctctgcacccaaaaggaatcgtttctgccagctacccctatgggcgtgatgcgtcttttagaacattatcacattgaaatcaagggtaaggatgtggcgattatcggggcgagcaatatcattggaaaacctttaagcatgctcatgttaaacgctggggctagcgtgagcgtgtgccatattttgactaaagacattagtttttacaccaaaaacgctgatattgtctgcgtgggcgtgggtaagcctgatttgattaaagcgagcatgttaaaaaaaggggctgtagtggtggatattgggatcaatcatttgaacgatgggcgtatcgtgggcgatgtggattttatcaacgctcaaaaaatcgccggttttatcacccctgtgcctaaaggcgtggggcctatgacgatcgtctcgcttttagaaaacactctaatcgcttttgaaaacaacaaaggaagggattttaatgaaatttttacgctctgtttatgctttttgctccagttgggtggggacgattattatcgtgctgttggttatcttttttatcgcgcaagcctttatcattccctctcgatctatggtaggcacgctctatga

SEQ ID NO: 763 - DNA (genomic), 522 bp, Helicobacter pylori; double-stranded, circular
  misc_feature (B) LOCATION 1...522
  hypothetical: NO
  anti-sense: NO
gagctattttttatggcggagcttggcattgtgctaggggcaaggataggatacgttcttatttatgagcctaattccagctattatttgacgcatttttggcaaatctttaacccctttgatagccatgggaattttataggcattcgtgggatgagctatcatggggggttagtggggtttttgatcgcttcgtatctttatagccgtaaggatttgaaaaagcttttgatttatttggatttgattgcgatcagcctgcctttagggtatgttttggggaggattgggaattttttaaaccaggagctttttgggagaatcgtccccaaagacagccatttagggcaaatcataggcattatggtggataatgagttgcgttatcctagccagttgattgaagcgtttttagagggggttgtcgtgtttttaatggtgatgtgggctaaaaaacacaccaaaacgcatgggttgctcatcgtggtttatggtttggggtattccttgatgcgctttatt

SEQ ID NO: 764 - DNA (genomic), 852 bp, Helicobacter pylori; double-stranded, circular
  misc_feature (B) LOCATION 1...852
  hypothetical: NO
  anti-sense: NO
atgaacgcttggaatacgatttatgaacgatttaaccccatcgcttttagtcttggcggtattgaagtgcattggtatggtttggcgtatgcgtgcgcgattgttgtcgcattttacatggcgttaagaatgatccaaaaagatcccaagcgattccccattgaaaggaaggaatttgagagctattttttatgggcggagcttggcattgtgctaggggcaaggataggatacgttcttatttatgagcctaattccagctattatttgacgcatttttggcaaatctttaacccctttgatagccatgggaattttataggcattcgtgggatgagctatcatggggggttagtggggtttttgatcgcttcgtatctttatagccgtaaggatttgaaaaagcttttgatttatttggatttgattgcgatcagcctgcctttagggtatgtttttgggaggattgggaattttttaaaccaggagctttttgggagaatcgtccccaaagacagccatttagggcaaatcataggcattatggtggataatgagttgcgttatcctagccagttgattgaagcgtttttagagggggttgtcgtgtttttaatggtgatgtgggctaaaaaacacaccaaaacgcatgggttgctcatcgtggtttatggtttggggtattccttgatgcgctttattgcggaattttacagagagccagacagccaattgggggtttattttttgaatttgagcatggggcagattttaagcgtgtttatggtaattgtttcgttagggattttattgtatgctacgaaaaattctaaaaaaataaaggaagaataa

SEQ ID NO: 765 - DNA (genomic), 600 bp, Helicobacter pylori; double-stranded, circular
  misc_feature (B) LOCATION 1...600
  hypothetical: NO
  anti-sense: NO
aagcgcatgaaagaatctttttacatagagggaatgacttgcacggcgtgttctagcgggattgaacgctctttaggacgtaaaagttttgtgaaaaaaatagaagtgagccttttaaataagagcgctaacattgaatttaacgaaaatgaaaccaatttagacgaaatttttaaactcattgaaaaactgggttatagccctaaaaaaactctagcagaagaaaaaaaagaattttttagccctaatgttaaattagcgttggcggttattttcacgctttttgtggtgtatctttctatgggggcgatgcttagccctagccttttacctgaaagcttgcttacgattaaccatcatagtaattttttaaacgcttgcttacagcttataggcgcgctcattgtcatgcatttggggagggatttttacattcaagggtttaaagccttatggcacagacaacccaacatgagcagccttatcgccataggcacaagtgctgccttaatttcagcctgtggcaattgtatttggtttataccaatcattataccgatcagtggtcttatgggcattattattttgaaagcgtgtgcg

SEQ ID NO: 766 - DNA (genomic), 1794 bp, Helicobacter pylori; double-stranded, circular
  misc_feature (B) LOCATION 1...1794
  hypothetical: NO
  anti-sense: NO
agccttatggcacagacaacccaacatgagcagccttatcgccataggcacaagtgctgccttaatttcagcctgtggcaattgtatttggtttataccaatcattataccgatcagtggtcttatgggcattattattttgaaagcgtgtgcgtgattttaatgtttgtgatggtgggcaaacgcattgaaaacgtttctaaagataaagccttagacgccatgcaagctttgatgaaaaacgccccaaaaaccgcccttaaaatgcacaataaccaacagattgaagttttagtggatagcattgtggtgggggatattctaaaagtcctccctggaagtgcgattgcggtggatggcgaaatcatagagggcgaaggggaattagatgagagcatgttaagcggcgaagcgttgccagtttataaaaaagtcggcgataaagtcttttcagggacgctcaatagcaacacgagttttttaatgaaagccacgcaagataacaaaaacagcaccttgtctcaaattatagaaatgatccataacgcccaaagctcaaaggcagagatttctcgcttagcggataaggtttcaagtgtatttgtgccaagcgtgatcgctatcgctgttttagcgtttgtggtgtggctcatcatcgcgcctaagcctgatttttggtggaattttcgcaccgctttagaagtgtttgtatcggttttggtgatttcttgcccttgcgctttggggttggctacgcctatgagtattttagtggcgaaccaaaaagcgagttctttaggcttattttttaaagacgctaaaagtttagaaaaagcaaggctagtcaatacgatcgtttttgataaaaccggcacgctcactaacggcaagcctgtcgttaaaagcatccattctaacatagaattattagagctattgagtttagcgagcagcattgaaaagagcagcgaacatgtcattgctaaggggattgtagaatacgctaaagagcgtaatgcccccttaaaagacattagcgaagttaaagtgaaaacgggctttggcatcagcgctaaagtagattatcaaggcgctaaagaaatcatcaaagtgggcaacagcgaattttttaaccctattaacacgctagaaattaaagaaaacgggattttagtgtttgtgggtagagcgatcaatgaaaaagaagacgagcttttaggggcgtttgttttagaggatttgcccaaaaaaggcgtgaaagagcatatcgctcaaatcaaaaatttaggcattaatacttttcttttgagtggggacaatagggaaaatgtcaaaaaatgcgcgcttgaattagggatagatggttatatcagtaacgctaaaccgcaagacaagctcaataagatcaaagagcttaaggaaaaagggcggatcgtgatgatggtgggcgatggcttgaatgacgcccctagccttgctatgagcgatgtggcggtggtgatggctaaagggagcgatgtgagcgtgcaagcggcggatattgtgagctttaataacgatattaaatcggtttatagcgcgattaaattaagccaggcgaccattaaaaatatcaaagaaaatttgttttgggctttttgttataatagcgtgtttatccctttagcttgtggggttctttataaggctaatatcatgttaagcccggcgattgcgggtttagcgatgagcttaagctctgtgagtgtggtcttaaactcccaaaggctaaggaattttaaaattaaggatcat

SEQ ID NO: 767 - DNA (genomic), 2238 bp, Helicobacter pylori; double-stranded, circular
  misc_feature (B) LOCATION 1...2238
  hypothetical: NO
  anti-sense: NO
atgaaagaatctttttacatagagggaatgacttgcacggcgtgttctagcgggattgaacgctctttaggacgtaaaagttttgtgaaaaaaatagaagtgagccttttaaataagagcgctaacattgaatttaacgaaaatgaaaccaatttagacgaaatttttaaactcattgaaaaactgggttatagccctaaaaaaactctagcagaagaaaaaaaagaattttttagccctaatgttaaattagcgttggcggttattttcacgctttttgtggtgtatctttctatgggggcgatgcttagccctagccttttacctgaaagcttgcttacgattaaccatcatagtaattttttaaacgcttgcttacagcttataggcgcgctcattgtcatgcatttggggagggatttttacattcaagggtttaaagccttatggcacagacaacccaacatgagcagccttatcgccataggcacaagtgctgccttaatttcaagcctgtggcaattgtatttggtttataccaatcattataccgatcagtggtcttatgggcattattattttgaaagcgtgtgcgtgattttaatgtttgtgatggtgggcaaacgcattgaaaacgtttctaaagataaagccttagacgccatgcaagctttgatgaaaaacgccccaaaaaccgcccttaaaatgcacaataaccaacagattgaagttttagtggatagcattgtggtgggggatattctaaaagtcctccctggaagtgcgattgcggtggatggcgaaatcatagagggcgaaggggaattagatgagagcatgttaagcggcgaagcgttgccagtttataaaaaagtcggcgataaagtcttttcagggacgctcaatagcaacacgagttttttaatgaaagccacgcaagataacaaaaacagcaccttgtctcaaattatagaaatgatccataacgcccaaagctcaaaggcagagatttctcgcttagcggataaggtttcaagtgtatttgtgccaagcgtgatcgctatcgctgttttagcgtttgtggtgtggctcatcatcgcgcctaagcctgatttttggtggaattttcgcaccgctttagaagtgtttgtatcggttttggtgatttcttgcccttgcgctttggggttggctacgcctatgagtattttagtggcgaaccaaaaagcgagttctttaggcttattttttaaagacgctaaaagtttagaaaaagcaaggctagtcaatacgatcgtttttgataaaaccggcacgctcactaacggcaagcctgtcgttaaaagcatccattctaacatagaattattagagctattgagtttagcgagcagcattgaaaagagcagcgaacatgtcattgctaaggggattgtagaatacgctaaagagcgtaatgcccccttaaaagacattagcgaagttaaagtgaaaacgggctttggcatcagcgctaaagtagattatcaaggcgctaaagaaatcatcaaagtgggcaacagcgaattttttaaccctattaacacgctagaaattaaagaaaacgggattttagtgtttgtgggtagagcgatcaatgaaaaagaagacgagcttttaggggcgtttgttttagaggatttgcccaaaaaaggcgtgaaagagcatatcgctcaaatcaaaaatttaggcattaatacttttcttttgagtggggacaatagggaaaatgtcaaaaaatgcgcgcttgaattagggatagatggttatatcagtaacgctaaaccgcaagacaagctcaataagatcaaagagcttaaggaaaaagggcggatcgtgatgatggtgggcgatggcttgaatgacgcccctagccttgctatgagcgatgtggcggtggtgatggctaaagggagcgatgtgagcgtgcaagcggcggatattgtgagctttaataacgatattaaatcggtttatagcgcgattaaattaagccaggcgaccattaaaaatatcaaagaaaatttgttttgggctttttgttataatagcgtgtttatccctttagcttgtggggttctttataaggctaatatcatgttaagcccggcgattgcgggtttagcgatgagcttaagctctgtgagtgtggtcttaaactcccaaaggctaaggaattttaaaattaaggatcattga

SEQ ID NO: 768 - DNA (genomic), 927 bp, Helicobacter pylori; double-stranded, circular
  misc_feature (B) LOCATION 1...927
  hypothetical: NO
  anti-sense: NO
atggctaataacgcttcgttttatgcggcggcgtctatggcttacatgctaggggcaaagcatgcgtttgacgctgatcacatcgcttgcatagacaacaccattagaaagctcacccaacaaggcaaaaacgcctatggcgtggggttttacttttctatggggcattcaagcgtggtgattttaatgaccatcatcagcgcgtttgcgatcgcttgggctaaagagcatacgccgatgttagaagaaatagggggggtagtggggactttagtttctgggcttttcttgctcattatagggctattgaatgcgattattttaatagatctattaaaaatcttcaaaaaatcgcattctaatgaaagcttgagccggcaacaaaacgaagagatcgaacggctcttaacgagtaggggcttactcaaccgcttttttaaacccttgtttaatttcgtttccaagtcgtggcatatttatcctgtgggttttctttttgggctaggctttgataccgctagtgaaatcgcgcttttggccctctctagtagcgcgattaaagtgagtgtggtgggcatgctctctttacccattctttttgccgctggcatgagtttgtttgacactttagatggggcgttcatgctcaaggcatatgattgggcgttcaaaacccctttaagaaaaatctattacaatatttccatcaccgccttgagcgtgtttatcgcgctttttatcgggttgattgagctttttcaagtcattagcgagaaactccatttaaaatttgaaaaccgccttttaagcaccctacaaagcctggaatttacagacttaggctattacttggtgggcttattcgtaatagcgtttttaggctcattcttcttatggaaaatcaaattttctaaattagagagctag

SEQ ID NO: 769 - DNA (genomic), 996 bp, Helicobacter pylori; double-stranded, circular
  misc_feature (B) LOCATION 1...996
  hypothetical: NO
  anti-sense: NO
gtgaaattgtggtttccttattttttagcgattgtgttcttgcatgcgttaggtttggcgttgctctttatggctaataacgcttcgttttatgcggcggcgtctatggcttacatgctaggggcaaagcatgcgtttgacgctgatcacatcgcttgcatagacaacaccattagaaagctcacccaacaaggcaaaaacgcctatggcgtggggttttacttttctatggggcattcaagcgtggtgattttaatgaccatcatcagcgcgtttgcgatcgcttgggctaaagagcatacgccgatgttagaagaaatagggggggtagtggggactttagtttctgggcttttcttgctcattatagggctattgaatgcgattattttaatagatctattaaaaatcttcaaaaaatcgcattctaatgaaagcttgagccggcaacaaaacgaagagatcgaacggctcttaacgagtaggggcttactcaaccgcttttttaaacccttgtttaatttcgtttccaagtcgtggcatatttatcctgtgggttttctttttgggctaggctttgataccgctagtgaaatcgcgcttttggccctctctagtagcgcgattaaagtgagtgtggtgggcatgctctctttacccattctttttgccgctggcatgagtttgtttgacactttagatggggcgttcatgctcaaggcatatgattgggcgttcaaaacccctttaagaaaaatctattacaatatttccatcaccgccttgagcgtgtttatcgcgctttttatcgggttgattgagctttttcaagtcattagcgagaaactccatttaaaatttgaaaaccgccttttaagcaccctacaaagcctggaatttacagacttaggctattacttggtgggcttattcgtaatagcgtttttaggctcattcttcttatggaaaatcaaattttctaaattagagagctag

SEQ ID NO: 770 - DNA (genomic), 1050 bp, Helicobacter pylori; double-stranded, circular
  misc_feature (B) LOCATION 1...1050
  hypothetical: NO
  anti-sense: NO
tttaacaaaatatattacaattatttaaaaaatactatttttacaaaaaggcgcgctgtgaaattgtggtttccttattttttagcgattgtgttcttgcatgcgttaggtttggcgttgctctttatggctaataacgcttcgttttatgcggcggcgtctatggcttacatgctaggggcaaagcatgcgtttgacgctgatcacatcgcttgcatagacaacaccattagaaagctcacccaacaaggcaaaaacgcctatggcgtggggttttacttttctatggggcattcaagcgtggtgattttaatgaccatcatcagcgcgtttgcgatcgcttgggctaaagagcatacgccgatgttagaagaaatagggggggtagtggggactttagtttctgggcttttcttgctcattatagggctattgaatgcgattattttaatagatctattaaaaatcttcaaaaaatcgcattctaatgaaagcttgagccggcaacaaaacgaagagatcgaacggctcttaacgagtaggggcttactcaaccgcttttttaaacccttgtttaatttcgtttccaagtcgtggcatatttatcctgtgggttttctttttgggctaggctttgataccgctagtgaaatcgcgcttttggccctctctagtagcgcgattaaagtgagtgtggtgggcatgctctctttacccattctttttgccgctggcatgagtttgtttgacactttagatggggcgttcatgctcaaggcatatgattgggcgttcaaaacccctttaagaaaaatctattacaatatttccatcaccgccttgagcgtgtttatcgcgctttttatcgggttgattgagctttttcaagtcattagcgagaaactccatttaaaatttgaaaaccgccttttaagcaccctacaaagcctggaatttacagacttaggctattacttggtgggcttattcgtaatagcgtttttaggctcattcttcttatggaaaatcaaattttctaaattagagagc

SEQ ID NO: 771 - DNA (genomic), 330 bp, Helicobacter pylori; double-stranded, circular
  misc_feature (B) LOCATION 1...330
  hypothetical: NO
  anti-sense: NO
ggcgtgtgtgcgatggtaggcgatggcaataatgatgcgctgaccttgaaacaagcgagcgtttctttggggtttgaaaaaagtgctttgagtaaaagtgcatgcgatattttgcttttagaagaggatttgagtttgctagaaaaagcgtttcataacgctcaaaaagtctatcaagtggtgttgcaaaacattgttttaagcttgatttataacgctattttaatcccggtcgctatgctaggatacatcaaccctttaatagcgagtttgagcatgagtggtagctcgctcttagtggttttaaattctttgaggttgaaacgctct

SEQ ID NO: 772 - DNA (genomic), 441 bp, Helicobacter pylori; double-stranded, circular
  misc_feature (B) LOCATION 1...441
  hypothetical: NO
  anti-sense: NO
ggattaaaaatgaaatgttcgcattgccagttggagtttaaagaaagcgatctttttaaagagactattaatcataaagaattgcatttttgctgcgcagggtgcgctagggtgtatgcgttattaacagatttgaatttagagagcttttatgacaagttaaacgattccactttagcccccgtaacgccccaagattcaatgaatattttagaattagaacaagcccttgaagaaaacaataagggcgattttattctcaatcttttgctagaaaaaacgcattgtaacgcttgcttgtggctcaatcaaaaggttttagagcgtttaaagggggttaaaaaagtgagcgtgaatttcaccacccaccacttgcaaatcgtgtttgacaagtccttaaaccctaaagaggttattcaaaagatcgagagcttgggctat

SEQ ID NO: 773 - DNA (genomic), 588 bp, Helicobacter pylori; double-stranded, circular
  misc_feature (B) LOCATION 1...588
  hypothetical: NO
  anti-sense: NO
cgtgctagtcataagctgcccttgcgcgttcgctcggctacgcccatagcgttagtgataggggtgtttaaaaaccctttgatcgtgtttaaagaagcgttgtttttagaaactctggctaaagtgaaaaaaatctttatagacaaaaccggcaccctcacgcaaaaagaagtccttttaaaagaaaaaatcattcatgaagaatttgatgaaaggcttttaaagagccttttaaaaactagggagcatttagcccataatgcgattcttaaaacattagatggcgatgaggttgatttggaaaagatagagtttttcgctcatggcctgaaagcgagctatcaaaacgaaaccttgctagtggggagtttgaaatttttaaacgctatgggggttgatttaaaggttaaagagagcgctaatatcatggtaggctttgcgaaaaataagaccttatgcgcgttattcattttagaagagcgtttgaaagctaacgctaaagaagtcattcaggctttacaaaatcaaggcttggaattagaaattttaagcggggataatgaaagctcggttaaggagtgcgcgaaa

SEQ ID NO: 774 - DNA (genomic), 840 bp, Helicobacter pylori; double-stranded, circular
  misc_feature (B) LOCATION 1...840
  hypothetical: NO
  anti-sense: NO
cgggttatggcggtgcgaatcatggcgacggtatggacaaactcatgcaaggaatttggactcgtatcgctctttttaagcttgttggtgctagtggtggtggggcgttttttcattaagggggcgttttatgggctaaaaaatggcgttttgggcatggatttgagcgtgtcttttggggcgttgtcggcgtttgtttattccctttatgcgatgttggtgtctcaagagacctattttgaagcgagcagcacgattttaacgcttgtttttggctctaagtttttggaattaaaggctaggctgtttgcgaatgaaaaatgtctggccctagaatcgcatgaaatccatagcgtgatcgttgtagaaaacggcaagcagatagaaaaacaccctaaagatgtggcgataggctcggttgtttgggtgccaagcggggctaaaatcgctttagatggcgtgcttttaaatagcgcgagcgtggatgcgtctttgatcagcggggagtttaagcctttggaattgggggttaatgatccaattttagggggttatgtgaacgtgggcgtgccttttagctatcaagtgagcgcgacctttcaaaactcacgcctttctagtttgctagaaactttaaaaaagagttttttagaaaagcccttaattgagagcagcgcgaataaaatcgcggatattttttctaaagcggtgttgtttttagcctttgtgagctttttattgtggcaatttggtttggggggtaattttgaaaaagctttaatggtgtgtattagcgtgctagtcataagctgcccttgcgcgttcgctcggctacgccca

SEQ ID NO: 775 - DNA (genomic), 837 bp, Helicobacter pylori; double-stranded, circular
  misc_feature (B) LOCATION 1...837
  hypothetical: NO
  anti-sense: NO
gttatggcggtgcgaatcatggcgacggtatggacaaactcatgcaaggaatttggactcgtatcgctctttttaagcttgttggtgctagtggtggtggggcgttttttcattaagggggcgttttatgggctaaaaaatggcgttttgggcatggatttgagcgtgtcttttggggcgttgtcggcgtttgtttattccctttatgcgatgttggtgtctcaagagacctattttgaagcgagcagcacgattttaacgcttgtttttggctctaagtttttggaattaaaggctaggctgtttgcgaatgaaaaatgtctggccctagaatcgcatgaaatccatagcgtgatcgttgtagaaaacggcaagcagatagaaaaacaccctaaagatgtggcgataggctcggttgtttgggtgccaagcggggctaaaatcgctttagatggcgtgcttttaaatagcgcgagcgtggatgcgtctttgatcagcggggagtttaagcctttggaattgggggttaatgatccaattttagggggttatgtgaacgtgggcgtgccttttagctatcaagtgagcgcgacctttcaaaactcacgcctttctagtttgctagaaactttaaaaaagagttttttagaaaagcccttaattgagagcagcgcgaataaaatcgcggatattttttctaaagcggtgttgtttttagcctttgtgagctttttattgtggcaatttggtttggggggtaattttgaaaaagctttaatggtgtgtattagcgtgctagtcataagctgcccttgcgcgttcgctcggctacgccca

SEQ ID NO: 776 - DNA (genomic), 972 bp, Helicobacter pylori; double-stranded, circular
  misc_feature (B) LOCATION 1...972
  hypothetical: NO
  anti-sense: NO
ttgcgcgttcgctcggctacgcccatagcgttagtgataggggtgtttaaaaaccctttgatcgtgtttaaagaagcgttgtttttagaaactctggctaaagtgaaaaaaatctttatagacaaaaccggcaccctcacgcaaaaagaagtccttttaaaagaaaaaatcattcatgaagaatttgatgaaaggcttttaaagagccttttaaaaactagggagcatttagcccataatgcgattcttaaaacattagatggcgatgaggttgatttggaaaagatagagtttttcgctcatggcctgaaagcgagctatcaaaacgaaaccttgctagtggggagtttgaaatttttaaacgctatgggggttgatttaaaggttaaagagagcgctaatatcatggtaggctttgcgaaaaataagaccttatgcgcgttattcattttagaagagcgtttgaaagctaacgctaaagaagtcattcaggctttacaaaatcaaggcttggaattagaaattttaagcggggataatgaaagctcggttaaggagtgcgcgaaaaaattagggatctctaagtatcatgcccatttgacccctgaagataaggctcaaatcatcagctcttataagggcgtgtgtgcgatggtaggcgatggcaataatgatgcgctggccttgaaacaagcgagcgtttctttggggtttgaaaaaagtgctttgagtaaaagtgcatgcgatattttgcttttagaagaggatttgagtttgctagaaaaagcgtttcataacgctcaaaaagtctatcaagtggtgttgcaaaacattgttttaagcttgatttataacgctattttaatcccggtcgctatgctaggatacatcaaccctttaatagcgagtttgagcatgagtggtagctcgctcttagtggttttaaattctttgaggttgaaacgctcttaa

SEQ ID NO: 777 - DNA (genomic), 1422 bp, Helicobacter pylori; double-stranded, circular
  misc_feature (B) LOCATION 1...1422
  hypothetical: NO
  anti-sense: NO
atgaaatgttcgcattgccagttggagtttaaagaaagcgatctttttaaagagactattaatcataaagaattgcatttttgctgcgcagggtgcgctagggtgtatgcgttattaacagatttgaatttagagagcttttatgacaagttaaacgattccactttagcccccgtaacgccccaagattcaatgaatattttagaattagaacaagcccttgaagaaaacaataagggcgattttattctcaatcttttgctagaaaaaacgcattgtaacgcttgcttgtggctcaatcaaaaggttttagagcgtttaaagggggttaaaaaagtgagcgtgaatttcaccacccaccacttgcaaatcgtgtttgacaagtccttaaaccctaaagagattattcaaaagattgagagcttgggctatggggctaaaatttataacgcgcaaaattacaccctaaaagcccaaaaagagcaacgctcctacttgctcactttaagcgtggggttttttgccaccatgaatttgatgtttattgccattgccaaatacgcaagctatggtagcgcgagttatggcggtgcgaattatggcggcggtatggacaaactcatgcaaaggaatttggatctcgtatcgctctttttaagcttgttggtgctagtggtggtggggcgttttttcattaagggggcgttttatgggctaaaaaatggcgttttgggcatggatttgagcgtgtcttttggggcgttgtcggcgtttgtttattccctttatgcgatgttggtgtctcaagagacctattttgaagcgagcagcacgattttaacgcttgtttttggctctaagtttttggaattaaaggctaggctgtttgcgaatgaaaaatgtctggccctagaatcgcatgaaatccatagcgtgatcgttgtagaaaacggcaagcagatagaaaaacaccctaaagatgtggcgataggctcggttgtttgggtgccaagcggggctaaaatcgctttagatggcgtgcttttaaatagcgcgagcgtggatgcgtctttgatcagcggggagtttaagcctttggaattgggggttaatgatccaattttagggggttatgtgaacgtgggcgtgccttttagctatcaagtgagcgcgacctttcaaaactcacgcctttctagtttgctagaaactttaaaaaagagttttttagaaaagcccttaattgagagcagcgcgaataaaatcgcggatattttttctaaagcggtgttgtttttagcctttgtgagctttttattgtggcaatttggtttggggggtaattttgaaaaagctttaatggtgtgtattagcgtgctagtcataagctgcccttgcgcgttcgctcggctacgcccatag

SEQ ID NO: 778 - DNA (genomic), 2367 bp, Helicobacter pylori; double-stranded, circular
  misc_feature (B) LOCATION 1...2367
  hypothetical: NO
  anti-sense: NO
atgaaatgttcgcattgccagttggagtttaaagaaagcgatctttttaaagagactattaatcataaagaattgcatttttgctgcgcagggtgcgctagggtgtatgcgttattaacagatttgaatttagagagcttttatgacaagttaaacgattccactttagcccccgtaacgccccaagattcaatgaatattttagaattagaacaagcccttgaagaaaacaataagggcgattttattctcaatcttttgctagaaaaaacgcattgtaacgcttgcttgtggctcaatcaaaaggttttagagcgtttaaagggggttaaaaaagtgagcgtgaatttcaccacccaccacttgcaaatcgtgtttgacaagtccttaaaccctaaagagattattcaaaagattgagagcttgggctatggggctaaaatttataacgcgcaaaattacaccctaaaagcccaaaaagagcaacgctcctacttgctcactttaagcgtggggttttttgccaccatgaatttgatgtttattgccattgccaaatacgcaagctatggtagcgcgagttatggcggtgcgaattatggcggcggtatggacaaactcatgcaaaggaatttggatctcgtatcgctctttttaagcttgttggtgctagtggtggtggggcgttttttcattaagggggcgttttatgggctaaaaaatggcgttttgggcatggatttgagcgtgtcttttggggcgttgtcggcgtttgtttattccctttatgcgatgttggtgtctcaagagacctattttgaagcgagcagcacgattttaacgcttgtttttggctctaagtttttggaattaaaggctaggctgtttgcgaatgaaaaatgtctggccctagaatcgcatgaaatccatagcgtgatcgttgtagaaaacggcaagcagatagaaaaacaccctaaagatgtggcgataggctcggttgtttgggtgccaagcggggctaaaatcgctttagatggcgtgcttttaaatagcgcgagcgtggatgcgtctttgatcagcggggagtttaagcctttggaattgggggttaatgatccaattttagggggttatgtgaacgtgggcgtgccttttagctatcaagtgagcgcgacctttcaaaactcacgcctttctagtttgctagaaactttaaaaaagagttttttagaaaagcccttaattgagagcagcgcgaataaaatcgcggatattttttctaaagcggtgttgtttttagcctttgtgagctttttattgtggcaatttggtttggggggtaattttgaaaaagctttaatggtgtgtattagcgtgctagtcataagctgcccttgcgcgttcgctctggctacgcccatagcgttagtgataggggtgtttaaaaaccctttgatcgtgtttaaagaagcgttgtttttagaaactctggctaaagtgaaaaaaatctttatagacaaaaccggcaccctcacgcaaaaagaagtccttttaaaagaaaaaatcattcatgaagaatttgatgaaaggcttttaaagagccttttaaaaactagggagcatttagcccataatgcgattcttaaaacattagatggcgatgaggttgatttggaaaagatagagtttttcgctcatggcctgaaagcgagctatcaaaacgaaaccttgctagtggggagtttgaaatttttaaacgctatgggggttgatttaaaggttaaagagagcgctaatatcatggtaggctttgcgaaaaataagaccttatgcgcgttattcattttagaagagcgtttgaaagctaacgctaaagaagtcattcaggctttacaaaatcaaggcttggaattagaaattttaagcggggataatgaaagctcggttaaggagtgcgcgaaaaaattagggatctctaagtatcatgcccatttgacccctgaagataaggctcaaatcatcagctcttataagggcgtgtgtgcgatggtaggcgatggcaataatgatgcgctggccttgaaacaagcgagcgtttctttggggtttgaaaaaagtgctttgagtaaaagtgcatgcgatattttgcttttagaagaggatttgagtttgctagaaaaagcgtttcataacgctcaaaaagtctatcaagtggtgttgcaaaacattgttttaagcttgatttataacgctattttaatcccggtcgctatgctaggatacatcaaccctttaatagcgagtttgagcatgagtggtagctcgctcttagtggttttaaattctttgaggttgaaacgctcttaa

SEQ ID NO: 779 - DNA (genomic), 297 bp, Helicobacter pylori; double-stranded, circular
  misc_feature (B) LOCATION 1...297
  hypothetical: NO
  anti-sense: NO
cgctccactctagcgagcgctgatgtggggattggcatggggaaaggatcagaattgagcaagcaaagcgcggacattgtgatcactaatgactccttaagctctttagtcaaagttttagcgatcgctaaaaaaactaaaagcattatttggcaaaatatcttgttcgctttggggattaaggcggtttttatcgtgctagggcttatgggggtagcgagcttgtgggaagcggtctttggcgatgtgggggttacgcttttagacttagccaattccatgcgcacgatgagggct

SEQ ID NO: 780 - DNA (genomic), 468 bp, Helicobacter pylori; double-stranded, circular
  misc_feature (B) LOCATION 1...468
  hypothetical: NO
  anti-sense: NO
cacaacaagacacgaatgaaaagagcgaaacggaggaaatttatcactaaattttcacgctactacaccccaagcgttttattcatcgccttaatgatcgctgtattaccgcccttgttttctatggggagctttgatgagtggatttatagggggcttgtggctttaatggtgagctgtccttgcgcgttagtgatttctgtgcctttagggtattttggaggcgtgggagcggcgagccgaaaggggattttaatgaaaggagtgcatgttttagaggtgcttacccaaactaaaagcatcgcctttgataaaaccggcactttgactaaaggcgtttttaaagtggtggatattgtgccgcaaaacgggcattctaaagaagaagtttgcattacgcttcttgctcgcagcttttatccacgcacccgatcgctttatccattcaaaaagcatgcgaagaaatgt

SEQ ID NO: 781 - DNA (genomic), 537 bp, Helicobacter pylori; double-stranded, circular
  misc_feature (B) LOCATION 1...537
  hypothetical: NO
  anti-sense: NO
agaagaagtttgcattacgcttcttgctcgcagcttttatccacgcacccgatcgctttatccattcaaaaagcatgcgaagaaatgttaaaggacgataagcaccagcatgacattaaaaattacgaagaattgagcgggatgggggttaaagcgcaatgccatacggatctaatcatcgcagggaatgaaaaaatgctcgatcaattccatatcgcgcacagcccttccccagaaaacggcacgatcgtgcatgtggcttttaaccaaacttatatcggctatatcgtgattagcgatgagattaaagatgatgccatagagtgcttaagggatttaaaagcgcaagggatagaaaatttttgcattttgagcggggacagaaaaagcgcgactgaaagcatcgctcgaactctaggctgtgaatatcatgcgagtttgttgcctgaagaaaaaacgagcgtgtttaaaacctttaatgaacgctataaggccccggcgatttttgcaggcgatggcatcaatgacgctccactc

SEQ ID NO: 782 - DNA (genomic), 1287 bp, Helicobacter pylori; double-stranded, circular
  misc_feature (B) LOCATION 1...1287
  hypothetical: NO
  anti-sense: NO
ttgaatttaaaagccgtccttgaaatccaagtagagaaactttataaagattcttctatcgctaaagtggtggatttagtccaacaagccacgaatgaaaagagcgaaacggagaaatttatcactaaattttcacgctactacaccccaagcgttttattcatcgccttaatgatcgctgtattaccgcccttgttttctatggggagctttgatgagtggatttatagggggcttgtggctttaatggtgagctgtccttgcgcgttagtgatttctgtgcctttagggtattttggaggcgtgggagcggcgagccgaaaggggattttaatgaaaggagtgcatgttttagaggtgcttacccaaactaaaagcatcgcctttgataaaaccggcactttgactaaaggcgtttttaaagtggtggatattgtgccgcaaaacgggcattctaaagaagaagttttgcattacgcttcttgctcgcagcttttatccacgcacccgatcgctttatccattcaaaaagcatgcgaagaaatgttaaaggacgataagcaccagcatgacattaaaaattacgaagaattgagcgggatgggggttaaagcgcaatgccatacggatctaatcatcgcagggaatgaaaaaatgctcgatcaattccatatcgcgcacagcccttccccagaaaacggcacgatcgtgcatgtggcttttaaccaaacttatatcggctatatcgtgattagcgatgagattaaagatgatgccatagagtgcttaagggatttaaaagcgcaagggatagaaaatttttgcattttgagcggggacagaaaaagcgcgactgaaagcatcgctcgaactctaggctgtgaatatcatgcgagtttgttgcctgaagaaaaaacgagcgtgtttaaaacctttaaagaacgctataaagccccggcgatttttgtaggcgatggcatcaatgacgctccgactctagcgagcgctgatgtggggattggcatggggaaaggatcagaattgagcaagcaaagcgcggacattgtgatcactaatgactccttaagctctttagtcaaagttttagcgatcgctaaaaaaactaaaagcattatttggcaaaatatcttgttcgctttggggattaaggcggtttttatcgtgctagggcttatgggggtagcgagcttgtgggaagcggtctttggcgatgtgggggttacgcttttagccttagccaattccatgcgcacgatgagggcttaa

SEQ ID NO: 783 - DNA (genomic), 324 bp, Helicobacter pylori; double-stranded, circular
  misc_feature (B) LOCATION 1...324
  hypothetical: NO
  anti-sense: NO
atctcacgtttgcctattacggttgtggagattttatttgggtccgttggggcgtatgtgggttttattgagccaactaaaggctttgaaatcatgtctgaaattggctttttgtttttaatgtttttgtgcggtttggaagtggagatttatttgtttaaaaaattaggggtttctcttttaaaacgtatttttgcttatctgttgatcttatacacgctttcattcatccttacttttagccttaatttagagcctatttttatggtgattttccctattatcaggtttgggcatgatcatgactttatccaaagattatcg

SEQ ID NO: 784 - DNA (genomic), 810 bp, Helicobacter pylori; double-stranded, circular
  misc_feature (B) LOCATION 1...810
  hypothetical: NO
  anti-sense: NO
ttttccctattatcaggtttgggcatgatcatgactttatccaaagattatcgtaaagagattttgtggcttgatttggttttaaaagtgggcgttattggggaattgttaagcatttttggtttggtggtcgtggatggggtgtattcgcatggtttgggcgtggatttaatcaaagatttaggcattctcattgtttttctcatcttaattatcgtggcgtttcaaatctttaagactttgttttggtggttcccgcatttaaagctttttgtgatgcctaaaagcagtcagttcaaccaagacgtgcgcttttcgctcatgctctttttttccttggttgcgatcgtggtgtggctcaaaatagaaatggttttgggggcgtttttggcggggttagtcgtttctacttttttccctcataaatcagagctgatccacaagctcaatgatgtgggttttgggttttttgtgcctttgtttttcatccatgtaggctctactttagacttaaaattagtgtttttaaacccgcatttgatccttcaagggatattgattgtcatagcgatgttaagcttgcacttgatcacttcaaccttattgtggcgcaaatactttaaagaagccaagcatttattttcattcgccttaggggcttccatgcctttaacttttttagtaaccaccgccgcagtgggtttaaaagcgcaagcgatttcgcaaaacacctactacgcattgctcatggcttccaccaatgaaggggtgttattcaccattgcgatcaaaatgctcaacaaaaaagct

SEQ ID NO: 785 - DNA (genomic), 1074 bp, Helicobacter pylori; double-stranded, circular
  misc_feature (B) LOCATION 1...1074
  hypothetical: NO
  anti-sense: NO
ttgcctattacggttgtggagattttatttgggtccgttggggcgtatgtgggttttattgagccaactaaaggctttgaaatcatgtctgaaattggctttttgtttttaatgtttttgtgcggtttggaagtggagatttatttgtttaaaaaattaggggtttctcttttaaaacgtatttttgcttatctgttgatcttatacacgctttcattcatccttacttttagccttaatttagagcctatttttatggtgattttccctattatcagtttgggcatgatcatgactttagtcaaagattatcgtaaagagattttgtggcttgatttggttttaaaagtgggcgttattggggaattgttaagcatttttggtttggtggtcgtggatggggtgtattcgcatggtttgggcgtggatttaatcaaagatttaggcattctcattgtttttctcatcttaattatcgtggcgtttcaaatctttaagactttgttttggtggttcccgcatttaaagctttttgtgatgcctaaaagcagtcagttcaaccaagacgtgcgcttttcgctcatgctctttttttccttggttgcgatcgtggtgtggctcaaaatagaaatggttttgggggcgtttttggcggggttagtcgtttctacttttttccctcataaatcagagctgatccacaagctcaatgatgtgggttttgggttttttgtgcctttgtttttcatccatgtaggctctactttagacttaaaattagtgtttttaaacccgcatttgatccttcaagggatattgattgtcatagcgatgttaagcttgcacttgatcacttcaaccttattgtggcgcaaatactttaaagaagccaagcatttattttcattcgccttaggggcttccatgcctttaacttttttagtaaccaccgccgcagtgggtttaaaagcgcaagcgatctcgcaaaacacctactacgccatgctcatggcggctatctttgaaagggtgttattcaccattgcgatcaaaatgctcaacaaaaaagcttaa

SEQ ID NO: 786 - DNA (genomic), 1152 bp, Helicobacter pylori; double-stranded, circular
  misc_feature (B) LOCATION 1...1152
  hypothetical: NO
  anti-sense: NO
atgcatgcagaatttttcactttcgcgctcattatgcttttaatcgtgatagccccttatgtgtctagaatctctcgtttgcctattacggttgtggagattttatttgggtctgttggggcgtatgtgggttttattgagccaactaaaggctttgaaatcatgtctgaaattggctttttgtttttaatgtttttgtgcggtttggaagtggagatttatttgtttaaaaaattaggggtttctcttttaaaacgtatttttgcttatctgttgatcttatacacgctttcattcatccttacttttagccttaatttagagcctatttttatggtgattttccctattatcagtttgggcatgatcatgactttagtcaaagattatcgtaaagagattttgtggcttgatttggttttaaaagtgggcgttattggggaattgttaagcatttttggtttggtggtcgtggatggggtgtattcgcatggtttgggcgtggatttaatcaaagatttaggcattctcattgtttttctcatcttaattatcgtggcgtttcaaatctttaagactttgttttggtggttcccgcatttaaagctttttgtgatgcctaaaagcagtcagttcaaccaagacgtgcgcttttcgctcatgctctttttttccttggttgcgatcgtggtgtggctcaaaatagaaatggttttgggggcgtttttggcggggttagtcgtttctacttttttccctcataaatcagagctgatccacaagctcaatgatgtgggttttgggttttttgtgcctttgtttttcatccatgtaggctctactttagacttaaaattagtgtttttaaacccgcatttgatccttcaagggatattgattgtcatagcgatgttaagcttgcacttgatcacttcaaccttattgtggcgcaaatactttaaagaagccaagcatttattttcattcgccttaggggcttccatgcctttaacttttttagtaaccaccgccgcagtgggtttaaaagcgcaagcgatctcgcaaaacacctactacgccatgctcatggcggctatctttgaaagggtgttattcaccattgcgatcaaaatgctcaacaaaaaagcttaa

SEQ ID NO: 787 - DNA (genomic), 285 bp, Helicobacter pylori; double-stranded, circular
  misc_feature (B) LOCATION 1...285
  hypothetical: NO
  anti-sense: NO
gtggagcaaaataaaatcattaaactcttcactgtggcgactatggcgatgatgccccccacattgattggcacgattwatggcatgaattttaaattcatgccggagttagaatggcaatacgggtatctttttgcgctgattgtcatggcgatttctacgattttgccggtgatttatttcaaaaagaaagggttggttgtagcctttcatggaatttttatcctcactcttagacgctctttctacaccgcatggcatagtctccttggctacgccacgctt

SEQ ID NO: 788 - DNA (genomic), 957 bp, Helicobacter pylori; double-stranded, circular
  misc_feature (B) LOCATION 1...957
  hypothetical: NO
  anti-sense: NO
atggtgaatgtgtttttcaagcagcaaaaattcgtcattaaaaaacgctttaatgactttaatggttttgatatagaagaaaatgaagtgttgtggtttgaattaatcaaccctacgcccaatgaattagccactctaagccaagaatacgctatccactacaacacggatcattcccaacgagtctcatcagttaccaaatactgggaagacagctccagcgttacgatcaacgcttttttcaccaaccaggatgaaaatgagactttccacatggaaatggcgacctttattttgtctaataacattcttttcacgatttattacgggactttagaaatctttgattctatccaaaaaaaggttttggctagccctaaaaaatttgaagacgggtttgatattctaactaaaatctttgaagtgtattttgaaaaaggggtggaatgtttggaatggatcaacaaacaaacgagcctgttgcgcaaaaacatcattttcaaagaaacttctacgcatgatgatattttagtgcgcttgtccaatttgcaagaatttaatgtggctttaagggattccttttttgacaaacggcgcattatcaccgctttattaaggagcaataaagtggatagcgatactaaaaataatttaaatatcattttaaccgattttagctctttggtggagtctacaacggtcaatctcaactcgcttgataacattcaaaacctgttcgcttctcaagtcaatgtggagcaaaataaaatcattaaactcttcactgtggcgactatggcgatgatgccccccacattgattggcacgatttatggcatgaattttaaattcatgccggagttagaatggcaatacgggtatctttttgcgctgattgtcatggcgatttctacgattttgccggtgatttatttcaaaaagaagggttggttgtag

SEQ ID NO: 789 - DNA (genomic), 963 bp, Helicobacter pylori; double-stranded, circular
  misc_feature (B) LOCATION 1...963
  hypothetical: NO
  anti-sense: NO
ggatcgcttatggtgaatgtgtttttcaagcagcaaaaattcgtcattaaaaaacgctttaatgactttaatggttttgatatagaagaaaatgaagtgttgtggtttgaattaatcaaccctacgcccaatgaattagccactctaagccaagaatacgctatccactacaacacggatcattcccaacgagtctcatcagttaccaaatactgggaagacagctccagcgttacgatcaacgcttttttcaccaaccaggatgaaaatgagactttccacatggaaatggcgacctttattttgtctaataacattcttttcacgatttattacgggactttagaaatctttgattctatccaaaaaaaggttttggctagccctaaaaaatttgaagacgggtttgatattctaactaaaatctttgaagtgtattttgaaaaaggggtggaatgtttggaatggatcaacaaacaaacgagcctgttgcgcaaaaacatcattttcaaagaaacttctacgcatgatgatattttagtgcgcttgtccaatttgcaagaatttaatgtggctttaagggattccttttttgacaaacggcgcattatcaccgctttattaaggagcaataaagtggatagcgatactaaaaataatttaaatatcattttaaccgattttagctctttggtggagtctacaacggtcaatctcaactcgcttgataacattcaaaacctgttcgcttctcaagtcaatgtggagcaaaataaaatcattaaactcttcactgtggcgactatggcgatgatgccccccacattgattggcacgatttatggcatgaattttaaattcatgccggagttagaatggcaatacgggtatctttttgcgctgattgtcatggcgatttctacgattttgccggtgatttatttcaaaaagaagggttggttg

SEQ ID NO: 790 - DNA (genomic), 318 bp, Helicobacter pylori; double-stranded, circular
  misc_feature (B) LOCATION 1...318
  hypothetical: NO
  anti-sense: NO
atgggggctttgatagccatgttttttttaatgctcattaaaaagactatcgcttataaagaagataaaaagagcgcggctttaaaggtcgtgccttatttggtggcgttgatgagcttagcctttagctggtatttgatcgtgaaggttttaaaacgcctctatgcggtgagttttgaaatccagctcgcttgcggttgtgtccttgcgcttttgatttttatcctttttaaaagatttgtgttaaaaaaagccccgcaattagaaaatagccacgaaagcgtcaatgagctttttaatgtccctttgatttttgcc

SEQ ID NO: 791 - DNA (genomic), 555 bp, Helicobacter pylori; double-stranded, circular
  misc_feature (B) LOCATION 1...555
  hypothetical: NO
  anti-sense: NO
cgctatcggtcctttagccgcaatcagtcaaactttagaagatgcgagcagccctatgggagtactttaaactctgtgccgttgtggattatggtagtaggggcagctgggatcgctttaggcttgagcttgtatgggccaaagctcattaaaacggtggggtctgaaatcacagaattagacaaaatgcaagctttttgcatcgcgctttcagcggtcatcaccgtgcttttagcctctcaattaggcttaccggtaagctctacgcatattgtggtgggcgcggtgtttggggtgggctttttaagggagcgtttgagggagcaatccagaaggcgttttgctagaatcagagacaacattgtagcggcgcactttggggaagatttagaagaaattgaaggctttttagagcgctttgataaagccaatttgaaagaaaaatcgctcatgctagagagcttgaaaaaaagcaagaacaccgctatcgctttggaattgaaaaagaaagacaaaaagtcgcttaaaaaagtgtataaagaagaagtgatcaaa

SEQ ID NO: 792 - DNA (genomic), 552 bp, Helicobacter pylori; double-stranded, circular
  misc_feature (B) LOCATION 1...552
  hypothetical: NO
  anti-sense: NO
cgctatcggtcctttagccgcaatcagtcaaactttagaagatgcgagcagccctatgggagtactttaaactctgtgccgttgtggattatggtagtaggggcagctgggatcgctttaggcttgagcttgtatgggccaaagctcattaaaacggtggggtctgaaatcacagaattagacaaaatgcaagctttttgcatcgcgctttcagcggtcatcaccgtgcttttagcctctcaattaggcttaccggtaagctctacgcatattgtggtgggcgcggtgtttggggtgggctttttaagggagcgtttgagggagcaatccagaaggcgttttgctagaatcagagacaacattgtagcggcgcactttggggaagatttagaagaaattgaaggctttttagagcgctttgataaagccaatttgaaagaaaaatcgctcatgctagagagcttgaaaaaaagcaagaacaccgctatcgctttggaattgaaaaagaaagacaaaaagtcgcttaaaaaagtgtataaagaagaagtgatc

SEQ ID NO: 793 - DNA (genomic), 591 bp, Helicobacter pylori; double-stranded, circular
  misc_feature (B) LOCATION 1...591
  hypothetical: NO
  anti-sense: NO
gtgccgttgtggattatggtagtaggggcagctgggatcgctttaggcttgagcttgtatgggccaaagctcattaaaacggtggggtctgaaatcacagaattagacaaaatgcaagctttttgcatcgcgctttcagcggtcatcaccgtgcttttagcctctcaattaggcttaccggtaagctctacgcatattgtggtgggcgcggtgtttggggtgggctttttaagggagcgtttgagggagcaatccagaaggcgttttgctagaatcagagacaacattgtagcggcgcactttggggaagatttagaagaaattgaaggctttttagagcgctttgataaagccaatttgaaagaaaaatcgctcatgctagagagcttgaaaaaaagcaagaacaccgctatcgctttggaattgaaaaagaaagaaaaaaagtcgcttaaaaaagtgtataaagaagaagtgatcaaacgctccattttgaaaaagattgttaccgcttggttggtaaccgtgccggtttctgcgcttttaggggcgcttctttttgtagctcttggttttatagaaaagtatttctag

SEQ ID NO: 794 - DNA (genomic), 903 bp, Helicobacter pylori; double-stranded, circular
  misc_feature (B) LOCATION 1...903
  hypothetical: NO
  anti-sense: NO
ggttttgatgacgatatggaaattagaaacatcaaagagtttgaaaaagcttccaaaaaactccaaaaagacactttaaagatcgctctcgctcttttgttcctcattggcgccgctttgctcgctctcatttttgggcaggctaattctaagggattgttgctcatctttgcggccgtgattggggggtatatggcgatgaatattggcgcgaacgatgtgtctaataatgtcggcccgtccgtaggctctaaagccattagcatgggtggggcgattttgatcgctgcggtttgtgaaatgctaggagcgatcattgctgggggggaagtggtttctacgattaagggccgtatcgtttcgcctgaatttattaacgatgcgcatgttttcattaatgtcatgttggctagccttttgagtggggcgttatggttgcatgtagccactttaataggcgctcccgtttccacttcgcactccgtagtgggagggattatgggggctggaatggcagcagctggaatgtctgctatcaattggcattttttatccggcattgtggctagttgggtaatctcgcctttaatgggggctttgatagccatgttttttttaatgctcattaaaaagactatcgcttataaagaagataaaaagagcgcggctttaaaggtcgtgccttatttggtggcgttgatgagcttagcctttagctggtatttgatcgtgaaggttttaaaacgcctctatgcggtgggttttgaaatccagctcgcttgcggttgtgtccttgcgcttttgatttttatcctttttaaaagatttgtgttaaaaaaagccccgcaattagaaaatagccacgaaagcgtcaatgagctttttaatgtccctttgattttt

SEQ ID NO: 795 - DNA (genomic), 1005 bp, Helicobacter pylori; double-stranded, circular
  misc_feature (B) LOCATION 1...1005
  hypothetical: NO
  anti-sense: NO
atggaaattagaaacatcaaagagtttgaaaaagcttccaaaaaactccaaaaagacactttaaagatcgctctcgctcttttgttcctcattggcgccgctttgctcgctctcatttttgggcaggctaattctaagggattgttgctcatctttgcggccgtgattggggggtatatggcgatgaatattggcgcgaacgatgtgtctaataatgtcggccctgccgtaggctctaaagccattagcatgggtggggcgattttgatcgctgcggtttgtgaaatgctaggagcgatcattgctgggggggaagtggtttctacgattaagggccgtatcgtttcgcctgaatttattaacgatgcgcatgttttcattaatgtcatgttggctagccttttgagtggggcgttatggttgcatgtagccactttaataggcgctcccgtttccacttcgcactccgtagtgggagggattatgggggctggaatggcagcagctggaatgtctgctatcaattggcattttttatccggcattgtggctagttgggtaatctcgcctttaatgggggctttgatagccatgttttttttaatgctcattaaaaagactatcgcttataaagaagataaaaagagcgcggctttaaaggtcgtgccttatttggtggcgttgatgagcttagcctttagctggtatttgatcgtgaaggttttaaaacgcctctatgcggtgggttttgaaatccagctcgcttgcggttgtgtccttgcgcttttgatttttatcctttttaaaagatttgtgttaaaaaaagccccgcaattagaaaatagccacgaaagcgtcaatgagctttttaatgtccctttgatttttgccgccgcgcttttaagctttgcgcatggggctaatgatgtagctaacgctatcggtcctttagccgcaatcagtcaaactttagaagatgcgagcagccctatgggagtactttaa

SEQ ID NO: 796 - DNA (genomic), 1602 bp, Helicobacter pylori; double-stranded, circular
  misc_feature (B) LOCATION 1...1602
  hypothetical: NO
  anti-sense: NO
atggaaattagaaacatcaaagagtttgaaaaagcttccaaaaaactccaaaaagacactttaaagatcgctctcgctcttttgttcctcattggcgccgctttgctcgctctcatttttgggcaggctaattctaagggattgttgctcatctttgcggccgtgattggggggtatatggcgatgaatattggcgcgaacgatgtgtctaataatgtcggccctgccgtaggctctaaagccattagcatgggtggggcgattttgatcgctgcggtttgtgaaatgctaggagcgatcattgctgggggggaagtggtttctacgattaagggccgtatcgtttcgcctgaatttattaacgatgcgcatgttttcattaatgtcatgttggctagccttttgagtggggcgttatggttgcatgtagccactttaataggcgctcccgtttccacttcgcactccgtagtgggagggattatgggggctggaatggcagcagctggaatgtctgctatcaattggcattttttatccggcattgtggctagttgggtaatctcgcctttaatgggggctttgatagccatgttttttttaatgctcattaaaaagactatcgcttataaagaagataaaaagagcgcggctttaaaggtcgtgccttatttggtggcgttgatgagcttagcctttagctggtatttgatcgtgaaggttttaaaacgcctctatgcggtgggttttgaaatccagctcgcttgcggttgtgtccttgcgcttttgatttttatcctttttaaaagatttgtgttaaaaaaagccccgcaattagaaaatagccacgaaagcgtcaatgagctttttaatgtccctttgatttttgccgccgcgcttttaagctttgcgcatggggctaatgatgtagctaacgctatcggtcctttagccgcaatcagtcaaactttagaagatgcgagcagccctatggggagtactttaaactctgtgccgttgtggattatggtagtaggggcagctgggatcgctttaggcttgagcttgtatgggccaaagctcattaaaacggtggggtctgaaatcacagaattagacaaaatgcaagctttttgcatcgcgctttcagcggtcatcaccgtgcttttagcctctcaattaggcttaccggtaagctctacgcatattgtggtgggcgcggtgtttggggtgggctttttaagggagcgtttgagggagcaatccagaaggcgttttgctagaatcagagacaacattgtagcggcgcactttggggaagatttagaagaaattgaaggctttttagagcgctttgataaagccaatttgaaagaaaaatcgctcatgctagagagcttgaaaaaaagcaagaacaccgctatcgctttggaattgaaaaagaaagaaaaaaagtcgcttaaaaaagtgtataaagaagaagtgatcaaacgctccattttgaaaaagattgttaccgcttggttggtaaccgtgccggtttctgcgcttttaggggcgcttctttttgtagctcttggttttatagaaaagtatttctag

SEQ ID NO: 797 - DNA (genomic), 1068 bp, Helicobacter pylori; double-stranded, circular
  misc_feature (B) LOCATION 1...1068
  hypothetical: NO
  anti-sense: NO
gtgcgtttgtttagatttgtggggtggtattatttcaaatactttttaatcgtgcttttagctttggaattgttttttgtaggcattgacagcctgaaatacgccgataaaatgcctgattctgcgaacatgatcattttatttttcacctatgatattttattcgctctcaattacaccttgcccatttccttgcttttagcgatggttttattttatatcaccttcattaaatccaaccaatacaccgccctgctctctattggattttccaaatgccagattttaagccctatttttttgattagcctgtttttcacggctgtttatgtggggttgaacgcgactccttttgtgtatatggaagaaaaaacgcaaaatttaatttataaagacaattctttgagcgtttcagagcatttgttagtgaaatacaacgatgattacgtgtattttgataagattaatcccttattgcaaaaagcccaaaatatcaaggtttttcgcctaaaagataaaactttagaatcttatgctgaagctaaagaagctttttttgaagacaaatattggattttacatgacactactatctatgagatgcccttgagttttgaactgggcgcgaacgctttaaacaccacgcatttagaaacctttaaaacgctcaaaaatttccgccctaaagttttagacaccatttatcaaaacaagcctgcggtttctatcacagacgctcttttatccttgcatgctttagtgcgccaaaacgcggacacgaaaaaagtgcgctcgtttttgtatgtgtttgcgattttgcccttttttgtgccgtttttaagcgttttaatcgcttatttttcgcccagtctcgcccgctatgaaaacctggctcttttagggctaaagtttatcattatcacgctcgttgtttgggggctattctttgctttagggaagttcagcatttcagggatactcattcctgaaataggcgttctatcgccctttttcgtatttctagctctcagtctttggtattttaaaaaacttaataagagattgtaa

SEQ ID NO: 798 - DNA (genomic), 1065 bp, Helicobacter pylori; double-stranded, circular
  misc_feature (B) LOCATION 1...1065
  hypothetical: NO
  anti-sense: NO
gtgcgtttgtttagatttgtggggtggtattatttcaaatactttttaatcgtgcttttagctttggaattgttttttgtaggcattgacagcctgaaatacgccgataaaatgcctgattctgcgaacatgatcattttatttttcacctatgatattttattcgctctcaattacaccttgcccatttccttgcttttagcgatggttttattttatatcaccttcattaaatccaaccaatacaccgccctgctctctattggattttccaaatgccagattttaagccctatttttttgattagcctgtttttcacggctgtttatgtggggttgaacgcgactccttttgtgtatatggaagaaaaaacgcaaaatttaatttataaagacaattctttgagcgtttcagagcatttgttagtgaaatacaacgatgattacgtgtattttgataagattaatcccttattgcaaaaagcccaaaatatcaaggtttttcgcctaaaagataaaactttagaatcttatgctgaagctaaagaagctttttttgaagacaaatattggattttacatgacactactatctatgagatgcccttgagttttgaactgggcgcgaacgctttaaacaccacgcatttagaaacctttaaaacgctcaaaaatttccgccctaaagttttagacaccatttatcaaaacaagcctgcggtttctatcacagacgctcttttatccttgcatgctttagtgcgccaaaacgcggacacgaaaaaagtgcgctcgtttttgtatgtgtttgcgattttgcccttttttgtgccgtttttaagcgttttaatcgcttatttttcgcccagtctcgcccgctatgaaaacctggctcttttagggctaaagtttatcattatcacgctcgttgtttgggggctattctttgctttagggaagttcagcatttcagggatactcattcctgaaataggcgttctatcgccctttttcgtatttctagctctcagtctttggtattttaaaaaacttaataagagattg

SEQ ID NO: 799 - DNA (genomic), 1074 bp, Helicobacter pylori; double-stranded, circular
  misc_feature (B) LOCATION 1...1074
  hypothetical: NO
  anti-sense: NO
gggtttaaagtgcgtttgtttagatttgtggggtggtattatttcaaatactttttaatcgtgcttttagctttggaattgttttttgtaggcattgacagcctgaaatacgccgataaaatgcctgattctgcgaacatgatcattttatttttcacctatgatattttattcgctctcaattacaccttgcccatttccttgcttttagcgatggttttattttatatcaccttcattaaatccaaccaatacaccgccctgctctctattggattttccaaatgccagattttaagccctatttttttgattagcctgtttttcacggctgtttatgtggggttgaacgcgactccttttgtgtatatggaagaaaaaacgcaaaatttaatttataaagacaattctttgagcgtttcagagcatttgttagtgaaatacaacgatgattacgtgtattttgataagattaatcccttattgcaaaaagcccaaaatatcaaggtttttcgcctaaaagataaaactttagaatcttatgctgaagctaaagaagctttttttgaagacaaatattggattttacatgacactactatctatgagatgcccttgagttttgaactgggcgcgaacgctttaaacaccacgcatttagaaacctttaaaacgctcaaaaatttccgccctaaagttttagacaccatttatcaaaacaagcctgcggtttctatcacagacgctcttttatccttgcatgctttagtgcgccaaaacgcggacacgaaaaaagtgcgctcgtttttgtatgtgtttgcgattttgcccttttttgtgccgtttttaagcgttttaatcgcttatttttcgcccagtctcgcccgctatgaaaacctggctcttttagggctaaagtttatcattatcacgctcgttgtttgggggctattctttgctttagggaagttcagcatttcagggatactcattcctgaaataggcgttctatcgccctttttcgtatttctagctctcagtctttggtattttaaaaaacttaataagagattg

SEQ ID NO: 800 - DNA (genomic), 249 bp, Helicobacter pylori; double-stranded, circular
  misc_feature (B) LOCATION 1...249
  hypothetical: NO
  anti-sense: NO
gtgagcgaaaaagacagggcgtttcttttagcgagcttgtcttgcgtggattatgttgtggtgtttggagaagacacgcccataaaattgattcaagccctaaagcctgatattttagtcaagggagcggactacctcaataaagaagtcatagggagcgagttggctaaagaaacccgtttgatagaatttgaagaaggttattccacaagcgctatcatagaaaaaattaaaaggacacataatgat

SEQ ID NO: 801 - DNA (genomic), 1272 bp, Helicobacter pylori; double-stranded, circular
  misc_feature (B) LOCATION 1...1272
  hypothetical: NO
  anti-sense: NO
aatttaggcggagcggccaatgtggctaataaccttacctctttaaaagctaaagtctttttatgtggggtagtgggagatgatttaaaaggcaagcatttcattagcactttaaattctataaggattgacacttcaggtgttttaatagataaaacccgttgcaccacgcttaaaacgcgcatcatcgcgcaaaaccagcaaatcgtgcgcgtggataaggaaatcaaagaccccttaaacgctgatttaagaaagaatcttttagattttatcgcagaaaaaattcaagaaatagatggcgtgatcctttcagattacaataagggtgtgttggattttgaactcactcaaaccatcatcacgctagctaataagcatcataagctcattttatgcgaccctaaaggaaaggattatagcaaatattcccatgcgagtttgatcacgcctaatcgcgctgaattagagcaagcgctccatttgaaattagacagccatgcgaatttatcaaaagcgctccaaattttacaagaaacttatcatatcgctatgcctttagtaaccttgagcgaacaaggcatcgcttttttagaaaaaggcgagttagtcaattgccccactatcgctaaagaagtttatgatgtaacgggggcaggcgatacggtgatagcgtctttaacgctctctttattggaatcaaaaagcttgaaagaagcttgcgagtttgctaatgcggctgcggcggtggtggtgggtaaaatggggagcgcgttagcgagtttagaagaaatcgctttgattttgaaccaaacgcaccctaaaatcctccctttagaaaagctgttagaaactttagaacgcaaccagcaaaaaatcgttttcaccaatggctgttttgatattctccataaagggcatgcgagctatttgcaaaaggctaaagctttaggggatattcttgttgtggggttaaatagcgataattccattaaaaggcttaagggggataaacgccccatagtgagcgaaaaagacagggcgtttcttttagcgagcttgtcttgcgtggattatgttgtggtgtttggagaagacacgcccataaaattgattcaagccctaaagcctgatattttagtcaagggagcggactacctcaataaagaagtcatagggagcgagttggctaaagaaacccgtttgatagaatttgaagaaggttattccacaagcgctatcatagaaaaaattaaaaggacacataatgat

SEQ ID NO: 802 - DNA (genomic), 1344 bp, Helicobacter pylori; double-stranded, circular
  misc_feature (B) LOCATION 1...1344
  hypothetical: NO
  anti-sense: NO
gtgggggaagagcgaacgctttcgcctgaagcccctgtgcctgttttagaagtcaaaaaagagagcaagaatttaggcggagcggccaatgtggctaataaccttacctctttaaaagctaaagtctttttatgtggggtagtgggagatgatttagaaggcaagcatttcattagcactttaaaaacaagagggattgacacttcaggtgttttaatagataaaacccgttgcaccacgcttaaaacgcgcatcatcgcgcaaaaccagcaaatcgtgcgcgtggataaggaaatcaaagaccccttaaacgctgatttaagaaagaatcttttagattttatcgcagaaaaaattcaagaaatagatggcgtgatcctttcagattacaataagggtgtgttggattttgaactcactcaaaccatcatcacgctagctaataagcatcataagctcattttatgcgaccctaaaggaaaggattatagcaaatattcccatgcgagtttgatcacgcctaatcgcgctgaattagagcaagcgctccatttgaaattagacagccatgcgaatttatcaaaagcgctccaaattttacaagaaacttatcatatcgctatgcctttagtaaccttgagcgaacaaggcatcgcttttttagaaaaaggcgagttagtcaattgccccactatcgctaaagaagtttatgatgtaacgggggcaggcgatacggtgatagcgtctttaacgctctctttattggaatcaaaaagcttgaaagaagcttgcgagtttgctaatgcggctgcggcggtggtggtgggtaaaatggggagcgcgttagcgagtttagaagaaatcgctttgattttgaaccaaacgcaccctaaaatcctccctttagaaaagctgttagaaactttagaacgcaaccagcaaaaaatcgttttcaccaatggctgttttgatattctccataaagggcatgcgagctatttgcaaaaggctaaagctttaggggatattcttgttgtggggttaaatagcgataattccattaaaaggcttaagggggataaacgccccatagtgagcgaaaaagacagggcgtttcttttagcgagcttgtcttgcgtggattatgttgtggtgtttggagaagacacgcccataaaattgattcaagccctaaagcctgatattttagtcaagggagcggactacctcaataaagaagtcatagggagcgagttggctaaagaaacccgtttgatagaatttgaagaaggttattccacaagcgctatcatagaaaaaattaaaaggacacataatgattga

SEQ ID NO: 803 - DNA (genomic), 819 bp, Helicobacter pylori; double-stranded, circular
  misc_feature (B) LOCATION 1...819
  hypothetical: NO
  anti-sense: NO
ttgttaatccttaaagagggcattgatttaaaccatggttattaccaattaggaaaatacaccattaaagacgactttatccccagtaaaaaggccgttgtggaagacgttttgatccaatctagcaatgtgggcatgataaaaatcagtaaaagcctcaacccagaggatttctataacgggcttttaggctatggattttctcaaaaaaccggcattgatttatccttagaagccacaggaaagatccctcctttgtccgctttcaagcgtgaagtgttaaaggggagcgtctcttatggctatgggttgaatgcgacttttttgcagcttttaagggcttatgcggtgttttctaatgaaggcaaattgactaccccctatttagtgcaacgagaaaccgcccctaatggcgatatttacatccctagccccaaacccacctttcaagtcattagccccaaaagcgctagaaaaatgaaagaaaccttaattaaggtggtgcgttatggcacaggcaaaaacgctcaatttgaagggctatacatagggggcaaaacaggcacggctagggttgctaaaaacggaagctatagcgcggagtcctataacagctctttttttgggttcgctgaagatgaaaggcaggtttttactatcggcgtggttatcttaggctcgcatggcaaggaagagtattacgctagcaagattgcagcccccatttttaaagaaatcaccgaaattttagtgcgttacaattacctatcgccctctattgcgattcaaaacgctttggaaaaaaaccgcttaaaataa

SEQ ID NO: 804 - DNA (genomic), 852 bp, Helicobacter pylori; double-stranded, circular
  misc_feature (B) LOCATION 1...852
  hypothetical: NO
  anti-sense: NO
acccattgtttattccttggtggtagtatcaaaattttgttaatccttaaagagggcattgatttaaaccatggttattaccaattaggaaaatacaccattaaagacgactttatccccagtaaaaaggccgttgtggaagacgttttgatccaatctagcaatgtgggcatgataaaaatcagtaaaagcctcaacccagaggatttctataacgggcttttaggctatggattttctcaaaaaaccggcattgatttatccttagaagccacaggaaagatccctcctttgtccgctttcaagcgtgaagtgttaaaggggagcgtctcttatggctatgggttgaatgcgacttttttgcagcttttaagggcttatgcggtgttttctaatgaaggcaaattgactaccccctatttagtgcaacgagaaaccgcccctaatggcgatatttacatccctagccccaaacccacctttcaagtcattagccccaaaagcgctagaaaaatgaaagaaaccttaattaaggtggtgcgttatggcacaggcaaaaacgctcaatttgaagggctatacatagggggcaaaacaggcacggctagggttgctaaaaacggaagctatagcgcggagtcctataacagctctttttttgggttcgctgaagatgaaaggcaggtttttactatcggcgtggttatcttaggctcgcatggcaaggaagagtattacgctagcaagattgcagcccccatttttaaagaaatcaccgaaattttagtgcgttacaattacctatcgccctctattgcgattcaaaacgctttggaaaaaaaccgcttaaaa

SEQ ID NO: 805 - DNA (genomic), 939 bp, Helicobacter pylori; double-stranded, circular
  misc_feature (B) LOCATION 1...939
  hypothetical: NO
  anti-sense: NO
tctttgtgctttttttatttttgggatggcgcttttaaaaaagcttttttggggcaagccaacatgcccactttggtgatgatcaaacaagacaccgctactagggggactatttatagtcaagacaactacagcctagccacttcacaaacccttttcaaactgggctttgatacaaggtttttaaacccaaataaagaagatttttttattgatttcctttctatttatagcaatatccctaaagagtccctaaaagacgcgcttaatacgaaaggctacacgattttagcttacaatctcacgcccaatatggccgctaatattagagacttgaataagaaatttttagcctttggggtttttcaaaatttcaaagacgcgcacgataaagtgtggcaaaaacaaaggctaaacattgaagtgagcgggttttccaggcattacccttatcaaaatagcctagagcctatcattgcctatgtgcaaaaacaagaagaagacaagctcactttaactaccggtaagaaaagtgttgaaaaatctcaaaacaacttgcttgaagcccaacaaaatggcataagatcaggaaaaagagacgtgagttttaatttcattcaaaaccgctcttatacagaggttgaacggcttgatggctatgaggtgtatttgagcgttcctttaaaactccaaagagaaattgaaaccctactagataaaactaaagacaaactcagggctaaagaaatcctagtgggtatcattaaccctaaaagcggggaaattttatccttagcttcaagcaaccgctttgatcctaacgccattaaaaccagcgattatgaaaacttgaatttgagcgttgccgaaaaagtttttgagccacgcaccacgattaaacccattgtttattccttggtggtagtatcaaaattttgt

SEQ ID NO: 806 - DNA (genomic), 1032 bp, Helicobacter pylori; double-stranded, circular
  misc_feature (B) LOCATION 1...1032
  hypothetical: NO
  anti-sense: NO
atggataataagaatattgatccttgcttcaacccagagcaatttttagaaacccaaaaatacaagggtgtggttacggcgctaatctttctgttgcttttttttatttttttgatggtcgcttttaaaaaagcttttttggggcaagccaacatgcccactttggtgatgatcaaacaagacaccgctactagggggactatttatagtcaagacaactacagcctagccacttcacaaacccttttcaaactgggctttgatacaaggtttttaaacccaaataaagaagatttttttattgatttcctttctatttatagcaatatccctaaagagtccctaaaagacgcgcttaatacgaaaggctacacgattttagcttacaatctcacgcccaatatggccgctaatattagagacttgaataagaaatttttagcctttggggtttttcaaaatttcaaagacgcgcacgataaagtgtggcaaaaacaagggctaaacattgaagtgagcggcgtttccaggcattacccttatcaaaatagcctagagcctatcattggctatgtgcaaaaacaagaagaagacaagctcactttaactaccggtaagaaaggcgttgaaaaatctcaaaacaacttgcttgaagcccaacaaaatggcataagatcaggaaaaagagacgtgagttttaatttcattcaaaaccgctcttatacagaggttgaacggcttgatggctatgaggtgtatttgagcgttcctttaaaactccaaagagaaattgaaaccctactagataaaactaaagacaaactcagggctaaagaaatcctagtgggtatcattaaccctaaaagcggggaaattttatccttagcttcaagcaaccgctttgatcctaacgccattaaaaccagcgattatgaaaacttgaatttgagcgttgccgaaaaagtttttgagccacgcaccacgattaaacccattgtttattccttggtggtagtatcaaaattttgttaa

SEQ ID NO: 807 - DNA (genomic), 1842 bp, Helicobacter pylori; double-stranded, circular
  misc_feature (B) LOCATION 1...1842
  hypothetical: NO
  anti-sense: NO
atggataataagaatattgatccttgcttcaacccagagcaatttttagaaacccaaaaatacaagggtgtggttacggcgctaatctttttgttgcttttttttatttttttgatggtcgcttttaaaaaagctttttttgcgcaagccaacatgcccactttggtgatgatcaaacaagacaccgctactagggggactatttatagtcaagacaactacagcctagccacttcacaaacccttttcaaactgggctttgatacaaggtttttaaacccaaataaagaagatttttttattgatttcctttctatttatagcaatatccctaaagagtccctaaaagacgcgcttaatacgaaaggctacacgattttagcttacaatctcacgcccaatatggccgctaatattagagacttgaataagaaatttttagcctttggggtttttcaaaatttcaaagacgcgcacgataaagtgtggcaaaaacaagggctaaacattgaagtgagcggcgtttccaggcattacccttatcaaaatagcctagagcctatcattggctatgtgcaaaaacaagaagaagacaagctcactttaactaccggtaagaaaggcgttgaaaaatctcaaaacaacttgcttgaagcccaacaaaatggcataagatcaggaaaaagagacgtgagttttaatttcattcaaaaccactcttatacagaggttgaacggcttgatggctatgaggtgtatttgagcgttcctttaaaactccaaagagaaattgaaaccctactagataaaactaaagacaaactcagggctaaagaaatcctagtgggtatcattaaccctaaaagcggggaaattttatccttagcttcaagcaaccgctttgatcctaacgccattaaaaccagcgattatgaaaacttgaatttgagcgttgccgaaaaagtttttgagccaggcagcacgattaaacccattgtctattccttgctgctagataaaaatttgattaaccctaaagagcgcattgatttaaaccatggttattaccaattaggaaaatacaccattaaagacgactttatccccagtaaaaaggccgttgtggaagacgttttgatccaatctagcaatgtgggcatgataaaaatcagtaaaagcctcaacccagaggatttctataacgggcttttaggctatggattttctcaaaaaaccggcattgatttatccttagaagccacaggaaagatccctcctttgtccgctttcaagcgtgaagtgttaaaggggagcgtctcttatggctatgggttgaatgcgacttttttgcagcttttaagggcttatgcggtgttttctaatgaaggcaaattgactaccccctatttagtgcaacgagaaaccgcccctaatggcgatatttacatccctagccccaaacccacctttcaagtcattagccccaaaagcgctagaaaaatgaaagaaaccttaattaaggtggtgcgttatggcacaggcaaaaacgctcaatttgaagggctatacatagggggcaaaacaggcacggctagggttgctaaaaacggaagctatagcgcggagtcctataacagctctttttttgggttcgctgaagatgaaaggcaggtttttactatcggcgtggttatcttaggctcgcatggcaaggaagagtattacgctagcaagattgcagcccccatttttaaagaaatcaccgaaattttagtgcgttacaattacctatcgccctctattgcgattcaaaacgctttggaaaaaaaccgcttaaaataa

SEQ ID NO: 808 - DNA (genomic), 207 bp, Helicobacter pylori; double-stranded, circular
  misc_feature (B) LOCATION 1...207
  hypothetical: NO
  anti-sense: NO
agggcgctttgtggggtttgtatgaaaaatcttcgctataagcttttgctctttgtttttataggggtttgggggttattaatcttaaatctgtttattctaagcgttaaaaatcaagaatactatgaaaaattggccgaacgcaacatgactaaaaaagaatttctaatcccacaaggggcaatattacagacagaaaccatgagt

SEQ ID NO: 809 - DNA (genomic), 1569 bp, Helicobacter pylori; double-stranded, circular
  misc_feature (B) LOCATION 1...1569
  hypothetical: NO
  anti-sense: NO
atgaattggtgtttggcgtgtttttgccccagcagattgaaacaaaaagagcttttagaaaaaattgaggtgatccaaaagtttttccctaattttcccaaagaaacgcttttaaacaattaccaaaaagaaaattcgctctataaccataacctcattaaagtggtgggcttcattccctatgccaccatgcaatccctttataccaaactcatccaaactcaaggcatttttgtgcgccctttagacaagcgctactaccctaataacgctttagcttcgcatgttttaggttatgtgggggtggcaagtttacaagatttaaaagacgatgaagagaatcaatacagccagattgtaggcaaaaccggcattgaaaaagaatacaacaagtttttacaaggcaaggtgggttataaaatcatacatgtcaatgcgctcaatcaagaattagccaccttagaggtcgtgccaccaagcgccaataaccacttgcaattgagtttagacaaacgcttgcaaaaagaagcagacaagctctttgaaaataagagaggggctattttagtgatggatgcagaaaatggggaattgctcgttgcaggaagttaccctgaatacaatttgaacgattttgtaggcgggatcagtcaagacaaatggcaaaaactccaagatgatatttataaccctttattaaaccgcttcgctaatgccttgtatccgccgggatctgtggttaaaatgggcgtggggttaagctttttagaaaaccttcatatcacagaaaacaccactatccccacaccgccttttattgaagtgggcaagcgcaaattcagggactggaaaaaaacagggcatggcaattctaatttgtataaagccattagggagtccgtggatgtgtatttttataagtttgggcttgaaatctctatagaaaaactctctaaaaccttaagggaagtgggctttggggaaaaaacgggcgttgatttgccgaatgaatttgtggggattgtgccggataatttgtggaagctcaaacgcttcaatcaagactggcgcgttggggacacgctcattactgctattgggcaaggctcttttttagccacgcctttgcaggtgttagcctacacaggactcattgcgacaggcaaactggcaacgcctcattttgctatccataaccaacaaccgctcaaagaccccctgaatagttttcaaaaaaagaagctccaagccttgcgcgtgggcatgtatgaagtgtgtaaccataaagacggcaccgcttatcattccacaagaggttctaaggttaccttagcgtgtaaaaccggcaccgcgcaagtcgtagaaatcgctcaaaacatcgtcaatcgcatgaaagaaaaggatatggaatatttccatcgatcccatgcgtggattacggcattcttgccctatgaaaaacccaaatacgctatcactattttagtagaacatggggagggagggtcaaaactagggggcttgttagtgaaaatgagcaacaaactctatgagcttggctatctttaa

SEQ ID NO: 810 - DNA (genomic), 1584 bp, Helicobacter pylori; double-stranded, circular
  misc_feature (B) LOCATION 1...1584
  hypothetical: NO
  anti-sense: NO
catgagtttttagctattaatgaattgatgtttgacgtgtttttgcccagcagattgaaacaaaaagagcttttagaaaaaattgaggtgatccaaaagtttttccctaattttcccaaagaaacgcttttaaacaattaccaaaaagaaaattcgctctataaccataacctcattaaagtggtgggcttcattccctatgccaccatgcaatccctttataccaaactcatccaaactcaaggcatttttgtgcgccctttagacaagcgctactaccctaataacgctttagcttcgcatgttttaggttatgtgggggtggcaagtttacaagatttaaaagacgatgaagagaatcaatacagccagattgtaggcaaaaccggcattgaaaaagaatacaacaagtttttacaaggcaaggtgggttataaaatcatacatgtcaatgcgctcaatcaagaattagccaccttagaggtcgtgccaccacgctccaataaccactcgcaattgagtttagacaaacgcttccaaaaagaagcacacaagctctttgtaaataagagagggcctattttagtgatggatgcagaaaatggggaattgctcgttgcaggaagttaccctgaatacaatttgaacgattttgtaggcgggatcagtcaagacaaatggcaaaaactccaagatgatatttataaccctttattaaaccgcttcgctaatgccttgtatccgccgggatctgtggttaaaatgggcgtggggttaagctttttagaaaaccttcatatcacagaaaacaccactatccccacaccgccttttattgaagtgggcaagcgcaaattcagggactggaaaaaaacagggcatggcaattctaatttgtataaagccattagggagtccgtggatgtgtatttttataagtttgggcttgaaatctctatagaaaaactctctaaaaccttaagggaagtgggctttggggaaaaaacgggcgttgatttgccgaatgaatttgtggggattgtgccggataatttgtggaagctcaaacgcttcaatcaagactggcgcgttggggacacgctcattactgctattgggcaaggctcttttttagccacgcctttgcaggtgttagcctacacaggactcattgcgacaggcaaactggcaacgcctcattttgctatccataaccaacaaccgctcaaagaccccctgaatagttttcaaaaaaagaagctccaagccttgcgcgtgggcatgtatgaagtgtgtaaccataaagacggcaccgcttatcattccacaagaggttctaaggttaccttagcgtgtaaaaccggcaccgcgcaagtcgtagaaatcgctcaaaacatcgtcaatcgcatgaaagaaaaggatatggaatatttccatcgatcccatgcgtggattacggcattcttgccctatgaaaaacccaaatacgctatcactattttagtagaacatggggagggagggtcaaaactagggggcttgttagtgaaaatgagcaacaaactctatgagcttggctatctt

SEQ ID NO: 811 - DNA (genomic), 1581 bp, Helicobacter pylori; double-stranded, circular
  misc_feature (B) LOCATION 1...1581
  hypothetical: NO
  anti-sense: NO
gagtttttagctattaatgaattgatgtttgacgtgtttttgcccagcagattgaaacaaaaagagcttttagaaaaaattgaggtgatccaaaagtttttccctaattttcccaaagaaacgcttttaaacaattaccaaaaagaaaattcgctctataaccataacctcattaaagtggtgggcttcattccctatgccaccatgcaatccctttataccaaactcatccaaactcaaggcatttttgtgcgccctttagacaagcgctactaccctaataacgctttagcttcgcatgttttaggttatgtgggggtggcaagtttacaagatttaaaagacgatgaagagaatcaatacagccagattgtaggcaaaaccggcattgaaaaagaatacaacaagtttttacaaggcaaggtgggttataaaatcatacatgtcaatgcgctcaatcaagaattagccaccttagaggtcgtgccaccacgctccaataaccactcgcaattgagtttagacaaacgcttccaaaaagaagcacacaagctctttgtaaataagagagggcctattttagtgatggatgcagaaaatggggaattgctcgttgcaggaagttaccctgaatacaatttgaacgattttgtaggcgggatcagtcaagacaaatggcaaaaactccaagatgatatttataaccctttattaaaccgcttcgctaatgccttgtatccgccgggatctgtggttaaaatgggcgtggggttaagctttttagaaaaccttcatatcacagaaaacaccactatccccacaccgccttttattgaagtgggcaagcgcaaattcagggactggaaaaaaacagggcatggcaattctaatttgtataaagccattagggagtccgtggatgtgtatttttataagtttgggcttgaaatctctatagaaaaactctctaaaaccttaagggaagtgggctttggggaaaaaacgggcgttgatttgccgaatgaatttgtggggattgtgccggataatttgtggaagctcaaacgcttcaatcaagactggcgcgttggggacacgctcattactgctattgggcaaggctcttttttagccacgcctttgcaggtgttagcctacacaggactcattgcgacaggcaaactggcaacgcctcattttgctatccataaccaacaaccgctcaaagaccccctgaatagttttcaaaaaaagaagctccaagccttgcgcgtgggcatgtatgaagtgtgtaaccataaagacggcaccgcttatcattccacaagaggttctaaggttaccttagcgtgtaaaaccggcaccgcgcaagtcgtagaaatcgctcaaaacatcgtcaatcgcatgaaagaaaaggatatggaatatttccatcgatcccatgcgtggattacggcattcttgccctatgaaaaacccaaatacgctatcactattttagtagaacatggggagggagggtcaaaactagggggcttgttagtgaaaatgagcaacaaactctatgagcttggctatctt

SEQ ID NO: 812 - DNA (genomic), 1767 bp, Helicobacter pylori; double-stranded, circular
  misc_feature (B) LOCATION 1...1767
  hypothetical: NO
  anti-sense: NO
atgaaaaatcttcgctataagcttttgctctttgtttttataggggtttgggggttattaatcttaaatctgtttattctaagcgttaaaaatcaagaatactatgaaaaattggccgaacgcaacatgactaaaaaagaatttctaatccctacaaggggcaatattacagacagaaaccatgagtttttagctattaatgaattggtgtttggcgtgtttttgcccagcagattgaaacaaaaagagcttttagaaaaaattgaggtgatccaaaagtttttccctaattttcccaaagaaacgcttttaaacaattaccaaaaagaaaattcgctctataaccataacctcattaaagtggtgggcttcattccctatgccaccatgcaatccctttataccaaactcatccaaactcaaggcatttttgtgcgccctttagacaagcgctactaccctaataacgctttagcttcgcatgttttaggttatgtgggggtggcaagtttacaagatttaaaagacgatgaagagaatcaatacagccagattgtaggcaaaaccggcattgaaaaagaatacaacaagtttttacaaggcaaggtgggttataaaatcatacatgtcaatgcgctcaatcaagaattagccaccttagaggtcgtgccaccaagcgccaataaccacttgcaattgagtttagacaaacgcttgcaaaaagaagcagacaagctctttgaaaataagagaggggctattttagtgatggatgcagaaaatggggaattgctcgttgcaggaagttaccctgaatacaatttgaacgattttgtaggcgggatcagtcaagacaaatggcaaaaactccaagatgatatttataaccctttattaaaccgcttcgctaatgccttgtatccgccgggatctgtggttaaaatgggcgtggggttaagctttttagaaaaccttcatatcacagaaaacaccactatccccacaccgccttttattgaagtgggcaagcgcaaattcagggactggaaaaaaacagggcatggcaattctaatttgtataaagccattagggagtccgtggatgtgtatttttataagtttgggcttgaaatctctatagaaaaactctctaaaaccttaagggaagtgggctttggggaaaaaacgggcgttgatttgccgaatgaatttgtggggattgtgccggataatttgtggaagctcaaacgcttcaatcaagactggcgcgttggggacacgctcattactgctattgggcaaggctcttttttagccacgcctttgcaggtgttagcctacacaggactcattgcgacaggcaaactggcaacgcctcattttgctatccataaccaacaaccgctcaaagaccccctgaatagttttcaaaaaaagaagctccaagccttgcgcgtgggcatgtatgaagtgtgtaaccataaagacggcaccgcttatcattccacaagaggttctaaggttaccttagcgtgtaaaaccggcaccgcgcaagtcgtagaaatcgctcaaaacatcgtcaatcgcatgaaagaaaaggatatggaatatttccatcgatcccatgcgtggattacggcattcttgccctatgaaaaacccaaatacgctatcactattttagtagaacatggggagggagggtcaaaactagggggcttgttagtgaaaatgagcaacaaactctatgagcttggctatctttaa

SEQ ID NO: 813 - DNA (genomic), 435 bp, Helicobacter pylori; double-stranded, circular
  misc_feature (B) LOCATION 1...435
  hypothetical: NO
  anti-sense: NO
ttttttaaccccctttcacatcaacatgatttcttcattggtttttttgtttgccgcgctcacggatttatggacggctatatcgccagaagctataaagccaaatcgcgctttggggaaatctttgaccctttagcggataaaatccttattttgagcgcgtttttagggttagtttatttggatcgtgtgaatgcgtgggtcccgtttgtgattttagggcgtgaattttttatttcagggcttagggttttagccgctaatgaaaaaaaggatattcctgtcaatgcgttaggcaagtataaaaccgtgtctcaagtcgtggcgattggcgctttattagccaatttaacttactcctatgtgcttgtggctatagcggtttttttaaccctttattcggggatagattacacgattaaatattataaatct

SEQ ID NO: 814 - DNA (genomic), 540 bp, Helicobacter pylori; double-stranded, circular
  misc_feature (B) LOCATION 1...540
  hypothetical: NO
  anti-sense: NO
atgaaagttttaaaactcctgcctaattttttaacgattttacgcattgtcttatccttatttttattgtttttattgttaaacacgcacacttattttagttttttaaccccctttcacatcaacatgatttcttcattggtttttttgtttgccgcgctcacggatttattggacggctatatcgccagaagctataaagccaaatcgcgctttggggaaatctttgaccctttagcggataaaatccttattttgagcgcgtttttagggttagtttatttggatcgtgtgaatgcgtgggtcccgtttgtgattttagggcgtgaattttttatttcagggcttagggttttagccgctaatgaaaaaaaggatattcctgtcaatgcgttaggcaagtataaaaccgtgtctcaagtcgtggcgattggcgctttattagccaatttaacttactcctatgtgcttgtggctatagcggtttttttaaccctttattcggggatagattacacgattaaatattataaatcttaa

SEQ ID NO: 815 - DNA (genomic), 705 bp, Helicobacter pylori; double-stranded, circular
  misc_feature (B) LOCATION 1...705
  hypothetical: NO
  anti-sense: NO
ggggttttagtcgttattttaagcgctacaaggagcgcgacaatcgcttttgtggctacttttttgatcctgtcttgctttattttatacgccaaaaaatcgctcaaaccattgggttatatggtggttgtgagttttgttttgagcgctttgtatgtggggagtaacgctttagaaaaaaggggggcaatagagcaatttagggttcaaaatcaaacctttgaagaagatttgaaacgctacgctaaaaaggacgctgatagcagtatcgggtggcgtttggagcgctggaaagaagccctaacggttttacgtttaaggcccttttttggtatggccgctagcgagaaatgccagagattagaagagattttatccttatcaaagtcttatagggcaaaagacttgattctttgttatgaaaggtatgacaatcaaatcattcatgttctagccactagggggatcataggctttttaatctggctctttttcttgttagtcattgtaaagattttttggagcgggataaagcaaaactctttaatatcattttttatactaataacactcgccttttacctcatttttggcatcgggtttgacccctttgatttcttcattacgggaagtttttttgtaggaatggtcatgatggttgtttttttaaaaaaggataaaagcgctttttatcatcaaagggct

SEQ ID NO: 816 - DNA (genomic), 702 bp, Helicobacter pylori; double-stranded, circular
  misc_feature (B) LOCATION 1...702
  hypothetical: NO
  anti-sense: NO
gttttagtcgttattttaagcgctacaaggagcgcgacaatcgcttttgtggctacttttttgatcctgtcttgctttattttatacgccaaaaaatcgctcaaaccattgggttatatggtggttgtgagttttgttttgagcgctttgtatgtggggagtaacgctttagaaaaaaggggggcaatagagcaatttagggttcaaaatcaaacctttgaagaagatttgaaacgctacgctaaaaaggacgctgatagcagtatcgggtggcgtttggagcgctggaaagaagccctaacggttttacgtttaaggcccttttttggtatggccgctagcgagaaatgccagagattagaagagattttatccttatcaaagtcttatagggcaaaagacttgattctttgttatgaaaggtatgacaatcaaatcattcatgttctagccactagggggatcataggctttttaatctggctctttttcttgttagtcattgtaaagattttttggagcgggataaagcaaaactctttaatatcattttttatactaataacactcgccttttacctcatttttggcatcgggtttgacccctttgatttcttcattacgggaagtttttttgtaggaatggtcatgatggttgtttttttaaaaaaggataaaagcgctttttatcatcaaagggct

SEQ ID NO: 817 - DNA (genomic), 1290 bp, Helicobacter pylori; double-stranded, circular
  misc_feature (B) LOCATION 1...1290
  hypothetical: NO
  anti-sense: NO
ttgaaagcctttttcagtgcggattctgttttcactttaatttttgcccttttttttctcacttcgtttaaaaaacctttaactcaagtcttgttgattgttttaatggtttttttgttttttaggtgttatttccaagcgtctttaaaagaaacctttagaatcaatcatttaaaaaccatgccctttaaatggctcactctggcttttttaggggtatttttaagcatcttccctaacatgtttaacatgtatgatagccaaaccttccgctacaatttattcgctctaaacatgtctttaacttatgcttgcggggcgttatgcttgcttttttctagccgtttaagaatcaaattgaatcaaaaagtccttttttatagcatggctgtggcaaatttcatcaacggcctgctttcattggtgcaaaaaatttattttaacatgcccagagcgcaagggtttagcacggttaaggagtatgtggttttagtgagcgtgtcaatcttaggctgttatatttacgcgctctattcgcaaaatcaaaaagaaaaactttttttcaccctttctgttttcgtggggtttttagtcgttattttaagcgctacaaggagcgcgacaatcgcttttgtggctacttttttgatcctgtcttgctttattttatacgccaaaaaatcgctcaaaccattgggttatatggtggttgtgagtcttgttttgagcgctttgtatgtggggagtaacgctttaaaaaaaaggggggcaataaaacaatctagggttcaaaatcaaacctttgaagaagatttgaaacgctacgctaaaaaggacgctgatagcagtatcgggtggcgtttggagcgctggaaagaagccctaacggttttacgtttaaggcccttttttggtatggccgctagcgagaaatgccagagattagaagagattttatccttatcaaagtcttatagggcaaaagacttgattctttgttatgaaaggtatgacaatcaaatcattcatgttctagccactagggggatcataggctttttaatctggctctttttcttgttagtcattgtaaagattttttggagcgggataaagcaaaactctttaatatcattttttatactaataacactcgccttttacctcatttttggcatcgggtttgacccctttgatttcttcattacgggaagtttttttgtaggaatggtcatgatggttgtttttttaaaaaaggataaaagcgctttttatcatcaaagggcttaa

SEQ ID NO: 818 - DNA (genomic), 192 bp, Helicobacter pylori; double-stranded, circular
  misc_feature (B) LOCATION 1...192
  hypothetical: NO
  anti-sense: NO
aaagcattaccaattctccagcaatctttcatcacagtcgcgcaattcagccctaaattagtgcgagtggttatcggctatgctcctaaaatgacttatgaagtcaagattcttaaagacaagctctatgtttctattatggagaaaaagcccttaataaggcatcaaatgacacccagacccaccaaacat

SEQ ID NO: 819 - DNA (genomic), 285 bp, Helicobacter pylori; double-stranded, circular
  misc_feature (B) LOCATION 1...285
  hypothetical: NO
  anti-sense: NO
agagcttacagagggttaatttgtagtgcttgtgaggttaggggttgttgcttgtcttttttggcttcattacgcttacgcacaacccttaaaattaccaacattgtgccttttggctctagcagtgttaaaatggtgttcaatcaagaggttaaaaaattcaaagaagtttcgctcaaaaattttaagagttatttggaattagaagcggttctaaccattcctaaaaagcattaccaattctccagcaatctttcatcacagtcgcgcaattcagccctaaat

SEQ ID NO: 820 - DNA (genomic), 327 bp, Helicobacter pylori; double-stranded, circular
  misc_feature (B) LOCATION 1...327
  hypothetical: NO
  anti-sense: NO
gtgaatttaatggactatttttctaaaagtttgtttttaaattcattgaacacgcagcgattgatcgtctccaacaaattagcgattgacgtgcaatacggcatgctccaaagtgtccgcaaaaattaccctgatgtggtggatgggggtgttagggaggggcctttttgggtgttagccggggcyttaatgccttcaattttaatagaaattggttataattcccatgcgatagaatctaaacgcatccaaagcaaaccgtatcaaaaaatcttggctaagggcattgctgatggcattgatagtttcttcagcaagaatgattag

SEQ ID NO: 821 - DNA (genomic), 1050 bp, Helicobacter pylori; double-stranded, circular
  misc_feature (B) LOCATION 1...1050
  hypothetical: NO
  anti-sense: NO
ataaggtcatcaaatgacacccaaaccacccaaacaccatggcactcaaacaccagacggccaaaacccacccctaaacccattaaaaaagaggctaaaaaggctaaagagaaaacaactaagcatgcgcattcaaagcatgcgcactctccattgaacgaaaggagcgctaaaaaagaaattcctaaaaaagaaatccctaaaaaagaaatccctaaaaaagaaatccctaaaaaagaaatccctaaaaaagaaatccctaaaaaagaaatccctaaaaaagaaatccctaaaaaagaagcagaaaatgagagtaagaaccaaatctttatagcagaaaaaaatgatacttggatcaaaaccaagcgcaaaaaacacaaaaagatcgttttggacgctgggcatggggggaaagattgcggggcgatgagcgcgaatttggtgtgtgaaaaggacattgttttagaagtggtgaagtttttgcataaagagcttaaaaaaagaggctatagcgttttattgacaagggataaggacatttacattgatttagtggcccgaacggaattagccaataaaaaaggggcggatttattcatctcagtgcatgccaattccatccctaaacgctccacctctaacgcccatggcatagagacttattttttatccaccgcaaggagtgaaagggctaggaaagtggctgagcaagaaaataaagacgatgtgaatttaatggactatttttctaaaagtttgtttttaaattcattgaacacgcagcgattgatcgtctccaacaaattagcgattgacgtgcaatacggcatgctccaaagtgtccgcaaaaattaccctgatgtggtggatgggggtgttagggaggggcctttttgggtgttagccggggctttaatgccttcaattttaatagaaattggttataattcccatgcgatagaatctaaacgcatccaaagcaaaccgtatcaaaaaatcttggctaagggcattgctgatggcattgatagtttcttcagcaagaatgat

SEQ ID NO: 822 - DNA (genomic), 1047 bp, Helicobacter pylori; double-stranded, circular
  misc_feature (B) LOCATION 1...1047
  hypothetical: NO
  anti-sense: NO
aggtcatcaaatgacacccaaaccacccaaacaccatggcactcaaacaccagacggccaaaacccacccctaaacccattaaaaaagaggctaaaaaggctaaagagaaaacaactaagcatgcgcattcaaagcatgcgcactctccattgaacgaaaggagcgctaaaaaagaaattcctaaaaaagaaatccctaaaaaagaaatccctaaaaaagaaatccctaaaaaagaaatccctaaaaaagaaatccctaaaaaagaaatccctaaaaaagaaatccctaaaaaagaagcagaaaatgagagtaagaaccaaatctttatagcagaaaaaaatgatacttggatcaaaaccaagcgcaaaaaacacaaaaagatcgttttggacgctgggcatggggggaaagattgcggggcgatgagcgcgaatttggtgtgtgaaaaggacattgttttagaagtggtgaagtttttgcataaagagcttaaaaaaagaggctatagcgttttattgacaagggataaggacatttacattgatttagtggcccgaacggaattagccaataaaaaaggggcggatttattcatctcagtgcatgccaattccatccctaaacgctccacctctaacgcccatggcatagagacttattttttatccaccgcaaggagtgaaagggctaggaaagtggctgagcaagaaaataaagacgatgtgaatttaatggactatttttctaaaagtttgtttttaaattcattgaacacgcagcgattgatcgtctccaacaaattagcgattgacgtgcaatacggcatgctccaaagtgtccgcaaaaattaccctgatgtggtggatgggggtgttagggaggggcctttttgggtgttagccggggctttaatgccttcaattttaatagaaattggttataattcccatgcgatagaatctaaacgcatccaaagcaaaccgtatcaaaaaatcttggctaagggcattgctgatggcattgatagtttcttcagcaagaatgat

SEQ ID NO: 823 - DNA (genomic), 1410 bp, Helicobacter pylori; double-stranded, circular
  misc_feature (B) LOCATION 1...1410
  hypothetical: NO
  anti-sense: NO
gtgcttgtgaggttaggggttgttgcttgtcttttttggcttcattacgcttacgctacaacccttaaaattaccaacattgtgccttttggctctagcagtgttaaaatggtgttcaatcaagaggttaaaaaattcaaagaagtttcgctcaaaaattttaagagttatttggaattagaagcggttctaaccattcctaaaaagcattaccaattctccaagcaatctttcatcacgatcgcgcaattcagccctaaattagtgcgagtggttatcggctatgctcctaaaatgacttatgaagtcaagattcttaaagacaagctctatgtttctattatggagaaaaagcccttaataaggcatcaaatgacacccaaaccacccaaacaccatgcactcaaacaccagacgccaaaacccacccctaaacccattaaaaaagaggctaaaaaggctaaagagaaaacaactaagcatgcgcattcaaagcatgcgcactctccattgaacgaaaggagcgctaaaaaagaaatccctaaaaaagaaatccctaaaaaagaaatccctaaaaaagaaatccctaaaaaagaaatccctaaaaaagaaatccctaaaaaagaaatccctaaaaaagaaatccctaaaaaagaagcagaaaatgagagtaagaaccaaatctttatagcagaaaaaaatgatacttggatcaaaaccaagcgcaaaaaacacaaaaagatcgttttggacgctgggcatggggggaaagattgcggggcgatgagcgcgaatttggtgtgtgaaaaggacattgttttagaagtggtgaagtttttgcataaagagcttaaaaaaagaggctatagcgttttattgacaagggataaggacatttacattgatttagtggcccgaacggaattagccaataaaaaaggggcggatttattcatctcagtgcatgccaattccatccctaaacgctccacctctaacgcccatggcatagagacttattttttatccaccgcaaggagtgaaagggctaggaaagtggctgagcaagaaaataaagacgatgtgaatttaatggattatttttctaaaagtttgtttttaaattcattgaacacgcagcgattgatcgtctccaacaaattagcgattgacgtgcaatacggcatgctccaaagtgtccgcaaaaattaccctgatgtggtggatgggggtgttagggaggggcctttttgggtgttagccggggctttaatgccttcaattttaatagaaattggttataattcccatgcgatagaatctaaacgcatccaaagcaaaccgtatcaaaaaatcttggctaagggcattgctgatggcattgatagtttcttcagcaagaatgattag

SEQ ID NO: 824 - DNA (genomic), 1410 bp, Helicobacter pylori; double-stranded, circular; identical to SEQ ID NO: 823
  misc_feature (B) LOCATION 1...1410
  hypothetical: NO
  anti-sense: NO

SEQ ID NO: 825 - DNA (genomic), 312 bp, Helicobacter pylori; double-stranded, circular
  misc_feature (B) LOCATION 1...312
  hypothetical: NO
  anti-sense: NO
tggagaattatcatcatgcaaagtcttagttggctgaatttagcgtttcgttggctctttataacagggcttggctattatataatgactttattgcaatggtatcattacagcgtgtttaggattttaaccaagcaccacaaaatgcgttggcatgggatttattttttattgcctttaggggtgtttatcctatcgtatgctttcaaaatgccgtttgtttttgatttcttttgcggcgtgattcaaatgcccatgctcattatctgggccaaacgcaacagcaaggcctttaggttttcacgccaaggg

SEQ ID NO: 826 - DNA (genomic), 1200 bp, Helicobacter pylori; double-stranded, circular
  misc_feature (B) LOCATION 1...1200
  hypothetical: NO
  anti-sense: NO
gttttcacgccaagggtgaagcgctttttcatcttcttattcctctttttaatcttgcatgaaatcttaaacacagaattagcccctttaaatgggatttcgctcgcgctgggctatttgtgtttgttcatactcgttttgagcgcttctttaatctttgaaaaagtcttatccaagcagtatttgcaaaccgctaaagataaaatcgcctctttaaaaaatttaaaagtcatcgccattacaggaagctttgggaaaaccagcaccaaaaatttcttgcatcaaatcttacaaacccaattcaacgcgcatgcaagccctaaaagtgtcaacacccttttaggcattgcgaacgatattaaccagaatttagacgacaggagtgaaatttatatcgctgaagctggggcaaggaataagggcgatattaaagaaatcacccgtctcattgaaccgcaccttgccgtggtcgcagaagtgggcgaacagcatttagaatattttaaaactttagaaaatatttgcgagactaaagcggaattattggattccaaacgcttagaaaaagccttttgctactctgtggaaaaaatcaaaccctatgcccctaaagatagccctttaatagactattctagcctagttagaaacgtccaatccactttaaaaggcacttcttttgaaacgcttatcaatggcgtttgggaaagctttgaaacgaaggttttaggggagtttaacgcctataatatcgcttcagcgattttaatcgctaagcatttaggcttagagacagaaaggatcaaacggcttgtttttgagcttaagcctattaaccatcgtttgcaactgttggaagcgaatcaaaaaatcattatagacgatagctttaatgggaatttaaagggcatgttagagggcattcgtttagcgagcttgcatcaagggcgtaaggtcattgtaacaccgggattagtggaaagcaatacagaaagtaatgaggctttagcgcaaaaaatagacggggtttttgatgtcgctatcatcacaggggagttgaattccaaaacgattgcttccaaattgaaaaccccccaaaaaatcttactcaaggataaggcgcaattggaaaatatcttacaagccaccacgattcaaggcgatttgattttattcgctactgacgcccctaattacatt

SEQ ID NO: 827 - DNA (genomic), 1482 bp, Helicobacter pylori; double-stranded, circular
  misc_feature (B) LOCATION 1...1482
  hypothetical: NO
  anti-sense: NO
atgcaaagtcttagttggctgaatttagcgtttcgttggctctttataacagggcttggctattatataatgactttattgcaatggtatcattacagcgtgtttaggattttaaccaagcaccacaaaatgcgttggcatgggatttattttttattgcctttaggggtgtttatcctatcgtatgctttcaaaatgccgtttgtttttgatttcttttgcggcgtgattcaaatgcccatgctcattatctgggccaaacgcaacgacaagcctttagttttcacgccaagggtgaagcgctttttcatcttcttattcctctttttaatcttgcatgaaatcttaaacacagaattagcccctttaaatgggatttcgctcgcgctgggctatttgtgtttgttcatactcgttttgagcgcttctttaatctttgaaaaagtcttatccaagcagtatttgcaaaccgctaaagataaaatcgcctctttaaaaaatttaaaagtcatcgccattacaggaagctttgggaaaaccagcaccaaaaatttcttgcatcaaatcttacaaacccaattcaacgcgcatgcaagccctaaaagtgtcaacacccttttaggcattgcgaacgatattaaccagaatttagacgacaggagtgaaatttatatcgctgaagctggggcaaggaataagggcgatattaaagaaatcacccgtctcattgaaccgcaccttgccgtggtcgcagaagtgggcgaacagcatttagaatattttaaaactttagaaaatatttgcgagactaaagcggaattattggattccaaacgcttagaaaaagccttttgctactctgtggaaaaaatcaaaccctatgcccctaaagatagccctttaatagactattctagcctagttagaaacgtccaatccactttaaaaggcacttcttttgaaacgcttatcaatggcgtttgggaaagctttgaaacgaaggttttaggggagtttaacgcctataatatcgcttcagcgattttaatcgctaagcatttaggcttagagacagaaaggatcaaacggcttgtttttgagcttaagcctattaaccatcgtttgcaactgttggaagcgaatcaaaaaatcattatagacgatagctttaatgggaatttaaagggcatgttagagggcattcgtttagcgagcttgcatcaagggcgtaaggtcattgtaacaccgggattagtggaaagcaatacagaaagtaatgaggctttagcgcaaaaaatagacggggtttttgatgtcgctatcatcacaggggagttgaattccaaaacgattgcttccaaattgaaaaccccccaaaaaatcttactcaaggataaggcgcaattggaaaatatcttacaagccaccacgattcaaggcgatttgattttattcgctaatgacgcccctaattacatttag

SEQ ID NO: 828 - DNA (genomic), 333 bp, Helicobacter pylori; double-stranded, circular
  misc_feature (B) LOCATION 1...333
  hypothetical: NO
  anti-sense: NO
aaatcgctattcttttattgttggcgcgatttgatcaaaatcaacccacctccttttaagggctatgattggggcatgtttttaaagcttagtttttacatttgcttaccggcggctttgattttaaaacagcctgatttaggcacggctcttattgtgctcatcatgggttttgggattttattgatcgtgggtttaaggactagggtgtggctccctcttttaatcgctttaatagtggcttcgcctatcgcttatcattttttgcatgattaccaaaaaaagcgcatcgcagacttcctttctgaaaagcctaattaccatgtcatgcaa

SEQ ID NO: 829 - DNA (genomic), 417 bp, Helicobacter pylori; double-stranded, circular
  misc_feature (B) LOCATION 1...417
  hypothetical: NO
  anti-sense: NO
aaccataagattaggggttatgaaaaacgcatggcattagacaaaaggatttggatgcattttgatcttttgccttttgtgtttatcatccccttgttggtggtttcttttttgttgatttttgagagtagtgcggttttgagcttgaagcaaggggtttattatgccatagggtttcttctcttttgggtagtgttttttatccctttcaggaaactcgatcggtggctctttgcgctttattgggcgtgcgttattttattagcgttagtggattttatgggatcgagcaagcttggagcgcagcgatggctagtcattcctttcacttctatcaccttacagcctagcgagcctgtgaaaatcgctattcttttattgttggcgcgatttgatcaaaatcaacccacctccttt

SEQ ID NO: 830 - DNA (genomic), 459 bp, Helicobacter pylori; double-stranded, circular
  misc_feature (B) LOCATION 1...459
  hypothetical: NO
  anti-sense: NO
gcaaatctaaagaagcctgcacccaaaccaaattcaaattctttgcctatcgcaacgagcgattttattttcgcctacttcgtgaagcgtttcgggtttttaggggctatattgctttttgcgatttatataggcttgagtttgcatttatttttttatctgtttgagagcaacagcgattggtttttaaagattgtagcccttgggatttctattttaatctttgtttattccagcgtgaatatcgccatgactttagggttagcccctgtggtggggattcccttacccttattcagctatggggggagcagttttatcacttttatgatcctgtttgcaatcctaggaaacgtgcttgctttccgctatattttggaaacaatacaaaccatcctttgggaattttggattcttagctcaactggtcagagcgctcggctcataaccgattggtcg

SEQ ID NO: 831 - DNA (genomic), 1122 bp, Helicobacter pylori; double-stranded, circular
  misc_feature (B) LOCATION 1...1122
  hypothetical: NO
  anti-sense: NO
atgcattttgatcttttgccttttgtgtttatcatccccttgttggtggtttcttttttgttgatttttgagagtagtgcggttttgagcttgaagcaaggggtttattatgccatagggtttcttctcttttgggtagtgttttttatccctttcaggaaactcgatcggtggctctttgcgctttattgggcgtgcgttattttattagcgttagtggattttatgggatcgagcaagcttggagcgcagcgatggctagtcattcctttcacttctatcaccttacagcctagcgagcctgtgaaaatcgctattcttttattgttggcgcatttgatcaaaatcaacccacctccttttaagggctatgattggggcatgtttttaaagcttagtttttacatttgcttaccggcggctttgattttaaaacagcctgatttaggcacggctcttattgtgctcatcatgggttttgggattttattgatcgtgggtttaaggactagggtgtggctccctcttttaatcgctttaatagtggcttcgcctatcgcttatcattttttgcatgattaccaaaaaaagcgcatcgcagacttcctttctgaaaagcctaattaccatgtcatgcaatccattatcgctataggatcgggcgggtttttaggcaaatctaaagaagcctgcacccaaaccaaattcaaattcttgcctatcgcaacgagcgattttattttcgcctacttcgtggagcgtttcgggtttttaggggctatattgctttttgcgatttatataggcttgagtttgcatttatttttttatctgtttgagagcaacagcgattggtttttaaagattgtagcccttgggatttctattttaatctttgtttattccagcgtgaatatcgccatgactttagggttagcccctgtggtggggattcccttacccttattcagctatggggggagcagttttatcacttttatgatcctgtttgcaatcctagaaaacctgcttgctttccgctatatttttggaaacaatagcaaaccatcctttgggaattttggattcttagctcagctggtcagagcgctcggctcataa

SEQ ID NO: 832 - DNA (genomic), 1146 bp, Helicobacter pylori; double-stranded, circular
  misc_feature (B) LOCATION 1...1146
  hypothetical: NO
  anti-sense: NO
atggcattagacaaaaggatttggatgcattttgatcttttgccttttgtgtttatcatccccttgttggtggtttcttttttgttgatttttgagagtagtgcggttttgagcttgaagcaaggggtttattatgccatagggtttcttctcttttgggtagtgttttttatccctttcaggaaactcgatcggtggctctttgcgctttattgggcgtgcgttattttattagcgttagtggattttatgggatcgagcaagcttggagcgcagcgatggctagtcattcctttcacttctatcaccttacagcctagcgagcctgtgaaaatcgctattcttttattgttggcgcatttgatcaaaatcaacccacctccttttaagggctatgattggggcatgtttttaaagcttagtttttacatttgcttaccggcggctttgattttaaaacagcctgatttaggcacggctcttattgtgctcatcatgggttttgggattttattgatcgtgggtttaaggactagggtgtggctccctcttttaatcgctttaatagtggcttcgcctatcgcttatcattttttgcatgattaccaaaaaaagcgcatcgcagacttcctttctgaaaagcctaattaccatgtcatgcaatccattatcgctataggatcgggcgggtttttaggcaaatctaaagaagcctgcacccaaaccaaattcaaattcttgcctatcgcaacgagcgattttattttcgcctacttcgtggagcgtttcgggtttttaggggctatattgctttttgcgatttatataggcttgagtttgcatttatttttttatctgtttgagagcaacagcgattggtttttaaagattgtagcccttgggatttctattttaatctttgtttattccagcgtgaatatcgccatgactttagggttagcccctgtggtggggattcccttacccttattcagctatggggggagcagttttatcacttttatgatcctgtttgcaatcctagaaaacctgcttgctttccgctatatttttggaaacaatagcaaaccatcctttgggaattttggattcttagctcagctggtcagagcgctcggctcataa

SEQ ID NO: 833 - DNA (genomic), 483 bp, Helicobacter pylori; double-stranded, circular
  misc_feature (B) LOCATION 1...483
  hypothetical: NO
  anti-sense: NO
atgctcaaaaaaaagattgatttgcataaagattctattaggaagctctttttttattacttcatccctttagttttttctatgatctcactttctacttactctatggtagatggcatgtttgtgggcaaaaaactgggtaaagaagctatcgctgcggtcaatatcgcatggcctatttttccaggactcattgcgtatgaattgctttttggttttggggcagcgagcattgtggggtattttttaggtcaaaataaaacccatagggctaggcttgtgtttagcagcgtgttttattttgtcgctctaagcgcctttattttgagcatggcgttattgccttttagcgaaaatatcgcgcgtttttttgggagcaatgacgctttattgagcatgtccaaacgctatattgaaatcattttaatgggctctgtttttatggttttgcaccctttagcggatgatctttgttgtgaatga

SEQ ID NO: 834 - DNA (genomic), 903 bp, Helicobacter pylori; double-stranded, circular
  misc_feature (B) LOCATION 1...903
  hypothetical: NO
  anti-sense: NO
atgctcaaaaaaaagattgatttgcataaagattctattaggaagctctttttttattacttcatccctttagttttttctatgatctcactttctacttactctatggtagatggcatgtttgtgggcaaaaaactgggtaaagaagctatcgctgcggtcaatatcgcatggcctatttttccaggactcattgcgtatgaattgctttttggttttggggcagcgagcattgtggggtattttttaggtcaaaataaaacccatagggctaggcttgtgtttagcagcgtgttttattttgtcgctctaagcgcctttattttgagcatggcgttattgccttttagcgaaaatatcgcgcgtttttttgggagcaatgacgctttattgagcatgtccaaacgctatattgaaatcattttaatgggctctgtttttatggttttgcaccctttagcggatgtctttgtggtgaatgacaaacggcccgttttagcgatggtagcgatgttgattggctcgttagcgaatatctttttcaattacttgtttatttttgtgttggaagtgggggttcaaggcagcgcgatagccaccgtgatagggcatgcgataggggttttagtcttaatgcagcatttttggcgcaaaaaagggcagttgtattttatcaaacgattttctttatcttcagtcatttcttcagctaaaagcggtgtgcctcaaagcacggcggaatttagcgcttctattatgattttattgtttaataccgctatcatgcacacggcgggggaaaggtttgtgagcatgtatgggatcgttatgtataatgcgattatcttttttacgactttgtttgcgatttctcaaggcatccaaccgattgcagagctttag

SEQ ID NO: 835 - DNA (genomic), 570 bp, Helicobacter pylori; double-stranded, circular
  misc_feature (B) LOCATION 1...570
  hypothetical: NO
  anti-sense: NO
atgcccacgatgttagcggttggtttttgggtgttggtttttttatccacgagcaatgcggtgaatttaaccgacgggttagacggattagcgagtgtgcctagcattttcaccctcttaagcctttctatctttgtgtatgtggcagggaatgcggaattttctaaatacttgctctatcctaaagtcatagatgtgggggaattgtttgtgatttcgctagcattagtgggatcgctctttggctttttgtggtataactgcaacccggcaagcgtgtttatgggcgatagcgggagtttggcaataggagggtttatcgcttataacgctattgtttcgcataatgaaatcttgctcgttttaatggggtctatttttgtaatagaaactctgtctgtgatcttgcaagtagggagctataaaacccgtaaaaaacgcctttttttaatggcacccatccatcatcattttgaacaaaagggttgggcagaaaataaggtgatcgtgcgtttttggatcatttctatgctgagtaatttagtcgctcttttgagcttgaaggtgtgt

SEQ ID NO: 836 - DNA (genomic), 1062 bp, Helicobacter pylori; double-stranded, circular
  misc_feature (B) LOCATION 1...1062
  hypothetical: NO
  anti-sense: NO
atgctctattctttattatatggctattttaatatcaatcttttccagtatttgacctttagagcagggttagggtttttcatagccttttttctcacgctttttttaatgcctaaattcattctatgggccaaggctaaaaaggctaaccagcccatttctagcttcgtgccaagccaccagaataaaaaggatacccctacgatggggggcattgtgtttgtttttgcaaccattgttgcgagcgtgttgtgcgcgtctttgagcaatctttatgtgttgttagggataatcgtgttagtgggctttagttttgtgggttttagagacgattacactaaaatcaaccagcaaaataacgccgggatgagtgcgaaaatgaaatttggcatgctgtttatcctttcgcttatagtgtctgttttattgagccttaaggggttggacacttttttatacgcgccgtttttgaaaaaccccttgtttgaaatgcccacgatgttagcggttggtttttgggtgttggtttttttatccacgagcaatgcggtgaatttaaccgacgggttagacggattagcgagtgtgcctagcattttcaccctcttaagcctttctatctttgtgtatgtggcagggaatgcggaattttctaaatacttgctctatcctaaagtcatagatgtgggggaattgtttgtgatttcgctagcattagtgggatcgctctttggctttttgtggtataactgcaacccggcaagcgtgtttatgggcgatagcgggagtttggcaataggagggtttatcgcttataacgctattgtttcgcataatgaaatcttgctcgttttaatggggtctatttttgtaatagaaactctgtctgtgatcttgcaagtagggagctataaaacccgtaaaaaacgcctttttttaatggcacccatccatcatcattttgaacaaaagggttgggcagaaaataaggtgatcgtgcgtttttggatcatttctatgctgagtaatttagtcgctcttttgagcttgaaggtgtgttaa

SEQ ID NO: 837 - DNA (genomic), 1128 bp, Helicobacter pylori; double-stranded, circular
  misc_feature (B) LOCATION 1...1128
  hypothetical: NO
  anti-sense: NO
gcaaatcaatttgcgctacaattttccttttctaatttcaagcatggcgattttaccacaagggattttatgctctattctttattatatggctattttaatatcaatcttttccagtatttgacctttagagcagggttagggtttttcatagccttttttctcacgctttttttaatgcctaaattcattctatgggccaaggctaaaaaggctaaccagcccatttctagcttcgtgccaagccaccagaataaaaaggatacccctacgatggggggcattgtgtttgtttttgcaaccattgttgcgagcgtgttgtgcgcgtctttgagcaatctttatgtgttgttagggataatcgtgttagtgggctttagttttgtgggttttagagacgattacactaaaatcaaccagcaaaataacgccgggatgagtgcgaaaatgaaatttggcatgctgtttatcctttcgcttatagtgtctgttttattgagccttaaggggttggacacttttttatacgcgccgtttttgaaaaaccccttgtttgaaatgcccacgatgttagcggttggtttttgggtgttggtttttttatccacgagcaatgcggtgaatttaaccgacgggttagacggattagcgagtgtgcctagcattttcaccctcttaagcctttctatctttgtgtatgtggcagggaatgcggaattttctaaatacttgctctatcctaaagtcatagatgtgggggaattgtttgtgatttcgctagcattagtgggatcgctctttggctttttgtggtataactgcaacccggcaagcgtgtttatgggcgatagcgggagtttggcaataggagggtttatcgcttataacgctattgtttcgcataatgaaatcttgctcgttttaatggggtctatttttgtaatagaaactctgtctgtgatcttgcaagtagggagctataaaacccgtaaaaaacgcctttttttaatggcacccatccatcatcattttgaacaaaagggttgggcagaaaataaggtgatcgtgcgtttttggatcatttctatgctgagtaatttagtcgctcttttgagcttgaaggtgtgt

SEQ ID NO: 838 - DNA (genomic), 351 bp, Helicobacter pylori; double-stranded, circular
  misc_feature (B) LOCATION 1...351
  hypothetical: NO
  anti-sense: NO
acgcccagcatgatagttacagaaacgagcaccggtaagattttagccttagtgggggggattgattataaaaaaagcgctttcaatcgcgccacgcaagccaaacggcagtttgggagcgcgatcaagccttttgtgtatcaaatcgcttttgataatggctattccaccacttccaaaatccctgataccgcgcgaaattttgaaaatggcaattatagtaaaaacagcgtgcaaaaccacgcatggcaccctagcaattatactcgcaaatttttagggcttgtaaccttgcaagaagccttgagccattcgttaaatctggctacgattaatttagcgatcgcttgg

SEQ ID NO: 839 - DNA (genomic), 477 bp, Helicobacter pylori; double-stranded, circular
  misc_feature (B) LOCATION 1...477
  hypothetical: NO
  anti-sense: NO
gtcatcaccaaccaacaaaacgaagtcaaaactttcacgcccattgaaaccaaaaagatcacttccaaagaacaagcttttttaaccctttcagcgctgatggatgcggtagaaaacggcacagggagtttggctcgcattaaaggtttagaaattgccggtaaaaccggaacttctaacaacaatattgacgcttggttcattggctttacccccaccttacaaagcgtgatctggtttgggagagacgataacacgcctattggcaaaggagcgacaggaggcgttgtgagcgcgcctgtgtattcgtatttcatgcgcaatatcttagcgattgaaccttctttaaaaagaaagtttgatgtccccaaaggcttgcgtaaagaaatcgtggataaaatcccctactactcaagccctaattccatcacccccacccccaaaaaaacagacgatagcgaagaacgcttgttgttc

SEQ ID NO: 840 - DNA (genomic), 1032 bp, Helicobacter pylori; double-stranded, circular
  misc_feature (B) LOCATION 1...1032
  hypothetical: NO
  anti-sense: NO
gagtggttaatgctaaaaaagattttttatggttttatcgttttatttttgattatcgtagggttgttggccgttcttgtcgctcaagtttgggtaactacggataaggatattgctaaaattaaagattatcgccccagtgtcgcttcacagattttagacagaaaagggcgtttgatcgctaatatttatgataaggaatttcgtttttatgcgcgttttgaagaaatccccccacgatttgttgaaagccttctagcggtagaagacaccctcttttttgagcatggggggatcaatttagacgctgtcatgcgcgctatgattaaaaacgctaaaagtggtcgttacactgaagggggtagcactctaacccaacaactcgttaaaaacatggtgctcacacgggaaaaaaccctaaccagaaaactcaaagaagctatcatctccatacgcattgaaaaagtcttaagcaaagaagaaattttagagcgttatttgaaccaaactttttttgggcatgggtattatggcgtgaaaaccgcaagtttagggtattttaaaaaaccccttgacaaactcacgcttaaagaaatcaccatgttagtcgccttacctagggctccaagtttttatgaccctaccaaaaatttagaattttcactctctagggctaatgatattttaaggcggttgtattctttaggctggatttcttctaacgagctcaaatccgctctcaatgaagtgccaatcgtctataaccaaacttccacgcaaaatatcgctccctatgtcgtggatgaagtgttgaagcaattggatcaattagacgggttaaaaactcaaggctataccataaaactcacgatagatttggattaccaacgcttagcgttggagtctttgcgttttgggcatcaaaaaatcttagaaaaaatcgctaaagagaagccaaaaactaacgcttctaatgataaagatgaagacaacttaaacgcccagcatgatagttacagaaacgagcaccgg

SEQ ID NO: 841 - DNA (genomic), 1983 bp, Helicobacter pylori; double-stranded, circular
  misc_feature (B) LOCATION 1...1983
  hypothetical: NO
  anti-sense: NO
atgctaaaaaagattttttatggttttatcgttttatttttgattatcgtagggttgttggccgttcttgtcgctcaagtttgggtaactacggataaggatattgctaaaattaaagattatcgccccagtgtcgcttcacagattttagacagaaaagggcgtttgatcgctaatatttatgataaggaatttcgtttttatgcgcgttttgaagaaatccccccacgatttgttgaaagccttctagcggtagaagacaccctcttttttgagcatggggggatcaatttagacgctgtcatgcgcgctatgattaaaaacgctaaaagtggtcgttacactgaagggggtagcactctaacccaacaactcgttaaaaacatggtgctcacacgggaaaaaaccctaaccagaaaactcaaagaagctatcatctccatacgcattgaaaaagtcttaagcaaagaagaaattttagagcgttatttgaaccaaactttttttgggcatgggtattatggcgtgaaaaccgcaagtttagggtattttaaaaaaccccttgacaaactcacgcttaaagaaatcaccatgttagtcgccttacctagggctccaagtttttatgaccctaccaaaaatttagaattttcactctctagggctaatgatattttaaggcggttgtattctttaggctggatttcttctaacgagctcaaatccgctctcaatgaagtgccaatcgtctataaccaaacttccacgcaaaatatcgctccctatgtcgtggatgaagtgttgaagcaattggatcaattagacgggttaaaaactcaaggctataccataaaactcacgatagatttggattaccaacgcttagcgttggagtctttgcgttttgggcatcaaaaaatcttagaaaaaatcgctaaagagaagccaaaaactaacgcttctaatgataaagatgaagacaacttaaacgccagcatgatagttacagaaacgagcaccggtaagattttagccttagtgggggggattgattataaaaaaagcgctttcaatcgcgccacgcaagccaaacggcagtttgggagcgcgatcaagccttttgtgtatcaaatcgcttttgataatggctattccaccacttccaaaatccctgataccgcgcgaaattttgaaaatggcaattatagtaaaaacagcgtgcaaaaccacgcatggcaccctagcaattatactcgcaaatttttagggcttgtaaccttgcaagaagccttgagccattcgttaaatctggctacgattaatttaagcgatcagcttggctttgaaaaaatttatcaatctttaagcgacatggggtttaaaaacctccctaaagatttgtctattgtgttagggagctttgctatctcaccgattgatgcggctgaaaagtattctctattttctaattacggcaccatgctcaaacccatgctcattgaaagcatcaccaaccaacaaaacgaagtcaaaactttcacgcccattgaaaccaaaaagatcacttccaaagaacaagcttttttaaccctttcagcgctgatggatgcggtagaaaacggcacagggagtttggctcgcattaaaggtttagaaattgccggtaaaaccgggacttctaacaacaatattgacgcttggttcattggctttacccccaccttacaaagcgtgatctggtttgggagagacgataacacgcctattggcaaaggagcgacaggaggcgttgtgagcgcgcctgtgtattcgtatttcatgcgcaatatcttagcgattgaaccttctttaaaaagaaagtttgatgtccccaaaggcttgcgtaaagaaatcgtggataaaatcccctactactcaagccctaattccatcacccccacccccaaaaaaacagacgatagcgaagaacgcttgttgttctaa

SEQ ID NO: 842 - DNA (genomic), 231 bp, Helicobacter pylori; double-stranded, circular
  misc_feature (B) LOCATION 1...231
  hypothetical: NO
  anti-sense: NO
agcatgaaaaaaacaaccctctttgtattgggcttattattcaatagctctttaagcgctgttgatgggatttctcaaaccgagccttcttctttgaatttggctgaagatagcctgcctttgaaccattctaacgcccaaaaactctctttaaaaaacgcatggaatagggtgttgtctaatcatgaaggcttgcatgcgcagaatacgccattaagcgagcgagtaaaa

SEQ ID NO: 843 - DNA (genomic), 372 bp, Helicobacter pylori; double-stranded, circular
  misc_feature (B) LOCATION 1...372
  hypothetical: NO
  anti-sense: NO
acgcagaagtggtcggaaactttaaaagagatggaaaaaggccattataatcatttccaaaacgctttgaaaatgcaaaaagttaggcaaatcgctacggtaaacaccttacgtgctcaactggcttatgataaggcccatatcgctagcgttaaggctaaagatgtgttagaagtttcgcaactctcgttcaattctattttgtctagcaaagacgatctagcgccttcaggcaaattagagatccacaccgagaaaaatctgcccgatttgagcttttttgtttcttccacgctcaattcttacccggttttaaagactttagaaaatcagattcaaatttctaaagaaaacacaaaacttcagatcgct

SEQ ID NO: 844 - DNA (genomic), 531 bp, Helicobacter pylori; double-stranded, circular
  misc_feature (B) LOCATION 1...531
  hypothetical: NO
  anti-sense: NO
aaaatcagattcaaatttctaaagaaaacacaaaacttcagatcgcttaattccttgccccaagagagttttttgcgctcgtatttcttgaaacacaacaactcggtgtttgaagacatgatccctaattggtttgtggacgtggctgggggtatgcctatcctttctcccacaggacgcattcaaaaataccaagcgagcaaattagcggaattacaggtcaatagcgagcaaatccaggctaaaaaaaacatggaattgttagtgaataagacttataaagagacgctttcttatttgaaagaatacaaaagcttgctttctagcgtgaaattagccaaagaaaatttaaaactccaagagcaggcttttttacaaggcttaagcacgaacgctcaagtcattgatgcgaggaacacgctttcttctatcatcgtggagcaaaaaagcgtggcttataaatacatcgtttcattagcgaatttaatggcgttaagcgatcacattgatttattttatgaatttgtttat

SEQ ID NO: 845 - DNA (genomic), 1533 bp, Helicobacter pylori; double-stranded, circular
  misc_feature (B) LOCATION 1...1533
  hypothetical: NO
  anti-sense: NO
atgaaaaaaacaaccctctttgtattgggcttattattcaatagctctttaagcgctgttgatgggatttctcaaaccgagccttcttctttgaatttggctgaagatagcctgcctttgaaccattctaacgcccaaaaactctctttaaaaaacgcatggaatagggtgttgtctaatcatgaaggcttgcatgcgcaagaatacgccattaagcgagcgagtaaaatgaaattagcggctaagctttcttttttgcctcaaattgatttgagtgcattttacgtgtatctttctaaccctattaaaatggattttgccagccaaaaacaagcaggcgtgcaaaaagccaccaaccagatccatcaaggcttgcaaaacatccagcaaaatatcccccctcaagtattaacccctcaaatccaagcgggtatacaaggggtgatgcaaggttttggggctttgagcagcactttagaagcccccttattgttttctaagcaaaatgtggtgattggggctttgagcattatttatcccctttatatgggtggggcaagattcacgatggtgcgcattgcggatttgatgcaaaaagacgccaatgaagtgtatcgcttgaaaaagctttccacctttcaagagcttgtgagcgtgtattatggcatggtgttaaacgcagaagtggctgaaactttagaagaagtggaaaaaggccattataagcatttccaaaacgctttgaaaatgcaaaaagtagggcaaatcgctagggtagaaaccttaggtgctcaagtggcttatgataaggcccatatcgctagcgttaaggctaaagatgtgttagaagtttcgcaactctcgttcaattctattttgtctagcaaagacgatctagcgccttcaggcaaattagagatccacaccgagaaaaatctgcccgatttgagcttttttgtttcttccacgctcaattcttacccggttttaaagactttagaaaatcagattcaaatttctaaagaaaacacaaaacttcagatcgctaaattcttgccccaagtgagtttttttggctcttatctcatgaaacaaaacaattcggtgtttgaagacatgatccctaattggtttgtgggcgtggctgggcgtatgcctatcctttctcccacaggacgcattcaaaaataccaagcgagcaaattagcggaattacaggtcaatagcgagcaaatccaggctaaaaaaaacatggaattgttagtgaataagacttataaagagacgctttcttatttgaaagaatacaaaagcttgctttctagcgtggaattagccaaagaaaatttaaaactccaagagcaggcttttttacaaggcttaagcacgaacgctcaagtcattgatgcgaggaacacgctttcttctatcatcgtggagcaaaaaagcgtggcttataaatacatcgtttcattagcgaatttaatggcgttaagcgatcacattgatttattttatgaatttgtttattaa

SEQ ID NO: 846 - DNA (genomic), 240 bp, Helicobacter pylori; double-stranded, circular
  misc_feature (B) LOCATION 1...240
  hypothetical: NO
  anti-sense: NO
ggggttcgtttgtcaaaatgggggggcataacccctttagagccggcgttttttaatacgcgcttaatcacaggggagtatcttttcaaccaggtagcgttgtttgaattaatcaagccttataaaatcgttcaaaaagaggatctgttaggcgctcttttagattacaaaaatttaggcgtggcgcgttttttagaaaatgggcatgatttaaacgaattgctcgcattaatcaaacat

SEQ ID NO: 847 - DNA (genomic), 993 bp, Helicobacter pylori; double-stranded, circular
  misc_feature (B) LOCATION 1...993
  hypothetical: NO
  anti-sense: NO
ttgtttaagtttttctaccttttatgtttgactttggggcatcttttttgtgcacctttcatcttgcttttgagttttaaagaaaaataccgccactctttaaaggctcgtttttttctcaaaggcaatcttttaaaaagcgagccgattttttggttccatgcatgctcttatggggaggtcaaatctttagagccgatcattcacgctttaaaagagccgattttaatcagcgttaccacccataccggctttgaattagccgctcaaacttaccagcattctcaacacatagaagtgcgttacctgccttttgaaaccctattgtttgcatgggaaaaaaacttaaaacgcttgaaaactttggtggttacagaagcggaattgtggtttaacgtgtttgatacggctcaaaaattaggggcaaaaaccatgctcattaacgctaggatcagcgttcgctcttaccccaagtaccagcgtttttcttttttttatgcgcttttattcaaacgcattgatttgattttagcgcaaagcaaagccgatcaaaagcgtttgttgaatctaggggctaaaaaagtggtggattttttgaatatcaagcgtttttcaaagcctgtgatcacttcgttttaccctaaaaacccaagcgctttaaacattgttttagccagcacgcatgagggcgaagaggaattagggttaaaagcgtttttagaattgaaaaagacttttaaaaacgcaagactttttgttgtgccgcgccaccctgagcgttttaaaagcgtgcggaatttgttgcaagatattttaaaaacgacgctttttagtttggagtgtttttcttcaaagggttttgtggaatgcgatattttgttagtggataggttgggggaattgaataacttctataaaatcgcagacattgtcattttagggggttcgtttgtcaaaatgggggggcataacccctttagagccggcgttttt

SEQ ID NO: 848 - DNA (genomic), 1182 bp, Helicobacter pylori; double-stranded, circular
  misc_feature (B) LOCATION 1...1182
  hypothetical: NO
  anti-sense: NO
ttgtttaagtttttctaccttttatgtttgactttggggcatcttttttgtgcacctttcatcttgcttttgagttttaaagaaaaataccgccactctttaaaggctcgtttttttctcaaaggcaatcttttaaaaagcgagccgattttttggttccatgcatgctcttatggggaggtcaaatctttagagccgatcattcacgctttaaaagagccgattttaatcagcgttaccacccataccggctttgaattagccgctcaaacttaccagcattctcaacacatagaagtgcgttacctgccttttgaaaccctattgtttgcatgggaaaaaaacttaaaacgcttgaaaactttggtggttacagaagcggaattgtggtttaacgtgtttgatacggctcaaaaattaggggcaaaaaccatgctcattaacgctaggatcagcgttcgctcttaccccaagtaccagcgtttttcttttttttatgcgcttttattcaaacgcattgatttgattttagcgcaaagcaaagccgatcaaaagcgtttgttgaatctaggggctaaaaaagtggtggattttttgaatatcaagcgtttttcaaagcctgtgatcacttcgttttaccctaaaaacccaagcgctttaaacattgttttagccagcacgcatgagggcgaagaggaattagggttaaaagcgtttttagaattgaaaaagacttttaaaaacgcaagactttttgttgtgccgcgccaccctgagcgttttaaaagcgtgcggaatttgttgcaagatattttaaaaacgacgctttttagtttggagtgtttttcttcaaagggttttgtggaatgcgatattttgttagtggataggttgggggaattgaataacttctataaaatcgcagacattgtcattttagggggttcgtttgtcaaaatgggggggcataaccctttagagccggcgttttttaatacgcgcttaatcacaggggagtatcttttcaaccaggtagcgttgtttgaattaatcaagccttataaaatcgttcaaaaagaggatctgttaggcgctcttttagattacaaaaatttaggcgtggcgcgttttttagaaaatgggcatgatttaaacgaattgctcgcattaatcaaacattaa

SEQ ID NO: 849 - DNA (genomic), 525 bp, Helicobacter pylori; double-stranded, circular
  misc_feature (B) LOCATION 1...525
  hypothetical: NO
  anti-sense: NO
aaagcccaagaagagagtaaagttttgattgaaaacgctaaaaacgatggctataaaatcggctttaaagagggcgaagaaaaaatgcgtaacgaactcactcacagcgtgaatgaagaaaaaaaccagcttttgcatgcgatcaccgctttagatgaaaaaatgaaaagctcagaaaatcatttaatggctttagaaaaggaattgagtgcgattgcgatagatatagctaaagaagtgatccttaaggaagtggaagacaacagccaaaaagtggccctagctttggctgaagagcttttaaaaaacgttttagacgcaacggatattcatttaaaagtcaatcctttggattacccttatttaaacgagcatttgcaaaacgcttccaaaatcaaattggagagcaatgaggctatttctaaaggaggcgttatgatcactagctctaacgggagccttgatgggaatttaatggagcgctttaaaacgctcaaagaaagcgtgttggataattttaaggtg

SEQ ID NO: 850 - DNA (genomic), 777 bp, Helicobacter pylori; double-stranded, circular
  misc_feature (B) LOCATION 1...777
  hypothetical: NO
  anti-sense: NO
atgtcattgaatagccgcaaaaacttgatccaaaaagaccatttgaataagcatgacattcaaaaatacgaatttaagagcatggcaaacttaccccctaaaactaatcctaatagtgcgtctttagaaacgcctaacccgcaagagcctttggaaaaaaaagcgatagaaaacgatttgattgattgcttattgaaaaaaaccgatgagctttcaagccatttagtgaaattgcaaatgcagtttgaaaaagcccaagaagagagtaaagttttgattgaaaacgctaaaaacgatggctataaaatcggctttaaagagggcgaagaaaaaatgcgtaacgaactcactcacagcgtgaatgaagaaaaaaaccagcttttgcatgcgatcaccgctttagatgaaaaaatgaaaagctcagaaaatcatttaatggctttagaaaaggaattgagtgcgattgcgatagatatagctaaagaagtgatccttaaggaagtggaagacaacagccaaaaagtggccctagctttggctgaagagcttttaaaaaacgttttagacgcaacggatattcatttaaaagtcaatcctttggattacccttatttaaacgagcatttgcaaaacgcttccaaaatcaaattggagagcaatgaggctatttctaaaggaggcgttatgatcactagctctaacgggagccttgatgggaatttaatggagcgctttaaaacgctcaaagaaagcgtgttggataattttaaggtgtga

SEQ ID NO: 851 - DNA (genomic), 195 bp, Helicobacter pylori; double-stranded, circular
  misc_feature (B) LOCATION 1...195
  hypothetical: NO
  anti-sense: NO
atggcagagataaaaaaagcgaagaatttaggcgaatggctggacatgcgtcttggcactaacaagcttgttaaagtgctaatgacagaatattggatccctaaaaacattaatttcttatgggctatgggggtgattttattgaccctttttggcgtgcttgtgatctcagggattttcttgctcatgtattac

SEQ ID NO: 852 - DNA (genomic), 219 bp, Helicobacter pylori; double-stranded, circular
  misc_feature (B) LOCATION 1...219
  hypothetical: NO
  anti-sense: NO
tggctaaagcgtaaggagagttccatggcagagataaaaaaagcgaagaatttaggcgaatggctggacatgcgtcttggcactaacaagcttgttaaagtgctaatgacagaatattggatccctaaaaacattaatttcttatgggctatgggggtgattttattgaccctttttggcgtgcttgtgatctcagggattttcttgctcatgtattac

SEQ ID NO: 853 - DNA (genomic), 246 bp, Helicobacter pylori; double-stranded, circular
  misc_feature (B) LOCATION 1...246
  hypothetical: NO
  anti-sense: NO
tcttcttcttactgccctttttggacagaagcccagtcgtcgctcccgcacaaacggccagcttttatggtgtggttttggcttttaatcattgacatgattgttttaacgatccatggtaaattgcctccgtttgggattggtaaatacatcggcttatttggttcaatcactttcctagcccttttctttgtggtattgcccattatcactatcgctgaaaggaagaaacaagggggtgttaga

SEQ ID NO: 854 - DNA (genomic), 276 bp, Helicobacter pylori; double-stranded, circular
  misc_feature (B) LOCATION 1...276
  hypothetical: NO
  anti-sense: NO
atggcctttggcgtggcgcaagtgatcttcttcttactgccctttttggacagaagcccagtcgtcgctcccgcgcacaaacggccagcttttatggtgtggttttggcttttaatcattgacatgattgttttaacgatctatggtaaattgcctccgcttgggattggcaaatacatcggcttatttggttcaatcactttcctagcccttttctttgtggtattgcccattatcactatcgctgaaaggaagaaacaagggggtgttagatga

SEQ ID NO: 855 - DNA (genomic), 531 bp, Helicobacter pylori; double-stranded, circular
  misc_feature (B) LOCATION 1...531
  hypothetical: NO
  anti-sense: NO
ttgaaggcaagaaaaaagaatccaaagtcattcctttttggccggtgttcttgtctaaagatatttttgtggtttgcacgttcatggtgtttttcttttacttggtgtgctaccagtatgattttgcgatggatcccatcaactttgaaaggggtaacagccttaaaacgccgcctcacatttaccctgaatggtatttctctatggagctatgaagtcttaaggggctttttctttagcgctgatttagggctaatggcctttggcgtggcgcaagtgatcttcttcttactgccctttttggacagaagcccagtcgtcgctcccgcgcacaaacggccagcttttatggtgtggttttggcttttaatcattgacatgattgttttaacgatctatggtaaattgcctccgcttgggattggcaaatacatcggcttatttggttcaatcactttcctagcccttttctttgtggtattgcccattatcactatcgctgaaaggaagaaacaagggggtgttagatga

SEQ ID NO: 856 - DNA (genomic), 675 bp, Helicobacter pylori; double-stranded, circular
  misc_feature (B) LOCATION 1...675
  hypothetical: NO
  anti-sense: NO
ccgaaaattgcaccgcttgccatggcattaaatcccaaaacattccagcccctatggatagccttagtgcgagcaactcttttggggtggggccaccggaatttaagccatgtggcgggggttttgaacgcgagtttcttagcccacttcatcaaagacccggtgaaaacggcgaaattgagccataagttcaacgatgaaaggccctatcctatgccggcgttttctcaatttagcgatcaagatttgagcgatattgtggcgtatctcacttctattttgcctaaaaatttgagcgataaggaagtgttcgcgcaaagttgtcaaaggtgccatagcctggattatgctaaagataaggcctttagcgatcctaaagatttagccaattatttaggctctcatgcgcctgatttgtccatgatgattagggctaagggcgaacatggcttgaatgttttcatcaacgatccgcaaaagcttttgcctggcacagccatgcctagagtgggattgaatgaaaaagctcaaaaacaagtcatttcttatttggaaaaagcgggcgataggaaaaagcatgaaaggaatactttagggattaagatcatgattttctttgcggtgctgtcgttcttggcttacgactggaaaagaaaagtttggagcgaagtgcat

SEQ ID NO: 857 - DNA (genomic), 858 bp, Helicobacter pylori; double-stranded, circular
  misc_feature (B) LOCATION 1...858
  hypothetical: NO
  anti-sense: NO
atgaaagaatttaaaattctaatcatccttattgtggtgataggcgtgatttattatggggttgagccttatgcacattcggtgatgcaccctaaagtcgctccggcggattttgctttcaaggatttagagccgattgatttaaaaaatggcgacgctaataagggcaaacagcttgtagccgaaaattgcaccgcttgccatggcattaaatcccaaaacattccagcccctatggatagccttagcgcgagcaactcttttggggttgtgccaccggatttaagccatgtggcgggggttttgaacgcgagtttcttagcccacttcatcaaagacccggtgaaaacggcgaaattgagccataagttcaacgatgaaaggccctatcctatgccggcgttttctcaatttagcgatcaagatttgagcgatattgtggcgtatctcacttctattttgcctaaaaatttgagcgataaggaagtgttcgcgcaaagttgtcaaaggtgccatagcctggattatgctaaagataaggcctttagcgatcctaaagatttagccaattatttaggctctcatgcgcctgatttgtccatgatgattagggctaagggcgaacatggcttgaatgttttcatcaacgatccgcaaaagcttttgcctggcacagccatgcctagagtgggattgaatgaaaaagctcaaaaacaagtcatttcttatttggaaaaagcgggcgataggaaaaagcatgaaaggaatactttagggattaagatcatgattttctttgcggtgctgtcgttcttggcttacgcatggaaaagaaaagtttggagcgaagtgcattaa

SEQ ID NO: 858 - DNA (genomic), 156 bp, Helicobacter pylori; double-stranded, circular
  misc_feature (B) LOCATION 1...156
  hypothetical: NO
  anti-sense: NO
gttgaaacgcgcgatttttatggcaaaaagctacgctatcattataagcatgaattcagccaagctaaagactatgtcaaaatcagaggcgaagacaaccttttttcctacactaaagttacaagcgtgggctatcgcatcaccgaaaagacactt

SEQ ID NO: 859 - DNA (genomic), 402 bp, Helicobacter pylori; double-stranded, circular
  misc_feature (B) LOCATION 1...402
  hypothetical: NO
  anti-sense: NO
atgttaggcgttgctttagcatgcttaatttctcaaatccctttaacgatcagcatagaaaacgaacgagcgaacaaagatttaaccttttttttagaatgcttaaaagcactccaagcaaacgcccctatcgtttatgaaagcttgcaaaaatttagcgagaagttgaacgctttcaatcgtgtccgttatctcaaaagcgatttggatttattgcacgaacaagcaagcagattagggatggttttagccacggctaaaccctgcttgaatgggcgttttgaattgctgtattaccacttagagcgatcggttagcatttcgtatcatcgttatgggaatttaggctcaagggttttaaggcaacccacttgccacaaatcatgctgtgctgaaaaataa

SEQ ID NO: 860 - DNA (genomic), 447 bp, Helicobacter pylori; double-stranded, circular
  misc_feature (B) LOCATION 1...447
  hypothetical: NO
  anti-sense: NO
agttacaagcgtgggctatcgcatcaccgaaaagacactttaagcgacatgttaggcgttgctttagcatgcttaatttctcaaatccctttaacgatcagcatagaaaacgaacgagcgaacaaagatttaaccttttttttagaatgcttaaaagcactccaagcaaacgcccctatcgtttatgaaagcttgcaaaaatttagcgagaagttgaacgctttcaatcgtgtccgttatctcaaaagcgatttggatttattgcacgaacaagcaagcagattagggatggttttagccacggctaaaccctgcttgaatgggcgttttgaattgctgtattaccacttagagcgatcggttagcatttcgtatcatcgttatgggaatttaggctcaagggttttaaggcaacccacttgccacaaatcatgctgtgctgaaaaa

SEQ ID NO: 861 - DNA (genomic), 537 bp, Helicobacter pylori; double-stranded, circular
  misc_feature (B) LOCATION 1...537
  hypothetical: NO
  anti-sense: NO
gtgtttagagtttacccttacagcttaagggtgttacaagagcaaaataaaaaaacgaaattcacccccaaaggcgtgggtgtggtcatcgctccatggaatttccctgtgggcatttctgtaggcactatcgctgcccccctagccgctggcaatcgggtgatttacaagccctcaagtttgtctagcgtaacgggttataagctttgcgagtgcttttgggatgcgggcgtgcctagagatgcgctcatttacttgccctctaaagggagcgatattagcgagcatcttttaaaagatgaaagcatcaagtttgccattttaacagggggtgaagacaccgcttataaaatgctcaaggctaaccccactttagccttaagcgctgaaacaggcggtaaaaacgccactattgtgagcaaaatggcagacagagaccaggcgattaagaatgttatccattcagcttttagcaattcggggcaaaaatgctccgccacttcgcttttagtgttagaaaaagaagtctatggaaga

SEQ ID NO: 862 - DNA (genomic), 1728 bp, Helicobacter pylori; double-stranded, circular
  misc_feature (B) LOCATION 1...1728
  hypothetical: NO
  anti-sense: NO
gtgtttagagtttacccttacagcttaagggtgttacaagagcaaaataaaaaaacgaaattcacccccaaaggcgtgggtgtggtcatcgctccatggaatttccctgtgggcatttctgtaggcactatcgctgcccccctagccgctggcaatcgggtgatttacaagccctcaagtttgtctagcgtaacgggttataagctttgcgagtgcttttgggatgcgggcgtgcctagagatgcgctcatttacttgccctctaaagggagcgatattagcgagcatcttttaaaagatgaaagcatcaagtttgccattttaacagggggtgaagacaccgcttataaaatgctcaaggctaaccccactttagccttaagcgctgaaacaggcggtaaaaacgccactattgtgagcaaaatggcagacagagaccaggcgattaagaatgttatccattcagcttttagcaattcggggcaaaaatgctccgccacttcgcttttagtgttagaaaaagaagtctatgaagatgagaatttcaaaaagactctaatagatgcgactctaagccttagcgtgggcgatccttttgatttcaaaaacaaaatcggtgctctagcggacaagcctaatgaaaaggtcatcaaagccatagatgaattgaaaagctatgaaaattacgaaatcccagcaagctttgttgatgataacccctatttgatgaagccaagcatcaaatacggcactaaaaaaggcgatttcacgcaccaaactgagctttttacgcccattttatccgtgatgaaagcaaaagatttagacgaggcgatagaaatagtcaattctaccggttacgggctgactagcgcgttagagtctttggacgaaagggagtgggaatattatttagaacgcattgaagccggtaatatctatatcaacaaacccaccacaggagcgattgtcttgcgccagccttttgggggggttaaaaaatccgctgtggggtttgggaggaaagtaggcattttcaactatatcacgcaatttgtgaatatccatcaagaagaagaagatgaaaacgccttaaaaaaccccttaagcgaagctttagagggcttgactcaaaaaggctatgatgaacacacgcatgagttgaaacgcgcgatttttatggcaaaaagctacgcttatcattataagcatgaattcagccaagctaaagactatgtcaaaatcagaggcgaagacaaccttttttcctacactaaagttacaagcgtgggctatcgcatcaccgaaaaggacactttaagcgacatgttaggcgttgctttagcatgcttaatttctcaaatccctttaacgatcagcatagaaaacgaacgagcgaacaaagatttaaccttttttttagaatgcttaaaagcactccaagcaaacgcccctatcgtttatgaaagcttgcaaaaatttagcgagaagttgaacgctttcaatcgtgtccgttatctcaaaagcgatttggatttattgcacgaacaagcaagcagattagggatggttttagccacggctaaaccctgcttgaatgggcgttttgaattgctgtattaccacttagagcgatcggttagcatttcgtatcatcgttatgggaatttaggctcaagggttttaaggcaacccacttgccacaaatcatgctgtgctgaaaaataa

SEQ ID NO: 863 - DNA (genomic), 183 bp, Helicobacter pylori; double-stranded, circular
  misc_feature (B) LOCATION 1...183
  hypothetical: NO
  anti-sense: NO
tttttgccactcttttgtgcgtggcagggtgggggcatttcttgtatcaaggcacgattcgatcctaaaggggggatttatacgctatggcctttatttggcgtgagtaaccagatgttagcgggcatggcgttgttgttggttagggtggtgttgtttaaaatggggcgtttaagggggcga

SEQ ID NO: 864 - DNA (genomic), 522 bp, Helicobacter pylori; double-stranded, circular
  misc_feature (B) LOCATION 1...522
  hypothetical: NO
  anti-sense: NO
ttgccactcttttgtgcgtggcagggtgggggtatttcttgtatcaaggcacgattcgatcctaaaggggggatttatacgctatggcctttatttggcgtgagtaaccagatgttagcgggcatggcgttgttgttggttacggtggtgttgtttaaaatggggcgttttaagggggcgataataagcgccttgccggcagttttgatcttagcaatcactttttatagcggtattttaaaagtgatgccaaagagtaatgatagcgtgcttaataacgtttcgcatgtggcgcaaatgcaaatcatcaaagaaaaaatcgcgctcactacggatgaaaaagcgctaaaaacgctccaaaaatccttttttaaccatgcgattgatgcgattttgtgcgtgtttttcatgctggtggcgcttctagtgctgatcgtgagcgttaggatttgctcaaacgcttattttaaaaatcaaatttacccaccactggctgaaacgccctacatcaaagccgcttga

SEQ ID NO: 865 - DNA (genomic), 246 bp, Helicobacter pylori; double-stranded, circular
  misc_feature (B) LOCATION 1...246
  hypothetical: NO
  anti-sense: NO
tatcacattttaggggatccaagcgtgatggcgttttggtaccattttgcgattttgtttgaagctttgttcattttaaccgctgtggatgctggcacacgaaccgctcgttttatgatccaagatttgcccggtaatatttataagcctttgggcgatcttagttcctataaggctgtgatttttgccactcttttgtgcgtggcagggtgggggcatttcttgtatcaaggcacgattcgatcc

SEQ ID NO: 866 - DNA (genomic), 243 bp, Helicobacter pylori; double-stranded, circular
  misc_feature (B) LOCATION 1...243
  hypothetical: NO
  anti-sense: NO
cacattttaggggatccaagcgtgatggcgttttggtaccattttgcgattttgtttgaagctttgttcattttaaccgctgtggatgctggcacacgaaccgctcgttttatgatccaagatttgcccggtaatatttataagcctttgggcgatcttagttcctataaggctgtgatttttgccactcttttgtgcgtggcagggtgggggcatttcttgtatcaaggcacgattcgatcc

SEQ ID NO: 867 - DNA (genomic), 828 bp, Helicobacter pylori; double-stranded, circular
  misc_feature (B) LOCATION 1...828
  hypothetical: NO
  anti-sense: NO
atcgttttatgccattttatcgcttatcgggtgttaaagctagacgatagcagagccacgcccgcatgcgtaaggaatgacggaaaggattttgtgccaaccgataaagccatcacctttgggcatcatttcgccgctattgctggggctggccctttagtaggcccgatattagccgctcaaatgggttacttgccctctattctatggattttgataggctcggttttagggggttgcgtgcatgattttgtggtgctttttgcttccattaggcgcgatggcaagtctttaggcgaaatgatcaagcttgaaatgggtaaatttgtagggatgatcgcaagtcttggcattttagggatcatgctcattatcattgcgattttggcgatggtggtggtgaaggctttagcgcattcgccttggggcttttttacgatcgctatgaccattcccattgcgattcttatggggctttacatgcggtttttcaggccgcataagattttagaagtttctgttatcggctttattttgttgattatagcgatttatgcgggtaaatacgtttctttagatcccaaactagcgtcaatttttacttttgaggccggctctttagcgtggatgatcatgggttatggttttgtggcttctattttgccggtatggtttttactcgctccacgagactatttaagcacttttttaaaaattggcgttataggggtgttggttgtggctattgtttttgtcgctccgcccttacaaatccgtcaaatcacgccctttttagatacagagctccgatttagcaaagatgttcca

SEQ ID NO: 868 - DNA (genomic), 837 bp, Helicobacter pylori; double-stranded, circular
  misc_feature (B) LOCATION 1...837
  hypothetical: NO
  anti-sense: NO
gctatcgttttatgccattttatcgcttatcgggtgttaaagctagacgatagcagagccacgcccgcatgcgtaaggaatgacggaaaggattttgtgccaaccgataaagccatcacctttgggcatcatttcgccgctattgctggggctggccctttagtaggcccgatattagccgctcaaatgggttacttgccctctattctatggattttgataggctcggttttagggggttgcgtgcatgattttgtggtgctttttgcttccattaggcgcgatggcaagtctttaggcgaaatgatcaagcttgaaatgggtaaatttgtagggatgatcgcaagtcttggcattttagggatcatgctcattatcattgcgattttggcgatggtggtggtgaaggctttagcgcattcgccttggggcttttttacgatcgctatgaccattcccattgcgattcttatggggctttacatgcggtttttcaggccgcataagattttagaagtttctgttatcggctttattttgttgattatagcgatttatgcgggtaaatacgtttctttagatcccaaactagcgtcaatttttacttttgaggccggctctttagcgtggatgatcatgggttatggttttgtggcttctattttgccggtatggtttttactcgctccacgagactatttaagcacttttttaaaaattggcgttataggggtgttggttgtggctattgtttttgtcgctccgcccttacaaatccgtcaaatcacgccctttttagatacagagctccgatttagcaaagatgttccagggtgt

SEQ ID NO: 869 - DNA (genomic), 1608 bp, Helicobacter pylori; double-stranded, circular
  misc_feature (B) LOCATION 1...1608
  hypothetical: NO
  anti-sense: NO
atgcaaaaaagtttagtttctttggcttgggtttttgtcgctattttaggggcgatctgtttaggggtgttagccttacacaagggcgagagcattaacacgctatggcttgtagtagcgagcgcttgcatttatagcataggctatcgtttttatagccattttatcgcttatcgggtgttaaagctagacgatagcagagccacgcccgcatgcgtaaggaatgacggaaaggattttgtgccaaccgataaagccatcacctttgggcatcatttcgccgctattgctggggctggccctttagtaggcccgatattagccgctcaaatgggttacttgccctctattctatggattttgataggctcggttttagggggttgcgtgcatgattttgtggtgctttttgcttccattaggcgcgatggcaagtctttaggcgaaatgatcaagcttgaaatgggtaaatttgtagggatgatcgcaagtcttggcattttagggatcatgctcattatcattgcgattttggcgatggtggtggtgaaggctttagcgcattcgccttggggcttttttacgatcgctatgaccattcccattgcgattcttatggggctttacatgcggtttttcaggccgcataagattttagaagtttctgttatcggctttattttgttgattatagcgatttatgcgggtaaatacgtttctttagatcccaaactagcgtcaatttttacttttgaggccggctctttagcgtggatgatcatgggttatggttttgtggcttctattttgccggtatggtttttactcgctccacgagactatttaagcacttttttaaaaattggcgttataggggtgttggttgtggctattgtttttgtcgctccgcccttacaaatccctaaaatcacgccctttgtagatggcagtgggcctgtgtttgcaggaagcgtgttccctttcttgtttatcacggtggcttgcgggacgattagcggattccatgctttaatttcttcaggcacgacccctaaaatgctcgctaaagaaagcgacgccaggctagtgggctatggctctatggtgatggagagcgtcgtggctcttatggcgttggtgtgcgcagggattttacacccagggctttatttcgctatcaattccccagaagtgagcatcggtaaagatatagctgatgcggcttcggtgattagctcatgggggtttagtatcagcgctgaagaaatccgtgagatgactaaaaacattggcgaaagctccattttgagccgcaccggtggggcgcccacttttgcgatcggtttagcgatgatcgtgtatcacattttaggggatccaagcgtgatggcgttttggtaccattttgcgattttgtttgaagctttgttcattttaaccgctgtggatgctggcacacgaaccgctcgttttatgatccaagatttgctcggtaatatttataagcctttgggcgatcttagttcctataaggctgggatttttgccactcttttgtgcgtggcagggtgggggtatttcttgtatcaaggcacgattcgatcctaa

SEQ ID NO: 870 - DNA (genomic), 630 bp, Helicobacter pylori; double-stranded, circular
  misc_feature (B) LOCATION 1...630
  hypothetical: NO
  anti-sense: NO
aaaaaaaccattctttttactctgcgtttattttcgtgttttctattgccaggcttggtggagattttgcctaactttttcaaatccgctcgcccgattgaaggctaccgaccttatacggttttagagacagcggggaggcaaatttatatccaagaaggttgctatcattgccattcccaactcattcgccctttccaagctgaggtggatcgatatggtgcgtatagtttgagtggggagtatgcgtatgacaggccatttttgtggggctctaaaaggattggccctgatttgcacagggtgggggattatcgcacaaccgattggcatgaaaagcacatgctggatcctaaaagcgttgtgccgcacagcatcatgccagcttacaagcatttatttataaaaaagagcgattttgacaccgcttatgcggaagctttgacgcaaaaaaaggtttttggcgtgccttatgacaccgaaaacggcgtgaaattagggaatgtagaagaagcgaaaaaggcctatctagaagaagctaaaaaaatcacagccgacatgaaagacaagagggtgctagaagcgattgagagaggtgaagtcttagaaatcgtggctttgatcgcttat

SEQ ID NO: 871 - DNA (genomic), 699 bp, Helicobacter pylori; double-stranded, circular
  misc_feature (B) LOCATION 1...699
  hypothetical: NO
  anti-sense: NO
atgtttagttttttagaaaaaaacccattctttttcactcttgcgtttattttcgtgttttctattgcaggcttggtggagattttgcctaactttttcaaatccgctcgcccgattgaaggcttacggccttatacggttttagagacagcggggaggcaaatttatatccaagaaggttgctatcattgccattcccaactcattcgccctttccaagctgaggtggatcgatatggtgcgtatagtttgagtggggagtatgcgtatgacaggccatttttgtggggctctaaaaggattggccctgatttgcacagggtgggggattatcgcacaaccgattggcatgaaaagcacatgctggatcctaaaagcgttgtgccgcacagcatcatgccagcttacaagcatttatttataaaaaagagcgattttgacaccgcttatgcggaagctttgacgcaaaaaaaggtttttggcgtgccttatgacaccgaaaacggcgtgaaattagggaatgtagaagaagcgaaaaaggcctatctagaagaagctaaaaaaatcacagccgacatgaaagacaagagggtgctagaagcgattgagagaggtgaagtcttagaaatcgtggctttgatcgcttatttgaatagcttgggtaattccaggatcaacgctaatcaaaacgctaaataa

SEQ ID NO: 872 - DNA (genomic), 156 bp, Helicobacter pylori; double-stranded, circular
  misc_feature (B) LOCATION 1...156
  hypothetical: NO
  anti-sense: NO
aggaaagttgaaatggattttttaaacgaccatataaatgtttttggcttgattgcagcacttgtgattttagttttaaccatctatgaatccagttcgctcattaaagaaatggcgatagcaaatctcaaggtgagctcatggaaaatgggcatt

SEQ ID NO: 873 - DNA (genomic), 396 bp, Helicobacter pylori; double-stranded, circular
  misc_feature (B) LOCATION 1...396
  hypothetical: NO
  anti-sense: NO
agaaatggcgatagcaaatctcaaggtgagctcatggaaaatgggcatttgattgatgggataggggagtttgccaacaatgtgccagtaggctggatcgcaagctttatgtgcgtgattgtgtgggctttttggtattttttctttgggtacccactgagcagtttttctcaaatcgggcaatacaatgaagaggttaaagcgcacaaccaaaaatttgaagccaagtggaagcatttgggtcaaaaggaattggtggatatgggtcaaggcatctttttagtccattgttcgcaatgccatggcatcaccgctgatggcttgcatgggagcgctcaaaatctgttgcgttgggataaagaagagggcattatggacaccattaagcatggctct

SEQ ID NO: 874 - DNA (genomic), 495 bp, Helicobacter pylori; double-stranded, circular
  misc_feature (B) LOCATION 1...495
  hypothetical: NO
  anti-sense: NO
atggattttttaaacgaccatataaatgtttttggcttgattgcagcacttgtgattttagttttaaccatctatgaatccagttcgctcattaaagaaatgcgcgatagcaaatctcaaggtgagctcatggaaaatgggcatttgattgatgggataggggagtttgccaacaatgtgccagtaggctggatcgcaagctttatgtgcgtgattgtgtgggctttttggtattttttctttgggtacccactgagcagtttttctcaaatcgggcaatacaatgaagaggttaaagcgcacaaccaaaaatttgaagccaagtggaagcatttgggtcaaaaggaattggtggatatgggtcaaggcatctttttagtccattgttcgcaatgccatggcatcaccgctgatggcttgcatgggagcgctcaaaatctgttgcgttgggataaagaagagggcattatggacaccattaagcatggctctaag

SEQ ID NO: 875 - DNA (genomic), 192 bp, Helicobacter pylori; double-stranded, circular
  misc_feature (B) LOCATION 1...192
  hypothetical: NO
  anti-sense: NO
cgttttgaccacttacaccccttacacaccaatgcggtaatctatggtttcactcttgaagggatttgggcgagttggtattatatcggtcaaagggtgtttaaaattacttaccaccaacacccctttttgaaaattgtagggttattgcatttttggctctggattcttcttttaagtcctaggggttat

SEQ ID NO: 876 - DNA (genomic), 687 bp, Helicobacter pylori; double-stranded, circular
  misc_feature (B) LOCATION 1...687
  hypothetical: NO
  anti-sense: NO
ttgctggtcttactcaatctaaagawtacgccgaatttgatgtggcctttagatattattgtggttgtggcatgggtgttatggggggttaatatgtttgggagcatgagcgttagaagagagaatactatttatgtgtctttgtggtattacatcgctacttatgtgggtatagcggtgatgtatatcttcaataacctttctatccccacctattttgtcgctgatatggggagcgtttggcattmtatttctatgtattcaggcagtaatgatgcgctcattcaatggtggtgggggcataatgcggtcgcttttgtctttacgagtggggtgattggcacaatttattatttcttgcctaaagagagcggccagcctatcttttcttacaaactcactttgttttctttttggagtttgatgtttgtttatatttgggcgggcgggcaccatttgatctattccaccgtgsctgatkgrgtacaaaccctttctagcgygttttcagtggtgttgatcttgccttcgygggggacagcgattaacatgcttttamcgatgagaggccaatggcaccagytcaaagaaagccctttgatcaagtttttagttttagcctcaactttctacatgctttccacgctagaaggctccattcaagccattaaaagcgtgaacgcttag

SEQ ID NO: 877 - DNA (genomic), 1125 bp, Helicobacter pylori; double-stranded, circular
  misc_feature (B) LOCATION 1...1125
  hypothetical: NO
  anti-sense: NO
gggttattagcttgtttgctggtcttactcaatctaaagattacgccgaatttgatgtggcctttagatattattgtggttgtggcatgggtgttatggggggttaatatgtttgggagcatgagcgttagaagagagaatactatttatgtgtctttgtggtattacatcgctacttatgtgggtatagcggtgatgtatatcttcaataacctttctatccccacctattttgtcgctgatatggggagcgtttggcattctatttctatgtattcaggcagtaatgatgcgctcattcaatggtggtgggggcataatgcggtcgcttttgtctttacgagtggggtgattggcacgatttattatttcttgcctaaagagagcggccagcctatcttttcttacaaactcactttgttttctttttggagtttgatgtttgtttatatttgggcgggcgggcaccatttgatctattccaccgtgcctgattgggtacaaaccctttctagcgtgttttcagtggtgttgatcttgccttcgtgggggacagcgattaacatgcttttaacgatgagaggccaatggcaccagctcaaagaaagccctttgatcaagtttttagttttagcctcaactttctacatgctttccacgctagaaggctccattcaagccattaaaagcgtgaacgccttagcccacttcaccgattggattatagggcatgtgcatgacggcgtgcttgggtgggtaggcttcactttgattgcgagcatgtatcacatgacccctaggcttttcaaaagagagatctattcaggaagacttgtggatttccaattttggatcatgactttagggattgtgctttacttttcgtccatgtggattgcagggatcacgcaagggatgatgtggagggatgtggatcaatacgggaatctcacttaccaattcattgacacggttaaggcgctaatcccttattacaatattagaggcgttgggggtcttatgtattttattggatttattatttttgcttacaatatctttatgacaatcacggcaggcaaaaaattagagcgtgagcccaattacgccacgcctatggccaga

SEQ ID NO: 878 - DNA (genomic), 1467 bp, Helicobacter pylori; double-stranded, circular
  misc_feature (B) LOCATION 1...1467
  hypothetical: NO
  anti-sense: NO
atgcaagaaaatgtgcctttgagttatgattattccattagcaaattgtttctttatgcgatgatcgcttttgggataataggcatgttaatagggatcgtgttagcctttgagttatctttccctagtttgaactacattgcaggggagtatggcgtttttggccgcttacgccccttacacaccaatgcggtgatctatggtttcactcttggagggatttgggcgagttggtattatatcggtcaaagggtgcttaaaatcacttaccaccaacacccctttttgaaaattgtagggttattgcatttttggctctggattcttcttttagtcctaggggttattagcttgtttgctggtcttactcaatctaaagaatacgccgaattgatgtggcctttagatattattgtggttgtggcatgggtgttatggggggttaatatgtttgggagcatgagcgttagaagagagaatactatttatgtgtctttgtggtattacatcgctacttatgtgggtatagcggtgatgtatatcttcaataacctttctatccccacctattttgtcgctgatatggggagcgtttggcattctatttctatgtattcaggcagtaatgatgcgctcattcaatggtggtgggggcataatgcggtcgcttttgtctttacgagtggggtgattggcacgatttattatttcttgcctaaagagagcggccagcctatcttttcttacaaactcactttgttttctttttggagtttgatgtttgtttatatttgggcgggcgggcaccatttgatctattccaccgtgcctgattgggtacaaaccctttctagcgtgttttcagtggtgttgatcttgccttcgtgggggacagcgattaacatgcttttaacgatgagaggccaatggcaccagctcaaagaaagccctttgatcaagtttttagttttagcctcaactttctacatgctttccacgctagaaggctccattcaagccattaaaagcgtgaacgccttagcccacttcaccgattggattatagggcatgtgcatgacggcgtgcttgggtgggtaggcttcactttgattgcgagcatgtatcacatgacccctaggcttttcaaaagagagatctattcaggaagacttgtggatttccaattttggatcatgactttagggattgtgctttacttttcgtccatgtggattgcagggatcacgcaagggatgatgtggagggatgtggatcaatacgggaatctcacttaccaattcattgacacggttaaggcgctaatcccttattacaatattagaggcgttgggggtcttatgtattttattggatttattatttttgcttacaatatctttatgacaatcacggcaggcaaaaaattagagcgtgagcccaattacgccacgcctatggccagataa

SEQ ID NO: 879 - DNA (genomic), 384 bp, Helicobacter pylori; double-stranded, circular
  misc_feature (B) LOCATION 1...384
  hypothetical: NO
  anti-sense: NO
agaattgccaaattttacctttcatggttattttgcctttttatagggatttttttcatcaccactagccttgggcgcgtgtggtgcggttgggcttgccctcaaacctttttaagggtgctttatagagatgtgattgaaaccaagattttcaaactccataaaaagatcagcaacaagcaagaaagccataaaaacaccccaagctataagatccgtaaagcattaagcgttttattgttcgctcctgttgtggcgtggctaatgatgttgtttttcttttatttcatcgccccagaagacttttttatgtatcttaaaaaccctagcgatcaccctatcgctatgggtttttggctttttagcgccttagtggtgcctatt

SEQ ID NO: 880 - DNA (genomic), 396 bp, Helicobacter pylori; double-stranded, circular
  misc_feature (B) LOCATION 1...396
  hypothetical: NO
  anti-sense: NO
tatccatgccataaaagattttcattaacgcatagccaaaaggaatccccccaatcaaatagcccaaagggggtgaaaatcacattgatattggttaggaaatttaaaacgccttccataaataccctttcaaataaaatagcgatcattataacatgttgctttttaagtgaaagcgttaagttgttagggtatagtggccttaaaaattttaggatattgagaatgcttgaaacttctagccattttttaaaatcgtttcgcttgaagcgttatatagggtttttattgatttctttagcactattaatcacgccatttgttcgcattgatggggcgcatttgtttttgatctcctttgagcataagcaactgcattttttaggcaagaatctt

SEQ ID NO: 881 - DNA (genomic), 540 bp, Helicobacter pylori; double-stranded, circular
  misc_feature (B) LOCATION 1...540
  hypothetical: NO
  anti-sense: NO
aatgcgtggagcatgcaccattaccaggccaaatacaaccgcccttcactcatccaatggtcttcaactaacgccattaatacgcgccagaaagtgcgcctagtgcgtttaaaaacgatcgcttacatgggggttatcgctgttgtggtagctcttttaatcatcacttcgtttaaaaaagaacgcatgcttttagacattaaccgcaacagcgatctgtatgaaatacgctctagtgggtatgtggataacgattacgtgtttttattccataacacggacaataaagaccatgagttttatttcaaaattttagggcaaaaagacatccaaatcaaaaagcctttaaaccctatcgccattaaagccgggcaaaagatcaaagcggtggtgattttacgaaaacccctaaagggtaacgccacagaatacaaacatgctaaagacgctttaatccctattacgatacaagcttatagcgtagacgataagaatattacgatagaaagggaatcggtgtttatcgtgcccagtgaagat

SEQ ID NO: 882 - DNA (genomic), 1377 bp, Helicobacter pylori; double-stranded, circular
  misc_feature (B) LOCATION 1...1377
  hypothetical: NO
  anti-sense: NO
atgcttgaaacttctagccattttttaaaatcgtttcgcttgaagcgttatatagggtttttattgatttctttagcactattaatcacgccatttgttcgcattgatggggcgcatttgtttttgatctcctttgagcataagcaactgcattttttaggcaagatctttagcgctgaagaattgcaaattttacctttcatggttattttgctttttatagggatttttttcatcaccactagccttgggcgcgtgtggtgcggttgggcttgccctcaaacctttttaagggtgctttatagagatgtgattgaaaccaagattttcaaactccataaaaagatcagcaacaagcaagaaagccctaaaaacaccccaagctataagatccgtaaagcattaagcgttttattgttcgctcctgttgtggcggggctaatgatgttgtttttcttttatttcatcgccccagaagacttttttatgtatcttaaaaaccctagcgatcaccctatcgctatgggtttttggctttttagcgccttagtggtgctatttgatatagtggtggttgcggagcgtttttgcatctatttatgcccttacgctagggtgcaatcggtgttgtatgataatgacaccttaaaccctatttatgatgaaaagcgcggcggggtgctttatgacaatcaaggtcgcctttttcccttgcctcccaaaaaacgcagcgcagaaaacgaatgcgtgaattgcttgcattgcgtgcaggtttgccccacgcatattgacattagaaagggcttgcaattagaatgcatcaattgcttagaatgcgtggacgcatgcaccattaccatggccaaatacaaccgcccttcactcatccaatggtcttcaactaacgccattaatacgcgccaaaaagtgcgcctagtgcgtttaaaaacgatcgcttacatgggggttatcgctgttgtggtagctcttttaatcatcacttcgtttaaaaaagaacgcatgcttttagacattaaccgcaacagcgatctgtatgaaatacgctctagtgggtatgtggataacgattacgtgtttttattccataacacggacaataaagaccatgagttttatttcaaaattttagggcaaaaagacatccaaatcaaaaagcctttaaaccctatcgccattaaagccgggcaaaagatcaaagcggtggtgattttacgaaaacccctaaagggtaacgccacagaatacaaacatgctaaagacgctttaatccctattacgatacaagcttatagcgtagacgataagaatattacgatagaaagggaatcggtgtttatcgtgcccagtgaagattga

SEQ ID NO: 883 - DNA (genomic), 429 bp, Helicobacter pylori; double-stranded, circular
  misc_feature (B) LOCATION 1...429
  hypothetical: NO
  anti-sense: NO
atgatgtttgataacacgcttatcaatttatttgagacagcgcctcttttaacytcgcttttagctgggattttaacttttttaagcccttgcgtgttgcctttgatcccggcgtatatgtcttatatttcgcaaatttctttagaggatattaaagatggtaaggctaaaagggtttcggtttttttaaaatccttgatgtttgtggtggggttttcgctcgtgtttttgggcgtgggcatgtctatggccaagcttatccatagcttttcgttttcctgggtgaattatatcgctggggggattgtgatcctttttggtttgcattttttaggcgtgtttcgttttgcatttttgtataaaacccaaagcgttggtttagcgagcaaatctaacagcatgcagcgctttacccctttctttttggca

SEQ ID NO: 884 - DNA (genomic), 720 bp, Helicobacter pylori; double-stranded, circular
  misc_feature (B) LOCATION 1...720
  hypothetical: NO
  anti-sense: NO
atgtttgataacacgcttatcaatttatttgagacagcgcctcttttaacttcgcttttagctgggattttaacttttttaagcccttgcgtgttgcctttgatcccggcgtatatgtcttatatttcgcaaatttctttagaggatattaaagatggtaaggctaaaagggtttcggtttttttaaaatccttgatgtttgtggtggggttttcgctcgtgtttttgggcgtgggcatgtctatggccaagcttatccatagcttttcgttttcctgggtgaattatatcgctggggggattgtgatcctttttggtttgcattttttaggcgtgtttcgttttgcatttttgtataaaacccaaagcgttggtttagcgagcaaatctaacagcatgcagcgcttttacccctttcttttgggcatgagtttcgctttgggttggacgccatgcatcgggccgatattcacttctatagtgatcatgagtgcgagtaaggacgcttatggcttaatgcttatggtggtgtttgtaatgggcttggcgatcccttttttattggtggctttaatgctagaaagagcgcttttgtttttaaaatccttaagaaaatacaaccgcgcgattgaaattgtttcagggttggtgcttattttaatgggaatattgatcatgacaaattctttagaaagcctaactaactttttacaaaattag

SEQ ID NO: 885 - DNA (genomic), 777 bp, Helicobacter pylori; double-stranded, circular
  misc_feature (B) LOCATION 1...777
  hypothetical: NO
  anti-sense: NO
gtgaggttttgttattctaaaaaatataaaaaaacgattattttaaaaaaggattggatgatgtttgataacacgcttatcaatttatttgagacagcgcctcttttaacttcgcttttagctgggattttaacttttttaagcccttgcgtgttgcctttgatcccggcgtatatgtcttatatttcgcaaatttctttagaggatattaaagatggtaaggctaaaagggtttcggtttttttaaaatccttgatgtttgtggtggggttttcgctcgtgtttttgggcgtgggcatgtctatggccaagcttatccatagcttttcgttttcctgggtgaattatatcgctggggggattgtgatcctttttggtttgcattttttaggcgtgtttcgttttgcgcttttgtataaaacccaaagcgctggtttagcgagcaaatctaacagcatgcagcgcttttacccctttcttttgggcatgagtttcgctttgggttggacgccatgcatcgggccgatattcacttctatagtgatcatgagtgcgagtaaggacgcttatggcttaatgcttatggtggtgtttgtaatgggcttggcgatcccttttgtattggtggctttaatgctagaaagagcgcttttgtttttaaaatccttaagaaaatacaaccgcgcgattgaaattgtttcagggttggtgcttattttaatgggaatattgatcatgacaaattctttagaaagcctaactaactttttacaaaat

SEQ ID NO: 886 - DNA (genomic), 453 bp, Helicobacter pylori; double-stranded, circular
  misc_feature (B) LOCATION 1...453
  hypothetical: NO
  anti-sense: NO
tgtttgaggactctccctaaattggatgcgtataaccgcccctcttgggcttatgggaacaggattcatgatttgtgcgaaaggcgagggcattttgatgcgggcgaaattgtggaacattttggcgatgaaaacgctaaaaagggcttttgtttgtataaaatgggctgtaaaaggccttacactttcaataattgctccaaactccgcttcaattcacacatcttttggcccttaggcgcagggcatgggtgcatagggtgttctgagcctaatttttgggatacgatgagtccttttgaagagcctttagcgaatcgctccattaaaaccgcctttgatggcttaggggctgataaagtagcggataaagtcggcacgactctactcagcgcaaccgctattggcattgccgcgcatgcgctcctttctaaagcgatcaaaaacaaagag

SEQ ID NO: 887 - DNA (genomic), 720 bp, Helicobacter pylori; double-stranded, circular
  misc_feature (B) LOCATION 1...720
  hypothetical: NO
  anti-sense: NO
attaccactacattattttgttatgttaagataatgaaaatttctagtgaaggagtggtcatgttctacgatgaaaaaagacctatcaaaggattggaggaacgccttgaagtaattagttcgtttaacggtcataacgagcataaaaacttgcaagacgagtttaagggcgcgggcatttccaggcgcgatttattgaagtgggcgggcatgatgagcgtgactctagctttgccggctagttttgctcccttgactttaaaagcggtagaagtggctaacaggttgcctgtgatttggttgcacatggcagaatgcaccggctgcagcgagagcttgttaaggagtgcggaccccaccattgatagcattatctttgattacattaacctagaataccatgagaccattatggtagcgagcggttttcaagctgaaaaaagtttgcatgacgccatagaaaagcacaaaaacaattacattttaatggtagaaggcgttatcccccaaggcacggatactctcttcactcaaggcccaaacgctgaaacgggggctgaagagtgcagaaaggttgctcaacacgcagccgctatttttgccataggcacatgctccagttttgggggcgtgcaagcggcttaccctaacccctctaacgcgcaacccttgcataaaatcattgataaacccgtgatcaatgttcccgggttgcccgcc

SEQ ID NO: 888 - DNA (genomic), 726 bp, Helicobacter pylori; double-stranded, circular
  misc_feature (B) LOCATION 1...726
  hypothetical: NO
  anti-sense: NO
tggccaattaccactacattattttgttatgttaagataatgaaaatttctagtgaaggagtggtcatgttctacgatgaaaaaagacctatcaaaggattggaggaacgccttgaagtaattagttcgtttaacggtcataacgagcataaaaacttgcaagacgagtttaagggcgcgggcatttccaggcgcgatttattgaagtgggcgggcatgatgagcgtgactctagctttgccggctagttttgctcccttgactttaaaagcggtagaagtggctaacaggttgcctgtgatttggttgcacatggcagaatgcaccggctgcagcgagagcttgttaaggagtgcggaccccaccattgatagcattatctttgattacattaacctagaataccatgagaccattatggtagcgagcggttttcaagctgaaaaaagtttgcatgacgccatagaaaagcacaaaaacaattacattttaatggtagaaggcgttatcccccaaggcacggatactctcttcactcaaggcccaaacgctgaaacgggggctgaagagtgcagaaaggttgctcaacacgcagccgctatttttgccataggcacatgctccagttttgggggcgtgcaagcggcttaccctaacccctctaacgcgcaacccttgcataaaatcattgataaacccgtgatcaatgttcccgggttgcccgcc

SEQ ID NO: 889 - DNA (genomic), 1155 bp, Helicobacter pylori; double-stranded, circular
  misc_feature (B) LOCATION 1...1155
  hypothetical: NO
  anti-sense: NO
atgttctacgatgaaaaaaagacctatcaaaggattgaagaacgccttgaagtaattagttcgtttaacgctcataacgagcataaaaacttgcaagacgagtttaagggcgcgggcatttccaggcgcgatttattgaagtgggcgggcatgatgagcgtgactctagctttgccggctagttttgctcccttgactttaaaagcggtagaagtggctaacaggttgcctgtgatttggttgcacatggcagaatgcaccggctgcagcgagagcttgttaaggagtgcggaccccaccattgatagcattatctttgattacattaacctagaataccatgagaccattatggtagcgagcggttttcaagctgaaaaaagtttgcatgacgccatagaaaagcacaaaaacaattacattttaatggtagaaggcggtatcccccaaggcacggaatacttcctcactcaaggcccaaacgctgaaacgggggctgaagagtgcagaaaggttgctcaacacgcagccgctatttttgccataggcacatgctccagttttgggggcgtgcaagcggcttaccctaacccctctaacgcgcaacccttgcataaaatcattgataaacccgtgatcaatgttcccggttgcccgcctagtgaaaaaaatatcgtgggcaatgtgctttattacttgatgtttgggactctccctaaattggatgcgtataaccgcccctcttgggcttatgggaacaggattcatgatttgtgcgaaaggcgagggcattttgatgcgggcgaaattgtggaacattttggcgatgaaaacgctaaaaagggcttttgtttgtataaaatgggctgtaaaaggccttacactttcaataattgctccaaactccgcttcaattcacacatcttttggcccttaggcgcagggcatgggtgcatagggtgttctgagcctaatttttgggatacgatgagtccttttgaagagcctttagcgaatcgctccattaaaaccgcctttgatggcttaggggctgataaagtagcggataaagtcggcacgactctactcagcgcaaccgctattggcattgccgcgcatgcgctcctttctaaagcgatcaaaaacaaagagtaa

SEQ ID NO: 890 - DNA (genomic), 675 bp, Helicobacter pylori; double-stranded, circular
  misc_feature (B) LOCATION 1...675
  hypothetical: NO
  anti-sense: NO
atggataaaatgaataaggtcgtcttgcacaaagagtattcaggttttgtgcgctttttccattgggttagggctttgagtatttttactttaatcgctacggggttttacatcgcttacccttttttgcagcctaattccagcttttataaaggggtgtatcttttacaagcttatgtacgctcttttcatgtcatgtttgggtttttactcattagcgcattaatctttagaacctatctttttttcactaaagaaagcttgatggaacgcaggagtttcagccaacttttaagcccaaaagcgtggattgatcagatgaaagcgtattttcttattagtgataaaccccacactaaaggattgtataaccctatccaactcgtggcttatttcactttggttgttttgatcgtgttgatgagtttgagcgggatagtgctgtattataatgtctatcatgaggggcttggggcgtttttagcaaacgcttttaagtggtttgaagcgctttgtggggggttagcgaatgttcgttttatccaccacttagcgacttgggggtttattttgtttgtccctgtgcatgtttatatggtgtttttccattctatcaggtatgatagttcgggggcggattctatgattaatggctatggttacaccaaagaatga

SEQ ID NO: 891 - DNA (genomic), 684 bp, Helicobacter pylori; double-stranded, circular
  misc_feature (B) LOCATION 1...684
  hypothetical: NO
  anti-sense: NO
aaagggttacgcatggataaaatgaataaggtcgtcttgcacaaagagtattcaggttttgtgcgctttttccattgggttagggctttgagtatttttactttaatcgctacggggttttacatcgcttacccttttttgcagcctaattccagcttttataaaggggtgtatcttttacaagcttatgtacgctcttttcatgtcatgtttgggtttttactcattagcgcattaatctttagaacctatctttttttcactaaagaaagcttgatggaacgcaggagtttcagccaacttttaagcccaaaagcgtggattgatcagatgaaagcgtattttcttattagtgataaaccccacactaaaggattgtataaccctatccaactcgtggcttatttcactttggttgttttgatcgtgttgatgagtttgagcgggatagtgctgtattataatgtctatcatgaggggcttggggcgtttttagcaaacgcttttaagtggtttgaagcgctttgtggggggttagcgaatgttcgttttatccaccacttagcgacttgggggtttattttgtttgtccctgtgcatgtttatatggtgtttttccattctatcaggtatgatagttcgggggcggattctatgattaatggctatggttacaccaaagaa

SEQ ID NO: 892 - DNA (genomic), 765 bp, Helicobacter pylori; double-stranded, circular
  misc_feature (B) LOCATION 1...765
  hypothetical: NO
  anti-sense: NO
ccgaacagagagcaaagcagcccccttaaaggaaaaagcgtagcggtttatactagccccatagatttggccgctaaagttgatctggtttttaccatgctttcggataaagcggcgattgatgctgttttagcaccaaaattttgggaacagatgtctaaaaaaatcgtggtaaatatgagcactatcgcccctttggaaagcttatctttagaaaaaatcgctcaaaagcatcaagcaacttaccttgaagcgcccgtttcgggatcggttggcgcggctaaagccggggctttattgattttagcggcaggtgatgaagaagttatctctaaactcaaacctgttttggcgcatttggggagtcaaaccttttatttaggaaaagttggtcaagggacaggagctaaactatccattaatagccttttggctcaaatgggggttgcttattcagaagctttgctattagccaaacgtttaggggttgatgcagagtcatttttgcaaattattggccaatctggcatgaattcgcctctctttcaagctaaaaaaggcatgtggttgcaagataattatccggctgctttcagtttgaagcttatggctaaggacattcgcttagccaaaaatgaagcaggagaggcgatgaagttgccattcttatttcaagcagaagagctttattctcaagcggaaaaatccggtttaggcggattggatatggcagccgtttatcattatttagaaaaaggagaacat

SEQ ID NO: 893 - DNA (genomic), 858 bp, Helicobacter pylori; double-stranded, circular
  misc_feature (B) LOCATION 1...858
  hypothetical: NO
  anti-sense: NO
atgaaaatcggatggattggactaggggctatggggactcctatggcgactcgtttgcgcgatgcggggttagaagtgtcggtttataaccgaacagagagcaaagcagcccccttaaaggaaaaaggcgtagcggtttatactagccccatagatttggccgctaaagttgatctggtttttaccatgctttcggataaagcggcgattgatgctgttttagcaccaaaattttgggaacagatgtctaaaaaaatcgtggtaaatatgagcactatcgcccctttggaaagcttatctttagaaaaaatcgctcaaaagcatcaagcaacttaccttgaagcgcccgtttcgggatcggttggcgcggctaaagccggggctttattgattttagcggcaggtgatgaagaagttatctctaaactcaaacctgttttggcgcatttggggagtcaaaccttttatttaggaaaagttggtcaagggacaggagctaaactatccattaatagccttttggctcaaatgggggttgcttattcagaagctttgctattagccaaacgtttaggggttgatgcagagtcatttttgcaaattattggccaatctggcatgaattcgcctctctttcaagctaaaaaaggcatgtggttgcaagataattatccggctgctttcagtttgaagcttatggctaaggacattcgcttagccaaaaatgaagcaggagaggcgatgaagttgccattcttatttcaagcagaagagctttattctcaagcggaaaaatccggtttaggcggattggatatggcagccgtttatcattatttagaaaaaggagaacattaa

SEQ ID NO: 894 - DNA (genomic), 384 bp, Helicobacter pylori; double-stranded, circular
  misc_feature (B) LOCATION 1...384
  hypothetical: NO
  anti-sense: NO
cgcgttagtggaaatctaaagagcgatcaaagcacttgtgctccttatcatattgataaaaatcaagaatataaagggcgctacattggtcaagtgccaaggggcatgttaagccattgggtgcgtattaaaaacggcgtggtggaaaattatcaagcggtagtgccttccacttggaatgcagggcctagagattctaaaaatcaaaggggggcttatgaaatgagcttgattggcactaaaatcgctgatttaacccagcctttagaaatcattaggactatccattcttttgatccatgcatcgcatgctcagtgcatgtgatggattttaaagggcagtctttgaacgagttcaaagtagagcctaatttcgctaaattc

SEQ ID NO: 895 - DNA (genomic), 507 bp, Helicobacter pylori; double-stranded, circular
  misc_feature (B) LOCATION 1...507
  hypothetical: NO
  anti-sense: NO
gggattaacatgtcaaaaaaaatcgtagtcgatcctatcactaggattgaggggcatttaaggattgaggtgatcgtagatgatgataatgtgatcaccgatgcgttttcttcttctacgctttttagggggctagaaacgatcattaagggcagagacccacgagatgcaggctttatcgctcaaaggatttgtggggtatgcacttattcgcattataaagccggtgttactgcggtagaaaacgctttaggaatcactcccccattaaacgcgcaattggtgcgatctttgatgaacatggcgttgctttttcacgatcatgtggtgcatttctatactttgcatgggcttgattggtgcgatattttgagcactttaaaagctgatcccattcaagcagcaaaactttctttcaaatacagcccttatcccattaataccggtgcggggcgaattaaaagcggttctaaaacgcttggaatgatttcgttaaaagcggatctt

SEQ ID NO: 896 - DNA (genomic), 903 bp, Helicobacter pylori; double-stranded, circular
  misc_feature (B) LOCATION 1...903
  hypothetical: NO
  anti-sense: NO
aacgcttggaatgatttcgttaaaagcggatctttagggccttttagcaatggttattatgagcataaaactattcgtttaaacccagaacaaaatttaatcgtcttaagccactacctcaagcttttagaaatccaaagggaagcggcgaaaatgaccgctatttttggggccaaacaacctcacccacaaagcctaacggtggggggtgttacgagtgtcatggatatattggatccaacaaggttggctgaatggaagagcaagtttgaagtggtggctaattttatcaaccatgcttactaccctgatttggtgatggcaggcgaaatgttcgctaacgaaccatctgttattaaaggctgtggtttaaggaattttatcgcttatgaagaagtgttgcttgggaaggataaataccttttgagtagtggggtggtgcttgatggggatatttctaaattacaccccattgatgaaagtttgattaaagaagaggttacgcattcttggtatcaatatgaagacactaaagaagtgcaactccacccttatgacgggcaaactaacccgcattataccggtttaaaagacggcgagagcgtggggattgaaaataaaataatccctgctaaagtgcttgacactaaggataaatattcttggataaaatcgcccagatacgatagtaagcccatggaagtagggcctttaagttccgtagtggtaggtttagcggcgaaaaacccttatgttactgaagtggctactaaatttttaaaagacacgaaactgcctttagaggcgttgttttcaacgcttgggcgcacagctgcaaggtgtattgaagctaagactatcgctgataatggtcttttggcgtttgacgcgttagtggaaatc

SEQ ID NO: 897 - DNA (genomic), 1737 bp, Helicobacter pylori; double-stranded, circular
  misc_feature (B) LOCATION 1...1737
  hypothetical: NO
  anti-sense: NO
atgtcaaaaaaaatcgtagtcgatcctatcactaggattgaggggcatttaaggattgaggtgatcgtagatgatgataatgtgatcaccgatgcgttttcttcttctacgctttttagggggctagaaacgatcattaagggcagagacccacgagatgcaggctttatcgctcaaaggatttgtggggtatgcacttattcgcattataaagccggtgttactgcggtagaaaacgctttaggaatcactcccccattaaacgcgcaattggtgcgatctttgatgaacatggcgttgctttttcacgatcatgtggtgcatttctatactttgcatgggcttgattggtgcgatattttgagcactttaaaagctgatcccattcaagcagcaaaactttctttcaaatacagcccttatcccattaataccggtgcgggcgaattaaaagcggttcaaaaacgcttgaatgatttcgctaaaagcggatctttagggccttttagcaatggctattatgggcataaaacctatcgtttaaacccagaacaaaatttaatcgtcttaagccactacctcaagcttttagaaatccaaagggaagcggcgaaaatgaccgctatttttggggccaaacaacctcacccacaaagcctaacggtggggggtgttacgagtgtcatggatatattggatccaacaaggttggctgaatggaagagcaagtttgaagtggtggctaattttatcaaccatgcttactaccctgatttggtgatggcaggcgaaatgttcgctaacgaaccatctgttattaaaggctgtggtttaaggaattttatcgcttatgaagaagtgttgcttgggaaggataaataccttttgagtagtggggtggtgcttgatggggatatttctaaattacaccccattgatgaaagtttgattaaagaagaggttacgcattcttggtatcaatatgaagacactaaagaagtgcaactccacccttatgacgggcaaactaacccgcattataccggtttaaaagacggcgagagcgtggggattgaaaataaaataatccctgctaaagtgcttgacactaaggataaatattcttggataaaatcgcccagatacgatagtaagcccatggaagtagggcctttaagttccgtagtggtaggtttagcggcgaaaaacccttatgttactgaagtggctactaaatttttaaaagacacgaaactgcctttagaggcgttgttttcaacgcttgggcgcacagctgcaaggtgtattgaagctaagactatcgctgataatggtcttttggcgtttgacgcgttagtggaaaatctaaagagcgatcaaagcacttgtgctccttatcatattgataaaaatcaagaatataaagggcgctacattggtcaagtgccaaggggcatgttaagccattgggtgcgtattaaaaacggcgtggtggaaaattatcaagcggtagtgccttccacttggaatgcagggcctagagattctaaaaatcaaaggggggcttatgaaatgagcttgattggcactaaaatcgctgatttaacccagcctttagaaatcattaggactatccattcttttgatccatgcatcgcatgctcagtgcatgtgatggattttaaagggcagtctttgaacgagttcaaagtagagcctaatttcgctaaattctaa

SEQ ID NO: 898 - DNA (genomic), 321 bp, Helicobacter pylori; double-stranded, circular
  misc_feature (B) LOCATION 1...321
  hypothetical: NO
  anti-sense: NO
agaatgagaatgaaaaaccttaagagcttgctctcttttttgttcgcttctttttgggttgctatccctttaatcgcactctacgcttgcacatgcgcgatagccacttttatagaaaacgattacggcacgagcgcgagtaaggcgatcgtgtataacaccccttggtttaatttcttgcatgcgtatttattggtggttttaataggcacattcatcaattctaaagctttagagcgcaaaaggtatgcgagccttttcttccacagctccttgattttcatcattttaggggcagcgatcacgcgctgttgcggagag

SEQ ID NO: 899 - DNA (genomic), 342 bp, Helicobacter pylori; double-stranded, circular
  misc_feature (B) LOCATION 1...342
  hypothetical: NO
  anti-sense: NO
atgaaaaaccttaagagcttgctctcttttttgttcgcttctttttgggttgctatccctttaatcgcactctacgcttgcacatgcgcgatagccacttttatagaaaacgattacggcacgagcgcgagtaaggcgatcgtgtataacaccccttggtttaatttcttgcatgcgtatttattggtggttttaataggcacattcatcaattctaaagctttagagcgcaaaaggtatgcgagccttttcttccacagctccttgattttcatcattttaggggcagcgatcacgcgcttttttgagagtggaagggcttatgcatgtgcgagaaaatag

SEQ ID NO: 900 - DNA (genomic), 390 bp, Helicobacter pylori; double-stranded, circular
  misc_feature (B) LOCATION 1...390
  hypothetical: NO
  anti-sense: NO
tcacctctttggttaaaaacacgattcccaaatatttggctcgctaaaatcctttatatggctatcttgctttgcgcgatcgctcattctgtggggctaatcttgcgctggtatgtgagtgggcattcgccttggagtaacgcttatgagtccatgctctatatcgcatgggcttctgttatcgcagggtttgttttacgatccaaactcgcgctatcggcttctagctttttggccggtatcgcgctctttgtggctcatttaggctttatggaccctcaaattggccctttagtgccggtgttaaaatcctattggctcaatatccatgtctctgtcatcaccgctagttatggctttttgggcttgtgttttgtgctagggatttta

SEQ ID NO: 901 - DNA (genomic), 399 bp, Helicobacter pylori; double-stranded, circular
  misc_feature (B) LOCATION 1...399
  hypothetical: NO
  anti-sense: NO
ttagcccctttacttcctcgttcgccaatgaaggccaaattgacattgcatgggggcaaaagcgctaaaatagaacgacaaaagatagaaaatcccgctaataaagaagattctaaaagcgcgatattagagcgtttgaaacgtttaagagagtattccaaagaccatttaaaagcctttcaaaggcttcaagtccaggattttgacgggcgtatcaaaccccttgataccatcagcattgaatacatccataagattttaaggaaagatgattttcaagggctaaacgccatgcaagtgcttttagggatcatgtttttccctaacgattggcgcagtattaagatgatttacacttccaataaatccttaataaatcctatttgcactcctttatac

SEQ ID NO: 902 - DNA (genomic), 483 bp, Helicobacter pylori; double-stranded, circular
  misc_feature (B) LOCATION 1...483
  hypothetical: NO
  anti-sense: NO
atggcttttgggcttgtgttttgtgctagggatttaagtttggttttgtttattttgcgcaaacaagggcgtttcaatttagacaaaaccattctttccattagcgctatcaatgaaatgagcatgattttaggcctgttcatgctcacagccgggaatttcttaggtggggtgtgggcgaatgaatcttgggggcgctattgggggtgggaccctaaagaaacttgggcgttgatttctatttgcgtctatgccttgatcttgcatttgcgttttttaggctctcaaaattggccctttattttagcgagcagcagcgtgctagggttttattcggttttaatgacttattttggcgtgaattactacctttctggcttgcacagctatgccgcaggtgatcctttgccgatccctacttttttatactttttggtagcgatacctttcgctctcgtatcttggcgtatttcaaacgccatt

SEQ ID NO: 903 - DNA (genomic), 681 bp, Helicobacter pylori; double-stranded, circular
  misc_feature (B) LOCATION 1...681
  hypothetical: NO
  anti-sense: NO
tccaaacgattaaaacccattcatgccactttagatcacaagcctttcctcttagaacctttagagatttacaagcaaaacgccattaaaaaagatgacgccaccattttagtgttgaaagcgacttataacggcgtgactaaattcaacctcattaaaaccaacaggaatgaaggcatagaagagagcgagatgtttaaagacgataagctctctttaagttttggatccgcttacattgaattgccctttcaaatcaaactgaagcgttttgaattagaacgctacgccggctctatgagcccttcatcttacgcttcagaagtggaagttttgaaattggataacactttaatcaaaccttataggattttcatgaaccatgttttagattatgaaggttatcgctttttccaatcttcctatgatacggatgaaaaaggcacgatcctttctgtcaataaagatccgggtaaaatccccacttatttagggtatgcgatgcttattttgggggctttgtggttgcttttggataaaaaggggcgttttttaaagctttcacgctttttaaaatcccaacaagccgctagtttcttattcgctttaattctagttagcccctttacttcctcgttcgccaatgaaggccaaattgacattgcatgggggcaaaagcgc

SEQ ID NO: 904 - DNA (genomic), 678 bp, Helicobacter pylori; double-stranded, circular
  misc_feature (B) LOCATION 1...678
  hypothetical: NO
  anti-sense: NO
aaacgattaaaacccattcatgccactttagatcacaagcctttcctcttagaacctttagagatttacaagcaaaacgccattaaaaaagatgacgccaccattttagtgttgaaagcgacttataacggcgtgactaaattcaacctcattaaaaccaacaggaatgaaggcatagaagagagcgagatgtttaaagacgataagctctctttaagttttggatccgcttacattgaattgccctttcaaatcaaactgaagcgttttgaattagaacgctacgccggctctatgagcccttcatcttacgcttcagaagtggaagttttgaaattggataacactttaatcaaaccttataggattttcatgaaccatgttttagattatgaaggttatcgctttttccaatcttcctatgatacggatgaaaaaggcacgatcctttctgtcaataaagatccgggtaaaatccccacttatttagggtatgcgatgcttattttgggggctttgtggttgcttttggataaaaaggggcgttttttaaagctttcacgctttttaaaatcccaacaagccgctagtttcttattcgctttaattctagttagcccctttacttcctcgttcgccaatgaaggccaaattgacattgcatgggggcaaaagcgc

SEQ ID NO: 905 - DNA (genomic), 2811 bp, Helicobacter pylori; double-stranded, circular
  misc_feature (B) LOCATION 1...2811
  hypothetical: NO
  anti-sense: NO
atgaaaaaccttaagagcttgctctcttttttgttcgcttctttttgggttgctatccctttaatcgcactctacgcttgcacatgcgcgatagccacttttatagaaaacgattacggcacgagcgcgagtaaggcgatcgtgtataacaccccttggtttaatttcttgcatgcgtatttattggtggttttaataggcacattcatcaattctaaagctttagagcgcaaaaggtatgcgagccttttcttccacagctccttgattttcatcattttaggggcagcgatcacgcgcttttttggagtggaagggcttatgcatgtgcgagaaaatagcgcgcaaagctcttttgaaagcgcggacacttaccttaatatcaccctaaatgacgaaaaaaaactttctttaaaaacgcctttaaccttttattactccaaacgattaaaacccattcatgccactttagatcacaagcctttgctcttagaacctttagagatttacaagcaaaacgccattaaaaaagatgacgccaccattttagtgttgaaagcgacttataacggcgtgagccgcaaattcaacctcattaaaaccaacaggaatgaaggcatagaagagagcgagatgtttaaagacgataagctctctttaagttttggatccgcttacattgaattgccctttcaaatcaaactgaagcgttttgaattagaacgctacgccggctctatgagcccttcatcttacgcttcagaagtggaagttttgaaattggataacactttaatcaaaccttataggattttcatgaaccatgttttagattatgaaggttatcgctttttccaatcttcctatgatacggatgaaaaaggcacgatcctttctgtcaataaagatccgggtaaaatccccacttatttagggtatgcgatgcttattttgggggctttgtggttgcttttggataaaaaggggcgttttttaaagctttcacgctttttaaaatcccaacaagccgctagtttcttattcgctttaattctagttagcccctttacttcctcgttcgccaatgaaggccaaattgacatgcatgggggcaaaagcgctaaaatagaacgacaaaagatagaaaatcccgctaataaagaagattctaaaagcgcgatattagagcgtttgaaacgtttaagagagtattccaaagaccatttaaaagcctttcaaaggcttcaagtccaggattttgacgggcgtatcaaaccccttgataccatcagcattgaatacatccataagattttaaggaaagatgattttcaagggctaaacgccatgcaagtgcttttagggatcatgtttttccctaacgattggcgcagtattaagatgatttacacttccaataaagccttaagaaagcttattggcacgcctttagacgaaagccgtatcgcttttagagatgcgtttgatagccgtgggtataaattaaaaaatttggttgaagaagtcaatcaaaaatcccccaatgcgcgcaacgagttggataaagacgcgctaaaagtagatgaacgcatcaacttagtctatacgctttttagcgctcaatttttacgcattttccctagcgataaaaccaccgcttggctctcgcccattgaagcgatcaacagccccaataaagaaatttcaagtgtggcaacggagtttttaaaaaatatttttagcggatttgatgacgctttaaaaaccaatcaatgggataaagtagaaaaaaccctaaaagatttaagcacctatcagcaagagcatgccaaaaacctctatttatcttcttctaaagtggattctgaaatttttttaaaccacaccaatttttttaacagcctgaccttgccttatatctttcttgggttgttgctttttatcgttgtgatcacctctttggttaaaaacacgattccaaatatttggctcactaaaatcctttatatggctatcttgctttgcgcgatcgctcattctgtggggctaatcttgcgctggtatgtgagtgggcattcgccttggagtaacgcttatgagtccatgctctatatcgcatgggcttctgttatcgcagggtttgttttacgatccaaactcgcgctatcggcttctagctttttggccggtatcgcgctctttgtggctcatttaggctttatggaccctcaaattggccctttagtgccggtgttaaaatcctattggctcaatatccatgtctctgtcatcaccgctagttatggctttttgggcttgtgttttgtgctagggattttaagtttggttttgtttattttgcgcaaacaagggcgtttcaatttagacaaaaccattctttccattagcgctatcaatgaaatgagcatgattttaggcctgttcatgctcacagccgggaatttcttaggtggggtgtgggcgaatgaatcttgggggcgctattgggggtgggaccctaaagaaacttgggcgttgatttctatttgcgtctatgccttgatcttgcatttgcgttttttaggctctcaaaattggccctttattttagcgagcagcagcgtgctagggttttattcggttttaatgacttattttggcgtgaattactacctttctggcttgcacagctatgccgcaggcgatcctttgccgatccctacttttttatactttttggtagcgatacctttcgctctcgtgatcttggcgtatttcaaacgccatttgagtttgcctaaattggtttaa

SEQ ID NO: 906 - DNA (genomic), 438 bp, Helicobacter pylori; double-stranded, circular
  misc_feature (B) LOCATION 1...438
  hypothetical: NO
  anti-sense: NO
gaacaagaagagcaggatttatggttttcaaggcgtaacgcttctcaaagtattagcgtttatggtaaaaagaaattgaatgaagatgtgaccgttcctagggcgagcttgccgagtttgttgcaagaagtcgccaaaatcagtcagaaatacggctttaaaatccctcgctttgggcatacgggcgatggcaatgtgcatgtgaatatcatgctagaagatcctaaaagggatttagaaaaaggccataaggctatggaagagatttttcaggccgctattagtttggaggggactttaagcggggagcatggtataggcttgtctaaagccaaattcatgcctttagcgtttaatcatagtgaaatggagctttttaggaacattaaaaaagcccttgatcctggtaatgttttaaacccttttaaaatggggcta

SEQ ID NO: 907 - DNA (genomic), 1119 bp, Helicobacter pylori; double-stranded, circular
  misc_feature (B) LOCATION 1...1119
  hypothetical: NO
  anti-sense: NO
atgttagagaagcaacacatccaatactttaaaaacctagtagggggagaggattttttcaccgatttagcgcatttgaacgcttattgttatgacgctactaaagaaaggcatttgcctagcggcgtgattttccctaaaaatgagcgagaaatcagccagattttaaaatactgcaacgagcaccgccttatcgttgtgcctaggggggctgggagcggttttacagggggggcgttgagcgtgagtggggggctagttttgagcgtacaaaagcatttggataagattttagagattgacactaaaaatttgatcgctagagtagaaccgggcgtgattaacaagcatttccaaaacgaagtggaaaaattggatttattctaccccccagacccagcgagcgagaatcaaagcactttaggggggaatgtcgctgaaaatgccggtggcatgcgcgcggctaaatacggcatcactaaagattatgtcatggctttaagggtggttttagcgaatggcgaaatcataagggcaggcaaaaagacgatcaaagatgtcgccggctttaatatcgcagggctgatgatcgctagtgaggggtgtttgggcgtgatttctgaaatcactttaaagcttttagccaaaccgcccctaaaacaaagcgcgatgggggtttttaaccatattgaagacgccatgaacgccgtttataagacgatgagcagcggcgttacgcctgtggcgatggaatttttggataatttgagtattaaagcggttgaagagcgattttctaaaggcttacccaaagacgctggagcgatacttatcactcaagtggatggcgtggtgaaagaacagatcgcatggcaactcaatgaaatagaaaagcattttaaagccaatggttgcgtgggttttaaaatcgctcaaaacgaacaagaagagcaggatttatggttttcaaggcgtaacgcttctcaaagtattagcgtttatggtaaaaagaaattgaatgaagatgtgaccgttcctacggcgagcttgccgagtttgttgcaaaaagtcgccaaaatcagtcagaaatacggctttaaaatcccttgctttgggcat

SEQ ID NO: 908 - DNA (genomic), 549 bp, Helicobacter pylori; double-stranded, circular
  misc_feature (B) LOCATION 1...549
  hypothetical: NO
  anti-sense: NO
atgcagtttgaagaaatgaaagaattagcccatcaaattggcgtgttttaccatgttggcgttgatggcatcgcgctctttttgttgctcttaaacgctatcgtggtgttattgtccgtggtttatgtcaaagagcgtcgtaaagactttgtgatttgtcttttattgttagamgggatcttaatgggcgtgttttcttctcttaatgtgatctttttctacgctttttgggaaatctcgctcttgccggttttatacctcatcggtcgttttggccgtaataacaaaatctattctggcatgaagtttttcctctacacctttttagcgtcgttgtgcatgcttttaggcattttatacatcgggtatgactacgccaataattacggcatgatgagttttgatattttagactggtatcagttgaatttttctagcgggattaaaacctggctctttgtagctttcttaatagggattgcggttaaaatcccgctctttcccttcacacatggctgccttatgcgtattctaacgcccccactctag

SEQ ID NO: 909 - DNA (genomic), 699 bp, Helicobacter pylori; double-stranded, circular
  misc_feature (B) LOCATION 1...699
  hypothetical: NO
  anti-sense: NO
atgctttcagccttgctttctaaaatggggacttacgccttattacgcttcttgctcccgctttttcctgaactttcagaaatttatttaacccccatagccattgtggcgctgtgcatgatcatttatggaggttttctagcctacgctcaaaaagatttaaaaaccctcatcgcttatagctctttctcgcacatgggagtcgtggtgcttggggttttttctttcaatgttgaaggggtttcaggggcggtgtttatgatgtttgcgcatggcgttatcgtcatgggattatttttactcgctggtatcttggaagaacgcgccagcagtttagaaatcgctcgctttggatcgatcgctaaaagcgctcctgtttttgcagccttttttatgatcgttttaatggcgaatgtgggcatgcctttaagcattggttttgtgggagagtttttgarcttgttagggttttttgccacttaccctcttttggctatcattgccgggacaagcctcattctatcagcggtttacatrctcacttcatataaagatgtgttctttggcaacttaaaaaccgggaacaaccaaatcagcgtgtttgaagatttaaacgctcgtgaggtaggggttttaagcgtgattttagcctttgatcttaattttagggatttatycyaaagcgcttttaaaaccgat

SEQ ID NO: 910 - DNA (genomic), 726 bp, Helicobacter pylori; double-stranded, circular
  misc_feature (B) LOCATION 1...726
  hypothetical: NO
  anti-sense: NO
gaaatgcagtttttacatgcgcatcttttaagcgtggtgatctttttccccatgctgagcgctctattagcgttctttatgagcgatcaagcgagcagggcgtatgcgatcgtcatcgccttgattgaattgttattggtcttgttgttatggcatgggtttgatattcaaaccgcaggcatgcagtttgaagaaatgaaagaattagcctatcaaattggcgtgaattaccatgttggcgttgatggcatcgcgctctttttgttgctcttaaacgctatcgtggtgttattgtccgtgatttatgtcaaagagcgtcgtaaagactttgtgatttgtcttttattgttagaagggatcttaatgggcgtgttttcttctcttaatgtgatctttttctacgctttttgggaaatctcgctcttgccggttttatacctcatcggtcgttttggccgtaataacaaaatctattctggcatgaagtttttcctctacacctttttagcgtcgttgtgcatgcttttaggcattttatacatcgggtatgactacgccaataattacggcatgatgagttttgatattttagactggtatcagttgaatttttctagcgggattaaaacctggctctttgtagctttcttaatagggattgcggttaaaatcccgctctttcccttcacacatggctgccttatgcgtattctaacgcccccactc

SEQ ID NO: 911 - DNA (genomic), 888 bp, Helicobacter pylori; double-stranded, circular
  misc_feature (B) LOCATION 1...888
  hypothetical: NO
  anti-sense: NO
aatcccgctctttcccttcacacatggctgccttatgcgtattctaacgcccccactctaggctctgtcatgctttcagccttgctttctaaaatggggacttacgccttattacgcttcttgctcccgctttttcctgaactttcagaaatttatttaacccccatagccattgtggcgctgtgcatgatcatttatggaggttttctagcctacgctcaaaaagatttaaaaaccctcatcgcttatagctctttctcgcacatgggagtcgtggtgcttggggttttttctttcaatgttgaaggggtttcaggggcggtgtttatgatgtttgcgcatggcgttatcgtcatgggattatttttactcgctggtatcttggaagaacgcgccagcagtttagaaatcgctcgctttggatcgatcgctaaaagcgctcctgtttttgcagccttttttatgatcgttttaatggcgaatgtgggcatgcctttaagcattggttttgtgggagagtttttgagcttgttagggttttttgccacttaccctcttttggctatcattgccgggacaagcatcattctatcagcggtttacatgctcacttcatataaagatgtgttctttggcaacttaaaaaccgggaacaaccaaatcagcgtgtttgaagatttaaacgctcgtgaggtaggggttttaagcgtgattttagctttgatcttaattttagggatttatcctaaagcgcttttaaaaccgattgagcaaggctttaagcagcttttagaggtgatagaaatccgctcgctcctttttttaggttcattggacactaagataaaagaggtctcttatgttaatagatattctccacatctcttt

SEQ ID NO: 912 - DNA (genomic), 1539 bp, Helicobacter pylori; double-stranded, circular
  misc_feature (B) LOCATION 1...1539
  hypothetical: NO
  anti-sense: NO
atgcagtttttacatgcgcatcttttaagcgtggtgatctttttccccatgctgagcgctctattagcgttctttatgagcgatcaagcgagcagggcgtatgcgatcgtcatcgccttgattgaattgttattggtcttgttgttatggcatgggtttgatattcaaaccgcaggcatgcagtttgaagaaatgaaagaattagcctatcaaattggcgtgaattaccatgttggcgttgatggcatcgcgctctttttgttgctcttaaacgctatcgtggtgttattgtccgtgatttatgtcaaagagcgtcgtaaagactttgtgatttgtcttttattgttagaagggatcttaatgggcgtgttttcttctcttaatgtgatctttttctacgctttttgggaaatctcgctcttgccggttttatacctcatcggtcgttttggccgtaataacaaaatctattctggcatgaagtttttcctctacacctttttagcgtcgttgtgcatgcttttaggcattttatacatcgggtatgactacgccaataattacggcatgatgagttttgatattttagactggtatcagttgaatttttctagcgggattaaaacctggctctttgtagctttcttaatagggattgcggttaaaatcccgctctttcccttacacacatggctgccttatgcgtattctaacgcccccactctaggctctgtcatgctttcagccttgctttctaaaatggggacttacgccttattacgcttcttgctcccgctttttcctgaactttcagaaatttatttaacccccatagccattgtggcgctgtgcatgatcatttatggaggttttctagcctacgctcaaaaagatttaaaaaccctcatcgcttatagctctttctcgcacatgggagtcgtggtgcttggggttttttctttcaatgttgaaggggtttcaggggcggtgtttatgatgtttgcgcatggcgttatcgtcatgggattatttttactcgctggtatcttggaagaacgcgccagcagtttagaaatcgctcgctttggatcgatcgctaaaagcgctcctgtttttgcagccttttttatgatcgttttaatggcgaatgtgggcatgcctttaagcattggttttgtgggagagtttttgagcttgttagggttttttgccacttaccctcttttggctatcattgccgggacaagcatcattctatcagcggtttacatgctcacttcatataaagatgtgttctttggcaacttaaaaaccgggaacaaccaaatcagcgtgtttgaagatttaaacgctcgtgaggtaggggttttaagcgtgattttagctttgatcttaattttagggatttatcctaaagcgcttttaaaaccgattgagcaaggctctaagcagcttttagaggtgatagaaatccgctcgctcccttttttaggttcattggacactaagataaaagaggtctcttatgttaatagatag

SEQ ID NO: 913 - DNA (genomic), 186 bp, Helicobacter pylori; double-stranded, circular
  misc_feature (B) LOCATION 1...186
  hypothetical: NO
  anti-sense: NO
tgcaacaagccgcagaacattgaatcaccctattttggcgtttttgttttgttggtattcaccttttgggtgtttaaattaaccttaaggattcaaaggtttttaagccgtaaaatggctcaaaaaaagggcgaaaagctcaaagctcagctccctatgaatgtggcctgtggctctcaagcagcc

SEQ ID NO: 914 - DNA (genomic), 237 bp, Helicobacter pylori; double-stranded, circular
  misc_feature (B) LOCATION 1...237
  hypothetical: NO
  anti-sense: NO
atgtggcctgtggctctcaagcagcctaatagggtgtcccatcatttttatatcatggccatgctttttattttatttgatgtagaaatcgttttcatgttcccttgggcgattgattttaaaaagttaggcttgtttgggctcgttgaaatgctaggctttgtcttctttttggcaatcggttttatttacgctttaaagcgaaacgctttgagctggcaaaaattagaggtgaaa

SEQ ID NO: 915 - DNA (genomic), 240 bp, Helicobacter pylori; double-stranded, circular
  misc_feature (B) LOCATION 1...240
  hypothetical: NO
  anti-sense: NO
atgtggcctgtggctctcaagcagcctaatagggtgtcccatcatttttatatcatggccatgctttttattttatttgatgtagaaatcgttttcatgttcccttgggcgattgattttaaaaagttaggcttgtttgggctcgttgaaatgctaggctttgtcttctttttggcaatcggttttatttacgctttaaagcgaaacgctttgagctggcaaaaattagaggtgaaataa

SEQ ID NO: 916 - DNA (genomic), 408 bp, Helicobacter pylori; double-stranded, circular
  misc_feature (B) LOCATION 1...408
  hypothetical: NO
  anti-sense: NO
gagcctgatgcaacaagccgcagaacattgaatcacccctattttggcgtttttgttttgttggtattcaccttttgggtgtttaacttaaccttaaggattcaaaggtttttaagccgtaaaatggctcaaaaaaagggcgaaaagctcaagctcgctccctatgaatgtgggcctgtggctctcaagcagcctaatagggtgtcccatcatttttatatcatggccatgctttttattttatttgatgtagaaatcgttttcatgttcccttgggcgattgattttaaaaagttaggcttgtttgggctcgttgaaatgctaggctttgtcttctttttggcaatcggttttatttacgctttaaagcgaaacgctttgagctggcaaaaattagaggtgaaataa

SEQ ID NO: 917 - DNA (genomic), 981 bp, Helicobacter pylori; double-stranded, circular
  misc_feature (B) LOCATION 1...981
  hypothetical: NO
  anti-sense: NO
gtgttaatggcgttgarcgataaacgctacggcttagaagcagggatcaagtatttcaccatgggggcgatggcgagcgcgttttttgctatgggcgcgatggctttttacctgcttacagggagcttgaatcttgaagtcattaccctatacttacacactgagggcatcacaaaccccatgctctttgcgatgggcactatttttttgattggagcgattggctttaaggtttctttagtgcctttccatacctggatgcctgatgtgtatgagggyaataacccagtctttgcgagctatatttccattgtgcctaaaatcgctggctttgtggtagcgactcgcctttttggggcgtttatagacactcataccgcttgggtagaagacattttttatgttttgatccttatgactatcaccatccctaatttcattgctttatggcaagaagatgtcaaaaggatgctcgcttatagttctatttcgcattctgggttcgctttagcgtgcgtgtttatccacactgaagatagccaacaagcgatgtttgtttattggttcatgtttgccttcacttacattggggcttttggccttttatggctcttaaaaagccgggaaaaaacatgggatgaacgctacgatcacccctattctaaattcaacggccttatcaaaacccaccccttagtggcgatcttgggcgctatttttgtttttgggcttgcagggatcccgccttttagcgtgttttgggggaaatttttagccgttgaaagcgcgttagagagcaatcacattcttttagcggtggtgatgttagttaatagcgcggtggctgcgttttattatttccgttggctcgtggcgatgtttttcaataagcccttacaaacccaaagctacgccaaaacgatatttacacccaaaacgccaccatgcccatttatgcggtcattattgccatggcgttag

SEQ ID NO: 918 - DNA (genomic), 1479 bp, Helicobacter pylori; double-stranded, circular
  misc_feature (B) LOCATION 1...1479
  hypothetical: NO
  anti-sense: NO
atgttaatagatagtctccacatctcttttgatagctttagttttgagagcattttacccatgctggtgttggtgtgtggggggattttcacgctcttaatcaacgctttcacttccaggttttcgcgcaatttgaatgtgtttttatgcatgctctttttggttttggattttttagtggttttagggttagaagagcaagaaaacgccttttttgggtttttaagcctagatactctctcgctcatctctcaaagcattgtcttgatttcagctttttttctcattttcttagccctttcaaaagaacgcttcaacgaatttcaaaccgctgaattttattccctatacttgtttattgtcgctggctttcagttcatggtttcaagcaaccatttgttgttaatccttattgggttagaaacagcgtccttgcccctttgtgtgttaatggcgttgagcgataaacgctacggcttagaagcagggatcaagtatttcaccatgggggcgatggcgagcgcgttttttgctatgggcgcgatggctttttacctgcttacagggagcttgaatcttgaagtcattaccctatacttacacactgagggcatcacaaaccccatgctctttgcgatgggcactatttttttgattggagcgattggctttaaggtttctttagtgcctttccatacctggatgcctgatgtgtatgagggcaataacccagtctttgcgagctatatttccattgtgcctaaaatcgctggctttgtggtagcgactcgcctttttggggcgtttatagacactcataccgcttgggtagaagacattttttatgttttgatccttatgactatcaccatccctaatttcattgctttatggcaagaagatgtcaaaaggatgctcgcttatagttctatttcgcattctgggttcgctttagcgtgcgtgtttatccacactgaagatagccaacaagcgatgtttgtttattggttcatgtttgccttcacttacattggggcttttggccttttatggctcttaaaaagccgggaaaaaacatgggatgaacgctacgatcacccctattctaaattcaacggccttatcaaaacccaccccttagtggcgatcttgggcgctatttttgtttttgggcttgcagggatcccgccttttagcgtgttttgggggaaatttttagccgttgaaagcgcgttagagagcaatcacattcttttagcggtggtgatgttagttaatagcgcggtggctgcgttttattatttccgttggctcgtggcgatgtttttcaataagcccttacaaacccaaagctacgctcaaaacgatatttacacccaaaacgccaccatgcccatttatgcggtcattattgccatggcgttagcgtgcttgttctctgtgtttatgatgcgagggcttttagagtttgtggcttaa

SEQ ID NO: 919 - DNA (genomic), 1488 bp, Helicobacter pylori; double-stranded, circular
  misc_feature (B) LOCATION 1...1488
  hypothetical: NO
  anti-sense: NO
aagaggtctcttatgttaatagatattctccacatctcttttgatagctttagttttgagagcattttacccatgctggtgttggtgtgtggggggattttcacgctcttaatcaacgctttcacttccaggttttcgcgcaatttgaatgtgtttttatgcatgctctttttggttttggattttttagtggtttcagggttagaagagcaagaaaacgccttttttgggtttttaagcctagatactctctcgctcatctctcaaagcattgtcttgatttcagctttttttctcattttcttagccctttcaaaagaacgcttcaacgaatttcaaaccgctgaattttattccctatacttgtttattgtcgctggctttcagttcatggtttcaagcaaccagtttgttgtaatccttattgggttagaaacagcgcctttgcccctttgtgtgttaatggcgttgagcgataaacgctacggcttagaagcagggatcaagtatttcaccatgggggcgatggcgagcgcgttttttgctatgggcgcgatggctttttacctgcttacagggagcttgaatcttgaagtcattaccctatacttacacactgagggcatcacaaaccccatgctctttgcgatgggcactatttttttgattggagcgattggctttaaggtttctttagtgcctttccatacctggatgcctgatgtgtatgagggcaataacccagtctttgcgagctatatttccattgtgcctaaaatcgctggctttgtggtagcgactcgcctttttggggcgtttatagacactcataccgcttgggtagaagacattttttatgttttgatccttatgactatcaccatccctaatttcattgctttatggcaagaagatgtcaaaaggatgctcgcttatagttctatttcgcattctgggttcgctttagcgtgcgtgtttatccacactgaagatagccaacaagcgatgtttgtttattggttcatgtttgccttcacttacattggggcttttggccttttatggctcttaaaaagccgggaaaaaacatgggatgaacgctacgatcacccctattctaaattcaacggccttatcaaaacccaccccttagtggcgatcttgggcgctatttttgtttttgggcttgcagggatcccgccttttagcgtgttttgggggaaatttttagccgttgaaagcgcgttagagagcaatcacattcttttagcggtggtgatgttagttaatagcgcggtggctgcgttttattatttccgttggctcgtggcgatgtttttcaataagcccttacaaacccaaagctacgctcaaaacgatatttacacccaaaacgccaccatgcccatttatgcggtcattattgccatggcgttagcgtgcttgttctctgtgtttatgatgcgagggcttttagagtttgtggct

SEQ ID NO: 920 - DNA (genomic), 210 bp, Helicobacter pylori; double-stranded, circular
  misc_feature (B) LOCATION 1...210
  hypothetical: NO
  anti-sense: NO
caaatactctttaattggctccgcagagcgacgatccaactgctcagctttgaagtggtcagcactttaaccattctagctcccttaatggtggtaggatcgctctctttggtggaaatcaatcattaccaaagcggtgggtttttagactggcttgtgtttaagcagcctctagcgtttgttttatttttgatcgcaagctacgcgaat

SEQ ID NO: 921 - DNA (genomic), 270 bp, Helicobacter pylori; double-stranded, circular
  misc_feature (B) LOCATION 1...270
  hypothetical: NO
  anti-sense: NO
gttcattttcacgctaactccattattgcgatggggagcgcgtttgtgtccatggcgcccatcccctttttccctaatttcactctgtttggctatgaaatcaagccccttatttctgacatcaacattggctttttgtttttcttagccgtgggttcagcagggatttatgcgcctattttagccgggcttgcctctaataacaaatactctttaattggctccgcagagcgacgatccaactgctcagctttgaagtggtcagcactt

SEQ ID NO: 922 - DNA (genomic), 990 bp, Helicobacter pylori; double-stranded, circular
  misc_feature (B) LOCATION 1...990
  hypothetical: NO
  anti-sense: NO
atgagcgcttatatcattgaaaccttgattaaaattttgattttagtcgccgtattttcggctttaggaggctttgccacttatattgaaaggaaagtgttagcctatttccaacgccgtttagggccttgttatgtggggccttttgggcttttgcaagtcgcagcagacggcattaagcttttcaccaaagaagacattatcccccaaggcgcgaataagttcattttcacgctagcgcccattattgcgatggtgagcgcgtttgtgtccatggcgcccatcccctttttccctaatttcactctgtttggctatgaaatcaagccccttatttctgacatcaacattggctttttgtttttcttagccgtgggttcagcagggatttatgcgcctattttagccgggcttgcctctaataacaaatactctttaattggctccgcgagagcgacgatccaactgctcagctttgaagtggtcagcactttaaccattctagctcccttaatggtggtaggatcgctctctttggtggaaatcaatcattaccaaagcggtgggtttttagactggcttgtgtttaagcagcctctagcgtttgttttatttttgatcgcaagctacgctgaattgaatcgaaccccctttgacttgttagagcatgaagccgagatcgtggcggggtattgcactgaatacagcggcttgaaatggggcatgttctttttagcggaatacgcgcatttattcgctttttcttttgtgatttctattgtgttttttggcgggtttaacgcatggggctttatccctgggggcatagcgattttaatcaaagcgggcttttttgtctttttatccatgtgggttagagcgacttatccgcatgtaagacccgatcaattgatgaacatgtgctggaaaatcatgctgcctttagcgttattgaatatcgtgctaacgggcattgttattttaatttaa

SEQ ID NO: 923 - DNA (genomic), 624 bp, Helicobacter pylori; double-stranded, circular
  misc_feature (B) LOCATION 1...624
  hypothetical: NO
  anti-sense: NO
atgtccaagaaccttcaaaagaagaatccaaagaagagtctccaacaagcccagaaagccataagggagatgaaaatgtttgaaaccattgccttttatttctttgcgatccttactttaagcatggcgttagtggtgatcacaaccacaaatatcctctatgccattaccgctctcgctagtagcatggtttttatttctgcttttttctttttactggacgctgagtttttgggcgtggtgcaaatcacggtgtatgtgggtgcggtcattgtgatgtatgcgtttggcatgatgtttttcaactccgctgcagaagtagttgaacgcaagcaaagccctaaaatcttgtgcgttctttcatttggcgtggcgctgttgctcaccttgattttaagcgctcctagcattggcgaaaacctttctaagcaagtcaattccaacgctattgatgcgcaaatccctaacattaaagcgattggttatgtgcttttcaccaattacctcattccctttgaagcggcggctttaatgcttttagtcgctatggttggaggcatcgctacagggattcaaaaaatccatgggaaaaatcacacgcaatttataaaggaatctctatga

SEQ ID NO: 924 - DNA (genomic), 621 bp, Helicobacter pylori; double-stranded, circular
  misc_feature (B) LOCATION 1...621
  hypothetical: NO
  anti-sense: NO
atgtccaagaaccttcaaaagaagaatccaaagaagagtttyccacaagcccagaaagccataagggagatgaaaatgtttgaaaccattgcyttttatttctttgcgatccttactttaagcatggcgttagtggtgatcacaaccacaaatatcctctatgccattaccgctctcgctagtagcatggtttttatttctgcttttttctttttactggacgctgagtttttgggcgtggtgcaaatcacggtgtatgtgggtgcggtcattgtgatgtatgcgtttggcatgatgtttttcaactccgctgcagaagtagttgaacgcaagcaaagccctaaaatcttgtgcgttctttcatttggcgtggcgctgttgctcaccttgattttaagcgctcctagcattgssgaaaacctttctaagcaagtcaattccaacgctattgatgcgcaaatyccyaacattaaagcgattggttatgtgcttttcaccaattacctcattccctttgaagcggcggctttaatgcttttagtcgctatggttggaggcatcgctacagggattcaaaaaatccatgggaaaaatcacacgcaatttataaaggaatctcta

SEQ ID NO: 925 - DNA (genomic), 624 bp, Helicobacter pylori; double-stranded, circular
  misc_feature (B) LOCATION 1...624
  hypothetical: NO
  anti-sense: NO
attatgtccaagaaccttcaaaagaagaatccaaagaagagtctccaacaagcccagaaagccataagggagatgaaaatgtttgaaaccattgccttttatttctttgcgatccttactttaagcatggcgttagtggtgatcacaaccacaaatatcctctatgccattaccgctctcgctagtagcatggtttttatttctgcttttttctttttactggacgctgagtttttgggcgtggtgcaaatcacggtgtatgtgggtgcggtcattgtgatgtatgcgtttggcatgatgtttttcaactccgctgcagaagtagttgaacgcaagcaaagccctaaaatcttgtgcgttctttcatttggcgtggcgctgttgctcaccttgattttaagcgctcctagcattggcgaaaacctttctaagcaagtcaattccaacgctattgatgcgcaaatccctaacattaaagcgattggttatgtgcttttcaccaattacctcattccctttgaagcggcggctttaatgcttttagtcgctatggttggaggcatcgctacagggattcaaaaaatccatgggaaaaatcacacgcaatttataaaggaatctcta

SEQ ID NO: 926 - DNA (genomic), 177 bp, Helicobacter pylori; double-stranded, circular
  misc_feature (B) LOCATION 1...177
  hypothetical: NO
  anti-sense: NO
agggaattagggttttttatccattcagagggcgagccataccctcatagattaaaaatcagagcccctagcttttatcacatcggggctttgagcgatattttagtggggcaatatttagcggatgcggtaaccgtgattggctcaaccaatgcggtgtttggcgaggtggataga

SEQ ID NO: 927 - DNA (genomic), 309 bp, Helicobacter pylori; double-stranded, circular
  misc_feature (B) LOCATION 1...309
  hypothetical: NO
  anti-sense: NO
aaaagaggctgtaaaatggctcaaaatttcacgaaactcaacccccagtttgaaaacatcatttttgaacatgacgataaccaaatgattttaaactttggcccccaacaccccagtagccatgggcaattgcgcttgattttggaattggagggcgaaaaaatcattaaggctacccctgaaattggctacttgcatagaggctgtgaaaagttaggcgaaaacatgacctataacgaatacatgcccactactgacaggttggattacacttcttctactagtaataattacgcttacgctatgcgg

SEQ ID NO: 928 - DNA (genomic), 819 bp, Helicobacter pylori; double-stranded, circular
  misc_feature (B) LOCATION 1...819
  hypothetical: NO
  anti-sense: NO
ttacgcttacgctatgcggtagagaccttgctcaatttagaaatcccgcgccgagcagcagtgatccgcacgattttactagagcttaaccgcatgatttcacacatcttttttatcagcgtgcatgctttagatgtgggggcgatgagcgtgtttttgtatgcgtttaaaacgagggaatacgggttggatttgatggaggattattgcggggctaggctcacgcataacgctataaggattgggggcgtgcctttagatttacccccgaattggttagagggcttgaaaaagtttttaggcgaaatgagggaatgcaaaaaactcattcaaggcttattggacaagaatcgcatttggcggatgcgtttggaaaatgtgggcgttgtaacgccaaaaatggcgcaaagttggggcatgagcggtatcatgttaagagggactgggatcgcttatgacattagaaaagaagagccttatgagctttataaagagcttgattttgacgtgccggtgggcaattatggcgatagttatgatcggtattgcttgtatatgctagaaattgatgaaagcattcgcatcattgagcaactcattcccatgtatgctaaaaccgatacgcccatcatggctcaaaacccgcattacatttccgccccaaaagaagatataatgacgcaaaactacgccttgatgcagcattttgttttagtggctcaaggcatgcgtccgcccgttgggaagtgtatgcccccacagaaagccctaaagggaattagggttttttatccattcagagggcgagccataccctca

SEQ ID NO: 929 - DNA (genomic), 1230 bp, Helicobacter pylori; double-stranded, circular
  misc_feature (B) LOCATION 1...1230
  hypothetical: NO
  anti-sense: NO
atggctcaaaatttcacgaaactcaacccccagtttgaaaacatcatttttgaacatgacgataaccaaatgattttaaactttggcccccaacaccccagtagccatgggcaattgcgcttgattttggaattggagggcgaaaaaatcattaaggctacccctgaaattggctacttgcatagaggctgtgaaaagttaggcgaaaacatgacctataacgaatacatgcccactactgacaggttggattacacttcttctactagtaataattacgcttacgcttatgcggtagagaccttgctcaatttagaaatcccgcgccgagcgcaagtgatccgcacgattttactagagcttaaccgcatgatttcacacatcttttttatcagcgtgcatgctttagatgtgggggcgatgagcgtgtttttgtatgcgtttaaaacgagggaatacgggttggatttgatggaggattattgcggggctaggctcacgcataacgctataaggattgggggcgtgcctttagatttacccccgaattggttagagggcttgaaaaagtttttaggcgaaatgagggaatgcaaaaaactcattcaaggcttattggacaagaatcgcatttggcggatgcgtttggaaaatgtgggcgttgtaacgccaaaaatggcgcaaagttggggcatgagcggtatcatgttaagagggactgggatcgcttatgacattagaaaagaagagccttatgagctttataaagagcttgattttgacgtgccggtgggcaattatggcgatagttatgatcggtattgcttgtatatgctagaaattgatgaaagcattcgcatcattgagcaactcattcccatgtatgctaaaaccgatacgcccatcatggctcaaaacccgcattacatttccgccccaaaagaagatataatgacgcaaaactacgccttgatgcagcattttgttttagtggctcaaggcatgcgtccgcccgttggggaagtgtatgcccccacagaaagccctaaaggggaattagggttttttatccattcagagggcgagccataccctcatagattaaaaatcagagcccctagcttttatcacatcggggctttgagcgatattttagtggggcaatatttagcggatgcggtaaccgtgattggctcaaccaatgcggtgtttggcgaggtggatagatga

SEQ ID NO: 930 - DNA (genomic), 285 bp, Helicobacter pylori; double-stranded, circular
  misc_feature (B) LOCATION 1...285
  hypothetical: NO
  anti-sense: NO
actcccaaaagaggggcacttttcatacaaactcttactcaacctaatactatatcccgcaactctatcaagggattgacagaagtttttagcgctgtcgcttcattcttgcaccaggtcgtggagttaaggatcattgacgcggtagtggataccataggaagaagcgtttttgttatagggcgcgtgtttagggctagccaagatgggaatttaacctccatactgcgcttcatggtggccggggttttaatcttattagcgtttgtagctttttttgggaga

SEQ ID NO: 931 - DNA (genomic), 390 bp, Helicobacter pylori; double-stranded, circular
  misc_feature (B) LOCATION 1...390
  hypothetical: NO
  anti-sense: NO
atgtttgtagcggccgggcttggggcttatgcgatcgcgcttttccacctctttacgcatgcgttcttcaaatccctccttttcttaggctcaggcaatgtcatgcatgcgatggaagacaatctggatattactaaaatgggcgctttatacaagcctatgaggatcacagctgtctttatgattatagggtcagtggctttgtgtgggatctacccctttgcgggctatttctccaaagacaagattttagaggtcgcctttgggatgcaccaccacattttatggtttgttcttttgattggggcgatctttaccgctttttatagcttcagactcatcatgctggtgttttttgcacccaaacaacatgaaatcaaccacccccca

SEQ ID NO: 932 - DNA (genomic), 1491 bp, Helicobacter pylori; double-stranded, circular
  misc_feature (B) LOCATION 1...1491
  hypothetical: NO
  anti-sense: NO
ttctttaaacgctatgaaaggttaagcatgcaatattcttctttgctgtcagtggtgttgtttttgcctttaatcggtgcggtttatgcggggctgtttggggctaaagctaaagcgttgcatgtgggcgttttcaattctttgtgcgtgctggtttctttcattggcgcggtggttcttttcattcaagcatggcatcatcaaagctatgaaaaatatttgtttgactggatcgtggtagggaattttaaagtcggcttttccctcatgctggataatatcaatgcggtcatgattgtcgtggtcactctagtttctttcttagtgcatgtgtattctataggctatatggagcatgatacagggtttaaccgctatttttcctaccttagcggctttgtgttttccatgctggtgttggtgttgagcgataattttttagggcttttcattggctgggaaggggtggggctatgctcttacttgctcattggcttttggtatcataaaaaaagcgcgaataacgcttctattgaagcctttgtgatgaatcgaatcacggatttaggcatgctcatggggattattttgatcttttggaattttggcaccctccagtataaagaagtctttagcatgctcaataacgccgattattccatgctcttttacattagcgtgtttctttttattggcgctatggggaagagtgctcaattccctatgcacacatggttagccaacgctatggaggggcctacccctgtatccgctctcatccatgcagcgacgatggtaaccgctggggtgtatctaatcatcagagccaatcctttgtatagtgcggtgtttgaagtgggttattttatcgcatgcttaggagcgtttgtggctctttttggagcgagcatggctttagtcaataaggatttaaaacgcatcgtggcttattccacgctttctcaattaggctatatgtttgtagcggccgggcttggggcttatgcgatcgcgcttttccacctctttacgcatgcgttcttcaaatccctccttttcttaggctcaggcaatgtcatgcatgcgatggaagacaatctggatattactaaaatgggcgctttatacaagcctatgaggatcacagctgtctttatgattatagggtcagtggctttgtgtgggatctacccctttgcgggctatttctccaaagacaagattttagaggtcgcctttgggatgcaccaccacattttatggtttgttcttttgattggggcgatctttaccgctttttatagcttcagactcatcatgctggtgttttttgcacccaaacaacatgaaatcaaccacccccatgaaggccaaaaatttcatgcttttgagcatgctaccgttaggggttttggcggtcattgccggtttttcagaagagccgttttttcattttatctctcaagtgaattcctagtgttggagagtatc

SEQ ID NO: 933 - DNA (genomic), 1839 bp, Helicobacter pylori; double-stranded, circular
  misc_feature (B) LOCATION 1...1839
  hypothetical: NO
  anti-sense: NO
atgcaatattcttctttgctgtcagtggtgttgtttttgcctttaatcggtgcggtttatgcggggctgtttggggctaaagctaaagcgttgcatgtgggcgttttcaattctttgtgcgtgctggtttctttcattggcgcggtggttcttttcattcaagcatggcatcatcaaagctatgaaaaatatttgtttgactggatcgtggtagggaattttaaagtcggcttttccctcatgctggataatatcaatgcggtcatgattgtcgtggtcactctagtttctttcttagtgcatgtgtattctataggctatatggagcatgatacagggtttaaccgctatttttcctaccttagcggctttgtgttttccatgctggtgttggtgttgagcgataattttttagggcttttcattggctgggaaggggtggggctatgctcttacttgctcattggcttttggtatcataaaaaaagcgcgaataacgcttctattgaagcctttgtgatgaatcgaatcacggatttaggcatgctcatggggattattttgatcttttggaattttggcaccctccagtataaagaagtctttagcatgctcaataacgccgattattccatgctcttttacattagcgtgtttctttttattggcgctatggggaagagtgctcaattccctatgcacacatggttagccaacgctatggaggggcctacccctgtatccgctctcatccatgcagcgacgatggtaaccgctggggtgtatctaatcatcagagccaatcctttgtatagtgcggtgtttgaagtgggttattttatcgcatgcttaggagcgtttgtggctctttttggagcgagcatggctttagtcaataaggatttaaaacgcatcgtggcttattccacgctttctcaattaggctatatgtttgtagcggccgggcttggggcttatgcgatcgcgcttttccacctctttacgcatgcgttcttcaaatccctccttttcttaggctcaggcaatgtcatgcatgcgatggaagacaatctggatattactaaaatgggcgctttatacaagcctatgaggatcacagctgtctttatgattatagggtcagtggctttgtgtgggatctacccctttgcgggctatttctccaaagacaagattttagaggtcgcctttgggatgcaccaccacattttatggtttgttcttttgattggggcgatctttaccgctttttatagcttcagactcatcatgctggtgttttttgcacccaaacaacatgaaatcaaccacccccatgaagccaaaaatttcatgcttttgagcatgctaccgttaggggttttggcggtcattgccgggttttttgaagagccgttttttcatttcatctctcaagtgatccctagtgttggagagtatctagtcccactcgctcttttaatcagtatcaccaccatagtggtgttgttgagcatcgcttatgccatatttaaatataaaaatggtatcacttctaaaaaagaggggggctttttatacaagctcttactcaaccaatactatatcccgcaactctatcaagggatgacaaaagtttttagcgctgtcgcttcattcttgcaccaggtcgtggagttaaggatcattgacgcggtagtggataccataggaagaagcgtttttgttatagggcgcgtgtttagggctagccaagatgggaatttaacctccatgctgcgcttcatggtggccggggttttaatcttattagcgtttgtagctttttttgggagataa

SEQ ID NO: 934 - DNA (genomic), 459 bp, Helicobacter pylori; double-stranded, circular
  misc_feature (B) LOCATION 1...459
  hypothetical: NO
  anti-sense: NO
gtgcatcatttgyaacggcttttagactcaggctctgaaaggtgtataggctgtgggctgtgcgaaaagatttgcacgagcaactgcataaggatcatcacgcataagggcgaagacaaccgcaaaaagatcgattcttacacgatcaatttggggcgttgcatttattgcgggttgtgtgcggaagtttgcccagaattggcgatcgttatggggaatcggtttgaaaacgccagcacccaacgctcccaatacggctctaaaagcgagtttctaacgagcgaacaagacgctaaaaactgctcgcatgccgaatttttaggctttggtgcggtaagccctaattataacgaacgcatgcaagccacccctttagattatgtccaagaaccttcaaaagaagaatccaaagaagagtttyccacaagcccagaaagccataagggagatgaaaatgtt

SEQ ID NO: 935 - DNA (genomic), 663 bp, Helicobacter pylori; double-stranded, circular
  misc_feature (B) LOCATION 1...663
  hypothetical: NO
  anti-sense: NO
atggccaaacaagaatacaagcaacttcctaaacgagccgaagtccatagcgcgaccgagcagtttaaagacaccattaaaacgagcttgggtttggatctattcaaagggttagggcttacgatcaaggaattttttagcccaagcgtaaccatccattaccctatggagcaactccccttaagcccacgctatcgcgcggtgcatcatttgcaacggcttttagactcaggctctgaaaggtgtataggctgtgggctgtgcgaaaagatttgcacgagcaactgcataaggatcatcacgcataagggcgaagacaaccgcaaaaagatcgattcttacacgatcaatttggggcgttgcatttattgcgggttgtgtgcggaagtttgcccagaattggcgatcgttatggggaatcggtttgaaaacgccagcacccaacgctcccaatacggctctaaaagcgagtttctaacgagcgaacaagacgctaaaaactgctcgcatgccgaatttttaggctttggtgcggtaagccctaattataacgaacgcatgcaagccacccctttagattatgtccaagaaccttcaaaagaagaatccaaagaagagtctccaacaagcccagaaagccataagggagatgaaaatgtttga

SEQ ID NO: 936 - DNA (genomic), 669 bp, Helicobacter pylori; double-stranded, circular
  misc_feature (B) LOCATION 1...669
  hypothetical: NO
  anti-sense: NO
ggaggttttatggccaaacaagaatacaagcaacttcctaaacgagccgaagtccatagcgcgaccgagcagtttaaagacaccattaaaacgagcttgggtttggatctattcaaagggttagggcttacgatcaaggaattttttagcccaagcgtaaccatccattaccctatggagcaactccccttaagcccacgctatcgcgcggtgcatcatttgcaacggcttttagactcaggctctgaaaggtgtataggctgtgggctgtgcgaaaagatttgcacgagcaactgcataaggatcatcacgcataagggcgaagacaaccgcaaaaagatcgattcttacacgatcaatttggggcgttgcatttattgcgggttgtgtgcggaagtttgcccagaattggcgatcgttatggggaatcggtttgaaaacgccagcacccaacgctcccaatacggctctaaaagcgagtttctaacgagcgaacaagacgctaaaaactgctcgcatgccgaatttttaggctttggtgcggtaagccctaattataacgaacgcatgcaagccacccctttagattatgtccaagaaccttcaaaagaagaatccaaagaagagtctccaacaagcccagaaagccataagggagatgaaaatgtt

SEQ ID NO: 937 - DNA (genomic), 348 bp, Helicobacter pylori; double-stranded, circular
  misc_feature (B) LOCATION 1...348
  hypothetical: NO
  anti-sense: NO
agaatcgaagccacagaatgcgagcctatcaagcctttaaaagaaaaaatcgctttcaacgcttatttaaaatacccagaaacgcaattcaataacgccacccataaaagcgagaatttgcaattaaaagccggtgtctatgtgtctaaagccttcttaaaaaaattgaataaagaagtggggcaaaacatcactttaactaaagaagaagaggaattaacaggcgttttgtatcttgatgagagcttggatcaggaggtgtttgtcatttcgccttctcttttgacaaaccattttaacttttttagagagggcgtgtttgatagcgtggatttaaaggagcaagca

SEQ ID NO: 938 - DNA (genomic), 489 bp, Helicobacter pylori; double-stranded, circular
  misc_feature (B) LOCATION 1...489
  hypothetical: NO
  anti-sense: NO
acgccccagcttgaagagattaaaacttctcatttagtcattacgattggttcttctatcaaaacggaaaaccctttggtgcgctatgccatcaataacgccctcaaactcaataaagcctctttgatcgctatgcaccctatcaaagataacgcgttagcgaatttgtgccgaagctctttttgcatcacccatgaagtgggggctgaagaaatccttttaggcatgcttttaaaaatgcttaacattgaaagcacggctttaaaaagcttagaagattctaaacaaagcattgtggatgaagcggctcttaaagccttagaagaagagcgaaaaaaggctttagaacaagccgaacaagggtgcagtattggagaaaacaaagaagaggcagttgcttcaaaagaaaacaaagaagagaataaaacagaagcggctgccccaaaagaaaatcaaacagaaaacaagacagaggttaaagagaaaaat

SEQ ID NO: 939 - DNA (genomic), 537 bp, Helicobacter pylori; double-stranded, circular
  misc_feature (B) LOCATION 1...537
  hypothetical: NO
  anti-sense: NO
cgtgtggagtcgcaagcaaaaggcattatttcttttgtgggtagcgtgccttgctatgattgtggggaatgcattgcggtatgccctgtgggcgctttgagctataaagatttcgcttacacggctaacgcatgggaattaaaaaagatccattctacctgttcgcattgttcagccgggtgtttgatttcctatgatgtgcgccattttgatactctaggcgaagagtctaagatttttagggtgcttaatgatttttaccataaccctatttgtggggcgggccggtttgcttttgacgtgagctctagccctaaaggtagcgccaatcttaaagaagcgcaaaacgccctcaaagaatgcgaagcggtgcgaataggtggggacattacgaatgaagaggcgtttttaatagagcgtttgaggaaagaattgaattttaaaatctataacaaagatttataccctttccaacaattcttaaaagtattgggcgaagttaaacgccccagcttgaagagattaaaacttctcatt

SEQ ID NO: 940 - DNA (genomic), 696 bp, Helicobacter pylori; double-stranded, circular
  misc_feature (B) LOCATION 1...696
  hypothetical: NO
  anti-sense: NO
cacctacccttatatccctattttatcccactctcaaggaatttcatgatcacaatgaatatcaatggcaaaacgattgaatgccaagagggacaaagcgttttagaagccgctaggagcgctgggatctacatccctaccatttgctatttaagcggttgttcgcccacggtcgcatgcaaaatgtgcatggttgaaatggatggcaaacgcatttatagctgcaacacgaaagccaaaaataacgctaccattctcactaacaccccaacgctcatggatgagagaaaaagcatcatgcaaacttatgatgtcaaccaccccctagaatgcggcgtgtgcgataagagcggggagtgcgaattgcaagacatgacgcatttaaccggcgtagagcaccaaccttatgcggtagctgatgattttaaagcgctagattcatgggcaaaagccttgtatgaccctaatttgtgcatcatgtgcgaaaggtgcgtaaccacttgtaaggacaatgtggacgaaaacaaccctaaagccactaaagccgacttgcacgctccggataaatttaaagacagcatgtccaaagacgcttttagcgtgtggagtcgcaagcaaaaggcattatttcttttgtgggtagcgtgccttgctatgattgtggggaatgcattgcggtatgccctgtgggcgctt

SEQ ID NO: 941 - DNA (genomic), 828 bp, Helicobacter pylori; double-stranded, circular
  misc_feature (B) LOCATION 1...828
  hypothetical: NO
  anti-sense: NO
aacaagccgaacaagggtgcagtattggagaaaacaaagaagaggcagttgcttcaaaagaaaacaaagaagagaataaaacagaagcggctgccccaaaagaaaatcaaacagaaaacaagacagaggttaaagagaaaaattgaagtccctaccaaaaccacttacttgttgcttgaagaagcgggcatcaatttagaaacttatgaaaaaattctcgctcttttgcaaaaatcaaataacaccttgctagtggttggcgaggaaatttatagccacaaacaagcccataacatcgctaaaatgttgcgtttattagcccaaaaaagcgctattaaactcattcttatccccccaagcgcgaacgctttaggcatcgcttctatttgcgaattgagcgaagaagtttttgaacatgaaaaaatcgtaggcattcgcgctcaaggggatttcactatcaatagcgacgatagggtttttgggaaagacgctgtcagtaaagtggattttattctgcccagtctcaaccaactagaaggcacgatcactaatgttgaagggcgtgtgttgcccttaaaaccggctttaaggtttgaaggctatgacttgagcgatatcatgcaaggctttggctttgtggaagaaaacctcacagaatgcacccacaaactccctacagaagcgggctttaaagccttagagtttgatcatctaaccaactatttcactaacgacagggctaatcacagaggctatttattaggaacaagccattttgaaaatagcgctaaagaatcgaagccacagaatgcgagcctatcaagcctt

SEQ ID NO: 942 - DNA (genomic), 2550 bp, Helicobacter pylori; double-stranded, circular
  misc_feature (B) LOCATION 1...2550
  hypothetical: NO
  anti-sense: NO
atgatcacaatgaatatcaatggcaaaacgattgaatgccaagagggacaaagcgttttagaagccgctaggagcgctgggatctacatccctaccatttgctatttaagcggttgttcgcccacggtcgcatgcaaaatgtgcatggttgaaatggatggcaaacgcatttatagctgcaacacgaaagccaaaaataacgctaccattctcactaacaccccaacgctcatggatgagagaaaaagcatcatgcaaacttatgatgtcaaccaccccctagaatgcggcgtgtgcgataagagcggggagtgcgaattgcaagacatgacgcatttaaccggcgtagagcaccaaccttatgcggtagctgatgattttaaagcgctagattcatgggcaaaagccttgtatgaccctaatttgtgcatcatgtgcgaaaggtgcgtaaccacttgtaaggacaatgtgggcgaaaacaaccttaaagccactaaagccgacttgcacgctccggataaatttaaagacagcatgtccaaagacgcttttagcgtgtggagtcgcaagcaaaaaggcattatttcttttgtgggtagcgtgccttgctatgattgtggggaatgcattgcggtatgccctgtgggcgctttgagctataaagatttcgcttacacggctaacgcatgggaattaaaaaagatccattctacctgttcgcattgttcagccgggtgtttgatttcctatgatgtgcgccattttgatactctaggcgaagagtctaagatttttagggtgcttaatgatttttaccataaccctatttgtggggcgggccggtttgcttttgacgtgagctctagccctaaaggtagcgccaatcttaaagaagcgcaaaacgccctcaaagaatgcgaagcggtgcgaataggtggggacattacgaatgaagaggcgtttttaatagagcgtttgaggaaagaattgaattttaaaatctataacaaagatttataccctttccaacaattcttaaaagtattgggcgaagttaaacgccccagcgttgaagagattaaaacttctcatttagtcattacgattggttcttctatcaaaacggaaaaccctttggtgcgctatgccatcaataacgccctcaaactcaataaagcctctttgatcgctatgcaccctatcaaagataacgcgttagcgaatttgtgccgaagctctttttgcatcacccatgaagtgggggctgaagaaatccttttaggcatgcttttaaaaatgcttaacattgaaagcacggctttaaaaagcttagaagattctaaacaaagcattgtggatgaagcggctcttaaagccttagaagaagagcgaaaaaaggctttagaacaagccgaacaagggtgcagtattggagaaaacaaagaagaggcagttgcttcaaaagaaaacaaagaagagaataaaacagaagcggctgccccaaaagaaaatcaaacagaaaacaagacagaggttaaagaagaaaaaattgaagtccctaccaaaaccacttacttgttgcttgaagaagcgggcatcaatttagaaacttatgaaaaaattctcgctcttttgcaaaaatcaaataacaccttgctagtggttggcgaagaaatttatagccacaaacaagcccataacatcgctaaaatgttgcgtttattagcccaaaaaagcgctattaaactcattcttatccccccaagcgcgaacgctttaggcatcgcttctatttgcgaattgagcgaagaagtttttgaacatgaaaaaatcgtaggcattcgcgctcaaggggatttcactatcaatagcgacgatagggtttttgggaaagacgctgtcagtaaagtggattttattctgcccagtctcaaccaactagaaggcacgatcactaatgttgaagggcgtgtgttgcccttaaaaccggctttaaggtttgaaggctatgacttgagcgatatcatgcaaggctttggctttgtggaagaaaacctcacagaatgcacccacaaactccctacagaagcgggctttaaagccttagagtttgatcatctaaccaactatttcactaacgacagggctaatcacagaggctatttattaggaacaagccattttgaaaatagcgctaaagaatgcgaagccacagaatgcgagcctatcaagcctttaaaagaaaaaatcgctttcaacgcttatttaaaatacccagaaacgcaattcaataacgccacccataaaagcgagaatttgcaattaaaagccggtgtctatgtgtctaaagccttcttaaaaaaattgaataaagaagtggggcaaaacatcactttaactaaagaagaagaggaattaacaggcgttttgtatcttgatgagagcttggatcaggaggtgtttgtcatttcgccttctcttttgacaaaccattttaacttttttagagagggcgtgtttgatagcgtggatttaaaggagcaagcatga

SEQ ID NO: 943 - DNA (genomic), 303 bp, Helicobacter pylori; double-stranded, circular
  misc_feature (B) LOCATION 1...303
  hypothetical: NO
  anti-sense: NO
atgatagggttaaaccactatttgattgtttcagggttgctcttttgcattggcttagcgggcatgctgaaacgcaaaaacattctattactctttttttccacagaaatcatgctcaatgcgatcaatatcggttttgtagcgatctctagatacacgcacaatttagacgggcagatgttcgcactctttattatcgctattgccgctagtgaggtggctattggtttgggcttggtgattttgtggtttaagaaatacaagagcttagacattgattctttaaacgctatgaaaggttaa

SEQ ID NO: 944 - DNA (genomic), 402 bp, Helicobacter pylori; double-stranded, circular
  misc_feature (B) LOCATION 1...402
  hypothetical: NO
  anti-sense: NO
agcggcggctttaatgcttttagtcgctatggttggaggcatcgctacagggattcaaaaaatccatgggaaaaatcacacgcaatttataaaggaatctctatgatagggttaaaccactatttgattgtatcacggttgctctcttgcattggcttaccgagcatgcagaaatgcaaaaacattctattactctttatttccacagaaatcatgctcaatgcgatcaatatcggttttgtagcgatctctagatacacgcacaatttagacgggcagatgttcgcactctttattatcgctattgccgctagtgaggtggctattggtttgggcttggtgattttgtggtttaagaaatacaagagcttagacattgattctttaaacgctatgaaaggt

SEQ ID NO: 945 - DNA (genomic), 318 bp, Helicobacter pylori; double-stranded, circular
  misc_feature (B) LOCATION 1...318
  hypothetical: NO
  anti-sense: NO
atgaaatttttagcgttattttttctggctttagcgggcgttgctttcgctcatgatggtggcatgggtgggatggatatgattaaatcctattctatcttaggggcgatgatcggtctagggatcgccgcttttggtggggcgatcggtatggggaatgcggccgcagcgaccattacaggcacagcgagaaacccaggagtgggcggtaaattgctcacaaccatgttcgtggccatggcgatgattgaagcgcaagtgatttatactctagtgtttgctattatcgctatttatagtaacccattcttaagttaa

SEQ ID NO: 946 - DNA (genomic), 231 bp, Helicobacter pylori; double-stranded, circular
  misc_feature (B) LOCATION 1...231
  hypothetical: NO
  anti-sense: NO
aacatgggttgcgcaggttgtcatggcaatgatggtaagggcttgcaaaaaaatcaagtgtttgcggccgatttgaccacttacggcacagagagttttttaagaaacatcttaacgcatggcaaaaagggcaatatagggcgtatgccatcattcaagtataaaaactttagcgacttgcaagttaaagcgttggtcgaatttatcaaatcgctaaaacccttagaagat

SEQ ID NO: 947 - DNA (genomic), 240 bp, Helicobacter pylori; double-stranded, circular
  misc_feature (B) LOCATION 1...240
  hypothetical: NO
  anti-sense: NO
ccaaccgttgtgaaatctaaggctggattacccgctggggaaatgcccgctatagaaatggacgaaaaagacgctaaagcgattgcaagctatgtgatggcagaactttctagcgttaaaaagacgaaaaaccctcaactcattgataaaggtaaggagttgtttgaaacatgggttgcgcaggttgtcatggcaatgatggtaagggcttgcaaaaaaatcaagtgtttgcggccgatt

SEQ ID NO: 948 - DNA (genomic), 237 bp, Helicobacter pylori; double-stranded, circular
  misc_feature (B) LOCATION 1...237
  hypothetical: NO
  anti-sense: NO
accgttgtgaaatctaaggctggattacccgctggggaaatgcccgctatagaaatggacgaaaaagacgctaaagcgattgcaagctatgtgatggcagaactttctagcgttaaaaagacgaaaaaccctcaactcattgataaaggtaaggagttgtttgaaacatgggttgcgcaggttgtcatggcaatgatggtaagggcttgcaaaaaaatcaagtgtttgcggccgatt

SEQ ID NO: 949 - DNA (genomic), 381 bp, Helicobacter pylori; double-stranded, circular
  misc_feature (B) LOCATION 1...381
  hypothetical: NO
  anti-sense: NO
atggattatcccgctggggaaatgcccgctatagaaatggacgaaaaagacgctaaagcgattgcaagctatgtgatggcagaactttctagcgttaaaaagacgaaaaaccctcaactcattgataaaggtaaggagttgtttgaaagcatgggttgcgcaggttgtcatggcaatgatggtaagggcttgcaagaaaatcaagtgtttgcggccgatttgaccacttacggcacagagagttttttaagaaacatcttaacgcatggcaaaaagggcaatatagggcgtatgccatcattcaagtataaaaactttagcgacttgcaagttaaagcgttggtcgaatttatcaaatcgctaaaacccttagaagattaa

SEQ ID NO: 950 - DNA (genomic), 189 bp, Helicobacter pylori; double-stranded, circular
  misc_feature (B) LOCATION 1...189
  hypothetical: NO
  anti-sense: NO
agcttgcaaaaggcacaacaaatattgcgggatttgcgggcaagtccaagcgattaccctgaagtaacagagtttttagtcaaagagggcatcacttccatttctttaaaccctgatagcgtgatccccacttggaacgctgtagccaagttagaaaaagagttgaaagaccatggcttaactgcacgt

SEQ ID NO: 951 - DNA (genomic), 303 bp, Helicobacter pylori; double-stranded, circular
  misc_feature (B) LOCATION 1...303
  hypothetical: NO
  anti-sense: NO
cgggtggcgctttctaacatgcaagaaactcaaacaaaaatttacatcaatattggaaaccctgaaaaagcctttagcttttctcaactccctaatcacggcgtagggctggccagaatggaaatgattattttaaatcaaatcaaagcccaccccttagctttagtggatttgcaccacaaaaaaagcgtgaaagaaaaaaatgaaattgaaaacctcatggcaggctatgctaaccctaaagatttttttgtgaaaaaaatcgctgaaggcattggcatgatcagcgcggcgttttaccct

SEQ ID NO: 952 - DNA (genomic), 300 bp, Helicobacter pylori; double-stranded, circular
  misc_feature (B) LOCATION 1...300
  hypothetical: NO
  anti-sense: NO
gtggcgctttctaacatgcaagaaactcaaacaaaaatttacatcaatattggaaaccctgaaaaagcctttagcttttctcaactccctaatcacggcgtagggctggccagaatggaaatgattattttaaatcaaatcaaagcccaccccttagctttagtggatttgcaccacaaaaaaagcgtgaaagaaaaaaatgaaattgaaaacctcatggcaggctatgctaaccctaaagatttttttgtgaaaaaaatcgctgaaggcattggcatgatcagcgcggcgttttaccct

SEQ ID NO: 953 - DNA (genomic), 555 bp, Helicobacter pylori; double-stranded, circular
  misc_feature (B) LOCATION 1...555
  hypothetical: NO
  anti-sense: NO
attgtaaggactagcgatttcaaatccaatgaatacatgcgcatgcttggcggctctagctatgagcctaatgaagaaaaccccatgcttggctataggggggctagtcggtattattcagagagctataacgaagcgttttcgtgggagtgtgaagccttagcgttagtgagggaagaaatgggcttgacgaatatgaaagtgatgatcccctttttgcgaaccattgaagagggtaaaaaagtcctagaaatcttaagaaaaaacaatttagaatccggtaaaaacgggcttgaaatttatatcatgtgtgaattaccggtgaatgtcattctggctgatgatttcttaagcttgtttgatggcttttctattggctctaatgatttaacccagctcactttaggcgtggatagagacagcgagttagtcagccatgtctttgatgaaaggaatgaagcgatgctaaaaatgtttaaaaaagcgattgaagcttgcaaaaggcacaacaaatattgcgggatttgcgggcaagtccaagcgattaccctgaag

SEQ ID NO: 954 - DNA (genomic), 552 bp, Helicobacter pylori; double-stranded, circular
  misc_feature (B) LOCATION 1...552
  hypothetical: NO
  anti-sense: NO
gtaaggactagcgatttcaaatccaatgaatacatgcgcatgcttggcggctctagctatgagcctaatgaagaaaaccccatgcttggctataggggggctagtcggtattattcagagagctataacgaagcgttttcgtgggagtgtgaagccttagcgttagtgagggaagaaatgggcttgacgaatatgaaagtgatgatcccctttttgcgaaccattgaagagggtaaaaaagtcctagaaatcttaagaaaaaacaatttagaatccggtaaaaacgggcttgaaatttatatcatgtgtgaattaccggtgaatgtcattctggctgatgatttcttaagcttgtttgatggcttttctattggctctaatgatttaacccagctcactttaggcgtggatagagacagcgagttagtcagccatgtctttgatgaaaggaatgaagcgatgctaaaaatgtttaaaaaagcgattgaagcttgcaaaaggcacaacaaatattgcgggatttgcgggcaagtccaagcgattaccctgaag

SEQ ID NO: 955 - DNA (genomic), 753 bp, Helicobacter pylori; double-stranded, circular
  misc_feature (B) LOCATION 1...753
  hypothetical: NO
  anti-sense: NO
ccaagcttagaacacaaactggctaaaactaaagctctatcatgctatcattgttatatttttgttttaagaaacttaatgatcattttaagggagttttgtgcgatatatcaagtttttccaagagttgacaataagaatgtgaatctggttgggggcaagaacgctagcattggtgaaatgtttcaagaattagtgccaattgggattaaagtgcctgatggctttgcgatcaccagcgaagcgtattggtatcttttagagcaagggggggctaaacccaaaatcatagagcttttagaaaatgttgatgccacggaaattgatgtgttaaaaatccgctccaaacaaatcagagagcttatttttggcacgccttttcctagcgatttaagagatgagatttttcaagcttatgaaattttaagccagcaataccacatgaaagaagccgatgtggctgtaaggagctccgctactgcagaagatttgccagacgcttcttttgccgggcagcaagacacttatttaaacattaagggtaaaaccgaattgatccactatatcaaatcctgtttggcgtcgctttttaccgatagagcgattagctatagagcgagtcgtgggtttgatcatttaaaagtcgctctaagtgtgggggtgcaaaaaatggtgcgagcggataaaggcagcgcgggcgtgatgttttctattgacaccgaaaccggttttaaagacgcggtgtttatcact

SEQ ID NO: 956 - DNA (genomic), 1467 bp, Helicobacter pylori; double-stranded, circular
  misc_feature (B) LOCATION 1...1467
  hypothetical: NO
  anti-sense: NO
atggcgagagcggggaaatctttatcgttcaagcgcgcccagaaaccgttcaaagccaaaaaaccaaagaagaaaatcaagtctttgaaaaattcaaattcaaaaaccctaacggaaaaaaaagaaattatcttacaaggcagagcgattgggagtaaaattggctcagggaaagtgcgcatcatcaatgatttggagcacatgaattcttttaaagagggcgaaattttagttacggataataccgatccggattgggagccttgcatgaaaaaagcgagcgcggttatcactaatcgtggagggcgcacttgccatgcggcgattgtggcgagagaaattggcgtgccagccattgttggggtgagtggggcgactgatagcctttataccggcatggaaatcacggtttcttgcgctgagggtgaagagggctatgtgtatgcgggcatttatgagcatgaaattgaaagggtggagctttctaacatgcaagaaactcaaacaaaaatttacatcaatattggaaaccctgaaaaagcctttagcttttctcaactccctaatcacggcgtagggctggccagaatggaaatgattattttaaatcaaatcaaagcccaccccttagctttagtggatttgcaccacaaaaaaagcgtgaaagaaaaaaatgaaattgaaaacctcatggcaggctatgctaaccctaaagatttttttgtgaaaaaaatcgctgaaggcattggcatgatcagcgcggcgttttaccctaaacctgtgattgtaaggactagcgatttcaaatccaatgaatacatgcgcatgcttggcggctctagctatgagcctaatgaagaaaaccccatgcttggctataggggggctagtcggtattattcagagagctataacgaagcgttttcgtgggagtgtgaagccttagcgttagtgagggaagaaatgggcttgacgaatatgaaagtgatgatcccctttttgcgaaccattgaagagggtaaaaaagtcctagaaatcttaagaaaaaacaatttagaatccggtaaaaacgggcttgaaatttatatcatgtgtgaattaccggtgaatgtcattctggctgatgatttcttaagcttgtttgatggcttttctattggctctaatgatttaacccagctcactttaggcgtggatagagacagcgagttagtcagccatgtctttgatgaaaggaatgaagcgatgctaaaaatgtttaaaaaagcgattgaagcttgcaaaaggcacaacaaatattgcgggatttgcgggcaagccccaagcgattaccctgaagtaacagagtttttagtcaaagagggcatcacttccatttctttaaaccctgatagcgtgatccccacttggaacgctgtagccaagttagaaaaagagttgaaagaccatggcttaactgcacgttga

SEQ ID NO: 957 - DNA (genomic), 411 bp, Helicobacter pylori; double-stranded, circular
  misc_feature (B) LOCATION 1...411
  hypothetical: NO
  anti-sense: NO
gtgtgcggcgtattatcgttacaagcgcgtttgagctttgaaaattgctctaagcccctagactgctcactattcgctacaacttgcaccccgcaaaacccgatcggcagttgcatggtcagctctcaagggggcgtgtgcggcgtattatcgttacaagcgcgtttgagctttgaaaattgctctaagcccctagactgctcactattcgccacaacttgcaccccgcaaaacccgatcggcagttgcatggtcagctctcaagggggcgtgcgcggcgtattatcgttacaagcgcgtttgagttttaaaaattgctttttagtgaaatcgctcaaaccctcgcaattgacattgatgctaaccggttttttaggggggttttcttttttgacaaccggtttttggtaa

SEQ ID NO: 958 - DNA (genomic), 264 bp, Helicobacter pylori; double-stranded, circular
  misc_feature (B) LOCATION 1...264
  hypothetical: NO
  anti-sense: NO
ttcagcggcgctcaaatctacgctcctttagtgaatcgctttaaactccccattattgtgagcggttttgagccggtggatatattagaaagcgtgctgatgctcactaaacaagccctaaacaaagaagccaagctagaaatccaatacaaaagagcggtgagctatgaagggaatacaaaagcgcaagaattagtgaatgcatgcatggaagttagggaaaattttgaatggagaggtttggggaatatcaacgatccgccc

SEQ ID NO: 959 - DNA (genomic), 321 bp, Helicobacter pylori; double-stranded, circular
  misc_feature (B) LOCATION 1...321
  hypothetical: NO
  anti-sense: NO
gggggcgtgtgcggcgtattatcgttacaagcgcatttgagctttgaaaattgctctaagcccctagactgctcactattcgctacaacttgcaccccgcaaaacccgatcggcagttgcatggtcagctctcaagggggcgtgtgcggcgtattatcgttacaagcgcatttgagctttgaaaattgctctaagcccctagactgctcactattcgccacaacttgcaccccgcaaaacccgatcggcagttacatggtcagctctcaagggggcgtgcgcggcgtattatcgttacaagcgcgtttgagttttaaaaat

SEQ ID NO: 960 - DNA (genomic), 1113 bp, Helicobacter pylori; double-stranded, circular
  misc_feature (B) LOCATION 1...1113
  hypothetical: NO
  anti-sense: NO
atgagcgttgatcacctcatttcgccctttagagacaagcggattattttagcgctctctaatgaaatcaaaaaattcgcttccaaactcactaaaaaattagtcatcatggaagtgtgcggagggcatacgcattccatcatgaaatacgggcttttagatttgatgcctaaaaatttagagtttgcgcatgggccagggtgtccggtgtgcgtgatgccaaaagcgcgccttgatgaagcttacgaactcgctagcatgaaagatagcattgttttgagtttgggggatatgatgagagtccctgggagctatgggagtttgatacaagccagagaaaaggggttagatgcgcgttttttgtattcgcccatgcaagctttagagatcgctaaagaaaaccctcataaaaaagtcatctacattgcgatcggttttgaaaccaccacgcccatgacggcgagcgttttgctcaatgccaaaaaagaaaaattaaaaaatctttttttccacattaaccacattctagtgcctccaagcgtgagcacgattttagaagataaagcatgccggatcaacgcccttttagcccctagccatgtgagcgtgatcagcggcgctcaaatctacgctcctttagtggatcgctttaaactccccattattgtgagcggttttgagccggtggatatattagaaagcgtgctgatgctcactaaacaagccctaaacaaagaagccaagctagaaatccaatacaaaagagcggtgagctatgaagggaatacaaaagcgcaagaattagtgaatgcatgcatggaagttagggaaaattttgaatggagaggtttggggaatatcaaacgatccgccctaaagcttaaagaagcgttcgcttcttacgacgctgaaaaagtttttaaagcatacttaagccacaaaacctccaaagaaaacaaggcatgcaagtgcggggaaattttaaaaggcatcgctaagcccctagactgctcactattcgccacaacttgcaccccgcaaaacccgatcggcagttgcatggtcagctctgagggggcgtgtgcggcgtattatcgttacaagcgcgtttga

SEQ ID NO: 961 - DNA (genomic), 162 bp, Helicobacter pylori; double-stranded, circular
  misc_feature (B) LOCATION 1...162
  hypothetical: NO
  anti-sense: NO
aaacgggcttgtgaaagtgcctacttaaggaatatcaccgaaacgatgccttatttccataacgggcaattctgggatgttaaggatgcgattaaagaaatgggctctatccagttaggcattgaaatcagcgatgcagaaccgaataagattgaacctctt

SEQ ID NO: 962 - DNA (genomic), 729 bp, Helicobacter pylori; double-stranded, circular
  misc_feature (B) LOCATION 1...729
  hypothetical: NO
  anti-sense: NO
gaacccatgcctatgggcaaagcgctcaaagaataccagatcaaaaaaaccagagatgtgggcattggcgctaaaaacagcgaaatcatgacctccgctcaagtggaattaggcaaaatgctctattttgaccctaggatttccacttcctatcttgtgtcttgcaacacatgccataatttgggcttaggcggggtggatctaatcccaagcgctataggctctcaatggaagaaaaacccccaccttttaagttccccaacggtgtataactctgtgtttaacgatgtgcagttttgggatggtagggttacgcatttaaacgaacaagcgcaagggccaatccaatcttcttttgaaatgggggctgatcctaaagtcgtggtagaaaaaatcaattccataccaggctatgtcaagctctttagaaaagcttatggctctaaagtcaaaattgattttaaattgatcgctgatagtatcgctatgtttgaagccacgctcattaccccaagccgttacgatgattttttaaggggcaatcctaaagcgctcagtaaagccgaaaaagaagggctggatttattcatttctaaaggctgtgtggcgtgtcataatggcatcaatcttggggggacgatgcagccttttggggtggtcaaaccttataaattcgctaatgtgggcgatttcaagggcgataaaaacgggcttgtgaaagtgcctact

SEQ ID NO: 963 - DNA (genomic), 1053 bp, Helicobacter pylori; double-stranded, circular
  misc_feature (B) LOCATION 1...1053
  hypothetical: NO
  anti-sense: NO
atgaaaaaaactattctattgagcgctcttttagctttttcttgcgctcatgctttaagcgatatggatttgattaaaaaagcgaaggaaagccaattagaacccatgcctatgggcaaagcgctcaaagaataccagatcaaaaaaaccagagatgtgggcattggcgctaaaaacagcgaaatcatgacctccgctcaagtggaattaggcaaaatgctctattttgaccctaggatttccacttcctatcttgtgtcttgcaacacatgccataatttgggcttaggcggggtggatctaatcccaagcgctataggctctcaatggaagaaaaacccccaccttttaagttccccaacggtgtataactctgtgtttaacgatgtgcagttttgggatggtagggttacgcatttaaacgaacaagcgcaagggccaatccaatcttcttttgaaatgggggctgatcctaaagtcgtggtagaaaaaatcaattccataccaggctatgtcaagctctttagaaaagcttatggctctaaagtcaaaattgattttaaattgatcgctgatagtatcgctatgtttgaagccacgctcattaccccaagccgttacgatgattttttaaggggcaatcctaaagcgctcagtaaagccgaaaaagaagggctggatttattcatttctaaaggctgtgtggcgtgtcataatggcatcaatcttggggggacgatgcagccttttggggtggtcaaaccttataaattcgctaatgtgggcgatttcaagggcgataaaaacgggcttgtgaaagtgcctactttaaggaatatcaccgaaacgatgccttatttccataacgggcaattctgggatgttaaggatgcgattaaagaaatgggctctatccagttaggcattgaaatcagcgatgcagaagcgaaaaagattgaaaccttctttgaagccttaaagggtaaaaaacctaaaataatctatccagaactccctgtgatgacagacaaaacccctaaaccctctttttga

SEQ ID NO: 964 - DNA (genomic), 108 bp, Helicobacter pylori; double-stranded, circular
  misc_feature (B) LOCATION 1...108
  hypothetical: NO
  anti-sense: NO
ttgagtaagcatgctgtcgcttacagagagatttcttggattttgagaagacccccaggtagggaggctcacctggagatgtgttttatatccactcacggcttttag

SEQ ID NO: 965 - DNA (genomic), 150 bp, Helicobacter pylori; double-stranded, circular
  misc_feature (B) LOCATION 1...150
  hypothetical: NO
  anti-sense: NO
gtcgtggattatgaagagcaactgcacccttttttggaagcaaaatacccccaagttttagaagaaatccacactaaaaaagtgctagataaggatttagaagccatgctaagaaaagtcttagaggaatttaagctcacttatagcgag

SEQ ID NO: 966 - DNA (genomic), 312 bp, Helicobacter pylori; double-stranded, circular
  misc_feature (B) LOCATION 1...312
  hypothetical: NO
  anti-sense: NO
aaagagcggctaaactttgacgatgaaaagggtgccggctctttgactgcgctccctattgtggaaactcacgcgggcgatgtttcagcttatatccctacgaatatcatttctattacagacgggcaaattttcttagaaacggatttgttttattcagggatccgccccggctatcaatgtgggcttgtcggtttcaagggttggaggggccgctcaaatcaaagcgaccaagcaggtttcagggactttgcgcctggatttagcgcaatacagagagttgcaagccttcacggcaattcgcttctgatt

SEQ ID NO: 967 - DNA (genomic), 357 bp, Helicobacter pylori; double-stranded, circular
  misc_feature (B) LOCATION 1...357
  hypothetical: NO
  anti-sense: NO
ccaaaaagggcaaaatgtgatctgtatctatgtggctattggccaaaaagaatccaccgttgcgcaagtggtccgcaaattagaagaatacggagcgatggaatacagcgtcgtgatcaatgcttcggcttcagactcagctgcgatgcaatatttagccccttatgcgggtgtggctatggggaatattttagagatcatgcccgccatgccttaatcgtttatgatgatttgagtaagcatgctgtcgcttacagagagatttctttgattttgagaagacccccaggtagggaggcttttcctggagatgtgttttatatccactcacggcttttagaaagagcggctaaactt

SEQ ID NO: 968 - DNA (genomic), 642 bp, Helicobacter pylori; double-stranded, circular
  misc_feature (B) LOCATION 1...642
  hypothetical: NO
  anti-sense: NO
gtgttttatatccactcacggcttttagaaagagcggctaaactttgcgatgaaaagggtgccggctctttgactgcgctccctattgtggaaactcaagcgggcgatgtttcagcttatatccctacgaatatcatttctattacagacgggcaaattttcttagaaacggatttgttttattcagggatccgcccggctatcaatgtgggcttgtcggtttcaagggttggaggggccgctcaaatcaaagcgaccaagcaggtttcagggactttgcgcctggatttagcgcaatacagagagttgcaagccttcacgcaattcgcttctgatttagatgaagcgagtaaaaagcaattagaaagggggcaacgcatggtagaagtgctgaaacaagccccttattcgcccttgcctattgaaaagcaagtggtcattatttatgctggggctaagggctttttagatagcgtgagcgtgaaaaaagtcgtggattatgaagagcaactgcacccttttttggaagcaaaatacccccaagttttagaagaaatccacactaaaaaagtgctagataaggatttagaagccatgctaagaaaagtcttagaggaatttaagctcacttatagcgagtag

SEQ ID NO: 969 - DNA (genomic), 774 bp, Helicobacter pylori; double-stranded, circular
  misc_feature (B) LOCATION 1...774
  hypothetical: NO
  anti-sense: NO
atgtcccaactaaaattggaagaaatcagctcggtcattgaagaaaaaatcaagaattttgaacttgattgcgatatggctgaagtcggaaaagtcgtttcgtatgcggatggcgtggctaagatttatggcttaaatggtgtgatgtcgtatgaagtgctggagtttgaaacaggggataaaggcgttgcggctaacttagaagaagatagcgttggcgtgattgtgtttggttttggcaacaatattaaagaagggactagcgttaaacgcacgaagagtttgatgaaggttcctgttggcgatgcggttgtagggcgcgtgttgaacgctttgggtgagcctattgatggcaagggtgagatagaaacgaatgagttcagcctaatagagcaaaaagccccgggcattatggacagaaaatctgtgcatgaacctttgcaaacaggcattaaggccattgatgcgttggtgcctattgggcgcgggcaaagggaattgatcattggggataaacaaaccggtaaaaccaccgtagcgatcgatgcgatcattaaccaaaaagggcaaaatgtgatctgtatctatgtggctattggccaaaaagaatccaccgttgcgcaagtggtccgcaaattagaagaatacggagcgatggaatacagcgtcgtgatcaatgcttcggcttcagactcagctgcgatgcaatatttagccccttatgcgggtgtggctatggggaatattttagagatcatgcccgccatgccttaa

SEQ ID NO: 970 - DNA (genomic), 819 bp, Helicobacter pylori; double-stranded, circular
  misc_feature (B) LOCATION 1...819
  hypothetical: NO
  anti-sense: NO
aaaaacaggttattcaatctatttaatcaatctaaggagataaagataatgtcccaactaaaattggaagaaatcagctcggtcattgaagaaaaaatcaagaattttgaacttgattgcgatatggctgaagtcggaaaagtcgtttcgtatgcggatggcgtggctaagatttatggcttaaatggtgtgatgtcgtatgaagtgctggagtttgaaacaggggataaaggcgttgcggctaacttagaagaagatagcgttggcgtgattgtgtttggttttggcaacaatattaaagaagggactagcgttaaacgcacgaagagtttgatgaaggttcctgttggcgatgcggttgtagggcgcgtgttgaacgctttgggtgagcctattgatggcaagggtgagatagaaacgaatgagttcagcctaatagagcaaaaagccccgggcattatggacagaaaatctgtgcatgaacctttgcaaacaggcattaaggccattgatgcgttggtgcctattgggcgcgggcaaagggaattgatcattggggataaacaaaccggtaaaaccaccgtagcgatcgatgcgatcattaaccaaaaagggcaaaatgtgatctgtatctatgtggctattggccaaaaagaatccaccgttgcgcaagtggtccgcaaattagaagaatacggagcgatggaatacagcgtcgtgatcaatgcttcggcttcagactcagctgcgatgcaatatttagccccttatgcgggtgtggctatggggaatattttagagatcatgcccgccatgcct

SEQ ID NO: 971 - DNA (genomic), 1512 bp, Helicobacter pylori; double-stranded, circular
  misc_feature (B) LOCATION 1...1512
  hypothetical: NO
  anti-sense: NO
atgtcccaactaaaattggaagaaatcagctcggtcattgaagaaaaaatcaagaattttgaacttgattgcgatatggctgaagtcggaaaagtcgtttcgtatgcggatggcgtggctaagatttatggcttaaatggtgtgatgtcgtatgaagtgctggagtttgaaacaggggataaaggcgttgcggctaacttagaagaagatagcgttggcgtgattgtgtttggttttggcaacaatattaaagaagggactagcgttaaacgcacgaagagtttgatgaaggttcctgttggcgatgcggttgtagggcgcgtgttgaacgctttgggtgagcctattgatggcaagggtgagatagaaacgaatgagttcagcctaatagagcaaaaagccccgggcattatggacagaaaatctgtgcatgaacctttgcaaacaggcattaaggccattgatgcgttggtgcctattgggcgcgggcaaagggaattgatcattggggataaacaaaccggtaaaaccaccgtagcgatcgatgcgatcattaaccaaaaagggcaaaatgtgatctgtatctatgtggctattggccaaaaagaatccaccgttgcgcaagtggtccgcaaattagaagaatacggagcgatggaatacagcgtcgtgatcaatgcttcggcttcagactcagctgcgatgcaatatttagccccttatgcgggtgtggctatgggggaatattttagagatcatgcccgccatgccttaatcgtttatgatgatttgagtaagcatgctgtcgcttacagagagatttcttggattttgagaagacccccaggtagggaggcttttcctggagatgtgttttatatccactcacggcttttagaaagagcggctaaactttgcgatgaaaagggtgccggctctttgactgcgctccctattgtggaaactcaagcgggcgatgtttcagcttatatccctacgaatatcatttctattacagacgggcaaattttcttagaaacggatttgttttattcagggatccgcccggctatcaatgtgggcttgtcggtttcaagggttggaggggccgctcaaatcaaagcgaccaagcaggtttcagggactttgcgcctggatttagcgcaatacagagagttgcaagccttcacgcaattcgcttctgatttagatgaagcgagtaaaaagcaattagaaagggggcaacgcatggtagaagtgctgaaacaagccccttattcgcccttgcctattgaaaagcaagtggtcattatttatgctggggctaagggctttttagatagcgtgagcgtgaaaaaagtcgtggattttgaagagcaactgcaccctttcttggaagcaaaatacccccaagttttagaagaaatccacactaaaaaagtgctagataaggatttagaagccatgctaagaaaagtcttagaggaatttaagctcacttatagcgagtag

SEQ ID NO: 972 - DNA (genomic), 543 bp, Helicobacter pylori; double-stranded, circular
  misc_feature (B) LOCATION 1...543
  hypothetical: NO
  anti-sense: NO
atgcaagatttaaaagtgatttctaagcattacgctaaggcgttgaaaaaccacactaaaagcgatttggcgttattggaagaaattgtcgtggggcttaaaaatttagcagaagccataaaattacacaaactcaaccaggtgttagcccatgtttctttaaaagttaaaaaagaggttgtgttagaaattttagaaaaaataactcccacaaaagcatgttcaattttaaagcctgtaatggaagtggtgttaaaaaataaccgacttgacatgctggaattagtcgctgaagagctgtcctttgattctaaaaggactttagaagccacacttttagtcccgcaaaagcttgaaaataatgaactagaagaagtgcaacaaaaattgcaagcgcgttttaacgcccctgtagaaatcgctcaagacacttggtctaaaaaaggggtttctttgagcgtttcaagcctggatttagaaataggcttttctaaagaagatattttaaaaaaaatagaaaaacaggttattcaatctatttaa

SEQ ID NO: 973 - DNA (genomic), 540 bp, Helicobacter pylori; double-stranded, circular
  misc_feature (B) LOCATION 1...540
  hypothetical: NO
  anti-sense: NO
atgcaagatttaaaagtgatttctaagcattacgctaaggcgttgaaaaaccacactaaaagcgatttggcgttattggaagaaattgtcgtggggcttaaaaatttagcagaagccataaaattacacaaactcaaccaggtgttagcccatgtttctttaaaagttaaaaaagaggttgtgttagaaattttagaaaaaataactcccacaaaagcatgttcaattttaaagcctgtaatggaagtggtgttaaaaaataaccgacttgacatgctggaattagtcgctgaagagctgtcctttgattctaaaaggactttagaagccacacttttagtcccgcaaaagcttgaaaataatgaactagaagaagtgcaacaaaaattgcaagcgcgttttaacgcccctgtagaaatcgctcaagacacttggtctaaaaaaggggtttctttgagcgtttcaagcctggatttagaaataggcttttctaaagaagatattttaaaaaaaatagaaaaacaggttattcaatctatt

SEQ ID NO: 974 - DNA (genomic), 342 bp, Helicobacter pylori; double-stranded, circular
  misc_feature (B) LOCATION 1...342
  hypothetical: NO
  anti-sense: NO
ttcctgagggggaagtttatacaggagaggttaaaagcgttgtgttgccaaggagtggaaggggaatttggggtgctttatgggcatagcaacatgatcaccttgcttcaggcgggagtggttgagattgaaaccgaaaaccaaaaagagcacattgctatcaattggggttatgcagaagttactaatgaacgggtggatattttagccgatggagcggtctttattaaaaaaggatcagatgacagagatgatgctatctctagggctaaaaagcttttagaggacgcaagctctgacaggttagcggtctctagcgtgctggctaagattgagtctctt

SEQ ID NO: 975 - DNA (genomic), 372 bp, Helicobacter pylori; double-stranded, circular
  misc_feature (B) LOCATION 1...372
  hypothetical: NO
  anti-sense: NO
atggctttgttgaaaattagtgtggtagttcctgagggggaagtttatacaggagaggttaaaagcgttgtgttgccaggagtggaaggggaatttggggtgctttatgggcatagcaacatgatcaccttgcttcaggcgggagtggttgagattgaaaccgaaaaccaaaaagagcacattgctatcaattggggttatgcagaagttactaatgaacgggtggatattttagccgatggagcggtctttattaaaaaaggatcagatgacagagatgatgctatctctagggctaaaaagcttttagaggacgcaagctctgacaggttagcggtctctagcgtgctggctaagattgagtctctttaa

SEQ ID NO: 976 - DNA (genomic), 723 bp, Helicobacter pylori; double-stranded, circular
  misc_feature (B) LOCATION 1...723
  hypothetical: NO
  anti-sense: NO
ttgacgatggcggagtattttcgtgatgaaaagggattagacgtgttgatgttcattgataacatctttagatacgctcaaagcggtgccgagatgagcgcgctactaggccgtatcccttcagccgtggggtatcagcccacgctagccggggaaatggggaaacttcaagagcgtatcgcttccactaaaaatggctctatcacttcggttcaagcggtgtatgtgccagcagacgacttgactgacccagcccctgcttcagtgtttgcgcatttggatgcgactacggtattgaacagaaagatcgctgaaaaagggatttatccggcagtggatcctttggattccacttcaaggattttaagccctcaaatgattggcgagaagcactatgaaatcgctaccggtatccagcaagttttgcaaaaatacaaggatttgcaagatattattgcgattttgggattggacgaattgagcgaagaggataaaaaaacggttgaaagggccagaaaaattgagaagtttttatcccagccgttttttgtggctgaagtgtttacgggaagtcccggtaaatatgtaacccttcaagagactttagagggctttggagggattttagagggcaaatacgatcacattcctgaaaacgcgttttacatggtgggcagcattcaagaggttttagaaaaagctaaaaacatgaaaaattcctaa

SEQ ID NO: 977 - DNA (genomic), 741 bp, Helicobacter pylori; double-stranded, circular
  misc_feature (B) LOCATION 1...741
  hypothetical: NO
  anti-sense: NO
gaccgcatcgcattcaccggcttgacgatggcggagtattttcgtgatgaaaagggattagacgtgttgatgttcattgataacatctttagatacgctcaaagcggtgccgagatgagcgcgctactaggccgtatcccttcagccgtggggtatcagcccacgctagccggggaaatggggaaacttcaagagcgtatcgcttccactaaaaatggctctatcacttcggttcaagcggtgtatgtgccagcagacgacttgactgacccagcccctgcttcagtgtttgcgcatttggatgcgactacggtattgaacagaaagatcgctgaaaaagggatttatccggcagtggatcctttggattccacttcaaggattttaagccctcaaatgattggcgagaagcactatgaaatcgctaccggtatccagcaagttttgcaaaaatacaaggaattgcaagatattattgcgatttcgggattggacgaattgagcgaagaggataaaaaaacggttgaaagggccagaaaaattgagaagtttttatcccagccgttttttgtggctgaagtgtttacgggaagtcccggtaaatatgtaacccttcaagagactttagagggctttggagggattttagagggcaaatacgatcacattcctgaaaacgcgttttacatggtgggcagcattcaagaggttttagaaaaagctaaaaacatgaaaaattcc

SEQ ID NO: 978 - DNA (genomic), 738 bp, Helicobacter pylori; double-stranded, circular
  misc_feature (B) LOCATION 1...738
  hypothetical: NO
  anti-sense: NO
cgcatcgcattcaccggcttgacgatggcggagtattttcgtgatgaaaagggattagacgtgttgatgttcattgataacatctttagatacgctcaaagcggtgccgagatgagcgcgctactaggccgtatcccttcagccgtggggtatcagcccacgctagccggggaaatggggaaacttcaagagcgtatcgcttccactaaaaatggctctatcacttcggttcaagcggtgtatgtgccagcagacgacttgactgacccagcccctgcttcagtgtttgcgcatttggatgcgactacggtattgaacagaaagatcgctgaaaaagggatttatccggcagtggatcctttggattccacttcaaggattttaagccctcaaatgattggcgagaagcactatgaaatcgctaccggtatccagcaagttttgcaaaaatacaaggaattgcaagatattattgcgatttcgggattggacgaattgagcgaagaggataaaaaaacggttgaaagggccagaaaaattgagaagtttttatcccagccgttttttgtggctgaagtgtttacgggaagtcccggtaaatatgtaacccttcaagagactttagagggctttggagggattttagagggcaaatacgatcacattcctgaaaacgcgttttacatggtgggcagcattcaagaggttttagaaaaagctaaaaacatgaaaaattcc

SEQ ID NO: 979 - DNA (genomic), 1410 bp, Helicobacter pylori; double-stranded, circular
  misc_feature (B) LOCATION 1...1410
  hypothetical: NO
  anti-sense: NO
atgaaagcgatggaaggtaaaatcattcaggttttaggcccggtggtagatgtggagtttgaatcctatctaccggcgatttttgaagcgttagacattaattttgaagtcaatggcactcaaaaggctttagttttagaggtggcagcccatttgggaggtaatcgggtgcgagcgattgctatggatatgacagaaggcttagtgcgtaaccaagccgtcaaagctcgtggcaaaatgattgaagtgcctgtgggcgaagaagtgttagggcgcatttttaatgttgtgggcgagagcattgacaatttagagcctcttaagccgtccttaacttggcccattcacagaaaagcccctagttttgagcaacaaagcactaaaacagaaatgtttgaaaccggtattaaagtcattgacttactcgcaccttattctaagggcggtaaagtaggcttgtttggcggggctggcgtaggcaaaacagtgatcattatggagcttatccacaatgtggcttataagcataacgggtattcggtgtttgcaggtgtgggggagcgcaccagagaagggaacgatctgtattttgagatgaaagaagggggcgttttagacaaagtcgcgctgtgctatgggcaaatgaatgagccaccaggcgcaaggaaccgcatcgcattcaccggcttgacgatggcggagtattttcgtgatgaaaagggattagacgtgttgatgttcattgataacatctttagatacgctcaaagcggtgccgagatgagcgcgctactaggccgtatcccttcagccgtggggtatcagcccacgctagccggggaaatggggaaacttcaagagcgtatcgcttccactaaaaatggctctatcacttcggttcaagcggtgtatgtgccagcagacgacttgactgacccagcccctgcttcagtgtttgcgcatttggatgcgactacggtattgaacagaaagatcgctgaaaaagggatttatccggcagtggatcctttggattccacttcaaggattttaagccctcaaatgattggcgagaagcactatgaaatcgctaccggtatccagcaagttttgcaaaaatacaaggatttgcaagatattattgcgattttgggattggacgaattgagcgaagaggataaaaaaacggttgaaagggccagaaaaattgagaagtttttatcccagccgttttttgtggctgaagtgtttacgggaagtcccggtaaatatgtaacccttcaagagactttagagggctttggagggattttagagggcaaatacgatcacattcctgaaaacgcgttttacatggtgggcagcattcaagaggttttagaaaaagctaaaaacatgaaaaattcctaa

SEQ ID NO: 980 - DNA (genomic), 237 bp, Helicobacter pylori; double-stranded, circular
  misc_feature (B) LOCATION 1...237
  hypothetical: NO
  anti-sense: NO
aatatggcgaatttaagagacattagtaagaaaattggaagcgttaaaaccacgcaaagaatcacgcatgcgatgaaactcgtttccacttccaagctaagaaaggccgaagaagttgcaagaaattctagagcgtatgcactgaagctagacgctgtgtttgatgatgtgctatccaaaatgataaatcaagggattgaagacattcaaagccagtatttgggaactgaaaagact

SEQ ID NO: 981 - DNA (genomic), 450 bp, Helicobacter pylori; double-stranded, circular
  misc_feature (B) LOCATION 1...450
  hypothetical: NO
  anti-sense: NO
catgcacgaatgaatacaaagaaaaagacattaaagcgtcgtttgcgcggtattggtaaaaagggtaatgagtattttagctttaacgggatagaggttttagacaagatcaataatttgagttctatgcctaattatgaacgcgcacaggaattcatgaaaaaagtggtagaggattatttgagtgggaaaaccgataaggtgattatcattcataatggctttaaaaacatgatcactcaagaaataagagtcaaaacgattttacctattgggtataaaatcatccaccaaaacccccagcctagtgagacgcaagagactattactagtgagccaagcgggagtgaagatgaaattttagactctttagcagaaaaatatgtggagtatagtttatactacgctttgattgattctttagccgcagagcatagcgctagaatgcag

SEQ ID NO: 982 - DNA (genomic), 447 bp, Helicobacter pylori; double-stranded, circular
  misc_feature (B) LOCATION 1...447
  hypothetical: NO
  anti-sense: NO
catgcacgaatgaatacaaagaaaaagacattaaagcgtcgtttgcgcggtattggtaaaaagggtaatgagtattttagctttaacgggatagaggttttagacaagatcaataatttgagttctatgcctaattatgaacgcgcacaggaattcatgaaaaaagtggtagaggattatttgagtgggaaaaccgataaggtgattatcattcataatggctttaaaaacatgatcactcaagaaataagagtcaaaacgattttacctattgggtataaaatcatccaccaaaacccccagcctagtgagacgcaagagactattactagtgagccaagcgggagtgaagatgaaattttagactctttagcagaaaaatatgtggagtatagtttatactacgctttgattgattctttagccgcagagcatagcgctagaatg

SEQ ID NO: 983 - DNA (genomic), 777 bp, Helicobacter pylori; double-stranded, circular
  misc_feature (B) LOCATION 1...777
  hypothetical: NO
  anti-sense: NO
atggcgaatttaagagacattagaaagaaaattggaagcgttaaaaacacgcaaagaatcacgcatgcgatgaaactcgtttccacttccaagctaagaaaggccgaagaagttgcaagaaattctagagcgtatgcactgaagctagacgctgtgtttgatgatgtgctatccaaaatgaaaaatcaagggattgaagacattcaaagcaagtattttagggaactagaaagacttgaaatcaaaaaagtggatattattttcatcacagccgataaggggctttgtgggggctttaacaccaataccattaaaaaagttttagcatgcacgaatgaatacaaagaaaaagacattaaagcgcgtttgcgcggtattggtaaaaagggtaatgagtattttagctttaacgggatagaggttttagacaagatcaataatttgagttctatgcctaattatgaacgcgcacaggaattcatgaaaaaagtggtagaggattatttgagtgggaaaaccgataaggtgattatcattcataatggctttaaaaacatgatcactcaagaaataagagtcaaaacgattttacctattgggtataaaatcatccaccaaaacccccagcctagtgagacgcaagagactattactagtgagccaagcgggagtgaagatgaaattttagactctttagcagaaaaatatgtggagtatagtttatactacgctttgattgattctttagccgcagagcatagcgctagaatgcaggct

SEQ ID NO: 984 - DNA (genomic), 906 bp, Helicobacter pylori; double-stranded, circular
  misc_feature (B) LOCATION 1...906
  hypothetical: NO
  anti-sense: NO
atggcgaatttaagagacattagaaagaaaattggaagcgttaaaaacacgcaaagaatcacgcatgcgatgaaactcgtttccacttccaagctaagaaaggccgaagaagttgcaagaaattctagagcgtatgcactgaagctagacgctgtgtttgatgatgtgctatccaaaatgaaaaatcaagggattgaagacattcaaagcaagtattttagggaactagaaagacttgaaatcaaaaaagtggatattattttcatcacagccgataaggggctttgtgggggctttaacaccaataccattaaaaaagttttagcatgcacgaatgaatacaaagaaaaagacattaaagtgcgtttgcgcggtattggtaaaaagggtaatgagtattttagctttaacgggatagaggttttagacaagatcaataatttgagttctatgcctaattatgaacgcgcacaggaattcatgaaaaaagtggtagaggattatttgagtgggaaaaccgataaggtgattatcattcataatggctttaaaaacatgatcactcaagaaataagagtcaaaacgattttacctattgggtataaaatcatccaccaaaacccccagcctagtgagacgcaagagactattactagtgagccaagcgggagtgaagatgaaattttagactctttagcagaaaaatatgtggagtatagtttatactacgctttgattgattctttagccgcagagcatagcgctagaatgcaggctatggatacagcgacgaataacgctaaagatttggttaaaactttaaccatttcttataataaagccagacaagaggcgattacgaccgagctagtagaaatcaatgctggcgtagaagccctaaaataa

SEQ ID NO: 985 - DNA (genomic), 369 bp, Helicobacter pylori; double-stranded, circular
  misc_feature (B) LOCATION 1...369
  hypothetical: NO
  anti-sense: NO
tgggcgatgaatgtttgggtgtataggcctttgttggcttttatggataacagacaggcagagataaaggacagcttggctaaaatcaaaacggataacacccaaagcgtggagattggccatcaaattgagactcttcttaaagaagccgctgaaaagcgcagggaaatgctagcagaagcgattcaaaaagctacagagtcttatgacgctgtgatcaagcaaaaggagaacgaactcaatcaagagtttgaagcgttcgcaaagcaattacaaaatgaaaaacaaatcttaaaagagcaattgcaagcgcaaatgacggtatttgaagacgagttaaacaagcgtgtggctatgggtttagggagt

SEQ ID NO: 986 - DNA (genomic), 435 bp, Helicobacter pylori; double-stranded, circular
  misc_feature (B) LOCATION 1...435
  hypothetical: NO
  anti-sense: NO
atgaatatatcggttaacccctatttaatggcggtcgtttttgtagtgtttgtgttgttgttgtgggcgatgaatgtttgggtgtataggcctttgttggcttttatggataacagacaggcagagataaaggacagcttggctaaaatcaaaacggataacacccaaagcgtggagattggccatcaaattgagactcttcttaaagaagccgctgaaaagcgcagggaaatgctagcagaagcgattcaaaaagctacagagtcttatgacgctgtgatcaagcaaaaggagaacgaactcaatcaagagtttgaagcgttcgcaaagcaattacaaaatgaaaaacaaatcttaaaagagcaattgcaagcgcaaatgacggtatttgaagacgagttaaacaagcgtgtggctatgggtttagggagttga

SEQ ID NO: 987 - DNA (genomic), 381 bp, Helicobacter pylori; double-stranded, circular
  misc_feature (B) LOCATION 1...381
  hypothetical: NO
  anti-sense: NO
atgtttgtagttaaaatggtgttagggtttttgatccttttaagccctttgtgcgctactggattggatatttcacaaacagacattatagagcgttctttaaatttcctcttgtttgtggggattttgtggtattttttggctaaaagattgcgttcatttttgcattccaaaagccttgaaatctccaaacgcttagaagagattcaagcccaacttaaagtgagtaaagaacataagaaaaaactccttaaagaattagagcaagccaaagaaaaagctgaattgattatttctgatgcgaataaagaagccctacacgatcacgcaaaaatacgaattacaaaccaaaatggatgtggaaaatttgatcaaaaattc

SEQ ID NO: 988 - DNA (genomic), 516 bp, Helicobacter pylori; double-stranded, circular
  misc_feature (B) LOCATION 1...516
  hypothetical: NO
  anti-sense: NO
atgtttgtagttaaaatggtgttagggtttttgatccttttaagccctttgtgcgctactggattggatatttcacaaacagacattatagagcgttctttaaatttcctcttgtttgtggggattttgtggtattttttggctaaaagattgcgttcatttttgcattccaaaagccttgaaatctccaaacgcttagaagagattcaagcccaacttaaagtgagtaaagaacataagaaaaaactccttaaagaattagagcaagccaaagaaaaagctgaattgattatttctgatgcgaataaagaagcctacacgatcacgcaaaaatacgaattacaaaccaaaatggatgtggaaaatttgatcaaaaattctaaggcgttgatggatttagaagttaaaaagatcaaaagagagttggttgaaagcgtttttaaagatctaagagagagtaaaaaagtgtctttcaatgcgcaagattgcgtgaatattttgaaacaaaggctttaa

SEQ ID NO: 989 - DNA (genomic), 516 bp, Helicobacter pylori; double-stranded, circular
  misc_feature (B) LOCATION 1...516
  hypothetical: NO
  anti-sense: NO
tggatgtttgtagttaaaatggtgttagggtttttgatccttttaagccctttgtgcgctactggattggatatttcacaaacagacattatagagcgttctttaaatttcctcttgtttgtggggattttgtggtattttttggctaaaagattgcgttcatttttgcattccaaaagccttgaaatctccaaacgcttagaagagattcaagcccaacttaaagtgagtaaagaacataagaaaaaactccttaaagaattagagcaagccaaagaaaaagctgaattgattatttctgatgcgaataaagaagcctacacgatcacgcaaaaatacgaattacaaaccaaaatggatgtggaaaatttgatcaaaaattctaaggcgttgatggatttagaagttaaaaagatcaaaagagagttggttgaaagcgtttttaaagatctaagagagagtaaaaaagtgtctttcaatgcgcaagattgcgtgaatattttgaaacaaaggctt

SEQ ID NO: 990 - DNA (genomic), 558 bp, Helicobacter pylori; double-stranded, circular
  misc_feature (B) LOCATION 1...558
  hypothetical: NO
  anti-sense: NO
atgcagatggtgcctatgggtttgcagaatgtgtatgagagcatcattagcgcgattttgagcgtggctaaggatattataggcgaagaattggcccgcaaatacttccccctagcaggcacgatcgctttgtatgtctttttttccaacatgataggcatcattcctggttttgaatcccctacggctagttggagctttacgctggttttagcgctgattgtgtttttttattaccattttgaaggcattagagtgcagggcttttttaagtatttcgctcattttgcaggccctgtgaaatggctcgcccctttcatgttccctattgagatcatctcgcatttttctaggatcgtgtctttatcgtttcgtttgtttgggaatatcaagggcgatgacatgttcttgctcatcatgcttttattagtgccttgggcggttcctgtagcaccttttatggttttgttttttatggggattttacaagcttttgtttttatgatcctcacttatgtgtatctggcaggggctgttttgaccgatgaaggacattaa

SEQ ID NO: 991 - DNA (genomic), 627 bp, Helicobacter pylori; double-stranded, circular
  misc_feature (B) LOCATION 1...627
  hypothetical: NO
  anti-sense: NO
ttttatcaccgggttttttgtcgttttgacagcggttttgatgtttttcatttcgcttggcgcatcgcgcaaatgcagatggtgcctatgggtttgcagaatgtgtatgagagcatcattagcgcgattttgagcgtggctaaggatattataggcgaagaattggcccgcaaatacttccccctagcaggcacgatcgctttgtatgtctttttttccaacatgataggcatcattcctggttttgaatcccctacggctagttggagctttacgctggttttagcgctgattgtgtttttttattaccattttgaaggcattagagtgcagggcttttttaagtatttcgctcattttgcaggccctgtgaaatggctcgcccctttcatgttccctattgagatcatctcgcatttttctaggatcgtgtctttatcgtttcgtttgtttgggaatatcaagggcgatgacatgttcttgctcatcatgcttttattagtgccttgggcggttcctgtagcaccttttatggttttgttttttatggggattttacaagcttttgtttttatgatcctcacttatgtgtatctggcaggggctgttttgaccgatgaaggacat

SEQ ID NO: 992 - DNA (genomic), 681 bp, Helicobacter pylori; double-stranded, circular
  misc_feature (B) LOCATION 1...681
  hypothetical: NO
  anti-sense: NO
atggaacacagagtatttactattgctaatttttttagctccaatcatgattttatcaccgggttttttgtcgttttgacagcggttttgatgtttttcatttcgcttggcgcatcgcgcaaaatgcagatggtgcctatgggtttgcagaatgtgtatgagagcatcattagcgcgattttgagcgtggctaaggatattataggcgaagaattggcccgcaaatacttccccctagcaggcacgatcgctttgtatgtctttttttccaacatgataggcatcattcctggttttgaatcccctacggctagttggagctttacgctggttttagcgctgattgtgtttttttattaccattttgaaggcattagagtgcagggcttttttaagtatttcgctcattttgcaggccctgtgaaatggctcgcccctttcatgttccctattgagatcatctcgcatttttctaggatcgtgtctttatcgtttcgtttgtttgggaatatcaagggcgatgacatgttcttgctcatcatgcttttattagtgccttgggcggttcctgtagcaccttttatggttttgttttttatggggattttacaagcttttgtttttatgatcctcacttatgtgtatctggcaggggctgttttgaccgatgaaggacattaa

SEQ ID NO: 993 - DNA (genomic), 231 bp, Helicobacter pylori; double-stranded, circular
  misc_feature (B) LOCATION 1...231
  hypothetical: NO
  anti-sense: NO
atgcaacaagaagagattatagagggttattatggcgctagtaaagggcttaaaaagagcggtatttacgctaagctggattttttacagagcgccacgggcttgattttagcgctctttatgatagcgcacatgtttttggtctctagtatcttaattagcgatgaagccatgtataaagtggcgaaattttttgaagggagtctgtttatgaaagcgggcgagccggga

SEQ ID NO: 994 - DNA (genomic), 297 bp, Helicobacter pylori; double-stranded, circular
  misc_feature (B) LOCATION 1...297
  hypothetical: NO
  anti-sense: NO
gatcggtttattaagaaaaattatttcaaatgtagtaaaattaaggcagtgtttttgcgtcaagcgattcaggttaaatttgagtttttaggagcagtttttatgcaacaagaagagattatagagggttattatggcgctagtaaagggcttaaaaagagcggtatttacgctaagctggattttttacagagcgccacgggcttgattttagcgctctttatgatagcgcacatgtttttggtctctagtatcttaattagcgatgaagccatgtataaagtggcgaaatttttt

SEQ ID NO: 995 - DNA (genomic), 768 bp, Helicobacter pylori; double-stranded, circular
  misc_feature (B) LOCATION 1...768
  hypothetical: NO
  anti-sense: NO
atgcaacaagaagagattatagagggttattatggcgctagtaaagggcttaaaaagagcggtatttacgctaagctggattttttacagagtgccacgggcttgattttagcgctctttatgatagcgcacatgtttttggtctctagtatcttaattagcgatgaagccatgtataaagtggcgaaattttttgaagggagtctgtttttgaaagcgggcgagccggctattgtgagcgtggttgcagcaggggttattcttattttggtcgcgcatgcttttttagccttgaggaaattccctatcaattacaggcaatacaaggtttttaaaacccataagcatttgatgaagcatggcgatacgagtttgtggtttatccaggccttaaccggatttgcgatgtttttcttagcgagtatccatttgtttgtcatgctcacagagcctgaaagtattgggcctcatggctcaagctatcgttttgtaacgcaaaacttttggcttttgtatattttcttattgtttgccgtagaattgcatggctctatcgggttgtatcgcttagcgatcaaatgggggtggtttaagaacgtgagcattcaaggcttgaggaagatcaaatgggcgatgagcgtgttttttattgttttagggctttgcacctatggggcttacattaaaaaaggtttagaaaataaggacaatggcattaaaaccatgcaagaagccatagaagctgatgggaaattccacaaagaataa

SEQ ID NO: 996 - DNA (genomic), 321 bp, Helicobacter pylori; double-stranded, circular
  misc_feature (B) LOCATION 1...321
  hypothetical: NO
  anti-sense: NO
gcatcagctctcctgggtatcatgccctatatcacttcttcaattatcatggagcttttgagcgcgactttccctaacctggctaaaatgataaaagagcgagacggcatgcaaaaatacatgcaaatcgtgcgctatttgaccattttaatcaccctaatccaagcggtgagcgtttcagtggggttaaggagcattaatggaggagccaatggggcgatcatgattgatatgcaagtctttatgattgtttcttcgtgtcctacgcttacagggacgatgttgctcatgtggataggggagcaaatcacgcaagaggcg

SEQ ID NO: 997 - DNA (genomic), 327 bp, Helicobacter pylori; double-stranded, circular
  misc_feature (B) LOCATION 1...327
  hypothetical: NO
  anti-sense: NO
ttgagcatcatctctctgggtatcatgccctatatcacttcttcaattatcatggagcttttgagcgcgactttccctaacctggctaaaatgataaaagagcgagacggcatgcaaaaatacatgcaaatcgtgcgctatttgaccattttaatcaccctaatccaagcggtgagcgtttcagtggggttaaggagcattagtggaggagccaatggggcgatcatgattgatatgcaagtctttatgatcttttcttcgtgtcctatgcttacagggacgatgttgctcatgtggataggggagcaaatcacgcaagaggcgtag

SEQ ID NO: 998 - DNA (genomic), 408 bp, Helicobacter pylori; double-stranded, circular
  misc_feature (B) LOCATION 1...408
  hypothetical: NO
  anti-sense: NO
tatgcaagtctttatgattgtttcttcgtgtcctacgcttacagggacgatgttgctcatgtggataggggagcaaatcacgcaagaggcgtagggaatgggatcagtctcattatttttgctgggattgtttcagggatcccatcagccatttcaggcacattcaatctagtcaatacgggcgtgatcaatatcttaatgctcattggtattgtattgattgttttagcgacgatttttgcgatcatctatgtggaattagccgagcgcaggatccctatttcttatgcgcgtaaagtggtgatgcaaaaccaaaacaagcgcatcatgaattacattcctattaagttgaatttaagcggggtgatcccccctattttcgttcaactttgctcgggttcccttaga

SEQ ID NO: 999 - DNA (genomic), 822 bp, Helicobacter pylori; double-stranded, circular
  misc_feature (B) LOCATION 1...822
  hypothetical: NO
  anti-sense: NO
gtgtcctatgcttacagggacgatgttgctcatgtggataggggagcaaatcacgcaagaggcgtagggaatgggatcagtctcattatttttgctgggattgtttcagggatcccatcagccatttcaggcacattcaatctagtcaatacgggcgtgatcaatatcttaatgctcattggtattgtattgattgttttagcgacgatttttgcgatcatctatgtggaattagccgagcgcaggatccctatttcttatgcgcgtaaagtggtgatgcaaaaccaaaacaagcgcatcatgaattacattcctattaagttgaatttaagcggggtgatcccccctattttcgcttcagctttgctcgtgttcccttctacgattttgcagcaagccacaagcaacaagaccttgcaagcgattgcggattttttaagcccacaagggtatgcgtataacattttgatgttcttactcatcatctttttcgcttatttttattcttctatcgtgttcaattctaaggatattgcggataatttgaggcgtaatggcgggtatattccagggcttaggcctggagaggggacttcatcgtttttgaatgctgtagcgagcaagctcactttgtggggttcgttgtacttggcgctcatttctaccgtgccttggattttggttaaggctatgggcgtgcctttttactttggaggtacggcggtgctgattgtggttcaagtcgctattgataccatgaaaaagattgaagcgcaaatttatatgagcaagtataaaactttaagcgcggtaggcttttaa

SEQ ID NO: 1000 - DNA (genomic), 1059 bp, Helicobacter pylori; double-stranded, circular
  misc_feature (B) LOCATION 1...1059
  hypothetical: NO
  anti-sense: NO
atgccctatatcacttcttcaattatcatggagcttttgagcgcgactttccctaacctggctaaaatgaaaaaagagcgagacggcatgcaaaaatacatgcaaatcgtgcgctatttgaccattttaatcaccctaatccaagcggtgagcgtttcagtggggttaaggagcattagtggaggagccaatggggcgatcatgattgatatgcaagtctttatgatcgtttcagcgttttctatgcttacagggacgatgttgctcatgtggataggggagcaaatcacgcaaagaggcgtagggaatgggatcagtctcattatttttgctgggattgtttcagggatcccatcagccatttcaggcacattcaatctagtcaatacgggcgtgatcaatatcttaatgctcattggtattgtattgattgttttagcgacgatttttgcgatcatctatgtggaattagccgagcgcaggatccctatttcttatgcgcgtaaagtggtgatgcaaaaccaaaacaagcgcatcatgaattacattcctattaagttgaatttaagcggggtgatcccccctattttcgcttcagctttgctcgtgttcccttctacgattttgcagcaagccacaagcaacaagaccttgcaagcgattgcggattttttaagcccacaagggtatgcgtataacattttgatgttcttactcatcatctttttcgcttatttttattcttctatcgtgttcaattctaaggatattgcggataatttgaggcgtaatggcgggtatattccagggcttaggcctggagaggggacttcatcgtttttgaatgctgtagcgagcaagctcactttgtggggttcgttgtacttggcgctcatttctaccgtgccttggattttggttaaggctatgggcgtgcctttttactttggaggtacggcggtgctgattgtggttcaagtcgctattgataccatgaaaaagattgaagcgcaaatttatatgagcaagtataaaactttaagcgcggtaggcttttaa

SEQ ID NO: 1001 - DNA (genomic), 603 bp, Helicobacter pylori; double-stranded, circular
  misc_feature (B) LOCATION 1...603
  hypothetical: NO
  anti-sense: NO
gtgtttatgacaagcgctctgttaggcttacaaattgttttagcggtattgattgtggtggtggttttgttgcaaaaaagttctagcatcggcttaggggcttatagcggaagcaacgattctttatttggcgctaaagggcccgcaagctttatggcgaaattgaccatgtttttaggtttattgtttgtcatcaacaccatcgctttgggctatttttacaacaaagaatacggcaagagcgttttagatgaaactaaaaccaataaagagctttcgcccttagtccctgccaccggcacgctcaaccctacgcttaatcccacattaaacccaacgctcaaccctttagagcaagcccccactaatcctttaatgcctacacaaacgcctaaagagcttcctaaagagccagccaaaacgccttttgttgaaagccccaaacagaatgaaaagaatgaaaagaatgatgccaaagaaaatggtataaagggtgttgaaaaaaacaaagagaacgccaaaacgcccccaaccacccaccaaaagcctaaaacgcatgcgacaaccaacgcccataccaaccaaaaaaaggatgaaaaataa

SEQ ID NO: 1002 - DNA (genomic), 432 bp, Helicobacter pylori; double-stranded, circular
  misc_feature (B) LOCATION 1...432
  hypothetical: NO
  anti-sense: NO
atgaatttttttaaaatccttttaatggagttaagagccattgtttctcataagggcgttttattgatccttataggcgctcctttaatctatggcttgttataccctttgccttatttgaaagacatcgtaacgcagcaaaaaatcgcccttgtagatgaagacaattccttcctttctaggcaattagccttcatggtgcaaagctccaacgagttagaaatcgctttctttagcccctctatgctggaagccaaaaagcttttaaaagaagaaaaaatttatgggatcttacacattccctctcattttgaagccaatatttataaacaaagtgcctgtaacgatagatttttatgcgaacgccaattactttttgatttatggtgcgttagcgaatgcggtggtggggagcatcaacgccttaaacga

SEQ ID NO: 1003 - DNA (genomic), 1131 bp, Helicobacter pylori; double-stranded, circular
  misc_feature (B) LOCATION 1...1131
  hypothetical: NO
  anti-sense: NO
atgaatttttttaaaatccttttaatggagttaagagccattgtttctcataagggcgttttattgatccttataggcgctcctttaatctatggcttgttataccctttgccttatttgaaagacatcgtaacgcagcaaaaaatcgcccttgtagatgaagacaattccttcctttctaggcaattagccttcatggtgcaaagctccaacgagttagaaatcgctttctttagcccctctatgctggaagccaaaaagcttttaaaagaagaaaaaatttatgggatcttacacattccctctcattttgaagccaatatttataaacaagtgcctgtaacgatagatttttatgcgaacgccaattactttttgatttatggtgcgttagcgaatgcggtggtggggagcatcaacgccttaaacgatgaaatcaggttcaaacgcaacgcccaaatagaagaagctgaattagggacagacgggattaagattaagcctatcgctttgtataaccctagtgaggggtatttgaattacgcgctctctagcgtgtttattttcatcttacaccaggtgatgctcattgcaagcagcatgtttactagctccaggcgtttggaattggcccttttagacaagaaacaaatcgctttaaggctgtgcgcaagactcttggtgttcatgggggcgtttagcgtttttgttttatggtattttggggcgctgttttctttttatgggatcgaacggcatggaagcgctttaatggtgtttttgaacagcttgattttcatgcttgcggccttgagtttggggtcgtttttaggggcatggatcaaaaatgaagcccacaccactcaaatcgttttgatttcttctttgcccttgatttttatgatgggttttgtgtggccttttgaatccttgccctcttatttgcaagtcttcgttcaaatagtgcctgcttatcatgggatcagtttgctcgggcgattgaatcaaatgcatgcggaatttatagatgtttctatccatttttacgcgcttattgcgatttttatcgtgagttttatagggtgcgtgttcaaactcagctctttaaagaaagcttgtgaaaacgcttaa

SEQ ID NO: 1004 - DNA (genomic), 1131 bp, Helicobacter pylori; double-stranded, circular
  misc_feature (B) LOCATION 1...1131
  hypothetical: NO
  anti-sense: NO
cgcatgaatttttttaaaatccttttaatggagttaagagccattgtttctcataagggcgttttattgatccttataggcgctcctttaatctatggcttgttataccctttgccttatttgaaagacatcgtaacgcagcaaaaaatcgcccttgtagatgaagacaattccttcctttctaggcaattagccttcatggtgcaaagctccaacgagttagaaatcgctttctttagcccctctatgctggaagccaaaaagcttttaaaagaagaaaaaatttatgggatcttacacattccctctcattttgaagccaatatttataaacaagtgcctgtaacgatagatttttatgcgaacgccaattactttttgatttatggtgcgttagcgaatgcggtggtggggagcatcaacgccttaaacgatgaaatcaggttcaaacgcaacgcccaaatagaagaagctgaattagggacagacgggattaagattaagcctatcgctttgtataaccctagtgaggggtatttgaattacgcgctctctagcgtgtttattttcatcttacaccaggtgatgctcattgcaagcagcatgtttactagctccaggcgtttggaattggcccttttagacaagaaacaaatcgctttaaggctgtgcgcaagactcttggtgttcatgggggcgtttagcgtttttgttttatggtattttggggcgctgttttctttttatgggatcgaacggcatggaagcgctttaatggtgtttttgaacagcttgattttcatgcttgcggccttgagtttggggtcgtttttaggggcatggatcaaaaatgaagcccacaccactcaaatcgttttgatttcttctttgcccttgatttttatgatgggttttgtgtggccttttgaatccttgccctcttatttgcaagtcttcgttcaaatagtgcctgcttatcatgggatcagtttgctcgggcgattgaatcatatgcatgcggaatttatagatgtttatatccatttttacgcgcttattgcgatttttatcgtgagttttatagggtgcgtgttcaaactcagctctttaaagaaagcttgtgaaaacgct

SEQ ID NO: 1005 - DNA (genomic), 477 bp, Helicobacter pylori; double-stranded, circular
  misc_feature (B) LOCATION 1...477
  hypothetical: NO
  anti-sense: NO
atgaaactttttaaccctcgtttaatcgtttttatattcgcgcttcttttaggggtagggttttctgtgccttctttgctagaaactaaaggccctaaaatcactttaggtttggatttaaggggggggttgaacatgcttttaggggtgcaaaccgatgaggctttaaaaaacaagtatttaagcctagcgtctgctttagaatacaacgctaaaaagcaaaatatcttgcttaaagacattaaatccagtttagaggggatcagttttgagcttttagatgaagatgaggcgaaaaaattagacgcgcttttattggaattgcaaggtcatagccagtttgaaatcaaaaaagaagcggagttttatagcgtgaaactcacccctttagagcaagaggaattgcgtaaaaacacgatcttgcaagtgatagggatcattcgtatccgcttggatcatttggcttggcagagcctg

SEQ ID NO: 1006 - DNA (genomic), 531 bp, Helicobacter pylori; double-stranded, circular
  misc_feature (B) LOCATION 1...531
  hypothetical: NO
  anti-sense: NO
atgaaactttttaaccctcgtttaatcgtttttatattcgcgcttcttttaggggtagggttttctgtgccttctttgctagaaactaaaggccctaaaatcactttaggtttggatttaaggggggggttgaacatgcttttaggggtgcaaaccgatgaggctttaaaaaacaagtatttaagcctagcgtctgctttagaatacaacgctaaaaagcaaaatatcttgcttaaagacattaaatccagtttagaggggatcagttttgagcttttagatgaagatgaggcgaaaaaattagacgcgcttttattggaattgcaaggtcatagccagtttgaaatcaaaaaagaagcggagttttatagcgtgaaactcacccctttagagcaagaggaattgcgtaaaaacacgatcttgcaagtgatagggatcattcgtaaccgcttggatcgatttggcttggcagagcctgtagtcattcagcaaggccgagtagaatttcggtgcaattgcccggcattaaga

SEQ ID NO: 1007 - DNA (genomic), 1581 bp, Helicobacter pylori; double-stranded, circular
  misc_feature (B) LOCATION 1...1581
  hypothetical: NO
  anti-sense: NO
atgaaactttttaaccctcgtttaatcgtttttatattcgcgcttcttttaggggtagggttttctgtgccttctttgctagaaactaaaggccctaaaatcactttaggtttggatttaaggggggggttgaacatgcttttaggggtgcaaaccgatgaggctttaaaaaacaagtatttaagcctagcgtctgctttagaatacaacgctaaaaagcaaaatatcttgcttaaagacattaaatccagtttagaggggatcagttttgagcttttagatgaagatgaggcgaaaaaattagacgcgcttttattggaattgcaaggtcatagccagtttgaaatcaaaaaagaagcggagttttatagcgtgaaactcacccctttagagcaagaggaattgcgtaaaaacacgatcttgcaagtgatagggatcattcgtaaccgcttggatcaatttggtttggcagagcctgtagtcattcagcaaggccgagaagaaatttcggtgcaattgcccggcattaagactttagaagaagagcggcgcgctaaagacttgatttctaaatccgctcatttgcagatgatggcagtggatgaagaacacaataaagatgcgatgaatatgacggatttagaggctcaaaaattaggcagcgtgttgttgtctgatgcggaaatggggggtaaaatcttactcaaagcgatccctattttagatggcgaaatgcttacagatgcgaaagtggtgtatgatcaaaataaccagccggtggtgagcttcacgctagatgcgcaaggggctaagatttttggggatttttcaggcgcgaatgtgggcaaacgcatggcgatcgttttagacaataaggtctattcagccccggtgattagggaacgcattggtggggggagcgggcagattaacgggaattttagcgtggctcaagcgagcgatttagcgatcgctttaaggagtggggcgatgaacgcgcccattcaggttttagaaaaaaggattgtaggtccgagtttagggaaagacagcattaaaacttccattatcgctctagttggaggctttattttagtgatgggctttatggcactttattactccatggctggggtgatcgcttgcatggcgttagtggtcaatctttttttgatcgtggcggtcatggcgatttttggagcgacgctgactttaccgggaatggcagggattgttttaaccgtggggattgccgtggatgctaatatcattatcaacgaacgcattagagaagttttaagagaaggagagggtgttgttaaggcgatccatttaggctatatcaatgcgagccgggcgatttttgactccaatatcacttccttgatcgcttcggtgttgctatacgcttatggcacaggagcgattaaaggctttgccctcaccacaggcattgggattttagcctctatcatcaccgctattataggcacgcaagggatttatcaagcccttttacctaaattagcccaaacgaaaagcctttacttttggtttggcgtgaaaaataaaagagcttag

SEQ ID NO: 1008 - DNA (genomic), 222 bp, Helicobacter pylori; double-stranded, circular
  misc_feature (B) LOCATION 1...222
  hypothetical: NO
  anti-sense: NO
gatcacgccggatatcatggatgtgtgttgcgctccattgatttgatgaaaaccttactcgtaacgattagagacaccggatcggatactaataacggcaaggaaaacgagattgaagaagtagtcaaaaagcttcaagccattacgagccaaaatttagagggcgctaaagaaacttcagggactaaagaaggccccagaaaaagaagtaaaaaaagaaaa

SEQ ID NO: 1009 - DNA (genomic), 276 bp, Helicobacter pylori; double-stranded, circular
  misc_feature (B) LOCATION 1...276
  hypothetical: NO
  anti-sense: NO
agggcgctaaagaaacttcagggactaaagaaggccccagaaaaagaagtaaaaaaagaaaataaagaaaaagcaaaagaagaagttaaagcaaataaaacccctactacagaaaaccttgcaagcggtaacccgctagccgatgagccggatttggattatgccaacatgagcgctgaagaagtggaagcggaaattgaacgactgcttaacaaacgccaagaagccgataaagaacgaagagctcaaaaaaagcaaggaagatcaagccaagcc

SEQ ID NO: 1010 - DNA (genomic), 285 bp, Helicobacter pylori; double-stranded, circular
  misc_feature (B) LOCATION 1...285
  hypothetical: NO
  anti-sense: NO
atggatgatttgcaagaaataatggaagacttcttgattgaagcctttgaaatgaatgagcagttggatcaggatctggtggaattagagcataaccctgaagatttggacttgctcaatcgcatttttagagtcgcccacaccattaaaggctctagctcgtttttgaatcttaatattctcactcacctcgcgcacaacatggaagatgtcttgaatcgcgccagaaagggcgaaattaagatcacgccggatatcatggatgtgtgttgcgctccattgatt

SEQ ID NO: 1011 - DNA (genomic), 1008 bp, Helicobacter pylori; double-stranded, circular
  misc_feature (B) LOCATION 1...1008
  hypothetical: NO
  anti-sense: NO
gcgctgaagaagtggaagcggaaattgaacgactgcttaacaaacgccaagaagccgataaagaacgaagagctcaaaaaaagcaaggaagatcaagccaagcctaaacaagaagtcgccccagccatgagaactcctataacagaaaccccccacacagaaacctcccaagtccctaaagcagaaactaaagctaaggctaaagctgatactgaagaaaataaagccccctctattggcgtggagcaaaccgttagggtggatgtgcgccgcttggatcacttgatgaatctaatcggcgaacttgtgttagggaagaatcgcttgatcaggatttatagcgatgtggaaggacgctatgatggggaaaagtttttagaggaattaaaccaggtggtttcttctatttcagcggtaacgacagacttgcagcttgcggtgatgaaaacccggatgcaaccagtgggcaaggtgttcaataaattccctcgcatggtaagggatttgagccgggaattaggcaagagcattgaattgattattgagggcgaagaaaccgagcttgataaatccattgtagaagagattggcgatccactcatccacattatccgcaactcatgcgatcatgggattgagcccttagaagaaagaagaaggcttaacaagcctgaaaccggtaaggtgcaattgagtgcgtataatgagggcaatcacattgtgatcaaaatctctgatgatggcaaggggttagatcctgtgatgcttaaagaaaaagcgattgaaaaaggggtgattagcgaaagagacgctgaaagcatgagcgatagggaagcgtttaacctcattttcaagccaggcttttctacccgaaaagtcgtttccaatgtttcaggcagaggtgtgggcatggatgtggtgaaaaccaatatgaaaagcttaatgggatcattgaaatcgattcagagtgggggtaggcacgactcaaagctaaaatccctctcactt

SEQ ID NO: 1012 - DNA (genomic), 1584 bp, Helicobacter pylori; double-stranded, circular
  misc_feature (B) LOCATION 1...1584
  hypothetical: NO
  anti-sense: NO
atggatgatttgcaagaaataatggaagacttcttgattgaagcctttgaaatgaatgagcagttggatcaggatctggtggaattagagcataaccctgaagatttggacttgctcaatcgcatttttagagtcgcccacaccattaaaggctctagctcgtttttgaatcttaatattctcactcacctcacgcacaacatggaagatgtcttgaatcgcgccagaaagggcgaaattaagatcacgccggatatcatggatgtcgtgttgcgctccattgatttgatgaaaaccttactcgtaacgattagagacaccggatcggatactaataacggcaaggaaaacgagattgaagaagtagtcaaaaagcttcaagccattacgagccaaaatttagagggcgctaaagaaacttcagggactaaagaagccccagaaaaagaagtaaaaaaagaaaataaagaaaaagcgaaagaagaagttaaagcaaataaaacccctactacagaaaaccttacaagcgataacccgctagccgatgagccggatttggattatgccaacatgagcgctgaagaagtggaagcggaaattgaacgactgcttaacaaacgccaagaagccgataaagaacgaagagctcaaaaaaagcaagaagatcaagccaagcctaaacaagaagtcgccccagcaaaagaaactcctaaaacagaaacccccaaaacagaaacccgcaaagtccctaaagcagaaactaaagctaaggctaaagcagatactgaagaaaataaagccccctctattggcgtggagcaaaccgttagggtggatgtgcgccgcttggatcacttgatgaatctaatcggcgaacttgtgttagggaagaatcgcttgatcaggatttatagcgatgtggaagaacgctatgatggggaaaagtttttagaggaattaaaccaggtggtttcttctatttcagcggtaacgacagacttgcagcttgcggtgatgaaaacccggatgcaaccagtgggcaaggtgttcaataaattccctcgcatggtaagggatttgagccgggaattaggcaagagcattgaattgattattgagggcgaagaaaccgagcttgataaatccattgtagaagagattggcgatccactcatccacattatccgcaactcatgcgatcatgggattgagcccttagaagaaagaagaaggcttaacaagcctgaaaccggtaaggtgcaattgagtgcgtataatgagggcaatcacattgtgatcaaaatctctgatgatggcaaggggttagatcctgtgatgcttaaagaaaaagcgattgaaaaaggggtgattagcgaaagagacgctgaaagcatgagcgatagggaagcgtttaacctcattttcaagccaggcttttctacccgaaaagtcgtttccaatgtttcaggcagaggtgtgggcatggatgtggtgaaaaccaatatgaaaagcttaatgggatcattgaaatcgattcagagtgggggtaggcacgactcaaagctaaaatccctctcactttag

SEQ ID NO: 1013 - DNA (genomic), 264 bp, Helicobacter pylori; double-stranded, circular
  misc_feature (B) LOCATION 1...264
  hypothetical: NO
  anti-sense: NO
aatccctctcactttagctatcatcaagctttactcgtgggcgttcaagaagaatattacgctatcccgctttcttcagttttagaaaccgtgcgtatcagccaggatgaaatttacaccgttgatggcaaaagcgtgttgcgtttgagagatgaggtgctttctttggtgcgcctttctgatatttttaaagtggatgctattttgaatccaactctgatgtgtatgtggttatcattggcttggccgatcaaaaaattggcg

SEQ ID NO: 1014 - DNA (genomic), 267 bp, Helicobacter pylori; double-stranded, circular
  misc_feature (B) LOCATION 1...267
  hypothetical: NO
  anti-sense: NO
atgctcaaaaatggcgataagattccggacgctattttagtggatattgagatgcctaaaatggatggctacactttcgcctctgaagtgcgtaaatacaataaattcaaaaacctgcccttgatcgccgttaccagtcgggtaactaaaacggacagaatgcgcggcgttgaatccggcatgactgaatacatcaccaaaccttatagcggtgaatatttaaccaccgtagtgaagcgcagcattaaattagaaggagaccaatcg

SEQ ID NO: 1015 - DNA (genomic), 681 bp, Helicobacter pylori; double-stranded, circular
  misc_feature (B) LOCATION 1...681
  hypothetical: NO
  anti-sense: NO
agtggatgctattttgaatccaactctgatgtgtatgtggttatcattggcttggccgatcaaaaaattggcgtgatcgtggattatttgatcggtcaagaagaagtggtcatcaagtctttaggttattatcttaaaaacactagaggcattgctggcgctacggtgaggggcgatgggaaaatcactctcattgtagatgtgggggcgatgatggaaatggcaaagagcattaaagtcaatatcactaccttgatgaacgagtcagaaaacacgaaaagcaaaaattctcctagcgattatgttgtcttggcgattgatgacagcagcacggacagagcgattatccgcaaatgtttaaaaccattaggcatcacgctcttagaggccactaacggcttagagggcttagaaatgctcaaaaatggcgataagattccggacgctattttagtggatattgagatgcctaaaatggatggctacactttcgcctctgaagtgcgtaaatacaataaattcaaaaacctgcccttgatcgccgttaccagtcgggtaactaaaacggacagaatgcgcggcgttgaatccggcatgactgaatacatcaccaaaccttatagcggtgaatatttaaccaccgtagtgaagcgcagcattaaattagaaggagaccaatcg

SEQ ID NO: 1016 - DNA (genomic), 840 bp, Helicobacter pylori; double-stranded, circular
  misc_feature (B) LOCATION 1...840
  hypothetical: NO
  anti-sense: NO
gtgggcgttcaagaagaatattacgctatcccgctttcttcagttttagaaaccgtgcgtatcagccaggatgaaatttacaccgttgatggcaaaagcgtgttgcgtttgagagatgaggtgctttctttggtgcgcctttctgatatttttaaagtggatgctattttggaatccaactctgatgtgtatgtggttatcattggcttggccgatcaaaaaattggcgtgatcgtggattatttgatcggtcaagaagaagtggtcatcaagtctttaggttattatcttaaaaacactagaggcattgctggcgctacggtgaggggcgatgggaaaatcactctcattgtagatgtgggggcgatgatggaaatggcaaagagcattaaagtcaatatcactaccttgatgaacgagtcagaaaacacgaaaagcaaaaattctcctagcgattatgttgtcttggcgattgatgacagcagcacggacagagcgattatccgcaaatgtttaaaaccattaggcatcacgctcttagaggccactaacggcttagagggcttagaaatgctcaaaaatggcgataagattccggacgctattttagtggatattgagatgcctaaaatggatggctacactttcgcctctgaagtgcgtaaatacaataaattcaaaaacctgcccttgatcgccgttaccagtcgggtaactaaaacggacagaatgcgcggcgttgaatccggcatgactgaatacatcaccaaaccttatagcggtgaatatttaaccaccgtagtgaagcgcagcattaaattagaaggagaccaatcgtga

SEQ ID NO: 1017 - DNA (genomic), 840 bp, Helicobacter pylori; double-stranded, circular; identical to SEQ ID NO: 1016
  misc_feature (B) LOCATION 1...840
  hypothetical: NO
  anti-sense: NO

SEQ ID NO: 1018 - DNA (genomic), 177 bp, Helicobacter pylori; double-stranded, circular
  misc_feature (B) LOCATION 1...177
  hypothetical: NO
  anti-sense: NO
tttggcgtgaaacaaaaagaagctttaaaagaattgagcaaaagcgtgcattttttaagcatgtccgccacgcctatcccgcgcactctaaacatggcgctttctcaaattaaaggcattagctctttaaaaaccccacccacagacagaaagcccagccgcacttttttgaaagaa

SEQ ID NO: 1019 - DNA (genomic), 276 bp, Helicobacter pylori; double-stranded, circular
  misc_feature (B) LOCATION 1...276
  hypothetical: NO
  anti-sense: NO
ataggaatgatccaatctagcctttatagagccttaaacaaaggctttgattatcaaatactcgcttgtaaggattttaaagaatccgagctcgctaaagaagtcataagctattttaagccaaatattaaagccgttcttttcccggagcttagggctaaaaaaaacgatgatttgcgttcgttttttgaagaatttttacagcttttagggggtttgagggagttttatcaggccttagaaaacaagcaagaaactattcatcattgcccctat

SEQ ID NO: 1020 - DNA (genomic), 699 bp, Helicobacter pylori; double-stranded, circular
  misc_feature (B) LOCATION 1...699
  hypothetical: NO
  anti-sense: NO
gtttttttgacggcagagtgtgagagcattaaggaattggatcccgccactcaaatgagtctcaaagaagatttgttagaaattgaaatcccccccacgctttttagtttggacgaaccatcttataaggatctaaaaacaaaagtggaacaaagccccttaaatagcttttctaaagatttaaccagtttcggtttgtggtttttaggagaaaaagcaaacgatttgttgggcgtttatcaaagcatcataagccctagagctttagaagaaattcaagaattagcgagcttaaacgaattggatgatgagcgtttcaaatttttaaaggttttagaaaacgcgcaaggctatgaagatttagaaatccatgtgcatgccctagaaggctttatcgctttgcattcaaatcgtaaaatcacgctcctagcccccaataaaacgattttagacaactcaataagcgtgcttgatgcaggcaacatggaatgcgtcatcgccccctttgtgttaaattttaaaacccctgatagggttttcatctcgctcaattcctttgaaaggaaggaaaaacgccaaaaatccaagctcgctttgaatgaattgaatgcgggcgaatgggcggtgcatgatgattatggggtgggcgtgttttctcaattgatccagcacagcgttttaggagcaagagggattttt

SEQ ID NO: 1021 - DNA (genomic), 720 bp, Helicobacter pylori; double-stranded, circular
  misc_feature (B) LOCATION 1...720
  hypothetical: NO
  anti-sense: NO
ttatggggtgggcgtgttttctcaattgatccagcacagcgttttaggagcaagagggattttttagaaatcgcttatttgggcgaagacaaactgctattaccggtagaaaacctgcatctcatcgctcgctatgtggtgcaaagcgatagcgtgccggttaaagaccggttagggaaagggagctttctcaaattaaaagctaaagtcagggctaagcttttagaaattgcgggcaagatcattgaattagcggctgaacgcaatttgatcttgggtaaaaagatggacacgcatttggcggagttggaaatctttaaatcgcatgcgggttttgaatacaccagcgatcaagaaaaagccatcgctgaaatttcaagggatttaagctctcacagggtgatggacagattattgagtggggatgtgggttttgggaaaacggaagtggcgatgctcgcgattttttgcgcgtttttaaacggctttcaaagcgcgctagtcgtgcctactactttattagcccaccagcattttgagactttaaaggcgcgttttgaaaattttggcgttaaagtggctcgtttggacaggtatattaaaaccagcgaaaaaagcaagcttttaaaggcggtggaattagggctagttgatgtgctaataggccacgcatgcgattttaggcacgaaattcaaaaacttgggcttaatggtcgtaga

SEQ ID NO: 1022 - DNA (genomic), 963 bp, Helicobacter pylori; double-stranded, circular
  misc_feature (B) LOCATION 1...963
  hypothetical: NO
  anti-sense: NO
aagagattatttacagagaattgcgccggtaacgggcaaattttttacatccataaccacatcgctagcatttcaaaagtcaaaaccaagctagaagatttaatccctaagcttaaaatcgccattttgcattcccagattaacgctaacgagagtgaagaaatcatgctagagtttgctaaggggaactatcaggttttattatgcacttctattgtggaatcgggcatccatttgcctaacgctaacgcgattattatagataatgcgcaaaatttcggcctggctgatttgcaccagttaagagggcgtgtggggagagcccaaaaagaaggcttttgctatttcctcatagaagatccaagaagtttgaatgaacaggctttaaaccgcttgctcgctctagaaaaaaattcgattttagaacgtggggagagtatcgcctatcatgatttagaaattaggggggacgggaatttgctcgggcaagatcagagcgggcatattaaaaatatcggttatgcgctctatacgcgcatgcttgaagacgcgatttatgaattgagtggggggaagaaaaggcttgaaaaaagcgtagaaatccaacttggcgtgagcgcttttttaaaccctgaactcatcgcaagcgatagtttgaggttggatctataccgccgtttgagtttgtgtgaaaatgtagatgaggtggggcaaatccatgaagaaatagaagacaggtttggtaaaatggacgatttgagcgctcaatttttgcaaatcattacgcttaaaatcttagccaaccagcttggcatccttaaactttctaatttcaatcaaaacatcacccttacttatagcgatgaaaaaaaagaaagtctgaaagccccaagcaaagacgataacgatattttagaaacccttttgaaacatttgcacgctcaaatttctttaaaacggcgt

SEQ ID NO: 1023 - DNA (genomic), 3006 bp, Helicobacter pylori; double-stranded, circular
  misc_feature (B) LOCATION 1...3006
  hypothetical: NO
  anti-sense: NO
atgatccaatctagcctttatagagccttaaacaaaggctttgattatcaaatactcgcttgtaaggattttaaagaatccgagctcgctaaagaagtcataagctattttaagccaaatattaaagccgttcttttcccggagcttagggctaaaaaaaacgatgatttgcgttcgttttttgaagaatttttacagcttttagggggtttgagggagttttatcaggccttagaaaacaagcaagaaactatcatcattgcccctattagcgctttattacaccctttacccaaaaaagaacttttagaaagctttaaaatcactcttttagaaaagtataaccttaaggatttgaaagacaaactcttttattatggctatgaaattttagacttagtggaagtggagggtgaagcgagctttaggggggatattgtggatatttatatacctaattctaaggcgtatcgcttgagtttttttgacgcagagtgtgagagcattaaggaattggattccgccactcaaatgagtctcaaagaagatttgttagaaattgaaatcccccccacgctttttagtttggacgaaccatcttataaggatctaaaaacaaaagtggaacaaagccccttaaatagcttttctaaagatttaaccagtttcggtttgtggtttttaggagaaaaagcaaacgatttgttgggcgtttatcaaagcatcataagccctagagctttagaagaaattcaagaattagcgagcttaaacgaattggatgatgagcgtttcaaatttttaaaggttttagaaaacgcgcaaggctatgaagatttagaaatccatgtgcatgccctagaaggctttatcgctttgcattcaaatcgtaaaatcacgctcctagcccccaataaaacgattttagacaactcaataagcgtgcttgatgcaggcaacatggaatgcgtcatcgccccctttgtgttaaattttaaaacccctgataggattttcatctcgctcaattcctttgaaaggaagaaaaaacgccaaaaatccaagctcgctttgaatgaattgaatgcgggcgaatgggtggtgcatgatgattatggggtgggcgtgttttctcaattgatccagcacagcgttttagggagcaagagggattttttagaaatcgcttatttgggcgaagacaaactgctattaccggtagaaaacctgcatctcatcgctcgctatgtggtgcaaagcgatagcgtgccggttaaagaccggctagggaaagggagctttctcaaattaaaagctaaagtcagggctaagcttttagaaattgcgggcaagatcattgaattagcggctgaacgcaatttgatcttgggtaaaaagatggacacgcatttggcggagttggaaatctttaaatcgcatgcgggttttgaatacaccagcgatcaagaaaaagccatcgctgaaatttcaagggatttaagctctcacagggtgatggacagattattgagtggggatgtgggttttgggaaaacggaagtggcgatgcatgcgattttttgcgcgtttttaaacggctttcaaagcgcgctagtcgtgcctactactttattagcccaccagcattttgagactttaaaggcgcgttttgaaaattttggcgttaaagtggctcgtttggacaggtatattaaaaccagcgaaaaaagcaagcttttaaaggcggtggaattagggctagttgatgtgctaataggcacgcatgcgattttaggcacgaaattcaaaaacttgggcttaatggtcgtagatgaagagcataaatttggcgtgaaacaaaaagaagctttaaaagaattgagcaaaagcgtgcattttttaagcatgtccgccacgcctatcccgcgcactctaaacatggcgctttctcaaattaaaggcattagctctttaaaaaccccacccacagacagaaagcccagccgcacttttttgaaagaaaaaaatgacgaacttttaaaagagattatttacagagaattgcgccgtaacgggcaaattttttacatccataaccacatcgctagcatttcaaaagtcaaaaccaagctagaagatttaatccctaagcttaaaatcgccattttgcattcccagattaacgctaacgagagtgaagaaatcatgctagagtttgctaaggggaactatcaggttttattatgcacttctattgtggaatcgggcatccatttgcctaacgctaacacgattattatagataatgcgcaaaatttcggcctggctgatttgcaccagttaagagggcgtgtggggagaggcaaaaaagaaggcttttgctatttcctcatagaagatcaaaaaagtttgaatgaacaggctttaaaacgcttgctcgctctagaaaaaaattcgtatttaggcagtggggagagtatcgcctatcatgatttagaaattagggggggcgggaatttgctcgggcaagatcagagcgggcatattaaaaatatcggttatgcgctctatacgcgcatgcttgaagacgcgatttatgaattgagtggggggaagaaaaggcttgaaaaaagcgtagaaatccaacttggcgtgagcgcttttttaaaccctgaactcatcgcaagcgatagtttgaggttggatctataccgccgtttgagtttgtgtgaaaatgtagatgaggtggggcaaatccatgaagaaatagaagacaggtttggtaaaatggacgatttgagcgctcaatttttgcaaatcattacgcttaaaatcttagccaaccagcttggcatccttaaactttctaatttcaatcaaaacatcacccttacttatagcgatgaaaaaaaagaaagcctgaaagccccaagcaaagacgataacgatattttagaaacccttttgaaacatttgcacgctcaaatttctttaaaacggcgttaa

SEQ ID NO: 1024 - DNA (genomic), 3006 bp, Helicobacter pylori; double-stranded, circular
  misc_feature (B) LOCATION 1...3006
  hypothetical: NO
  anti-sense: NO
atgatccaatctagcctttatagagccttaaacaaaggctttgattatcaaatactcgcttgtaaggattttaaagaatccgagctcgctaaagaagtcataagctattttaagccaaatattaaagccgttcttttcccggagcttagggctaaaaaaaacgatgatttgcgttcgttttttgaagaatttttacagcttttagggggtttgagggagttttatcaggccttagaaaacaagcaagaaactatcatcattgcccctattagcgctttattacaccctttacccaaaaaagaacttttagaaagctttaaaatcactcttttagaaaagtataaccttaaggatttgaaagacaaactcttttattatggctatgaaattttagacttagtggaagtggagggtgaagcgagctttaggggggatattgtggatatttatatacctaattctaaggcgtatcgcttgagtttttttgacgcagagtgtgagagcattaaggaattggatcccgccactcaaatgagtctcaaagaagatttgttagaaattgaaatcccccccacgctttttagtttggacgaaccatcttataaggatctaaaaacaaaagtggaacaaagccccttaaatagcttttctaaagatttaaccagtttcggtttgtggtttttaggagaaaaagcaaacgatttgttgggcgtttatcaaagcatcataagccctagagctttagaagaaattcaagaattagcgagcttaaacgaattggatgatgagcgtttcaaatttttaaaggttttagaaaacgcgcaaggctatgaagatttagaaatccatgtgcatgccctagaaggctttatcgctttgcattcaaatcgtaaaatcacgctcctagcccccaataaaacgattttagacaactcaataagcgtgcttgatgcaggcaacatggaatgcgtcatcgccccctttgtgttaaattttaaaacccctgataggattttcatctcgctcaattcctttgaaaggaagaaaaaacgccaaaaatccaagctcgctttgaatgaattgaatgcgggcgaatgggtggtgcatgatgattatggggtgggcgtgttttctcaattgatccagcacagcgttttagggagcaagagggattttttagaaatcgcttatttgggcgaagacaaactgctattaccggtagaaaacctgcatctcatcgctcgctatgtggtgcaaagcgatagcgtgccggttaaagaccggctagggaaagggagctttctcaaattaaaagctaaagtcagggctaagcttttagaaattgcgggcaagatcattgaattagcggctgaacgcaatttgatcttgggtaaaaagatggacacgcatttggcggagttggaaatctttaaatcgcatgcgggttttgaatacaccagcgatcaagaaaaagccatcgctgaaatttcaagggatttaagctctcacagggtgatggacagattattgagtggggatgtgggttttgggaaaacggaagtggcgatgcatgcgattttttgcgcgtttttaaacggctttcaaagcgcgctagtcgtgcctactactttattagcccaccagcattttgagactttaaaggcgcgttttgaaaattttggcgttaaagtggctcgtttggacaggtatattaaaaccagcgaaaaaagcaagcttttaaaggcggtggaattagggctagttgatgtgctaataggcacgcatgcgattttaggcacgaaattcaaaaacttgggcttaatggtcgtagatgaagagcataaatttggcgtgaaacaaaaagaagctttaaaagaattgagcaaaagcgtgcattttttaagcatgtccgccacgcctatcccgcgcactctaaacatggcgctttctcaaattaaaggcattagctctttaaaaaccccacccacagacagaaagcccagccgcacttttttgaaagaaaaaaatgacgaacttttaaaagagattatttacagagaattgcgccgtaacgggcaaattttttacatccataaccacatcgctagcatttcaaaagtcaaaaccaagctagaagatttaatccctaagcttaaaatcgccattttgcattcccagattaacgctaacgagagtgaagaaatcatgctagagtttgctaaggggaactatcaggttttattatgcacttctattgtggaatcgggcatccatttgcctaacgctaacacgattattatagataatgcgcaaaatttcggcctggctgatttgcaccagttaagagggcgtgtggggagaggcaaaaaagaaggcttttgctatttcctcatagaagatcaaaaaagtttgaatgaacaggctttaaaacgcttgctcgctctagaaaaaaattcgtatttaggcagtggggagagtatcgcctatcatgatttagaaattagggggggcgggaatttgctcgggcaagatcagagcgggcatattaaaaatatcggttatgcgctctatacgcgcatgcttgaagacgcgatttatgaattgagtggggggaagaaaaggcttgaaaaaagcgtagaaatccaacttggcgtgagcgcttttttaaaccctgaactcatcgcaagcgatagtttgaggttggatctataccgccgtttgagtttgtgtgaaaatgtagatgaggtggggcaaatccatgaagaaatagaagacaggtttggtaaaatggacgatttgagcgctcaatttttgcaaatcattacgcttaaaatcttagccaaccagcttggcatccttaaactttctaatttcaatcaaaacatcacccttacttatagcgatgaaaaaaaagaaagcctgaaagccccaagcaaagacgataacgatattttagaaacccttttgaaacatttgcacgctcaaatttctttaaaacggcgttaa

SEQ ID NO: 1025 - DNA (genomic), 1323 bp, Helicobacter pylori; double-stranded, circular
  misc_feature (B) LOCATION 1...1323
  hypothetical: NO
  anti-sense: NO
atgataacgctctttagttttggagcgttcgcttactatttcgtgtcttctcaaatcagtcacgaaaactatcaaaacgaaatgcgccattaccagtttgttaccactatcaatgaaattttaaataactactctgattatagagccatagaagattacctctataaaattggctttagagaaaccacaatagaaaatttagaaaaggttttagccaaaagacgccaccagttgcaccacagaaatatttggtatgctgaagtgtttaaattcagcgatatggtttttatccttttaaaaaaggatgagcattttgtgctttataaagatttgcattcggtttcttataggaattatttcttagccattacggtgggtttattattgattttattcctctttttatttgttttgcagagtttattgcctttaagagagttaagatctcaagtgaaacgcttcgctcaaggggataaaagcgtgagttgtaaaagcaagcaaaaagatgaaataggggatttggctaacgaatttgacaattgcatccaaaaaatcaatgcgatgaatgaatctcgggttttatttttgcgctctatcatgcatgaattacgcacccctatcactaagggcaagatactaagctctatgctcaaagaagagctgtcttgcaaacgcttttcatctatatttgatcacttgaacatgttgattgagcaatttgcccgcattgagcagctcgcttccaaaaattatgggagcaataaagaaaaatttttaatgagcgatttgatagataagattgaaaaaatgcttttaattgatgaagataaaaaaagccctatccatgtatcctcttcaaattacatcattgaagcggattttgaattgtttgctatagcgttaaaaaacatgatagacaatgcgatcaaatacagcgatgacaaacaggtgtttttggatttcatagggaataatttagtggtgtccaataaaagcaaacctttaaaagaagattttgaaaagtatttgcaaccctactttaaatcttctaaccccagccaagcccatgggtttgggttaggcatgtatatcattaaaaacgctttagaggctatgggattgaatttgagctatcattatagcaatggaagaatctgtttcactatccatgattgcgtttttaatagtttttacgatttagaagcggataatgaagagctacccccccccgaaaatttgagagaggtgaagggaatgaagggaacagaaaaagccaattgtggggttaaagaaaaacaaaaagagagaacatgttcaaacgat

SEQ ID NO: 1026 - DNA (genomic), 1329 bp, Helicobacter pylori; double-stranded, circular
  misc_feature (B) LOCATION 1...1329
  hypothetical: NO
  anti-sense: NO
ttgcgtttctctatcttttttaaagttgtcgctttgtttatgataacgctctttagttttggagcgttcgcttactatttcgtgtcttctcaaatcagtcacgaaaactatcaaaacgaaatgcgccattaccagtttgttaccactatcaatgaaattttaaataactactctgattatagagccatagaagattacctctataaaattggctttagagaaaccacaatagaaaatttagaaaaggttttagccaaaagacgccaccagttgcaccacagaaatatttggtatgctgaagtgtttaaattcagcgatatggtttttatccttttaaaaaaggatgagcattttgtgctttataaagatttgcattcggtttcttataggaattatttcttagccattacggtgggtttattattgattttattcctctttttatttgttttgcagagtttattgcctttaagagagttaagatctcaagtgaaacgcttcgctcaaggggataaaagcgtgagttgtaaaagcaagcaaaaagatgaaataggggatttggctaacgaatttgacaattgcatccaaaaaatcaatgcgatgaatgaatctcgggttttatttttgcgctctatcatgcatgaattacgcacccctatcactaagggcaagatactaagctctatgctcaaagaagagctgtcttgcaaacgcttttcatctatatttgatcacttgaacatgttgattgagcaatttgcccgcattgagcagctcgcttccaaaaattatgggagcaataaagaaaaatttttaatgagcgatttgatagataagattgaaaaaatgcttttaattgatgaagataaaaaaagccctatccatgtatcctcttcaaattacatcattgaagcggattttgaattgtttgctatagcgttaaaaaacatgatagacaatgcgatcaaatacagcgatgacaaacaggtgtttttggatttcatagggaataatttagtggtgtccaataaaagcaaacctttaaaagaagattttgaaaagtatttgcaaccctactttaaatcttctaaccccagccaagcccatgggtttgggttaggcatgtatatcattaaaaacgctttagaggctatgggattgaatttgagctatcattatagcaatggaagaatctgtttcactatccatgattgcgtttttaatagtttttacgatttagaagcggataatgaagagctaccccccccccgaaaatttgagagaggtgaagggaatgaagggaacagaaaaagccaattgtggggttaa

SEQ ID NO: 1027 - DNA (genomic), 1332 bp, Helicobacter pylori; double-stranded, circular
  misc_feature (B) LOCATION 1...1332
  hypothetical: NO
  anti-sense: NO
ggggttttgcgtttctctatcttttttaaagttgtcgctttgtttatgataacgctctttagttttggagcgttcgcttactatttcgtgtcttctcaaatcagtcacgaaaactatcaaaacgaaatgcgccattaccagtttgttaccactatcaatgaaattttaaataactactctgattatagagccatagaagattacctctataaaattggctttagagaaaccacaatagaaaatttagaaaaggttttagccaaaagacgccaccagttgcaccacagaaatatttggtatgctgaagtgtttaaattcagcgatatggtttttatccttttaaaaaaggatgagcattttgtgctttataaagatttgcattcggtttcttataggaattatttcttagccattacggtgggtttattattgattttattcctctttttatttgttttgcagagtttattgcctttaagagagttaagatctcaagtgaaacgcttcgctcaaggggataaaagcgtgagttgtaaaagcaagcaaaaagatgaaataggggatttggctaacgaatttgacaattgcatccaaaaaatcaatgcgatgaatgaatctcgggttttatttttgcgctctatcatgcatgaattacgcacccctatcactaagggcaagatactaagctctatgctcaaagaagagctgtcttgcaaacgcttttcatctatatttgatcacttgaacatgttgattgagcaatttgcccgcattgagcagctcgcttccaaaaattatgggagcaataaagaaaaatttttaatgagcgatttgatagataagattgaaaaaatgcttttaattgatgaagataaaaaaagccctatccatgtatcctcttcaaattacatcattgaagcggattttgaattgtttgctatagcgttaaaaaacatgatagacaatgcgatcaaatacagcgatgacaaacaggtgtttttggatttcatagggaataatttagtggtgtccaataaaagcaaacctttaaaagaagattttgaaaagtatttgcaaccctactttaaatcttctaaccccagccaagcccatgggtttgggttaggcatgtatatcattaaaaacgctttagaggctatgggattgaatttgagctatcattatagcaatggaagaatctgtttcactatccatgattgcgtttttaatagtttttacgatttagaagcggataatgaagagctaccccccccccgaaaatttgagagaggtgaagggaatgaagggaacagaaaaagccaattgtggggt

SEQ ID NO: 1028 - DNA (genomic), 291 bp, Helicobacter pylori; double-stranded, circular
  misc_feature (B) LOCATION 1...291
  hypothetical: NO
  anti-sense: NO
aatgatagtggctcaaaacatttcatcttgccttttttaacgctccttttgcaaatgtatttgagccgcacacgagaatacatggccgatagcggggcggcgtttttaatgcatgacaataagcccatgatcagagccttacaaaagatttctaacgattacaccaacaacgattataaagaaatagataaaaatagcacccgatcagcggcctatctttttaacgctgaaatgtttagcacccaccctagtattaaaaatcgtatccaatccttaagaaagcgtgtgatc

SEQ ID NO: 1029 - DNA (genomic), 675 bp, Helicobacter pylori; double-stranded, circular
  misc_feature (B) LOCATION 1...675
  hypothetical: NO
  anti-sense: NO
atgaatacaagcttattgacccaagcacaggttttaagctctaaagaaaatcaaatccatcgccttttgttagagcttttagaagaggctaagcttcattttgagcctaagctttatatcattaacgccccttacatgaacgcttttgcgagcgggtgggatgaatctaattcccttatcgctcttacaagcgctttaatagagaggttagatagagacgaattaaaagccgtgatcgctcatgagctcagccacatacggcacaacgacatccgcttgaccatgtgcgtggggattttgagcaatatcatgctattggtggctaattttagcgtgtattttttcatggggaatcgcaagaatagcggggcgaatttagcccgaatgattttatgggttttacagatcatcttgccttttttaacgctccttttgcaaatgtatttgagccgcacacgagaatacatggccgatagcggggcggcgtttttaatgcatgacaataagcccatgatcagagccttacaaaagatttctaacgattacaccaacaacgattataaagaaatagataaaaatagcacccgatcagcggcctatctttttaacgctgaaatgtttagcacccaccctagtattaaaaatcgtatccaatccttaagaaagcgtgtgatc

SEQ ID NO: 1030 - DNA (genomic), 1014 bp, Helicobacter pylori; double-stranded, circular
  misc_feature (B) LOCATION 1...1014
  hypothetical: NO
  anti-sense: NO
ttgaattggaattttacttgcctaaagggagttatgcgagcgcgctgctcaaagaaatcaagcatgagaaaggagaaaataatgacgaattttgaaaagattatcgcgcaaaacaggctcaaaacgaacgcggttttaaccacttactgcgcgatttttgcttttattgggttgttggtggatgctattagaatcaacgctaatgatttaggtatagccctttttaaactcatgacttttcaaatttttcctacgattactattgtcatgtttgtggtggcttttgtcattattcttgtttgtatccaaaattttagctctatcatgttaagcggcgatgaatacaagcttattgacccaagcaaggttttaagctctaaagaaaatcaaatccatcgccttttgttagagcttttagaagaggctaagcttcattttgagcctaagctttatatcattaacgccccttacatgaacgcttttgcgagcgggtgggatgaatctaattcccttatcgctcttacaagcgctttaatagagaggttagatagagacgaattaaaagccgtgatcgctcatgagctcagccacatacggcacaacgacatccgcttgaccatgtgcgtggggattttgagcaatatcatgctattggtggctaattttagcgtgtattttttcatggggaatcgcaagaatagcggggcgaatttagcccgaatgattttatgggttttacagatcatcttgccttttttaacgctccttttgcaaatgtatttgagccgcacacgagaatacatggccgatagcggggcggcgtttttaatgcatgacaataagcccatgatcagagccttacaaaagatttctaacgattacaccaacaacgattataaagaaatagataaaaatagcacccgatcagcggcctatctttttaacgctgaaatgtttagcacccaccctagtattaaaaatcgtatccaatccttaagaaagcgtgtgatctaa

SEQ ID NO: 1031 - DNA (genomic), 1041 bp, Helicobacter pylori; double-stranded, circular
  misc_feature (B) LOCATION 1...1041
  hypothetical: NO
  anti-sense: NO
cttctcaatacatcaaagaaaaagcgcaatttgaattggaattttacttgcctaaagggagttatgcgagcgcgctgctcaaagaaatcaagcatgagaaaggagaaaataatgacgaattttgaaaagattatcgcgcaaaacaggctcaaaacgaacgcggttttaaccacttactgcgcgatttttgcttttattgggttgttggtggatgctattagaatcaacgctaatgatttaggtatagccctttttaaactcatgacttttcaaatttttcctacgattactattgtcatgtttgtggtggcttttgtcattattcttgtttgtatccaaaattttagctctatcatgttaagcggcgatgaatacaagcttattgacccaagcaaggttttaagctctaaagaaaatcaaatccatcgccttttgttagagcttttagaagaggctaagcttcattttgagcctaagctttatatcattaacgccccttacatgaacgcttttgcgagcgggtgggatgaatctaattcccttatcgctcttacaagcgctttaatagagaggttagatagagacgaattaaaagccgtgatcgctcatgagctcagccacatacggcacaacgacatccgcttgaccatgtgcgtggggattttgagcaatatcatgctattggtggctaattttagcgtgtattttttcatggggaatcgcaagaatagcggggcgaatttagcccgaatgattttatgggttttacagatcatcttgccttttttaacgctccttttgcaaatgtatttgagccgcacacgagaatacatggccgatagcggggcggcgtttttaatgcatgacaataagcccatgatcagagccttacaaaagatttctaacgattacaccaacaacgattataaagaaatagataaaaatagcacccgatcagcggcctatctttttaacgctgaaatgtttagcacccaccctagtattaaaaatcgtatccaatccttaagaaagcgtgtgatc

SEQ ID NO: 1032 - DNA (genomic), 204 bp, Helicobacter pylori; double-stranded, circular
  misc_feature (B) LOCATION 1...204
  hypothetical: NO
  anti-sense: NO
gagaacgcctattcaaaaaaccaaaataaggaaatcccaatgactacagacagaaacctgtttttttgcgcttcgttgttgatttttttaggggtattgatgagctattcgctctcaacttacaccacagtggtgctgtatcattatggggaattccatttttttatacgccagcttgtgagtgcgatcatgggcattattata

SEQ ID NO: 1033 - DNA (genomic), 699 bp, Helicobacter pylori; double-stranded, circular
  misc_feature (B) LOCATION 1...699
  hypothetical: NO
  anti-sense: NO
aaaaggctaatgtcaaagaagaactcatcacttttgtgccttaattcgtttgtgtttgtggccttagcgattggggtgggggttttgcaaaacgatttggggcagattgttcttttgggggcggttttagcggtgttattggttttttctggggggagcgtgcatttatttggcttgattgtttcaggggcgtttgcgatcagcgttttagcgattgttacaagcgaacataggattttacgcctaaaattatggtggtctaatttacaaaattcgcttttcacgctcttgcctgacaaattagcgaacgctcttagaataagcgacttgcccgaatcctatcaagtctttcatgcaggcaatgccatgcataatggggggttattagggcaagggcttgggctagggcaaatcaagcttgggtttttgagcgaagtgcatacggacatggttttagctgggatcgccgaagaatgggggtttttggggttatgcgtttgttttattttgttttctgtcatgattgttttgatttttaggatcgctaaccgcttgaaagagccaaaatattcgctattctgcgtgggcgtggtgctgctaatagggttttctttggtgatcaacgcctttggggtgggtgggatttttccggttaagggcctagcggtgccgtttttgagctatggagggagttgcttt

SEQ ID NO: 1034 - DNA (genomic), 696 bp, Helicobacter pylori; double-stranded, circular
  misc_feature (B) LOCATION 1...696
  hypothetical: NO
  anti-sense: NO
aggctaatgtcaaagaagaactcatcacttttgtgccttaattcgtttgtgtttgtggccttagcgattggggtgggggttttgcaaaacgatttggggcagattgttcttttgggggcggttttagcggtgttattggttttttctggggggagcgtgcatttatttggcttgattgtttcaggggcgtttgcgatcagcgttttagcgattgttacaagcgaacataggattttacgcctaaaattatggtggtctaatttacaaaattcgcttttcacgctcttgcctgacaaattagcgaacgctcttagaataagcgacttgcccgaatcctatcaagtctttcatgcaggcaatgccatgcataatggggggttattagggcaagggcttgggctagggcaaatcaagcttgggtttttgagcgaagtgcatacggacatggttttagctgggatcgccgaagaatgggggtttttggggttatgcgtttgttttattttgttttctgtcatgattgttttgatttttaggatcgctaaccgcttgaaagagccaaaatattcgctattctgcgtgggcgtggtgctgctaatagggttttctttggtgatcaacgcctttggggtgggtgggatttttccggttaagggcctagcggtgccgtttttgagctatggagggagttgcttt

SEQ ID NO: 1035 - DNA (genomic), 1167 bp, Helicobacter pylori; double-stranded, circular
  misc_feature (B) LOCATION 1...1167
  hypothetical: NO
  anti-sense: NO
atgactacagacagaaacctgtttttttgcgcttcgttgttgatttttttaggggtattgatgagctattcgctctcaacttacaccacagtggtgctgtatcattatggggaattccatttttttatacgccagcttgtgagtgcgatcatgggcattattatcatgtgggggttgtctagggttgatcctagaaagtggtttagccgtttggggttttttctcctttttgtcccatcactactcattattggcatgttttttttgccagaaagcctttctagcagcgcagggggggcgaagcgctggatccgtttagggtttttctctctagcgcctttggagtttttaaagattggtttcaccttttttcttgcgtggagtttgtctcgcacctttgtggcaaaagaaaaggctaatgtcaaagaagaactcatcacttttgtgccttattcgtttgtgtttgtggccttagcgattggggtgggggttttgcaaaacgatttggggcagattgttcttttgggggcggttttagcggtgttattggttttttctggggggagcgtgcatttatttggcttgattgtttcaggggcgtttgcgatcagcgttttagcgattgttacaagcgaacataggattttacgcctaaaattatggtggtctaatttacaaaattcgcttttcacgctcttgcctgacaaattagcgaacgctcttagaataagcgacttgcccgaatcctatcaagtctttcatgcaggcaatgccatgcataatggggggttattagggcaagggcttgggctagggcaaatcaagcttgggtttttgagcgaagtgcatacggacatggttttagctgggatcgccgaagaatgggggtttttggggttatgcgtttgttttattttgttttctgtcatgattgttttgatttttaggatcgctaaccgcttgaaagagccaaaatattcgctattctgcgtgggcgtggtgctgctaatagggttttctttggtgatcaacgcctttggggtgggtgggatttttccggttaagggcctagcggtgccgtttttgagctatggagggagttcgcttttagcgaattgcatcgctatagggcttgttctaagcctagcgcgatacacgaaaggctaa

SEQ ID NO: 1036 - DNA (genomic), 843 bp, Helicobacter pylori; double-stranded, circular
  misc_feature (B) LOCATION 1...843
  hypothetical: NO
  anti-sense: NO
gtgatgatcgatcccaaaatggtggaatttagcatttatgcggacatccctcatttactcacgcccattatcactgaccctaaaaaagctatcggggctttgcaaagcgtggctaaagaaatggagcgccgatactctttaatgagcgaatacaaggttaaaaccattgattcttataatgaacaagcccaaagtaacgrcgttgaagcgttcccctatttgattgtggtgattgatgaattagcggatttgatgatgacagggggcaaagaagcggagtttcctatcgctagaatcgctcaaatggggcgagcgagcggcttgcacctcattgtggcgacccaacgcccgagcgtggatgtcgtaaccggcttgattaaaaccaacttgccttcaagggtgagttttagggtaggcactaagattgattctaaagtgattttagacaccgatggggcgcaaagcttactaggaaggggcgatatgctctttacccccccaggaacaaacgggttagtgcgcttgcatgccccctttgccactgaagatgaaatcaaaaaaatcgtggattttattaaagcccaaaaagaggtggaatacgataaagatttcttgctagaagaatcgcgcatgcctttagacacccctaactatcaaggcgatgacattctagaaagggctaaagcggtgattttagaaaaaaagatcacttctacgagctttttacaacgccaattaaaaatcggctacaaccaagccgccaccattactgacgaattagaagctcaaggctttctatccccaagaaacgccaaaggcaacagagagattttgcaaaatttt

SEQ ID NO: 1037 - DNA (genomic), 2535 bp, Helicobacter pylori; double-stranded, circular
  misc_feature (B) LOCATION 1...2535
  hypothetical: NO
  anti-sense: NO
atgaaatctaaaaaactttatttagctttaatcataggggttttattagcgtttttaaccctatcttcatggctaggtaatagcggtttagtggggcgttttggggtgtggtttgccgcaatcaataaaaaatattttgggtatctttcattgattaatttaccctatttggcgtgggttttattccttttatacagggctaaaaacccttttacagaaatcgttttagaaaaaactttagggcatctattaggcattttatctttactctttttgcaatctagcctgttgaatcaaggggaaatcggcaacagcgcgcgtttgtttttacacccttttataggggactttgggctttatgtgctgataatgcttatggtagttatctcttatttaattttattcaaactgccccctaaaagcgttttttacccttatatgaacaaaacacaaagccttttaaaagagatttacaaacaatgcttgcaggcctttagccctaattttagcctgaaaaaagagggttttgaaaacaccccatcagattctcaaaaaaaagaaaccaacaacgacaaagaaaaagaaaacctcaaagaaaaccctattgatgaaaaccacaacacccctaacgaagaatcgtttttagcgatccctaccccctataacacgaccttaaataattcagagccgcaagaaggcttagtccaaatttccccacacccccctacccattacaccatttaccctaaaagaaaccgatttgatgatttgactaaccccactttaaaagaacctaagcaagaaaccaaagaaagagaacccacgctaaaaaaagaaacgcccaccacactcaaacctatcatgcccatatccgcatccaacacagaaaatcatgacaaaacagaaaaccacaaaacccctaaccaccccataaaagaagatgatttacaagaaagcccacaagaaaacccacaaaaagaaaatatagaagaaaatatagaagaaaaagaaacgcaaaacgctccaagctttagcccactaaccctcaccagcgctaaaaaacccgttatggttaaagaattgagcgaaaataaagagatattagacgggttggattatggcgaagtgcaaaaacccaaagattatgagcttcccacaacgcaattattgaatgcggtttgcttgaaagaaacttctttagacgaaaacgagattgaccaaaaaatccaggatttattgagcaagctgcgcacctttaaaattgatggcgatattatacgcacttattcaggccctattgtaaccacctttgaattccgcccagcccctagcgttaaggtgagccgtattttaggcttgagcgatgatttagcgatgactttatgcgctgaatccatccgcattcaagcccctatcaaaggtaaagatgtcgttggtattgaaatccctaacagccaaagccaaattatttatttaagagaaattttagaaagcgaattgtttcaaaaatccagctcgcctctaaccctagctttaggcaaagacattgtgggtaaccctttcatcacggatttaaaaaagctcccccacttgctcatcgccggcacgacagggagcggtaagagcgtgggcgtgaatgcgatgattttatccttactttataaaaacccccctgatcaactcaaattagtgatgatcgatcccaaaatggtggaatttagcatttatgcggacatccctcatttactcacgcccattatcactgaccctaaaaaagctatcggggctttgcaaagcgtggctaaagaaatggagcgccgatactctttaatgagcgaatacaaggttaaaaccattgattcttataatgaacaagcccaaagtaacggcgttgaagcgttcccctatttgattgtggtgattgatgaattagcggatttgatgatgacagggggcaaagaagcggagtttcctatcgctagaatcgctcaaatggggcgagcgagcggcttgcacctcattgtggcgacccaacgcccgagcgtggatgtcgtaaccggcttgattaaaaccaacttgccttcaagggtgagttttagggtaggcactaagattgattctaaagtgattttagacaccgatggggcgcaaagcttactaggaaggggcgatatgctctttacccccccaggaacaaacgggttagtgcgcttgcatgccccctttgccactgaagatgaaatcaaaaaaatcgtggattttattaaagcccaaaaagaggtggaatacgataaagatttcttgctagaagaatcgcgcatgcctttagacacccctaactatcaaggcgatgacattctagaaagggctaaagcggtgattttagaaaaaaagatcacttctacgagctttttacaacgccaattaaaaatcggctacaaccaagccgccaccattactgacgaattagaagctcaaggctttctatccccaagaaacgccaaaggcaacagagagattttgcaaaatttttag

SEQ ID NO: 1038 - DNA (genomic), 2544 bp, Helicobacter pylori; double-stranded, circular
  misc_feature (B) LOCATION 1...2544
  hypothetical: NO
  anti-sense: NO
gtgcaaccgatgaaatctaaaaaactttatttagctttaatcataggggttttattagcgtttttaaccctatcttcatggctaggtaatagcggtttagtggggcgttttggggtgtggtttgccgcaatcaataaaaaatattttgggtatctttcattgattaatttaccctatttggcgtgggttttattccttttatacagggctaaaaacccttttacagaaatcgttttagaaaaaactttagggcatctattaggcattttatctttactctttttgcaatctagcctgttgaatcaaggggaaatcggcaacagcgcgcgtttgtttttacacccttttataggggactttgggctttatgtgctgataatgcttatggtagttatctcttatttaattttattcaaactgccccctaaaagcgttttttacccttatatgaacaaaacacaaagccttttaaaagagatttacaaacaatgcttgcaggcctttagccctaattttagcctgaaaaaagagggttttgaaaacaccccatcagattctcaaaaaaaagaaaccaacaacgacaaagaaaaagaaaacctcaaagaaaaccctattgatgaaaaccacaacacccctaacgaagaatcgtttttagcgatccctaccccctataacacgaccttaaataattcagagccgcaagaaggcttagtccaaatttccccacacccccctacccattacaccatttaccctaaaagaaaccgatttgatgatttgactaaccccactttaaaagaacctaagcaagaaaccaaagaaagagaacccacgctaaaaaaagaaacgcccaccacactcaaacctatcatgcccatatccgcatccaacacagaaaatcatgacaaaacagaaaaccacaaaacccctaaccaccccataaaagaagatgatttacaagaaagcccacaagaaaacccacaaaaagaaaatatagaagaaaatatagaagaaaaagaaacgcaaaacgctccaagctttagcccactaaccctcaccagcgctaaaaaacccgttatggttaaagaattgagcgaaaataaagagatattagacgggttggattatggcgaagtgcaaaaacccaaagattatgagcttcccacaacgcaattattgaatgcggtttgcttgaaagaaacttctttagacgaaaacgagattgaccaaaaaatccaggatttattgagcaagctgcgcacctttaaaattgatggcgatattatacgcacttattcaggccctattgtaaccacctttgaattccgcccagcccctagcgttaaggtgagccgtattttaggcttgagcgatgatttagcgatgactttatgcgctgaatccatccgcattcaagcccctatcaaaggtaaagatgtcgttggtattgaaatccctaacagccaaagccaaattatttatttaagagaaattttagaaagcgaattgtttcaaaaatccagctcgcctctaaccctagctttaggcaaagacattgtgggtaaccctttcatcacggatttaaaaaagctcccccacttgctcatcgccggcacgacagggagcggtaagagcgtgggcgtgaatgcgatgattttatccttactttataaaaacccccctgatcaactcaaattagtgatgatcgatcccaaaatggtggaatttagcatttatgcggacatccctcatttactcacgcccattatcactgaccctaaaaaagctatcggggctttgcaaagcgtggctaaagaaatggagcgccgatactctttaatgagcgaatacaaggttaaaaccattgattcttataatgaacaagcccaaagtaacggcgttgaagcgttcccctatttgattgtggtgattgatgaattagcggatttgatgatgacagggggcaaagaagcggagtttcctatcgctagaatcgctcaaatggggcgagcgagcggcttgcacctcattgtggcgacccaacgcccgagcgtggatgtcgtaaccggcttgattaaaaccaacttgccttcaagggtgagttttagggtaggcactaagattgattctaaagtgattttagacaccgatggggcgcaaagcttactaggaaggggcgatatgctctttacccccccaggaacaaacgggttagtgcgcttgcatgccccctttgccactgaagatgaaatcaaaaaaatcgtggattttattaaagcccaaaaagaggtggaatacgataaagatttcttgctagaagaatcgcgcatgcctttagacacccctaactatcaaggcgatgacattctagaaagggctaaagcggtgattttagaaaaaaagatcacttctacgagctttttacaacgccaattaaaaatcggctacaaccaagccgccaccattactgacgaattagaagctcaaggctttctatccccaagaaacgccaaaggcaacagagagattttgcaaaatttttag

SEQ ID NO: 1039 - DNA (genomic), 2547 bp, Helicobacter pylori; double-stranded, circular
  misc_feature (B) LOCATION 1...2547
  hypothetical: NO
  anti-sense: NO
agacatgtgcaaccgatgaaatctaaaaaactttatttagctttaatcataggggttttattagcgtttttaaccctatcttcatggctaggtaatagcggtttagtggggcgttttggggtgtggtttgccgcaatcaataaaaaatattttgggtatctttcattgattaatttaccctatttggcgtgggttttattccttttatacagggctaaaaacccttttacagaaatcgttttagaaaaaactttagggcatctattaggcattttatctttactctttttgcaatctagcctgttgaatcaaggggaaatcggcaacagcgcgcgtttgtttttacacccttttataggggactttgggctttatgtgctgataatgcttatggtagttatctcttatttaattttattcaaactgccccctaaaagcgttttttacccttatatgaacaaaacacaaagccttttaaaagagatttacaaacaatgcttgcaggcctttagccctaattttagcctgaaaaaagagggttttgaaaacaccccatcagattctcaaaaaaaagaaaccaacaacgacaaagaaaaagaaaacctcaaagaaaaccctattgatgaaaaccacaacacccctaacgaagaatcgtttttagcgatccctaccccctataacacgaccttaaataattcagagccgcaagaaggcttagtccaaatttccccacacccccctacccattacaccatttaccctaaaagaaaccgatttgatgatttgactaaccccactttaaaagaacctaagcaagaaaccaaagaaagagaacccacgctaaaaaaagaaacgcccaccacactcaaacctatcatgcccatatccgcatccaacacagaaaatcatgacaaaacagaaaaccacaaaacccctaaccaccccataaaagaagatgatttacaagaaagcccacaagaaaacccacaaaaagaaaatatagaagaaaatatagaagaaaaagaaacgcaaaacgctccaagctttagcccactaaccctcaccagcgctaaaaaacccgttatggttaaagaattgagcgaaaataaagagatattagacgggttggattatggcgaagtgcaaaaacccaaagattatgagcttcccacaacgcaattattgaatgcggtttgcttgaaagaaacttctttagacgaaaacgagattgaccaaaaaatccaggatttattgagcaagctgcgcacctttaaaattgatggcgatattatacgcacttattcaggccctattgtaaccacctttgaattccgcccagcccctagcgttaaggtgagccgtattttaggcttgagcgatgatttagcgatgactttatgcgctgaatccatccgcattcaagcccctatcaaaggtaaagatgtcgttggtattgaaatccctaacagccaaagccaaattatttatttaagagaaattttagaaagcgaattgtttcaaaaatccagctcgcctctaaccctagctttaggcaaagacattgtgggtaaccctttcatcacggatttaaaaaagctcccccacttgctcatcgccggcacgacagggagcggtaagagcgtgggcgtgaatgcgatgattttatccttactttataaaaacccccctgatcaactcaaattagtgatgatcgatcccaaaatggtggaatttagcatttatgcggacatccctcatttactcacgcccattatcactgaccctaaaaaagctatcggggctttgcaaagcgtggctaaagaaatggagcgccgatactctttaatgagcgaatacaaggttaaaaccattgattcttataatgaacaagcccaaagtaacggcgttgaagcgttcccctatttgattgtggtgattgatgaattagcggatttgatgatgacagggggcaaagaagcggagtttcctatcgctagaatcgctcaaatggggcgagcgagcggcttgcacctcattgtggcgacccaacgcccgagcgtggatgtcgtaaccggcttgattaaaaccaacttgccttcaagggtgagttttagggtaggcactaagattgattctaaagtgattttagacaccgatggggcgcaaagcttactaggaaggggcgatatgctctttacccccccaggaacaaacgggttagtgcgcttgcatgccccctttgccactgaagatgaaatcaaaaaaatcgtggattttattaaagcccaaaaagaggtggaatacgataaagatttcttgctagaagaatcgcgcatgcctttagacacccctaactatcaaggcgatgacattctagaaagggctaaagcggtgattttagaaaaaaagatcacttctacgagctttttacaacgccaattaaaaatcggctacaaccaagccgccaccattactgacgaattagaagctcaaggctttctatccccaagaaacgccaaaggcaacagagagattttgcaaaatttt

SEQ ID NO: 1040 - DNA (genomic), 456 bp, Helicobacter pylori; double-stranded, circular
  misc_feature (B) LOCATION 1...456
  hypothetical: NO
  anti-sense: NO
gaagttgatgatgtcttggttagggctgtgagcggcatttctacgattaccaccaaacccggtaatatcaatgttgattttgccgatttaaagagcgctcttggttttaaaggctttgcgctaatgggtattggtgaagccactggcgaagattccgctaaattagcggtgcaaaacgcgatccaatcgcctcttcttgatgacgcttctattgaaggagctaagagcattatcgtcttttttgagcaccaccctgactatcccatgatggcttattctcaagcttgcgatttcattcaagatcaagcccaccaagatgttgatgttaagtttggacagcacacgagcgagaatatccccattgatcatgtgcgcgttactatcattgcgaccggttctgaaagaaacagcaacggagcgggtttggaatctatcgctacgcttctcaacctgtgg

SEQ ID NO: 1041 - DNA (genomic), 540 bp, Helicobacter pylori; double-stranded, circular
  misc_feature (B) LOCATION 1...540
  hypothetical: NO
  anti-sense: NO
ttggttagggctgtgagcggcatttctacgattatcaccaaacccggtaatatcaatgttgattttgccgatttaaagagcgctcttggttttaaaggctttgcgctaatgggtattggtgaagccactggcgaagattccgctaaattagcggtgcaaaacgcgatccaatcgcctcttcttgatgacgcttctattgaaggagctaagagcattatcgtcttttttgagcaccaccctgactatcccatgatggcttattctcaagcttgcgatttcattcaagatcaagcccaccaagatgttgatgttaagtttggacagcacacgagcgagaatatccccattgatcatgtgcgcgttactatcattgcgaccggttctgaaagaaacagcaacggagcgggtttggaatctatcgctacgccttctcaacctgtggtgaaaccaacaagaaaagtgggcaatggcgagtatttaagaatccctactgaagaagagctgtccatacccacaaccataagaatccaacaagattga

SEQ ID NO: 1042 - DNA (genomic), 531 bp, Helicobacter pylori; double-stranded, circular
  misc_feature (B) LOCATION 1...531
  hypothetical: NO
  anti-sense: NO
ttgcgctcgttttatggggatttgaaggtttttagcggtaaattagaagtttgcaatatcaacatgaataacgcttcaaaatcaacgattttagatttgcgtaaaaatattggcgtggttttccaagattataaattgatccaagattacacgattgagcaaaacatcaaactaccgatggtgatttgcggaatcaaaaaagaagaatgccacttgcagctagaaaaacttttagggcatattgatttacgccataaggctaaccgctaccccaaagaactcagtgggggcgaacaacaacgagtggctatggctagggctatggcgaactgccctgaactcattttagccgatgaacctaccgggaatttagacgattattctagcgataaaatctggagcctattaaggggcatgaacacacaattaaacgctacgatcgtggtggttacgcacaaattccctaaaaattttagcgcttatcaccgaaaattttacatagaagagggggaagtttatgaatactcttaa

SEQ ID NO: 1043 - DNA (genomic), 660 bp, Helicobacter pylori; double-stranded, circular
  misc_feature (B) LOCATION 1...660
  hypothetical: NO
  anti-sense: NO
tcatcgcagcgaataatttatgcttacaataccagcaaaacgagccggtcattaaacatgccaatttacgcatcaaacgaaaagactttgtgtttcatttcagggcctgcgggagcggtaaaagcacgctttttgcgctcgttttatggggatttgaaggtttttagcggtaaattagaagtttgcaatatcaacatgaataacgcttcaaaatcaacgattttagatttgcgtaaaaatattggcgtggttttccaagattataaattgatccaagattacacgattgagcaaaacatcaaactaccgatggtgatttgcggaatcaaaaaagaagaatgccacttgcagctagaaaaacttttagggcatattgatttacgccataaggctaaccgctaccccaaagaactcagtgggggcgaacaacaacgagtggctatggctagggctatggcgaactgccctgaactcattttagccgatgaacctaccgggaatttagacgattattctagcgataaaatctggagcctattaaggggcatgaacacacaattaaacgctacgatcgtggtggttacgcacaaattccctaaaaattttagcgcttatcaccgaaaattttacatagaagagggggaagtttatgaatactct

SEQ ID NO: 1044 - DNA (genomic), 672 bp, Helicobacter pylori; double-stranded, circular
  misc_feature (B) LOCATION 1...672
  hypothetical: NO
  anti-sense: NO
atgagcgtgatcatcgcagcgaataatttatgcttacaataccagcaaaacgagccggtcattaaacatgccaatttacgcatcaaacgaaaagactttgtgttcatttcagggcctagcgggagcggtaaaagcacgcttttgcgctcgttttatggggatttgaaggtttttagcggtaaattagaagtttgcaatatcaacatgaataacgcttcaaaatcaacgattttagatttgcgtaaaaatattggcgtggttttccaagattataaattgatccaagattacacgattgagcaaaacatcaaactaccgatggtgatttgcggaatcaaaaaagaagaatgccacttgcagctagaaaaacttttagggcatattgatttacgccataaggctaaccgctaccccaaagaactcagtgggggcgaacaacaacgagtggctatggctagggctatggcgaactgccctgaactcattttagccgatgaacctaccgggaatttagacgattattctagcgataaaatctggagcctattaaggggcatgaacacacaattaaacgctacgatcgtggtggttacgcacaaattccctaaaaattttagcgcttatcaccgaaaattttacatagaagagggggaagtttatgaatactcttaa

SEQ ID NO: 1045 - DNA (genomic), 807 bp, Helicobacter pylori; double-stranded, circular
  misc_feature (B) LOCATION 1...807
  hypothetical: NO
  anti-sense: NO
atgaatactcttaaaaagcatttagcctttatcattcccctagtggcgttattgtttagcttggagtgtgtgttgtttatcaatcaagcgatcgcgcaaaaagaaaaaaaattgattgaagattattcaatcgtgttagccagcacgcaaaaattaggcttggaattgttgcgtcaaaattttaacgaaatcatagcgttaaaagaaattgatcctaattattctttagaacctcttcaaaaaactttaggcgcagacgggcttaaggaattaaaaaaaaatttaccctttttttattctttacaactttccacattccccactcaagagcgtttagaaaacattaaagaaaaattgctcaaaatccctggcgttcaaaaagttgaggtctttgccaaaacttacatgcaagtgtatgatctcttaagcttgattaaagccacgatttatatctttgcgttagtggtctttgttttatcggttttattgatgttcaagcaagtccgcatctggatctatcaataccatgagaggttagagatcatggatttattaggggcttcggtgtcttttaaaaacgggtttttgtataaaatagctttgatggactctctaattgctagttttttagctcccatgttcatgctttatatcacttcgcaaaaaggttttgaaaaaacaatggatactttgggtattataggaggcgcgtttgttttaaaccattttttatggggattgctttttagccttgtggtctcatttgtttctgttttacttgtagcttggaggactagacatgtataa

SEQ ID NO: 1046 - DNA (genomic), 819 bp, Helicobacter pylori; double-stranded, circular
  misc_feature (B) LOCATION 1...819
  hypothetical: NO
  anti-sense: NO
aagagggggaagtttatgaatactcttaaaaagcatttagcctttatcattcccctagtggcgttattgtttagcttggagtgtgtgttgtttatcaatcaagcgatcgcgcaaaaagaaaaaaaattgattgaagattattcaatcgtgttagccagcacgcaaaaattaggcttggaattgttgcgtcaaaattttaacgaaatcatagcgttaaaagaaattgatcctaattattctttagaacctcttcaaaaaactttaggcgcagacgggcttaaggaattaaaaaaaaatttaccctttttttattctttacaactttccacattccccactcaagagcgtttagaaaacattaaagaaaaattgctcaaaatccctggcgttcaaaaagttgaggtctttgccaaaacttacatgcaagtgtatgatctcttaagcttgattaaagccacgatttatatctttgcgttagtggtctttgttttatcggttttattgatgttcaagcaagtccgcatctggatctatcaataccatgagaggttagagatcatggatttattaggggcttcggtgtcttttaaaaacgggtttttgtataaaatagctttgatggactctctaattgctagttttttagctcccatgttcatgctttatatcacttcgcaaaaaggttttgaaaaaacaatggatactttgggtattataggaggcgcgtttgttttaaaccattttttatggggattgctttttagccttgtggtctcatttgtttctgttttacttgtagcttggaggactagacatgta

SEQ ID NO: 1047 - DNA (genomic), 360 bp, Helicobacter pylori; double-stranded, circular
  misc_feature (B) LOCATION 1...360
  hypothetical: NO
  anti-sense: NO
tatttccaatttaaaggactgaatttaatgtttaattttttcaaaaaaattgtcaataagattaagggcgaagaggttaaagaaaaaaagcgtgaaagcgttcctaaagaggaattagaagaaattttgattggttttgatattcaatacgatttgatagagagcctgttaaagcatttaggcgatttaattacacccaagcaattagaagtcgctttgttgcgttttgtgcgtggggaaagctattatgataaaacccgcctaaagaccatcaccacaaagcccttagtgcatctcatcgtgggggttaatggggcgggtaaaaccacaacgatcgctaaattagccaaactctcttta

SEQ ID NO: 1048 - DNA (genomic), 456 bp, Helicobacter pylori; double-stranded, circular
  misc_feature (B) LOCATION 1...456
  hypothetical: NO
  anti-sense: NO
cgtccagtcattagcgccaaagaagggagcgatccaagctctctagcttacaacaccatagaaagcgcgatcgctaaaaatatagatgaagtttttatagacaccgccgggaggttgcacaaccagaccaacctcaaaaacgagctttctaaaatcgcgcacacctgctctaaagttttaaaagacgcccccttttacaaattccttattttagacggcacgcaagggagttctgggctaacgcaagcgaagattttccatgagactttggcgctagatggcgtgattatgactaagcttgatggcacttctaagggcggagcgattttaagcgtgctgtatgagttgaaattacccattctttatttaggaatgggcgaaaaagaagacgatttgatcgcttttgatgaagaacgctttatagaagatttggttgatgcggtgtttgtggaacaa

SEQ ID NO: 1049 - DNA (genomic), 882 bp, Helicobacter pylori; double-stranded, circular
  misc_feature (B) LOCATION 1...882
  hypothetical: NO
  anti-sense: NO
atgtttaattttttcaaaaaaattgtcaataagattaagggcgaagaggttaaagaaaaaaagcgtgaaagcgttcctaaagaggaattagaagaaattttgattggttttgatattcaatacgatttgatagagagcctgttaaagcatttaggcgatttaattacacccaagcaattagaagtcgctttgttgcgttttgtgcgtggggaaagctattatgataaaacccgcctaaagaccatcaccacaaagcccttagtgcatctcatcgtgggggttaatggggcgggtaaaaccacaacgatcgctaaattagccaaactctctttaaaacagcataaaaaagcgcttttaggagccggcgatacctttagagcggccgcagtcaaacagctccaattatggggcgaaaagcttaacgtccaagtcattagcgccaaagaagggagcgatccaagctctctagcttacaacaccatagaaagcgcgatcgctaaaaatatagatgaagtttttatagacaccgccgggaggttgcacaaccagaccaacctcaaaaacgagctttctaaaatcgcgcacacctgctctaaagttttaaaagacgcccccttttacaaattccttattttagacggcacgcaagggagttctgggctaacgcaagcgaagattttccatgagactttggcgctagatggcgtgattatgactaagcttgatggcacttctaagggcggagcgattttaagcgtgctgtatgagttgaaattacccattctttatttaggaatgggcgaaaaagaagacgatttgatcgcttttgatgaagaacgctttatagaagatttggttgatgcggtgtttgtggaacaataa

SEQ ID NO: 1050 - DNA (genomic), 708 bp, Helicobacter pylori; double-stranded, circular
  misc_feature (B) LOCATION 1...708
  hypothetical: NO
  anti-sense: NO
agacagaaacaatcccatttcctcttaggaggaatgcgtatacaccctaaaactaaggcatccgtttctttttctggggcttataccgaaagcattagagatgttactggtgtggccagcaccaaagacaatgtggttactatagatgaaatcaatcgcgctatcaataacgcatgcgctaaagcaggcttggataacgacaaacacattttgcatgccctcccttatcgcttcactttagacaaacaggaagtgaacgaccccttagggatgagcgggactcgcttagaagtctttatccacattgtctatacagaaaaaaacaacattgaaaatttagaaaaaatcatgatccaatctggggtagagattgaaaacatcgtgatcaattcttatgcagcctcgattgccaccttgtctaatgatgaaagggaattgggcgtggcttgcgtggatatgggcggagagacatgcaaccttacgatttatagcggcaattctatacgctataacaaatacttacccgtaggctctcaccatttaaccacggatttatcgcacatgctcaataccccattcccttacgctgaagaagttaagatcaaatacggggatctttcttttgaaagcggcgcagaaacgccctctcaaagtgtccaaatccctaccaccggctcggatggccatgaaagccatattgtgccgctt

SEQ ID NO: 1051 - DNA (genomic), 963 bp, Helicobacter pylori; double-stranded, circular
  misc_feature (B) LOCATION 1...963
  hypothetical: NO
  anti-sense: NO
atggaacataaagaaatcgttataggggttgatataggctctagaaagatttgcgcgatagtggctgaatttaaagacgggattttacgcatcattggcacggctcatcaagactctaaagaaatcaattcaaaagccattaaaagagggcgtatcaatagccttgctcacgcttctaacgccattaaggaagtgattaatagcgctaaaaaaatggcaggtttgaacgctgatgaagacagaaacaatcccatttcctcctttagagaatcgtatcaccctaaaactaaggcgatcgtttctttttctggggcttataccgaaagcattagagatgttactggtgtggccagcaccaaagacaatgtggttactatagatgaaatcaatcgcgctatcaataacgcatgcgctaaagcaggcttggataacgacaaacacattttgcatgccctcccttatcgcttcactttagacaaacaggaagtgaacgaccccttagggatgagcgggactcgcttagaagtctttatccacattgtctatacagaaaaaaacaacattgaaaatttagaaaaaatcatgatccaatctggggtagagattgaaaacatcgtgatcaattcttatgcagcctcgattgccaccttgtctaatgatgaaagggaattgggcgtggcttgcgtggatatgggcggagagacatgcaaccttacgatttatagcggcaattctatacgctataacaaatacttacccgtaggctctcaccatttaaccacggatttatcgcacatgctcaataccccattcccttacgctgaagaagttaagatcaaatacggggatctttcttttgaaagcggcgcagaaacgccctctcaaagtgtccaaatccctaccaccggctcggatggccatgaaagccatattgtgccgcttagtgaaatgccaacttcatga

SEQ ID NO: 1052 - DNA (genomic), 1047 bp, Helicobacter pylori; double-stranded, circular
  misc_feature (B) LOCATION 1...1047
  hypothetical: NO
  anti-sense: NO
atgcaaggggaaatcatggaacataaagaaatcgttataggggttgatataggctctagaaagatttgcgcgatagtggctgaatttaaagacgggattttacgcatcattggcacggctcatcaagactctaaagaaatcaattcaaaagccattaaaagagggcgtatcaatagccttgctcacgcttctaacgccattaaggaagtgattaatagcgctaaaaaaatggcaggtttgaacgctgatgaagacagaaacaatcccatttcctcctttagagaatcgtatcaccctaaaactaaggcgatcgtttctttttctggggcttataccgaaagcattagagatgttactggtgtggccagcaccaaagacaatgtggttactatagatgaaatcaatcgcgctatcaataacgcatgcgctaaagcaggcttggataacgacaaacacattttgcatgccctcccttatcgcttcactttagacaaacaggaagtgaacgaccccttagggatgagcgggactcgcttagaagtctttatccacattgtctatacagaaaaaaacaacattgaaaatttagaaaaaatcatgatccaatctggggtagagattgaaaacatcgtgatcaattcttatgcagcctcgattgccaccttgtctaatgatgaaagggaattgggcgtggcttgcgtggatatgggcggagagacatgcaaccttacgatttatagcggcaattctatacgctataacaaatacttacccgtaggctctcaccatttaaccacggatttatcgcacatgctcaataccccattcccttacgctgaagaagttaagatcaaatacggggatctttcttttgaaagcggcgcagaaacgccctctcaaagtgtccaaatccctaccaccggctcggatggccatgaaagccatattgtgccgcttagtgaaatccaaactatcatgagggaaagggctttagaaacctttaaaatcatccacaggagcattcaagatagcggatttgaagagcat

SEQ ID NO: 1053 - DNA (genomic), 372 bp, Helicobacter pylori; double-stranded, circular
  misc_feature (B) LOCATION 1...372
  hypothetical: NO
  anti-sense: NO
atgccagaaacagaagctaataagttaaaaatagccgaaaaagaaaaagagaaagcgaataaagaaagagaactagagctttccacttatttagaagaactcatttgcgattataaaaatcttttagacatggagattgtttttagcgcggaacttggctctacgcaaatccctttattgcaaattttgcgttttgaaaaaggctctgtgattgatttgcaaaaacccgccggagaaagcgtggatacttttgtgaacgggcgggttattggtaagggtgaggtgatggtttttgaaaggaatttagccattcgtttgaatgaaatccttgattctaacgccattgtgtattatctcgctaaaaattcatga

SEQ ID NO: 1054 - DNA (genomic), 375 bp, Helicobacter pylori; double-stranded, circular
  misc_feature (B) LOCATION 1...375
  hypothetical: NO
  anti-sense: NO
agttttatgccagaaacagaagctaataagttaaaaatagccgaaaaagaaaaagagaaagcgaataaagaaagagaactagagctttccacttatttagaagaactcatttgcgattataaaaatcttttagacatggagattgtttttagcgcggaacttggctctacgcaaatccctttattgcaaattttgcgttttgaaaaaggctctgtgattgatttgcaaaaacccgccggagaaagcgtggatacttttgtgaacgggcgggttattggtaagggtgaggtgatggtttttgaaaggaatttagccattcgtttgaatgaaatccttgattctaacgccattgtgtattatctcgctaaaaattca

SEQ ID NO: 1055 - DNA (genomic), 552 bp, Helicobacter pylori; double-stranded, circular
  misc_feature (B) LOCATION 1...552
  hypothetical: NO
  anti-sense: NO
ccaaaattttgtgaaagcctgcctaaaagcttttctaaaactttgttagcactcagtttgggtttgattttattgggtgtttttatccctttcccgaaagtccggaaacaccaaagtgtacctttggcgcttcatttcaccgagcattacgcgcgctttatccctacgattttatctgtggcgattcccttgattcaaagagatgcggtagggctttttcaagtcgctaacgcttctatcgccacaacttttctcacgcatgccaccaaaagagccttaaaccatgtaacgatcaatgatcagcgtttgggcgagcgcccttatgggggtaatttcaacatgccaagcgggcattcgtctatggtgggtttggcagtggcgtttttaatgcgccgttattctgttaaaaaatacttgtggctcttgcccctaatccctttaaccatgctcgctcgcatttatttagacatgcacaccatcggcgcggtgttggccgggcttggcactggaatgttgtgcgtgggtctttttacaagccccaaaaaccttaat

SEQ ID NO: 1056 - DNA (genomic), 576 bp, Helicobacter pylori; double-stranded, circular
  misc_feature (B) LOCATION 1...576
  hypothetical: NO
  anti-sense: NO
atgaaaaaattcttatttaaacaaaaattttgtgaaagcctgcctaaaagcttttctaaaactttgttagcactcagtttgggtttgattttattgggtgtttttatccctttccctaaagtccctaaacaccaaagcgtacctttggcgcttcatttcaccgagcattacgcgcgctttatccctacgattttatctgtggcgattcccttgattcaaagagatgcggtagggctttttcaagtcgctaacgcttctatcgccacaacttttctcacgcatgccaccaaaagagccttaaaccatgtaacgatcaatgatcagcgtttgggcgagcgcccttatgggggtaatttcaacatgccaagcgggcattcgtctatggtgggtttggcagtggcgtttttaatgcgccgttattctgttaaaaaatacttgtggctcttgcccctaatccctttaaccatgctcgctcgcatttatttagacatgcacaccatcggcgcggtgttggccgggcttggcactggaatgttgtgcgtgggtctttttacaagccccaaaaaccttaattaa

SEQ ID NO: 1057 - DNA (genomic), 306 bp, Helicobacter pylori; double-stranded, circular
  misc_feature (B) LOCATION 1...306
  hypothetical: NO
  anti-sense: NO
gtgcgtaatgtggttttattcattttaacagcgatctttttagcgttcatgcttttagtgagttattgcatgccccattatagcgtggctgtcattagcggggtggaagtcaaaagaatgaatgaaaatgaaaacacgcccaataataaggaagtaaaaacccttgctagagatgtctattttgtgcaaacttacgaccctaaggatcaaaaaagcgtgaccgtctatcgtaacgaagacacgcgctttggcttccctttttattttaagtttaattcggctgatatttcagctctcgccaaagtt

SEQ ID NO: 1058 - DNA (genomic), 528 bp, Helicobacter pylori; double-stranded, circular
  misc_feature (B) LOCATION 1...528
  hypothetical: NO
  anti-sense: NO
ttgataaaatttgtgcgtaatgtggttttattcattttaacagcgatctttttagcgttcatgcttttagtgagttattgcatgccccattatagcgtggctgtcattagcggggtggaagtcaaaagaatgaatgaaaatgaaaacacgcccaataataaggaagtaaaaacccttgctagagatgtctattttgtgcaaacttacgaccctaaggatcaaaaaagcgtgaccgtctatcgtaacgaagacacgcgctttggcttccctttttattttaagtttaattcggctgatatttcagctctcgctcaaagtttagtcaatcagcaagtggaagtgcaatactatggctggcggatcaatttgtttaacatgttccctaatgtgatttttttaaaacccttaaaagagagcgatgagatgtcaaaacccgtttttagctggattttatacgccctgctactagtgggcttttttatcagtgcacgttctgtttgcactttatttaagggcaaagctcattaa

SEQ ID NO: 1059 - DNA (genomic), 534 bp, Helicobacter pylori; double-stranded, circular
  misc_feature (B) LOCATION 1...534
  hypothetical: NO
  anti-sense: NO
ggaataaagttgataaaatttgtgcgtaatgtggttttattcattttaacagcgatctttttagcgttcatgcttttagtgagttattgcatgccccattatagcgtggctgtcattagcggggtggaagtcaaaagaatgaatgaaaatgaaaacacgcccaataataaggaagtaaaaacccttgctagagatgtctattttgtgcaaacttacgaccctaaggatcaaaaaagcgtgaccgtctatcgtaacgaagacacgcgctttggcttccctttttattttaagtttaattcggctgatatttcagctctcgctcaaagtttagtcaatcagcaagtggaagtgcaatactatggctggcggatcaatttgtttaacatgttccctaatgtgatttttttaaaacccttaaaagagagcgatgagatgtcaaaacccgtttttagctggattttatacgccctgctactagtgggcttttttatcagtgcacgttctgtttgcactttatttaagggcaaagctcat

SEQ ID NO: 1060 - DNA (genomic), 1323 bp, Helicobacter pylori; double-stranded, circular
  misc_feature (B) LOCATION 1...1323
  hypothetical: NO
  anti-sense: NO
ttggggttagggtttaaaattttagcgttagtcgttttaattttggggggttatttgatttttaacgcctttatcacaaaacccagagctttaagttttagtttaaagagcgaagaaaatgcgcttaacgacaacaatgaagcgcttttttgggatttgaaaaaacccattaaggttaaaatagtagccccaaagggcatcaaacgctatgagataaaagtaaccacaaaagacaatttgatcttatatgaaaaagaaagtctggtattggataaacccaagtctttagaagtgcctttgattaggcctgaaatcatgggattagaaggcaagtgccttgattatgaatttcaggcgagcgattggagctatgctaattttttcaatggcaataaggcgtctttcaaacaggaagtgtgtattgatacgataaaaccctcaatcgttattttatctcgatccccaagcatcgcttatggagggagcgcgatagtcatctttgaagctttggataagaatttgtctcaagcgtttgtgcgcgtcaaaaaaaaggattttaaagcgttcaggcttttagaattcaagcagcgtaatgtttttatcgctttagtgccttggtcttatgagaataaggattttaaggcgttcattgtcgctaaagataaagcttataactctaataccacccctttattgttcaaacgaaaaacccatcgtttgagggaaagggatataaatttaagcgccttaaaagataagattgcaaagcaagaaaaatttcaaaatcacactgagcaaactttattggaaatgttttccaacgcgcgcttaaaagatttagaaaaaatccaaaagatcgctttagagcaaggggattttgataaggatttttcccattttcaagcgctaaaacccttgaatgggccttttaaaatgacaagcaattttttagaaaatcggcggtttttaaaggacaatcaggtgttgtttaaattcttgcatttaggggtggatttaatgcccagtaaggatttatccttagcgtttgatccatcggtgaagagggtttttaagggggaattggatttttatggtaatagtttaatcaattgctatggtttaggtttgtgcgtttttttagcgcatttaaaagatgatgaaagcgtggggagtagtggtttgaaattagggatcgggttgcatttagggatgcttttgcaaggggtgtttgtccggcccaatgaatggcttaatgagcaatggataaaaaccaatatcattgcccccatagagcaagccaaacggcttttaatgaaaggatag

SEQ ID NO: 1061 - DNA (genomic), 1329 bp, Helicobacter pylori; double-stranded, circular
  misc_feature (B) LOCATION 1...1329
  hypothetical: NO
  anti-sense: NO
ggcttgatcttggggttagggtttaaaattttagcgttagtcgttttaattttggggggttatttgatttttaacgcctttatcacaaaacccagagctttaagttttagtttaaagagcgaagaaaatgcgcttaacgacaacaatgaagcgcttttttgggatttgaaaaaacccattaaggttaaaatagtagccccaaagggcatcaaacgctatgagataaaagtaaccacaaaagacaatttgatcttatatgaaaaagaaagtctggtattggataaacccaagtctttagaagtgcctttgattaggcctgaaatcatgggattagaaggcaagtgccttgattatgaatttcaggcgagcgattggagctatgctaattttttcaatggcaataaggcgtctttcaaacaggaagtgtgtattgatacgataaaaccctcaatcgttattttatctcgatccccaagcatcgcttatggagggagcgcgatagtcatctttgaagctttggataagaatttgtctcaagcgtttgtgcgcgtcaaaaaaaaggattttaaagcgttcaggcttttagaattcaagcagcgtaatgtttttatcgctttagtgccttggtcttatgagaataaggattttaaggcgttcattgtcgctaaagataaagcttataactctaataccacccctttattgttcaaacgaaaaacccatcgtttgagggaaagggatataaatttaagcgccttaaaagataagattgcaaagcaagaaaaatttcaaaatcacactgagcaaactttattggaaatgttttccaacgcgcgcttaaaagatttagaaaaaatccaaaagatcgctttagagcaaggggattttgataaggatttttcccattttcaagcgctaaaacccttgaatgggccttttaaaatgacaagcaattttttagaaaatcggcggtttttaaaggacaatcaggtgttgtttaaattcttgcatttaggggtggatttaatgcccagtaaggatttatccttagcgtttgatccatcggtgaagagggtttttaagggggaattggatttttatggtaatagtttaatcaattgctatggtttaggtttgtgcgtttttttagcgcatttaaaagatgatgaaagcgtggggagtagtggtttgaaattagggatcgggttgcatttagggatgcttttgcaaggggtgtttgtccggcccaatgaatggcttaatgagcaatggataaaaaccaatatcattgcccccatagagcaagccaaacggcttttaatgaaagga

SEQ ID NO: 1062 - DNA (genomic), 609 bp, Helicobacter pylori; double-stranded, circular
  misc_feature (B) LOCATION 1...609
  hypothetical: NO
  anti-sense: NO
ttgaaaaacattatccatatccaccaaaataaagagttgcgattcgttaaaaaatgcttgttgggctattttttcgcccctttgtgtggggctattttgttggtgctttttcttgtttcaagcggggcaaaatcgtttcaaatttctaacctcttcaataatcaattggcttatatcgtgttattgtctctttttttgtgtgcgattgggttcattgccggagcggttggtttttacaggctttctaaaatcacacgccatctgagtttttttgaaaattttgctttcagttttttggcggtgattttatgcgctcttttaagctatcttgtccctaacgccagtaacgccctttcactaatcggtaatggcgtttctattttttatctgcataaactctatagagaattgagcctttacacgcaagaaagattttttttaagcggttttagattgttgctttttagtttcatgctggctcttttaggggttttagtgcaagcgttagttatcatttttttaacgatcgctgtgattttaatgtgtgtggcgctcagttttttagggcgcgcgttcttgaatttttcacaagtctttttgaaagcatga

SEQ ID NO: 1063 - DNA (genomic), 228 bp, Helicobacter pylori; double-stranded, circular
  misc_feature (B) LOCATION 1...228
  hypothetical: NO
  anti-sense: NO
atgcttgataaacgcattaaaacgcttttacttttttttggtcttaatatggtgtgtttgagcgtgagttttaccaataagcctcatttgtgtttttggtttttagtgttaggttgttatttagtttatgagtggcaaaagaaacaaaaaaaagattttcaaagcgctaaaagtttgaaatttgacagcgttagcgaattagaaaaggattttgaacatggaagtaac

SEQ ID NO: 1064 - DNA (genomic), 156 bp, Helicobacter pylori; double-stranded, circular
  misc_feature (B) LOCATION 1...156
  hypothetical: NO
  anti-sense: NO
ctaatgatgaatgggatacccattaaaaaacttaatgaaaagttaaaaatgttttttaatgtagaaaatgctatctatgtttttttattagtgagttatcttattgtagggatgcgcgttactctctctcttatagataatcacggagtgttgaaa

SEQ ID NO: 1065 - DNA (genomic), 258 bp, Helicobacter pylori; double-stranded, circular
  misc_feature (B) LOCATION 1...258
  hypothetical: NO
  anti-sense: NO
gcgaggatcatgcttgataaacgcattaaaacgcttttacttttttttggtcttaatatggtgtgtttgagcgtgagttttaccaataagcctcatttgtgtttttggtttttagtgttaggttgttatttagtttatgagtggcaaaagaaacaaaaaaaagattttcaaagcgctaaaagtttgaaatttgacagcgttagcgaattagaaaaggatttgaacatggaagtaactaatgatgaatgggatacccat

SEQ ID NO: 1066 - DNA (genomic), 384 bp, Helicobacter pylori; double-stranded, circular
  misc_feature (B) LOCATION 1...384
  hypothetical: NO
  anti-sense: NO
atgcttgataaacgcattaaaacgcttttacttttttttggtcttaatatggtgtgtttgagcgtgagttttaccaataagcctcatttgtgtttttggtttttagtgttaggttgttatttagtttatgagtggcaaaagaaacaaaaaaaagattttcaaagcgctaaaagtttgaaatttgacagcgttagcgaattagaaaaggatttgaacatggaagtaactaatgatgaatgggataccattaaaaaacttaatgaaaagttaaaaatgttttttaatgtagaaaatgctatctatgtttttttattagtgagttatcttattgtagggatgcgcgttactctctctcttatagataatcacggagtgttgaaatga

SEQ ID NO: 1067 - DNA (genomic), 357 bp, Helicobacter pylori; double-stranded, circular
  misc_feature (B) LOCATION 1...357
  hypothetical: NO
  anti-sense: NO
gtggttttgtctgatttgctgctaccaaaaccattaccaaccaaagcagatcccatgtttttgatactatcgaatccattcttcagcacttctgccataaaattcttgatattgtccataggcaagttaaattttttccctaatgcttcattaagtcccatcattaacatcaggaagaacaaaaaatttaatatcatagaaaacaaatcactggataaacctgtaaaaagatttgttccgccacccaacaaagaagctaaaatttttcccatactcaatccttttatttttggttgtgtaagttcttgcttgttcggatctctaatgcgtgttttagtaggaagcatttcacaatag

SEQ ID NO: 1068 - DNA (genomic), 384 bp, Helicobacter pylori; double-stranded, circular
  misc_feature (B) LOCATION 1...384
  hypothetical: NO
  anti-sense: NO
agtcttacttgtgggacactcattttattagtggttttgtctgatttgctgctaccaaaaccattaccaaccaaagcagatcccatgtttttgatactatcgaatccattcttcagcacttctgccataaaattcttgatattgtccataggcaagttaaattttttccctaatgcttcattaagtcccatcattaacatcaggaagaacaaaaaatttaatatcatagaaaacaaatcactggataaacctgtaaaaagatttgttccgccacccaacaaagaagctaaaatttttcccatactcaatccttttatttttggttgtgtaagttcttgcttgttcggatctctaatgcgtgttttagtaggaagcatttcacaa

SEQ ID NO: 1069 - DNA (genomic), 216 bp, Helicobacter pylori; double-stranded, circular
  misc_feature (B) LOCATION 1...216
  hypothetical: NO
  anti-sense: NO
ggccaaaaggaggaaaaaggcattattgatggctattgtcagagcgatgtgcttaacacttactggcttttttttaaatacgaagtgctaaaaggggctttaaataaggagcaataccttgggctattgaatgattttttagccaaattccctaaggaaaaatcctattcaagcgtttttattaacgctttagagaaagagattagggagtttgct

SEQ ID NO: 1070 - DNA (genomic), 390 bp, Helicobacter pylori; double-stranded, circular
  misc_feature (B) LOCATION 1...390
  hypothetical: NO
  anti-sense: NO
atgcgaaaggggcgtgtgatgttatgcgtgtttgatatagaaaccattcctaatataagcttgtgtaaagagcattttcaattaaaagaagacgatgcgctaaaaatctgtgaatggagttttgaaaagcaaaaagaaaaaagcgggagcgagtttttgcccctttatttgcatgaaatcatctctattgcagcmgtcattggcgatgattacgggcaatttatcaaagtagggaattttggtcaaaaacacgagaataaagaggattttgcgagcgaaaaagagcttttagaggactttttcaaatactttaacgaaaagcaaccgcgcctaataagctttaawggcaggggttttggatattcccctactcacgctcaaagcccttaa

SEQ ID NO: 1071 - DNA (genomic), 660 bp, Helicobacter pylori; double-stranded, circular
  misc_feature (B) LOCATION 1...660
  hypothetical: NO
  anti-sense: NO
aagcgagacaagaatgttaaaatgcgaaaggggcgtgtgatgttatgcgtgtttgatatagaaaccattcctaatataagcttgtgtaaagagcattttcaattaaaagaagacgatgcgctaaaaatctgtgaatggagttttgaaaagcaaaaagaaaaaagcgggagcgagtttttgcccctttatttgcatgaaatcatctctattgcagcagtcattggcgatgattacgggcaatttatcaaagtagggaattttggtcaaaaacacgagaataaagaggattttgcgagcgaaaaagagcttttagaggactttttcaaatactttaacgaaaagcaaccgcgcctaataagctttaatggcagaggttttgatattcccctactcacgctcaaagcccttaaatacaatttaaccttagacgctttttacagccaagaaaacaaatgggaaaattaccgcgcgcgttatagcgagcagtttcatttggatttgatggatagcttgagccattatggatccgttagggggttgaatctaaatggcgtttgctctatgacgaatattcctggtaaatttgatgtgagcggggacttagtgcatgcgatttattacaacccccatttaaggccaaaaggaggaaaaaggcattat

SEQ ID NO: 1072 - DNA (genomic), 831 bp, Helicobacter pylori; double-stranded, circular
  misc_feature (B) LOCATION 1...831
  hypothetical: NO
  anti-sense: NO
atgcgaaaggggcgtgtgatgttatgcgtgtttgatatagaaaccattcctaatataagcttgtgtaaagagcattttcaattaaaagaagacgatgcgctaaaaatctgtgaatggagttttgaaaagcaaaaagaaaaaagcgggagcgagtttttgcccctttatttgcatgaaatcatctctattgcagcagtcattggcgatgattacgggcaatttatcaaagtagggaattttggtcaaaaacacgagaataaagaggattttgcgagcgaaaaagagcttttagaggactttttcaaatactttaacgaaaagcaaccgcgcctaataagctttaatggcagaggttttgatattcccctactcacgctcaaagcccttaaatacaatttaaccttagacgctttttacagccaagaaaacaaatgggaaaattaccgcgcgcgttatagcgagcagtttcatttggatttgatggatagcttgagccattatggatccgttagggggttgaatctaaatggcgtttgctctatgacgaatattcctggtaaatttgatgtgagcggggacttagtgcatgcgatttattacaacccccatttaagccaaaaggagaaaaaaggcattattgatggctattgtcagagcgatgtgcttaacacttactggctttttttaaaatacgaagtgctaaaaggggctttaaataaggagcaataccttgggctattgaatgattttttagccaaattccctaaggaaaaatcctattcaagcgtttttattaacgctttagagaaagagattagggagtttgcttaa

SEQ ID NO: 1073 - DNA (genomic), 576 bp, Helicobacter pylori; double-stranded, circular
  misc_feature (B) LOCATION 1...576
  hypothetical: NO
  anti-sense: NO
atgcttgatatatggatagatatgataatctgtattttttatttgctcttttttacgactccttacattgtaggcgatattttgcaattgaaatttatccgtcaaaaactctgcgagaagcctgttttactcccacaaaaggattatgaagaagcgggaaattatgctattaggaaaatgcaattatccattatttctcaaattttagatggggtgatctttgctggttgggtcttttttggtttgacgcatttagaagatctcacgcattatttaaaccttcctgaaacgctaggttacttggtgtttgccttgttgtttttagcgattcaaagcgttttagctttacccattagctactatactaccatgcatttggataaggaatttggcttttctaaggtgagtttatcgttgttttttaaggattttttcaaaggattattgctcactttaggcgtggggttgttgttgatttacactctcataatgatcattgaacatgtggagcattgggagatcagctcgttttttgtcgtgtttgttttcatgattttggctaatctttttttaccc

SEQ ID NO: 1074 - DNA (genomic), 1224 bp, Helicobacter pylori; double-stranded, circular
  misc_feature (B) LOCATION 1...1224
  hypothetical: NO
  anti-sense: NO
atgcttgatatatggatagatatgataatctgtattttttatttgctcttttttacgactccttacattgtaggcgatattttgcaattgaaatttatccgtcaaaaactctgcgagaagcctgttttactcccacaaaaggattatgaagaagcgggaaattatgctattaggaaaatgcaattatccattatttctcaaattttagatggggtgatctttgctggttgggtcttttttggtttgacgcatttagaagatctcacgcattatttaaaccttcctgaaacgctaggttacttggtgtttgccttgttgtttttagcgattcaaagcgttttagctttacccattagctactatactaccatgcatttggataaggaatttggcttttctaaggtgagtttatcgttgttttttaaggattttttcaaaggattattgctcactttaggcgtggggttgttgttgatttacactctcataatgatcattgaacatgtggagcattgggagatcagctcgttttttgtcgtgtttgttttcatgattttggctaatcttttttaccctaaaatcgcccagcttttcaaccaattcacccccttgaataatagggatttagaaagtcaaattgagagcatgatggataaggtgggttttaaatctcaaggcatctttgtgatggacgctagcaagagggatgggcgtttgaacgcgtattttggaggcttgggtaaaaacaagcgggtggtgttgtttgacactttgatctctaaagttgggacagaagggcttttagccattttagggcatgagttagggcattttaaaaataaggatttgttgaaaaatttagggattatgggaggcttgctcgctcttgtttttgctttgatcgctcatttgccgccgttggtttttgaaggctttaatgtctcgcaaacgccagcgagtttgatcacgattctactcttgtttttgccggtgttttccttttacgccatgcctttgattgggttttttagccgcaagaacgaatacaatgcggacaagtttggggcgagtttaagctctaaagagactttagccaaagcgttagtgtccattgtgaatgaaaataaagcgttcccctattcgcaccctttttatgttttcttgcatttcacgcacccgccgctattagaacgcctaaaagctttggattatgaaattgaatga

SEQ ID NO: 1075 - DNA (genomic), 1224 bp, Helicobacter pylori; double-stranded, circular
  misc_feature (B) LOCATION 1...1224
  hypothetical: NO
  anti-sense: NO
aatatgcttgatatatggatagatatgataatctgtattttttatttgctcttttttacgactccttacattgtaggcgatattttgcaattgaaatttatccgtcaaaaactctgcgagaagcctgttttactcccacaaaaggattatgaagaagcgggaaattatgctattaggaaaatgcaattatccattatttctcaaattttagatggggtgatctttgctggttgggtcttttttggtttgacgcatttagaagatctcacgcattatttaaaccttcctgaaacgctaggttacttggtgtttgccttgttgtttttagcgattcaaagcgttttagctttacccattagctactatactaccatgcatttggataaggaatttggcttttctaaggtgagtttatcgttgttttttaaggattttttcaaaggattattgctcactttaggcgtggggttgttgttgatttacactctcataatgatcattgaacatgtggagcattgggagatcagctcgttttttgtcgtgtttgttttcatgattttggctaatcttttttaccctaaaatcgcccagcttttcaaccaattcacccccttgaataatagggatttagaaagtcaaattgagagcatgatggataaggtgggttttaaatctcaaggcatctttgtgatggacgctagcaagagggatgggcgtttgaacgcgtattttggaggcttgggtaaaaacaagcgggtggtgttgtttgacactttgatctctaaagttgggacagaagggcttttagccattttagggcatgagttagggcattttaaaaataaggatttgttgaaaaatttagggattatgggaggcttgctcgctcttgtttttgctttgatcgctcatttgccgccgttggtttttgaaggctttaatgtctcgcaaacgccagcgagtttgatcacgattctactcttgtttttgccggtgttttccttttacgccatgcctttgattgggttttttagccgcaagaacgaatacaatgcggacaagtttggggcgagtttaagctctaaagagactttagccaaagcgttagtgtccattgtgaatgaaaataaagcgttcccctattcgcaccctttttatgttttcttgcatttcacgcacccgccgctattagaacgcctaaaagctttggattatgaaattgaa

SEQ ID NO: 1076 - DNA (genomic), 429 bp, Helicobacter pylori; double-stranded, circular
  misc_feature (B) LOCATION 1...429
  hypothetical: NO
  anti-sense: NO
gtgcaagaatcagtcgttcatgtggattatgactctttagagacttgtaagaatttcaaaccaagcgttggcactgaattggtcgttttagaaaaaaacatcgcccatgtccgtttcaagggcaatgaaaacatggtgtatgaagaaaattttgtgcatgccgggtttgtgcttcttgcgtgcaattatgcggccttgtgcgcgttgaataaaaaatacagcgtggtggtttctaataacatcaatttttacgcccccctagaattgaatcaagaagcgctcattaaagcgcaagtcattcaagatggcgtgaaaaaagctgaaataaaaatagaggcgtttgtgttagacattcaggttttagagggaatgatagaaatcgtggtgtttgataaaaagccttttaaattcaattttaaagaagagtag

SEQ ID NO: 1077 - DNA (genomic), 480 bp, Helicobacter pylori; double-stranded, circular
  misc_feature (B) LOCATION 1...480
  hypothetical: NO
  anti-sense: NO
gggggtattttaaaatgcttaaaccaagcaagcgttaaaataaaggataagatagtgcaagaatcagtcgttcatgtggattatgactctttagagacttgtaagaatttcaaaccaagcgttggcactgaattggtcgttttagaaaaaaacatcgcccatgtccgtttcaagggcaatgaaaacatggtgtatgaagaaaattttgtgcatgccgggtttgtgcttcttgcgtgcaattatgcggccttgtgcgcgttgaataaaaaatacagcgtggtggtttctaataacatcaatttttacgcccccctagaattgaatcaagaagcgctcattaaagcgcaagtcattcaagatggcgtgaaaaaagctgaaataaaaatagaggcgtttgtgttagacattcaggttttagagggaatgatagaaatcgtggtgtttgataaaaagccttttaaattcaattttaaagaagag

SEQ ID NO: 1078 - DNA (genomic), 747 bp, Helicobacter pylori; double-stranded, circular
  misc_feature (B) LOCATION 1...747
  hypothetical: NO
  anti-sense: NO
atgcaaaaaagtatattcaaaataactctgttgttggttttcctctttttaaggaatgctgttggtttagacgataaaaaagcagctcctaaaagcgttcaaaatacccctaaaaatttaccccctatccagttaaggctcgatcaagcctatgaagaccttatcaaaatgttagacaatatgggaaaaagcacgcagtatgagttccctaaaattaaagaaatcctagaacaaagcgaagaggaatggctaggagtcgcccatgaagaatgtgtggcgttagtcatgttaataagccctaaggcttctattgaaaacagcccgatttataagaattgctatgaagcttatgtgaaacaaagaatccatgatttatatgatttttatatagagggcaaaaaagtgaaaagaaaaatcaagaaagcccatgagcatgaaatggccctcaacaaatcccaacccttaaaaaaggaaccgcctaaaagcgagaataaaaagggcttaacaaaacctagcttgaaagacgcaaagatccctaaagggtattacttgcaaattggggcttttttaaattcgcccagtaaggattttttgcaaacgctcaaaactttccctcaccaaatggaggaaaaagactccctcacgcattatttgattggcccttataaaaccaaagaagaagccctaaaacagcttgaaaatgcggctaaaagctttaaaaataagcctgcgttggtagagaagtga

SEQ ID NO: 1079 - DNA (genomic), 744 bp, Helicobacter pylori; double-stranded, circular
  misc_feature (B) LOCATION 1...744
  hypothetical: NO
  anti-sense: NO
atgcaaaaaagtatattcaaaataactctgttgttggttttcctctttttaaggaatgctgttggtttagacgataaaaaagcagctcctaaaagcgttcaaaatacccctaaaaatttaccccctatccagttaaggctcgatcaagcctatgaagaccttatcaaaatgttagacaatatgggaaaaagcacgcagtatgagttccctaaaattaaagaaatcctagaacaaagcgaagaggaatggctaggagtcgcccatgaagaatgtgtggcgttagtcatgttaataagccctaaggcttctattgaaaacagcccgatttataagaattgctatgaagcttatgtgaaacaaagaatccatgatttatatgatttttatatagagggcaaaaaagtgaaaagaaaaatcaagaaagcccatgagcatgaaatggccctcaacaaatcccaacccttaaaaaaggaaccgcctaaaagcgagaataaaaagggcttaacaaaacctagcttgaaagacgcaaagatccctaaagggtattacttgcaaattggggcttttttaaattcgcccagtaaggattttttgcaaacgctcaaaactttccctcaccaaatggaggaaaaagactccctcacgcattatttgattggcccttataaaaccaaagaagaagccctaaaacagcttgaaaatgcggctaaaagctttaaaaataagcctgcgttggtagagaag

SEQ ID NO: 1080 - DNA (genomic), 744 bp, Helicobacter pylori; double-stranded, circular; identical to SEQ ID NO: 1079
  misc_feature (B) LOCATION 1...744
  hypothetical: NO
  anti-sense: NO

SEQ ID NO: 1081 - DNA (genomic), 369 bp, Helicobacter pylori; double-stranded, circular
  misc_feature (B) LOCATION 1...369
  hypothetical: NO
  anti-sense: NO
gtggtcagcattaggttaattgtattgcctttaggtttaatctcccaaaccaaaggcatgttatttagctatcttaaaaagctcatttcccttactctttataaaccttgtatgatgttagtagctttttttaattatggaataatctataaagtcaatactttaatccccactaaacacgaagtcacacaaggcttttatggcaatgcggataaaatggcaaatgagggaaaaattattgatgtctttgggaatgtcttaaaaggagattggaactcttatatagcccatagttctattgtaggctttttaaccaattattgttttaggttctgtgatttgtttctttctagtcaaacgagtgcctga

SEQ ID NO: 1082 - DNA (genomic), 1053 bp, Helicobacter pylori; double-stranded, circular
  misc_feature (B) LOCATION 1...1053
  hypothetical: NO
  anti-sense: NO
gcatttggagttatcaattggggggttaaaattcttgatgattttgacacttattttatcaatacgatattctacccatctgaagaactagccatacttatcgctcaaagcctaaatgatgggttagaaatccccactaacactaatttaagtcctagtgaaatttttagcataggaaatttagcctcaagtgcgtatgcaatgatagttaatctgtgggataatgcttttgatggtattaacatgtttaattggctcacaatgatacctaaaataattatgttttttttagtgattttaggggaattattgtttttaggcttattgcttattattgtgttattagttacagcagaaatttttatgtggtcagcattaggtttaattgtattgcctttaggtttaatcccccaaaccaaaggcatgttatttagctatcttaaaaagctcatttcccttactctttataaaccttgtatgatgttagtagctttttttaattatggaataatctataaagtcaatactttaatccccactaaacacgaagtcacacaaggcttttatggcaatgcggataaaatggcaaatgagggaaaaattattgatgtctttggcaatgtcttaaaaggagattggaactcttatatagcccatagttctattgtaggctttttaaccattattgttttaggttctgtgatttgtttctttctagtcaaacgagtgcctgattttatcaataatatctttggcacaagtggaggcgtgggggcagtaacagaaatgatgcaaaaaattggcatgacaataggcggagctgtatttgggggtagtgcagttatagttgctaatcaagttaagcaagcctatcagagtgctgggggcggactagcaggacttcaagctggagctaaagcttttgggcttggagcaatcagtggaggggcaagtgctatggcaaaccacaggagtgttaaagctggggtgaaacactttgtagcaagtgttaaaagtggctttggatttgataatgataaaaataataaatga

SEQ ID NO: 1083 - DNA (genomic), 1266 bp, Helicobacter pylori; double-stranded, circular
  misc_feature (B) LOCATION 1...1266
  hypothetical: NO
  anti-sense: NO
atgaatttttttgacacccttatgggtatgtttgttgagccatctcaaaaagtagccaaaagtcttgctgaacatgtgggtagcttttttcatgcacaactcattttaaacacaattattactattttatttatgatatgggcgtataagcgtgtgaaagagggcgatatgtttgagtttaaaaccgctatgggtgtggttgtatttatagcgtttgtaggatttatcaattgggggattaaaaatcctaatgattttaacacttattttatcaatacgatattctacccatctgaaaaactagccatacttatcgctcaaagcctaaatgatggcttagaaatccccactaacactaatttaagtcctagtgaaatttttagcataggaaatttagcctcaagtgcgtatgcaatgatagttaatctgtgggataatgcttttgatggtattaacatgtttaattggctcacaatgatacctaaaataattatgttttttttagtgattttaggggaattattgtttttaggcttattgcttattattgtgttattagttacagcagaaatttttatgtggtcagcattaggtttaattgtattgcctttaggtttaatcccccaaaccaaaggcatgttatttagctatcttaaaaagctcatttcccttactctttataaaccttgtatgatgttagtagctttttttaattatggaataatctataaagtcaatactttaatccccactaaacacgaagtcacacaaggcttttatggcaatgcggataaaatggcaaatgagggaaaaattattgatgtctttggcaatgtcttaaaaggagattggaactcttatatagcccatagttctattgtaggctttttaaccattattgttttaggttctgtgatttgtttctttctagtcaaacgagtgcctgattttatcaataatatctttggcacaagtggaggcgtgggggcagtaacagaaatgatgcaaaaaattggcatgacaataggcggagctgtatttgggggtagtgcagttatggttgctaatcaagttaagcaagcctatcagagtgctgggggcggactagcaggacttcaagctggagctaaagcttttgggcttggagcaatcagtggaggggcaagtgctatggcaaaccacaggagtgttaaagctggggtgaaacactttgtagcaagtgttaaaagtggctttggatttgataatgataaaaataataaatga

SEQ ID NO: 1084 - DNA (genomic), 1263 bp, Helicobacter pylori; double-stranded, circular
  misc_feature (B) LOCATION 1...1263
  hypothetical: NO
  anti-sense: NO
atgaatttttttgacacccttatgggtatgtttgttgagccatctcaaaaagtagccaaaagtcttgctgaacatgtgggtagcttttttcatgcacaactcattttaaacacaattattactattttatttatgatatgggcgtataagcgtgtgaaagagggcgatatgtttgagtttaaaaccgctatgggtgtggttgtatttatagcgtttgtaggatttatcaattgggggattaaaaatcctaatgattttaacacttattttatcaatacgatattctacccatctgaaaaactagccatacttatcgctcaaagcctaaatgatggcttagaaatccccactaacactaatttaagtcctagtgaaatttttagcataggaaatttagcctcaagtgcgtatgcaatgatagttaatctgtgggataatgcttttgatggtattaacatgtttaattggctcacaatgatacctaaaataattatgttttttttagtgattttaggggaattattgtttttaggcttattgcttattattgtgttattagttacagcagaaatttttatgtggtcagcattaggtttaattgtattgcctttaggtttaatcccccaaaccaaaggcatgttatttagctatcttaaaaagctcatttcccttactctttataaaccttgtatgatgttagtagctttttttaattatggaataatctataaagtcaatactttaatccccactaaacacgaagtcacacaaggcttttatggcaatgcggataaaatggcaaatgagggaaaaattattgatgtctttggcaatgtcttagaaggagattggaactcttatatagcccatagttctattgtaggctttttaaccattattgttttaggttctgtgatttgtttctttctagtcaaacgagtgcctgattttatcaataatatctttggcacaagtggaggcgtgggggcagtaacagaaatgatgcaaaaaattggcatgacaataggcggagctgtatttgggggtagtgcagttatggttgctaatcaagttaagcaagcctatcagagtgctgggggcggactagcaggacttcaagctggagctaaagcttttgggcttggagcaatcagtggaggggcaagtgctatggcaaaccacaggagtgttaaagctggggtgaaacactttgtagcaagtgttaaaagtggctttggatttgataatgataaaaataataaa

SEQ ID NO: 1085 - DNA (genomic), 1275 bp, Helicobacter pylori; double-stranded, circular
  misc_feature (B) LOCATION 1...1275
  hypothetical: NO
  anti-sense: NO
agggagggggcgatgaatttttttgacacccttatgggtatgtttgttgagccatctcaaaaagtagccaaaagtcttgctgaacatgtgggtagcttttttcatgcacaactcattttaaacacaattattactattttatttatgatatgggcgtataagcgtgtgaaagagggcgatatgtttgagtttaaaaccgctatgggtgtggttgtatttatagcgtttgtaggatttatcaattgggggattaaaaatcctaatgattttaacacttattttatcaatacgatattctacccatctgaaaaactagccatacttatcgctcaaagcctaaatgatggcttagaaatccccactaacactaatttaagtcctagtgaaatttttagcataggaaatttagcctcaagtgcgtatgcaatgatagttaatctgtgggataatgcttttgatggtattaacatgtttaattggctcacaatgatacctaaaataattatgttttttttagtgattttaggggaattattgtttttaggcttattgcttattattgtgttattagttacagcagaaatttttatgtggtcagcattaggtttaattgtattgcctttaggtttaatcccccaaaccaaaggcatgttatttagctatcttaaaaagctcatttcccttactctttataaaccttgtatgatgttagtagctttttttaattatggaataatctataaagtcaatactttaatccccactaaacacgaagtcacacaaggcttttatggcaatgcggataaaatggcaaatgagggaaaaattattgatgtctttggcaatgtcttaaaaggagattggaactcttatatagcccatagttctattgtaggctttttaaccattattgttttaggttctgtgatttgtttctttctagtcaaacgagtgcctgattttatcaataatatctttggcacaagtggaggcgtgggggcagtaacagaaatgatgcaaaaaattggcatgacaataggcggagctgtatttgggggtagtgcagttatggttgctaatcaagttaagcaagcctatcagagtgctgggggcggactagcaggacttcaagctggagctaaagcttttgggcttggagcaatcagtggaggggcaagtgctatggcaaaccacaggagtgttaaagctggggtgaaacactttgtagcaagtgttaaaagtggctttggatttgataatgataaaaataataaa

SEQ ID NO: 1086 - DNA (genomic), 831 bp, Helicobacter pylori; double-stranded, circular
  misc_feature (B) LOCATION 1...831
  hypothetical: NO
  anti-sense: NO
atgttaaggaaaaacattttagcttactatggggcgaattttctcttaatcatcgctcaaagcttgccccatgcgattttaacccccttgttgctttctaaagggcttagtttgagtgaaatcttgctcgtgcaaaccttttttagtttttgcgtgctggtggctgaatacccaagcggcgttttagcggatttgatgagccggaagaatttattcctggtttctaatgtgtttttaatcgctagtttttcgttggtgctgttttttgatagttttatcctcatgcttttagcgtgggggttgtatggtttgtatagcgcatgctctagcggcacgattgaagcttcactcatcacagacattaaggaaaacaaaaaagatttatccaagtttttagccaaaaacaatcaaattacttatttgggcatgattatagggagttctttgggatcgtttttgtatctcaaagtccatgcgatgctgtatgtcgtggggatttttttaatcatgctctgtgcgctaacaatcatcatttattttaaagaaaaagaaggggattttaaaagccaaaaaaatttgaaactccttaaagagcaagtcaaaggcagtcttaaagagcttaaagataaccccaagcttaaaattttgttagtggggcatttgattacgcctgtcttttttatgagccatttccaaatgtggcaagcgtattttttaaaacaaggcgttaaagagcaatacctttttgtgttctatatcgcttttcaagtgatttccatccctcattcattttttaaaagccaaaaattakcagccaaaaaatcgccctga

SEQ ID NO: 1087 - DNA (genomic), 1161 bp, Helicobacter pylori; double-stranded, circular
  misc_feature (B) LOCATION 1...1161
  hypothetical: NO
  anti-sense: NO
atgttaaggaaaaacattttagcttactatggggcgaattttctcttaatcatcgctcaaagcttgccccatgcgattttaacccccttgttgctttctaaagggcttagtttgagtgaaatcttgctcgtgcaaaccttttttagtttttgcgtgctggtggctgaatacccaagcggcgttttagcggatttgatgagccggaagaatttattcctggtttctaatgtgtttttaatcgctagtttttcgtttgtgctgttttttgatagttttatcctcatgcttttagcgtgggggttgtatggtttgtatagcgcatgctctagcggcacgattgaagcttcactcatcacagacattaaggaaaacaaaaaagatttatccaagtttttagccaaaaacaatcaaattacttatttgggcatgattatagggagttctttgggatcgtttttgtatctcaaagtccatgcgatgctgtatgtcgtggggatttttttaatcatgctctgtgcgctaacaatcatcatttattttaaagaaaaagaaggggattttaaaagccaaaaaaatttgaaactccttaaagagcaagtcaaaggcagtcttaaagagcttaaagataaccccaagcttaaaattttgttagtggggcatttgattacgcctgtcttttttatgagccatttccaaatgtggcaagcgtattttttaaaacaaggcgttaaagagcaatacctttttgtgttctatatcgcttttcaagtgatttccatcctcattcattttttaaaagccaaaaattacagccaaaaaatcgccctgagttcgcttttggtgttgctaggcgttagccccttgttgcttagcaatatcccttattgtttcataggggtgtatgcgctcatggtggcgttttttgcttacatgagttattgcttggggtatcaattctccaaattcgtttctaaaaacaacatttcatcgctctcatcgcttttatcaagctgtgtgcgcgtggtctctgtgctaatcttgtcgctcagtagcctagagttgcgttacttctcacccctaactatcataaccatgcattttgccctaacgcttatcatcctctttttctttttgtataaggctaagccgtttgatgagtga

SEQ ID NO: 1088 - DNA (genomic), 1182 bp, Helicobacter pylori; double-stranded, circular
  misc_feature (B) LOCATION 1...1182
  hypothetical: NO
  anti-sense: NO
gctagttttaattacaattttcaaatgttaaggaaaaacattttagcttactatggggcgaattttctcttaatcatcgctcaaagcttgccccatgcgattttaacccccttgttgctttctaaagggcttagtttgagtgaaatcttgctcgtgcaaaccttttttagtttttgcgtgctggtggctgaatacccaagcggcgttttagcggatttgatgagccggaagaatttattcctggtttctaatgtgtttttaatcgctagtttttcgtttgtgctgttttttgatagttttatcctcatgcttttagcgtgggggttgtatggtttgtatagcgcatgctctagcggcacgattgaagcttcactcatcacagacattaaggaaaacaaaaaagatttatccaagtttttagccaaaaacaatcaaattacttatttgggcatgattatagggagttctttgggatcgtttttgtatctcaaagtccatgcgatgctgtatgtcgtggggatttttttaatcatgctctgtgcgctaacaatcatcatttattttaaagaaaaagaaggggattttaaaagccaaaaaaatttgaaactccttaaagagcaagtcaaaggcagtcttaaagagcttaaagataaccccaagcttaaaattttgttagtggggcatttgattacgcctgtcttttttatgagccatttccaaatgtggcaagcgtattttttaaaacaaggcgttaaagagcaatacctttttgtgttctatatcgcttttcaagtgatttccatcctcattcattttttaaaagccaaaaattacagccaaaaaatcgccctgagttcgcttttggtgttgctaggcgttagccccttgttgcttagcaatatcccttattgtttcataggggtgtatgcgctcatggtggcgttttttgcttacatgagttattgcttggggtatcaattctccaaattcgtttctaaaaacaacatttcatcgctctcatcgcttttatcaagctgtgtgcgcgtggtctctgtgctaatcttgtcgctcagtagcctagagttgcgttacttctcacccctaactatcataaccatgcattttgccctaacgcttatcatcctctttttctttttgtataaggctaagccgtttgatgag

SEQ ID NO: 1089 - DNA (genomic), 219 bp, Helicobacter pylori; double-stranded, circular
  misc_feature (B) LOCATION 1...219
  hypothetical: NO
  anti-sense: NO
aaaacacgctcaaacccatcaagtgccacaaggcgctttactatgatgatcccttcttcaccgcatgagctcattaaggtgagtccaagcttgagcaagaaatacaaattggggaaagtgcctaatcaagcaacattttatgatgacttgcaagccgctaaaaccagaggcgaattgagctatgataaatctttagtgcctgtgggttcaagcgaactg

SEQ ID NO: 1090 - DNA (genomic), 240 bp, Helicobacter pylori; double-stranded, circular
  misc_feature (B) LOCATION 1...240
  hypothetical: NO
  anti-sense: NO
atggaagactttttgtataacaccttatatttcatagaggattataagttggttgttatttttagtttcatagggttaatagcgttatttttcctctacaaattcataaaaactcaaaaaaaggtttttaaagataaagctaaccagcctcaaaagaaaaaaagctttaaagaaatcattatagatgggctgaaagaaagggttaaaacctttggctttaggttgcaagctatactatta

SEQ ID NO: 1091 - DNA (genomic), 303 bp, Helicobacter pylori; double-stranded, circular
  misc_feature (B) LOCATION 1...303
  hypothetical: NO
  anti-sense: NO
gtagtaggcacaatggaagactttttgtataacaccttatatttcatagaggattataagttggttgttatttttagtttcatagggttaatagcgttatttttcctctacaaattcataaaaactcaaaaaaaggtttttaaagataaagctaaccagcctcaaaagaaaaaaagctttaaagaaatcattatagatgggctgaaagaaagggttaaaacctttggcttttggttgccaagctatactattactatcctattcttttatcacatcagggttatttttcttgattctcttagg

SEQ ID NO: 1092 - DNA (genomic), 1899 bp, Helicobacter pylori; double-stranded, circular
  misc_feature (B) LOCATION 1...1899
  hypothetical: NO
  anti-sense: NO
aagaaagggttaaaacctttggcttttggttgccaagctatactattactatcctattcttttatcacatcagggttatttttcttgattctcttaggtaatttttatgatgataatagattgcctgagagcgatgatgatctttttgatatatgggtctatgcgatacaagattttcctgcatactattttaaggcactcacttttagctcgctcaagatttatgggttcaatatatccttagtcgtatatagttctattttatgctcttatatattcattaccttttttgtgtggttcttaaaatacttaactcggactagggacataggagcgaataaaaaagttgatgatctctttggtagcgcgagttgggaaactgaagagaaaatgatcaaagccaagcttatcacacccaacaataaaaaacgcgcctttgacaaacgagaggttattgtaggcaggcgtggcttaggggattttatcgcttacgcaggacaggcgtttattggcttgattgctcctactaggagcggtaagggtgtgggtttcatcatgcccaatatgatcaattaccctcaaaatatcgttgtgtttgatcctaaggctgacactatggaaacttgcgggaaaatcagagaaaaacgcttcaaccaaaaagtgttcatctatgaacctttctccttaaaaacacaccgatttaatcctttcgcttatgtggattttggtaatgatgtggttttgactgaagacatactctctcaaattgacacacgcctaaaagggcatggcatggtggctagtggaggggatttttccactcaaatctttggattggctaagttggtgttccctgaaagacctaatgaaaaagatcctttttttagcaatcaggcgcgaaacctttttgtcatcaattgcaatatttatagggatctcatgtggactaaaaaggggcttgagtttgtcaaaagaaaaaaaatcatcatgcctgaaacccccacgatgtttttcataggttctatggcaagcggtatcaacttgattgatgaagacacaaacatggaaaaagtcgtgtctttaatggaattttttggaggtgaagaagataagagtggcgacaatctaagagcgcttagtcctgccactagaaacatgtggaataacttcaagacaatgggtggcgctaaagaaacttacagctcggttcaaggggtctatacatcagcgtttgcgccttacaataacgccatgatcaggaatttcacgagcgctaatgattttgatttcaggcgtttaaggatcgatgcagtgagtattggtgtgatcgctaatcctaaagaaagcactattgttggaccgatattagagctgtttttcaacgtgatgatttatagcaatttgattctgccaatccatgatccacaatgcaaaagaagctgcttgatgctcatggatgaatttacgctctgtggctatttagagacctttgttaaagcggtagggatcatggcagaatacaacatgcgccccgcttttgtgtttcaaagtaaggcgcaattagaaaacgaccccccacttggttatggtaggaatggcgctaagactattttagacaacctttctttgaatatgtattatgggatcaacaacgataactactatgaacattttgaaaagctttctaaagtgttagggaaatacacaaggcaagatgtgagccggagcattgatgataatacgggtaagaccaacacttctatcagcaacaaggagcggtttttgatgacccctgatgaattgatgactatgggcgatgagcttatcattttagaaaacacgctcaaacccatcaagtgccacaaggcgctttactatgatgatcccttcttcaccgca

SEQ ID NO: 1093 - DNA (genomic), 2247 bp, Helicobacter pylori; double-stranded, circular
  misc_feature (B) LOCATION 1...2247
  hypothetical: NO
  anti-sense: NO
atggaagactttttgtataacaccttatatttcatagaggattataagttggttgttatttttagtttcatagggttaatagcgttatttttcctctacaaattcataaaaactcaaaaaaaggtttttaaagataaagctaaccagcctcaaaagaaaaaaagctttaaagaaatcattatagatgggctgaaagaaagggttaaaacctttggcttttggttgcaagctatactattactatcctattcttttatcacatcagggttatttttcttgattctcttaggtaatttttatgatgataatagattgcctgagagcgatgatgatctttttgatatatgggtctatgcgatacaagattttcctgcatactattttaaggcactcacttttagctcgctcaagatttatgggttcaatatatccttagtcgtatatagttctattttatgctcttatatattcattaccttttttgtgtggttcttaaaatacttaactcggactagggacataggagcgaataaaaaagttgatgatctctttggtagcgcgagttgggaaactgaagagaaaatgatcaaagccaagcttatcacacccaacaataaaaaacgcgcctttgacaaacgagaggttattgtaggcaggcgtggcttaggggattttatcgcttacgcaggacaggcgtttattggcttgattgctcctactaggagcggtaagggtgtgggtttcatcatgcccaatatgatcaattaccctcaaaatatcgttgtgtttgatcctaaggctgacactatggaaacttgcgggaaaatcagagaaaaacgcttcaaccaaaaagtgttcatctatgaacctttctccttaaaaacacaccgatttaatcctttcgcttatgtggattttggtaatgatgtggttttgactgaagacatactctctcaaattgacacacgcctaaaagggcatggcatggtggctagtggaggggatttttccactcaaatctttggattggctaagttggtgttccctgaaagacctaatgaaaaagatcctttttttagcaatcaggcgcgaaacctttttgtcatcaattgcaatatttatagggatctcatgtggactaaaaaggggcttgagtttgtcaaaagaaaaaaaatcatcatgcctgaaacccccacgatgtttttcataggttctatggcaagcggtatcaacttgattgatgaagacacaaacatggaaaaagtcgtgtctttaatggaattttttggaggtgaagaagataagagtggcgacaatctaagagcgcttagtcctgccactagaaacatgtggaataacttcaagacaatgggtggcgctaaagaaacttacagctcggttcaaggggtctatacatcagcgtttgcgccttacaataacgccatgatcaggaatttcacgagcgctaatgattttgatttcaggcgtttaaggatcgatgcagtgagtattggtgtgatcgctaatcctaaagaaagcactattgttggaccgatattagagctgtttttcaacgtgatgatttatagcaatttgattctgccaatccatgatccacaatgcaaaagaagctgcttgatgctcatggatgaatttacgctctgtggctatttagagacctttgttaaagcggtagggatcatggcagaatacaacatgcgccccgcttttgtgtttcaaagtaaggcgcaattagaaaacgaccccccacttggttatggtaggaatggcgctaagactattttagacaacctttctttgaatatgtattatgggatcaacaacgataactactatgaacattttgaaaagctttctaaagtgttagggaaatacacaaggcaagatgtgagccggagcattgatgataatacgggtaagaccaacacttctatcagcaacaaggagcggtttttgatgacccctgatgaattgatgactatgggcgatgagcttatcattttagaaaacacgctcaaacccatcaagtgccacaaggcgctttactatgatgatcccttcttcaccgatgagctcattaaggtgagtccaagcttgagcaagaaatacaaattggggaaagtgcctaatcaagcaacattttatgatgacttgcaagccgctaaaaccagaggcgaattgagctatgataaatctttagtgcctgtgggttcaagcgaactgtga

SEQ ID NO: 1094 - DNA (genomic), 1014 bp, Helicobacter pylori; double-stranded, circular
  misc_feature (B) LOCATION 1...1014
  hypothetical: NO
  anti-sense: NO
aatgagttttataagcttgcaatcgcctcttggcaagaacccttaagagtgagtatagaatttgtggatttgcctaaaaaaatcatccgttttccggcccatgatttgaaagtgggggagtttggttttgtggttactcaactttcagattatgaaatcgttaattctgaagtggtcattattgctgttgaaaatggcgtcgcaacggctaaattcaaagcgtttgagtcgatgaaacaaagccatttacccactccaagaatggtcgctaaaaaaggggatttagtctatttcaggcaatttaacaaccaagcgtttttgatcgctcctaatgatgaactctatgagcaaatcagagcgactaacaccgatattaatttcattagctctgatttgttggttacttttttgaatgggtttgacccaaaaatcgctaatttaaggaaagcgtgcaatgtttatagcgtgggggtgatttatattgtaaccaccaacacgctcaatattttaagttgtgagagttttgaaattttagaaaaaagagagctggatacaagcggcgttactaaaacttccacgccgtttttttctagggttgagggcattgatgcaggcacgctagggaaacttttttcaggcagtcaatctaaaaattacttcgcttactatgacgctttagtgaaaaaagaaaaacgaaaagaagtaaggattgaaaagaaagaagaaaggattgatgctagagaaaataaacgagaaatcaagcaagaagccattaaagagcctaaaaaagccaatcaaggcacagaaaacgctcccactttagaagagaaaaactaccaaaaagcagagcgaaaatttgacgctaaagaagaaaggcgtcgttcaagagatgaaaggaaaaaaactaaagccaccaaaaaggctatggaatttgaacaaagagcgagagaacatcaagaaagagatgaaaaagagcttgaagaaagaagaaaagctttagaaatgaataagaag

SEQ ID NO: 1095 - DNA (genomic), 1353 bp, Helicobacter pylori; double-stranded, circular
  misc_feature (B) LOCATION 1...1353
  hypothetical: NO
  anti-sense: NO
atgttaaggcttttgataggacttcttttaatgagttttataagcttgcaatcagcctcttggcaagaacccttaagagtgagtatagaatttgtggatttgcctaaaaaaatcatccgttttccggcccatgatttgaaagtgggggagtttggttttgtggttactaaactttcagattatgaaatcgttaattctgaagtggtcattattgctgttgaaaatggcgtcgcaacggctaaattcaaagcgtttgagtcgatgaaacaaagccatttacccactccaagaatggtcgctaaaaaaggggatttagtctatttcaggcaatttaacaaccaagcgtttttgatcgctcctaatgatgaactctatgagcaaatcagagcgactaacaccgatattaatttcattagctctgatttgttggttacttttttgaatgggtttgacccaaaaatcgctaatttaaggaaagcgtgcaatgtttatagcgtgggggtgatttatattgtaaccaccaacacgctcaatattttaagttgtgagagttttgaaattttagaaaaaagagagctggatacaagcggcgttactaaaacttccacgccgtttttttctagggttgagggcattgatgcaggcacgctagggaaacttttttcaggcagtcaatctaaaaattacttcgcttactatgacgctttagtgaaaaaagaaaaacgaaaagaagtaaggattgaaaagaaagaagaaaggattgatgctagagaaaataaacgagaaatcaagcaagaagccattaaagagcctaaaaaagccaatcaaggcacagaaaacgctcccactttagaagagaaaaactaccaaaaagcagagcgaaaatttgacgctaaagaagaaaggcgtcgttcaagagatgaaaggaaaaaaactaaagccaccaaaaaggctatggaatttgaagaaagagaaaaagagcatgatgaaagagacgaaaaagagactgaagaaagaagaaaagctttagaaatggataaaggcaatgaaaaagtcaatgccaaagaaaacgagcgagaaatcaatcaagaatccgctaatgagccaagtagtgaaaacaacgccactctaaaagacacagaaaacacttctgtcttaaaagaaagtgccgctaaaaaagaagcgccaaaaccaagctctaaagaggaaaaacgccgcttgaaagaagaaaagaaaaaagccaaagccgaacaaagagcgagggaatttgaacaaagagcgagagaacatcaagaaagagatgaaaaagagcttgaagaaagaagaaaagctttagaaatgaataagaagtaa

SEQ ID NO: 1096 - DNA (genomic), 1605 bp, Helicobacter pylori; double-stranded, circular
  misc_feature (B) LOCATION 1...1605
  hypothetical: NO
  anti-sense: NO
atgtttaatattaaaaggacttttttaataacgatcataagtttttttctcattgttcctaattggttgaaagctattgatttgcccattgtttcaaatctcaaaatttaccaaacagtttattgcatgctgataccgagttatgttttaaccaacaaaagttttgcagatattttgacaggctatacatctattggtgcatcagggagtggaaagagttcagggcagggtgtgatcgaagcgcttagcacaccattagccacaagtttagccgctagcaatctggtgaaatatttgaatactttaggtcctttatggggatcggcgtgggcaagtgttgctacagctatacaaggttttgctctaacgccatcaagtggctgtaattttggttggaacgcattgataaataaaaacatagatgtatccatggatagcgtactagacaatttgagcaacaagattcagaattttaccaaaggcggtgttgaggacaatgtgaaaggcaatattcttttacaaataattggctcaataaccgctcaagcttctacgaatattacagctgatggtttaatttggctgattggtaaagaattcactgcaaataaactgcaaaacaacactatagccatgcttgcttttgccgcattagaatctgttgtcaaaggagcggacgctgctgttcttcctgcatatggtgtagtcaatctgcctgatattatcatagggcaagggtcatatcttgattttgtttcttacctaatttatattgtttttgggatttttgtttttatttcttttatgaaattgagagatatttcaaacggcattcagattaacataggttttgaatacatgcgatttgttggggggacattattcaaaatggcgatggtctcttttatcgcctatgcaggttttggttatctttataaaatctcttattctatttattttggtttagcaggtgcttttgggctgaatcaagttcttttttgggctttagatttagtgctgaattacactgttaattcaattttacctgcggtaagagctgttttttctaatgttggcaacaacgctcctagtttgttacaaggcttgcaagtggcaggtatttctttattcgctatttttatgcaagtaactatcattatgagaataagcactgttgttgtgaaacctttgatagcgggggcttttagcggtattgttttccctattgcagtatgtttgatcgtgctagattggttcaaagattctatgaaaaacatattgatatggtttattaataatctgtttatcttggttctagctattcctattttgctctttggtgttttggcattattggcattcaatttgaccataacgccctctgttgctatacaaaacatcaatcaagggggattgggtatcgattcaactattgcgagtttgatcactctatttattttaaaaggtttcatagagacgattattgagagcgtcaatgcgatcgttaacaccattttcagctctgtctctatggatggtagcagaatggatagagaaagagatgccttaatggtgggaagagttggtggatctatgtttaaagga

SEQ ID NO: 1097 - DNA (genomic), 1608 bp, Helicobacter pylori; double-stranded, circular
  misc_feature (B) LOCATION 1...1608
  hypothetical: NO
  anti-sense: NO
atgtttaatattaaaaggacttttttaataacgatcataagtttttttctcattgttcctaattggttgaaagctattgatttgcccattgtttcaaatctcaaaatttaccaaacagtttattgcatgctgataccgagttatgttttaaccaacaaaagttttgcagatattttgacaggctatacatctattggtgcatcagggagtggaaagagttcagggcagggtgtgatcgaagcgcttagcacaccattagccacaagtttagccgctagcaatctggtgaaatatttgaatactttaggtcctttatggggatcggcgtgggcaagtgttgctacagctatacaaggttttgctctaacgccatcaagtggctgtaattttggttggaacgcattgataaataaaaacatagatgtatccatggatagcgtactagacaatttgagcaacaagattcagaattttaccaaaggcggtgttgaggacaatgtgaaaggcaatattcttttacaaataattggctcaataaccgctcaagcttctacgaatattacagctgatggtttaatttggctgattggtaaagaattcactgcaaataaactgcaaaacaacactatagccatgcttgcttttgccgcattagaatctgttgtcaaaggagcggacgctgctgttcttcctgcatatggtgtagtcaatctgcctgatattatcatagggcaagggtcatatcttgattttgtttcttacctaatttatattgtttttgggatttttgtttttatttcttttatgaaattgagagatatttcaaacggcattcagattaacataggttttgaatacatgcgatttgttggggggacattattcaaaatggcgatggtctcttttatcgcctatgcaggttttggttatctttataaaatctcttattctatttattttggtttagcaggtgcttttgggctgaatcaagttcttttttgggctttagatttagtgctgaattacactgttaattcaattttacctgcggtaagagctgttttttctaatgttggcaacaacgctcctagtttgttacaaggcttgcaagtggcaggtatttctttattcgctatttttatgcaagtaactatcattatgagaataagcactgttgttgtgaaacctttgatagcgggggcttttagcggtattgttttccctattgcagtatgtttgatcgtgctagattggttcaaagattctatgaaaaacatattgatatggtttattaataatctgtttatcttggttctagctattcctattttgctctttggtgttttggcattattggcattcaatttgaccataacgccctctgttgctatacaaaacatcaatcaagggggattgggtatcgattcaactattgcgagtttgatcactctatttattttaaaaggtttcatagagacgattattgagagcgtcaatgcgatcgttaacaccattttcagctctgtctctatggatggtagcagaatggatagagaaagagatgccttaatggtgggaagagttggtggatctatgtttaaaggataa

SEQ ID NO: 1098 - DNA (genomic), 1617 bp, Helicobacter pylori; double-stranded, circular
  misc_feature (B) LOCATION 1...1617
  hypothetical: NO
  anti-sense: NO
ataaataagaacatgtttaatattaaaaggacttttttaataacgatcataagtttttttctcattgttcctaattggttgaaagctattgatttgcccattgtttcaaatctcaaaatttaccaaacagtttattgcatgctgataccgagttatgttttaaccaacaaaagttttgcagatattttgacaggctatacatctattggtgcatcagggagtggaaagagttcagggcagggtgtgatcgaagcgcttagcacaccattagccacaagtttagccgctagcaatctggtgaaatatttgaatactttaggtcctttatggggatcggcgtgggcaagtgttgctacagctatacaaggttttgctctaacgccatcaagtggctgtaattttggttggaacgcattgataaataaaaacatagatgtatccatggatagcgtactagacaatttgagcaacaagattcagaattttaccaaaggcggtgttgaggacaatgtgaaaggcaatattcttttacaaataattggctcaataaccgctcaagcttctacgaatattacagctgatggtttaatttggctgattggtaaagaattcactgcaaataaactgcaaaacaacactatagccatgcttgcttttgccgcattagaatctgttgtcaaaggagcggacgctgctgttcttcctgcatatggtgtagtcaatctgcctgatattatcatagggcaagggtcatatcttgattttgtttcttacctaatttatattgtttttgggatttttgtttttatttcttttatgaaattgagagatatttcaaacggcattcagattaacataggttttgaatacatgcgatttgttggggggacattattcaaaatggcgatggtctcttttatcgcctatgcaggttttggttatctttataaaatctcttattctatttattttggtttagcaggtgcttttgggctgaatcaagttcttttttgggctttagatttagtgctgaattacactgttaattcaattttacctgcggtaagagctgttttttctaatgttggcaacaacgctcctagtttgttacaaggcttgcaagtggcaggtatttctttattcgctatttttatgcaagtaactatcattatgagaataagcactgttgttgtgaaacctttgatagcgggggcttttagcggtattgttttccctattgcagtatgtttgatcgtgctagattggttcaaagattctatgaaaaacatattgatatggtttattaataatctgtttatcttggttctagctattcctattttgctctttggtgttttggcattattggcattcaatttgaccataacgccctctgttgctatacaaaacatcaatcaagggggattgggtatcgattcaactattgcgagtttgatcactctatttattttaaaaggtttcatagagacgattattgagagcgtcaatgcgatcgttaacaccattttcagctctgtctctatggatggtagcagaatggatagagaaagagatgccttaatggtgggaagagttggtggatctatgtttaaagga

SEQ ID NO: 1099 - DNA (genomic), 657 bp, Helicobacter pylori; double-stranded, circular
  misc_feature (B) LOCATION 1...657
  hypothetical: NO
  anti-sense: NO
atgaacgatacaacagagcaccatggatccaatccgctaaacgccccaccacctagcaactcacagagcaacgatctcttaaatttgctagactcgttatatcctaaagggagtttaggggaacaaagatttcacgaagctttaaagaatcaagaagagttgaaaaatatcctaatagaaatagaaaagctaccgcaagaaaaaaggtatgaacttctgatgcagataggacaagccaaacagagaataatggaagcatacgctcattcattcttaggatatatagggggactagagcatctgttaggattgtgtatgggtgggatatttgttttgtttgcaatctattttgtatttttaagaactagcaaaaacacagagctagtggaaagtctaaaaacaaaattaaaacttcagtatttttactatgcctttggtgtgggtgcggttttgttttttggattagaaacaattagatcgatttatgaactatatatcttaggaattggtagcactaacgacaaggtgctctttgttttgaaaaacatttgcttcataggtatgggctatttgatttataaagttattaaagttattggtataaaaaattttatcaatggtcttttcgcttcaaagaaacaaggcggtgcagaatga

SEQ ID NO: 1100 - DNA (genomic), 654 bp, Helicobacter pylori; double-stranded, circular
  misc_feature (B) LOCATION 1...654
  hypothetical: NO
  anti-sense: NO
atgaacgatacaacagagcaccatggatccaatccgctaaacgccccaccacctagcaactcacagagcaacgatctcttaaatttgctagactcgttatatcctaaagggagtttaggggaacaaagatttcacgaagctttaaagaatcaagaagagttgaaaaatatcctaatagaaatagaaaagctaccgcaagaaaaaaggtatgaacttctgatgcagataggacaagccaaacagagaataatggaagcatacgctcattcattcttaggatatatagggggactagagcatctgttaggattgtgtatgggtgggatatttgttttgtttgcaatctattttgtatttttaagaactagcaaaaacacagagctagtggaaagtctaaaaacaaaattaaaacttcagtatttttactatgcctttggtgtgggtgcggttttgttttttggattagaaacaattagatcgatttatgaactatatatcttaggaattggtagcactaacgacaaggtgctctttgttttgaaaaacatttgcttcataggtatgggctatttgatttataaagttattaaagttattggtataaaaaattttatcaatggtcttttcgcttcaaagaaacaaggcggtgcagaa

SEQ ID NO: 1101 - DNA (genomic), 750 bp, Helicobacter pylori; double-stranded, circular
  misc_feature (B) LOCATION 1...750
  hypothetical: NO
  anti-sense: NO
aagcgcctaattcaaagagatgagacaatcgcaactcagagagagaatggtataatatcaaaacaatttctcaatttaattcttgaaaggagtttcatgaacgatacaacagagcaccatggatccaatccgctaaacgccccaccacctagcaactcacagagcaacgatctcttaaatttgctagactcgttatatcctaaagggagtttaggggaacaaagatttcacgaagctttaaagaatcaagaagagttgaaaaatatcctaatagaaatagaaaagctaccgcaagaaaaaaggtatgaacttctgatgcagataggacaagccaaacagagaataatggaagcatacgctcattcattcttaggatatatagggggactagagcatctgttaggattgtgtatgggtgggatatttgttttgtttgcaatctattttgtatttttaagaactagcaaaaacacagagctagtggaaagtctaaaaacaaaattaaaacttcagtatttttactatgcctttggtgtgggtgcggttttgttttttggattagaaacaattagatcgatttatgaactatatatcttaggaattggtagcactaacgacaaggtgctctttgttttgaaaaacatttgcttcataggtatgggctatttgatttataaagttattaaagttattggtataaaaaattttatcaatggtcttttcgcttcaaagaaacaaggcggtgcagaa

SEQ ID NO: 1102 - DNA (genomic), 354 bp, Helicobacter pylori; double-stranded, circular
  misc_feature (B) LOCATION 1...354
  hypothetical: NO
  anti-sense: NO
atggttatacatgaaaaaatcaaaagccgcttttctaggaattggtctttaaggaataggggcaggcattttgcatcttcaagcgtgtattttttctcacttcttgtcattacagcggttaatagaagtagtgcagttgcttggttattgatgcctgaacatttgattgggtggtttttgatttcttttagtggggaatttgtagcagacatggcgtttggcaaaaaaagtaagatttttaaaacccgctttggaatttctattgtgagcggcgtttcactattgcttggcgcttaccagcgcttttattttttgtatggtttggctttattaattggtgggctgtctttttta

SEQ ID NO: 1103 - DNA (genomic), 438 bp, Helicobacter pylori; double-stranded, circular
  misc_feature (B) LOCATION 1...438
  hypothetical: NO
  anti-sense: NO
atggttatacatgaaaaaatcaaaagccgcttttctaggaattggtctttaaggaataggggcaggcattttgcatcttcaagcgtgtattttttctcacttcttgtcattacagcggttaatagaagtagtgcagttgcttggttattgatgcctgaacatttgattgggtggtttttgatttcttttagtggggaatttgtagcagacatggcgtttggcaaaaaaagtaagatttttaaaacccgctttggaatttctattgtgagcggcgtttcactattgcttggcgctttaccagcgcatttattttttgtatggtttggctttattaattggtgggctgtcttttttatagaagcgggagctgatctattggtgggctgtgtgatacaaaagattttttttggtaaatattgggtggatcgctattattaa

SEQ ID NO: 1104 - DNA (genomic), 462 bp, Helicobacter pylori; double-stranded, circular
  misc_feature (B) LOCATION 1...462
  hypothetical: NO
  anti-sense: NO
tggtattttaaaaaagaaagaaatcccatggttatacatgaaaaaatcaaaagccgcttttctaggaattggtctttaaggaataggggcaggcattttgcatcttcaagcgtgtattttttctcacttcttgtcattacagcggttaatagaagtagtgcagttgcttggttattgatgcctgaacatttgattgggtggtttttgatttcttttagtggggaatttgtagcagacatggcgtttggcaaaaaaagtaagatttttaaaacccgctttggaatttctattgtgagcggcgtttcactattgcttggcgctttaccagcgcatttattttttgtatggtttggctttattaattggtgggctgtcttttttatagaagcgggagctgatctattggtgggctgtgtgatacaaaagattttttttggtaaatattgggtggatcgctattat

SEQ ID NO: 1105 - DNA (genomic), 147 bp, Helicobacter pylori; double-stranded, circular
  misc_feature (B) LOCATION 1...147
  hypothetical: NO
  anti-sense: NO
gttaaaataatgaatatttatcaaaaaaacttgcaagctcttttcaaaaaagaccctcttttgttcgcaaagctcaaagccattaaagaaaacaaaaaatacgaagtgtttttagggaatgatagcgctgaatttcaacctcttaga

SEQ ID NO: 1106 - DNA (genomic), 525 bp, Helicobacter pylori; double-stranded, circular
  misc_feature (B) LOCATION 1...525
  hypothetical: NO
  anti-sense: NO
gtggaaacttttcttagaatttttgaaaaagatatttttaacacgccctataaattagaagtcattaacgctactgaggggggggctaggattaaagggactaaagaaatgccctttaaagaagtgtgcgaaaaawtagacaaatccaagccaaagcctcctatcaatcttatttatcccacccaatcagaacaggctaaaaatttaaagatcgccaagaaaaaatgcgaagagatcatcaaatacgccaatgagaaaaaaacgcaagttgaagaagcgtttttaaaggtggcagagtttttagaaaaagtggaaaagcttcatgaaaaaaacaaattagaagagttggattttgaagaattagaaaatttgagcgctgaaattgataacgttaaagagctttttgatgacaaacgattcaattcgtattttatggatgcgatacaatcttacattttccaccaggaattgcatatcgctgaaatcgtgtgtaaaaaaacgagtaatgaagacgggattaagggc

SEQ ID NO: 1107 - DNA (genomic), 1776 bp, Helicobacter pylori; double-stranded, circular
  misc_feature (B) LOCATION 1...1776
  hypothetical: NO
  anti-sense: NO
ggaatgatagcgctgaatttcaacctcttagataaagaaacaaacacgcccttatttgaaaaaagcccgctagattcaagcttagagctatataaaaatagcgaaattcacatgctctatccttatttgtattattttggcttgggtaatggggtgttttatcgcttgcttttaggcaatgaaaatttaaaacgcttggtggtcattgagcctgaaatagaggtgattttcattgtgctgaatcttttggatttttccactgagattttagaaaatcgtttgattttattgcatgcaagtttttgcaattacaacatgattgcttcattatttgatatggataaaaagtctcgtttatacgcaagaatgtatgatttaaaactttttaacgcttattatgaacgatactctcatcaaatgatagaaatcaaccagcatttcacgcgcgctttagagcatggcgctattagcgtaggcaatgacgctaaagacgcactcataggcatcaaacagcatgtcgctaatttgcctgaagtcatcaaaagccctagtttagtggattttgtgaacgctttaaaaaacagagacaccgctattatcgtttcaaccgggcctagtttaaataagcaactcccccttttaaaagaaatcgctccttacgcaacgcttttttgcatagacgcttctttccctattctagccagagccggtatcaagcctgatattgtgctgtctttagaaagggtggatttaacggcgaaattctatgaagaaacccccttagattttcaagaaggcgttatttttgctctgacttccattgtgcataaacgattgattcaagcgattcaaaaaggggttaagcaattcagtttccgcccctttggctataccaacctttttgatttgcaccagtatggttatgtgggcataggcatgagcgcagcgaacatggcgtatgaattagtggtgcattctcgtttcaaaaggtgcgtgtttatcgggcaagatttgagcttttcacaaagcggtaacagccacgctagtggggcgatttatggcgatagagagatcaagcctaaaaaggataaagacaagatttttatagaaaaatacgggggtaatgggaaagtagaaaccactttagtgtggaaacttttcttagaattttttgaaaaagatatttttaacacgccctataaattagaagtcattaacgctactgaggggggggctaggattaaagggactaaagaaatgccctttaaagaagtgtgcgaaaaaatagacaaatccaagccaaagcctcctatcaatcttatttatcccacccaatcagaacaggctaaaaatttaaagatcgccaagaaaaaatgcgaagagatcatcaaatacgccaatgagaaaaaaacgcaagttgaagaagcgtttttaaaggtggcagagtttttagaaaaagtggaaaagcttcatgaaaaaaacaaattagaagagttggattttgaagaattagaaaatttgagcgctgaaattgataacgttaaagagctttttgatgacaaacgattcaattcgtattttatggatgcgatacaatcttacattttccaccaggaattgcatatcgctgaaatcgtgtgtaaaaaaacgagtaatgaagacggattaagggctaagcaattagaatacatttacgcgcacaaatactggctttttagtttagcgggtgggatggattgcgtgatagaagcgatcaaaatggctttgaaagaatgg

SEQ ID NO: 1108 - DNA (genomic), 1884 bp, Helicobacter pylori; double-stranded, circular
  misc_feature (B) LOCATION 1...1884
  hypothetical: NO
  anti-sense: NO
atgaatatttatcaaaaaaacttgcaagctcttttcaaaaaagaccctcttttgttcgcaaagctcaaagccattaaagaaaacaaaaaatacgaagtgtttttagggaatgatagcgcgaatttcaacctcttagataaagaaacaaacacgcccttatttgaaaaaagcccgctagattcaagcttagagctatataaaaatagcgaaattcacatgctctatccttatttgtattattttggcttgggtaatggggtgttttatcgcttgcttttaggcaatgaaaatttaaaacgcttggtggtcattgagcctgaaatagaggtgattttcattgtgctgaatcttttggatttttccactgagattttagaaaatcgtttgattttattgcatgcaagtttttgcaattacaacatgattgcttcattatttgatatggataaaaagtctcgtttatacgcaagaatgtatgatttaaaactttttaacgcttattatgaacgatactctcatcaaatgatagaaatcaaccagcatttcacgcgcgctttagagcatggcgctattagcgtaggcaatgacgctaaagacgcactcataggcatcaaacagcatgtcgctaatttgcctgaagtcatcaaaagccctagtttagtggattttgtgaacgctttaaaaaacagagacaccgctattatcgtttcaaccgggcctagtttaaataagcaactcccccttttaaaagaaatcgctccttacgcaacgcttttttgcatagacgcttctttccctattctagccagagccggtatcaagcctgatattgtgctgtctttagaaagggtggatttaacggcgaaattctatgaagaaacccccttagattttcaagaaggcgttatttttgctctgacttccattgtgcataaacgattgattcaagcgattcaaaaaggggttaagcaattcagtttccgcccctttggctataccaacctttttgatttgcaccagtatggttatgtgggcataggcatgagcgcagcgaacatggcgtatgaattagtggtgcattctcgtttcaaaaggtgcgtgtttatcgggcaagatttgagcttttcacaaagcggtaacagccacgctagtggggcgatttatggcgatagagagatcaagcctaaaaaggataaagacaagatttttatagaaaaatacgggggtaatgggaaagtagaaaccactttagtgtggaaacttttcttagaattttttgaaaaagatatttttaacacgccctataaattagaagtcattaacgctactgaggggggggctaggattaaagggactaaagaaatgccctttaaagaagtgtgcgaaaaaatagacaaatccaagccaaagcctcctatcaatcttatttatcccacccaatcagaacaggctaaaaatttaaagatcgccaagaaaaaatgcgaagagatcatcaaatacgccaatgagaaaaaaacgcaagttgaagaagcgtttttaaaggtggcagagtttttagaaaaagtggaaaagcttcatgaaaaaaacaaattagaagagttggattttgaagaattagaaaatttgagcgctgaaattgataacgttaaagagctttttgatgacaaacgattcaattcgtattttatggatgcgatacaatcttacattttccaccaggaattgcatatcgctgaaatcgtgtgtaaaaaaacgagtaatgaagacggattaagggctaagcaattagaatacatttacgcgcacaaatactggctttttagtttagcgggtgggatggattgcgtgatagaagcgatcaaaatggctttgaaagaatggtaa

SEQ ID NO: 1109 - DNA (genomic), 645 bp, Helicobacter pylori; double-stranded, circular
  misc_feature (B) LOCATION 1...645
  hypothetical: NO
  anti-sense: NO
ttgctatccaataagtcaaacttggtgcgtttagaattattcgcaccgatgaaaaggtttttgaaatcgcttgacatgggttatcctttaaaatcaaccatcataaccaacgcgtctcacgccaatcacttagaagagtcttgtttgttgatagaaatatctagcttgttgaaagggatttcaatacgattagcgtccagggcgtttttgatgcgttcaatgagttcgctcctcacattaaagatcccgtcttcaatctttgcccaaaccctaatggtgaagttcagcgaactttgtccaaaatccgtgattccaatgaaagtgggcatgtttttatcaattttttccatcccgtcaataacatcttttatagtcttatgcaccagttcaatatcgctcccataccctaccccacagacccattcaatgcgccgacacgcagtgttattgctattgataatattagaattagcgacacttctattaggcaaaaccgccaagcgcccgtcatgcaagcgtaaagaagtattaaaaaaattaagcgcttctactttgccctctaggccagagatttcaatgatgtctccttttttgaaagggtgtaaaataataaggattatccctccagcaatgcttgaaagataa

SEQ ID NO: 1110 - DNA (genomic), 651 bp, Helicobacter pylori; double-stranded, circular
  misc_feature (B) LOCATION 1...651
  hypothetical: NO
  anti-sense: NO
gggctttttttgctatccaataagtcaaacttggtgcgtttagaattattcgcaccgatgaaaaggtttttgaaatcgcttgacatgggttatcctttaaaatcaaccatcataaccaacgcgtctcacgccaatcacttagaagagtcttgtttgttgatagaaatatctagcttgttgaaagggatttcaatacgattagcgtccagggcgtttttgatgcgttcaatgagttcgctcctcacattaaagatcccgtcttcaatctttgcccaaaccctaatggtgaagttcagcgaactttgtccaaaatccgtgattccaatgaaagtgggcatgtttttatcaattttttccatcccgtcaataacatcttttatagtcttatgcaccagttcaatatcgctcccataccctaccccacagacccattcaatgcgccgacacgcagtgttattgctattgataatattagaattagcgacacttctattaggcaaaaccgccaagcgcccgtcatgcaagcgtaaagaagtattaaaaaaattaagcgcttctactttgccctctaggccagagatttcaatgatgtctccttttttgaaagggtgtaaaataataaggattatccctccagcaatgcttgaaaga

SEQ ID NO: 1111 - DNA (genomic), 807 bp, Helicobacter pylori; double-stranded, circular
  misc_feature (B) LOCATION 1...807
  hypothetical: NO
  anti-sense: NO
atgaaaaaacttcttttactcttagagcataagatcgtaaaaattggcttaattattgtgattgtgttagtgggtttttttcttttttatgaacaagaaatcaaagaaaaagctgttaatgtttctcaaggtaaattccccacttcatcttatttgtttcaagcttacgaaggcattaagaataaaatagatactatcaatcaagtgaagccaaacgatgaaactaaaagcgttaatgagaatatagaaaaaacacaaaaagatttagatgattttaatgcgctagtgcaaaagttaccaaatttgcctaaggactttaataaaacacttattaaaccacaaagtccatttttcaactacaataccgctaacgaagatgaaaaaaaccgcctggtgattttagcgtctcgtattagcagccaaaaagaaacgcaacctcccatttctataaaaaatagcgtttctcacataaaatccaaagaaaaacgagaacttgaaaaagaatgggcaaaacctagtgtttcttttggttctttttccttgctttccagttcttcttctttttcttcttttgaagtttcttttttatcaaggggaataggattggattgtgagaagctcaaatcctttttaaaagctttttcaagttcgctattttccttattatcttcattgttttgccatccactttctcttttttgctctctaataggattaatcttttgtttttctaagttttctagagagctagtgaatgcgtctaacaattcgcttgagttttcatcattgtcaaggctaggatcataa

SEQ ID NO: 1112 - DNA (genomic), 804 bp, Helicobacter pylori; double-stranded, circular
  misc_feature (B) LOCATION 1...804
  hypothetical: NO
  anti-sense: NO
atgaaaaaacttcttttactcttagagcataagatcgtaaaaattggcttaattattgtgattgtgttagtgggtttttttcttttttatgaacaagaaatcaaagaaaaagctgttaatgtttctcaaggtaaattccccacttcatcttatttgtttcaagcttacgaaggcattaagaataaaatagatactatcaatcaagtgaagccaaacgatgaaactaaaagcgttaatgagaatatagaaaaaacacaaaaagatttagatgattttaatgcgctagtgcaaaagttaccaaatttgcctaaggactttaataaaacacttattaaaccacaaagtccatttttcaactacaataccgctaacgaagatgaaaaaaaccgcctggtgattttagcgtctcgtattagcagccaaaaagaaacgcaacctcccatttctataaaaaatagcgtttctcacataaaatccaaagaaaaacgagaacttgaaaaagaatgggcaaaacctagtgtttcttttggttctttttccttgctttccagttcttcttctttttcttcttttgaagtttcttttttatcaaggggaataggattggattgtgagaagctcaaatcctttttaaaagctttttcaagttcgctattttccttattatcttcattgttttgccatccactttctcttttttgctctctaataggattaatcttttgtttttctaagttttctagagagctagtgaatgcgtctaacaattcgcttgagttttcatcattgtcaaggctaggatca

SEQ ID NO: 1113 - DNA (genomic), 816 bp, Helicobacter pylori; double-stranded, circular
  misc_feature (B) LOCATION 1...816
  hypothetical: NO
  anti-sense: NO
agaaaacaagaaatgaaaaaacttcttttactcttagagcataagatcgtaaaaattggcttaattattgtgattgtgttagtgggtttttttcttttttatgaacaagaaatcaaagaaaaagctgttaatgtttctcaaggtaaattccccacttcatcttatttgtttcaagcttacgaaggcattaagaataaaatagatactatcaatcaagtgaagccaaacgatgaaactaaaagcgttaatgagaatatagaaaaaacacaaaaagatttagatgattttaatgcgctagtgcaaaagttaccaaatttgcctaaggactttaataaaacacttattaaaccacaaagtccatttttcaactacaataccgctaacgaagatgaaaaaaaccgcctggtgattttagcgtctcgtattagcagccaaaaagaaacgcaacctcccatttctataaaaaatagcgtttctcacataaaatccaaagaaaaacgagaacttgaaaaagaatgggcaaaacctagtgtttcttttggttctttttccttgctttccagttcttcttctttttcttcttttgaagtttcttttttatcaaggggaataggattggattgtgagaagctcaaatcctttttaaaagctttttcaagttcgctattttccttattatcttcattgttttgccatccactttctcttttttgctctctaataggattaatcttttgtttttctaagttttctagagagctagtgaatgcgtctaacaattcgcttgagttttcatcattgtcaaggctaggatca

SEQ ID NO: 1114 - DNA (genomic), 522 bp, Helicobacter pylori; double-stranded, circular
  misc_feature (B) LOCATION 1...522
  hypothetical: NO
  anti-sense: NO
atgaaaaaatttaccctatcgctatttttgtgttgcaccttacttaacgctgaagaggatatttttaggaacaacacaaatgaaactgatcttacaaattcttttgaacatggcaaagaaaacaacaatcttatcccagcaaaatccgatagtttagaaagtttcaaagaacaagaaaacaaagaaaaagccaaacagcttatggatttaaaggccttacagagcgtgtatttttctaaaaatagaaaattgcaagacaataatttcaatgtcttgtatgtggcaggcaacaccaacaaaatccgcttacgctatgcgatgactaccacctttatttttgataatgatcctattatctatgtgagtttaggagatcctagcgattttgaactcacttaccccactaatgatcattacgatttgtctaacatgctagtgattaagccgttacttataggggtggatacgaacctaaccgtagtcggagcgagcggcacaatttataccttattatttgtttag

SEQ ID NO: 1115 - DNA (genomic), 528 bp, Helicobacter pylori; double-stranded, circular
  misc_feature (B) LOCATION 1...528
  hypothetical: NO
  anti-sense: NO
ggagcaataatgaaaaaatttaccctatcgctatttttgtgttgcaccttacttaacgctgaagaggatatttttaggaacaacacaaatgaaactgatcttacaaattcttttgaacatggcaaagaaaacaacaatcttatcccagcaaaatccgatagtttagaaagtttcaaagaacaagaaaacaaagaaaaagccaaacagcttatggatttaaaggccttacagagcgtgtatttttctaaaaatagaaaattgcaagacaataatttcaatgtcttgtatgtggcaggcaacaccaacaaaatccgcttacgctatgcgatgactaccacctttatttttgataatgatcctattatctatgtgagtttaggagatcctagcgattttgaactcacttaccccactaatgatcattacgatttgtctaacatgctagtgattaagccgttacttataggggtggatacgaacctaaccgtagtcggagcgagcggcacaatttataccttattatttgtt

SEQ ID NO: 1116 - DNA (genomic), 825 bp, Helicobacter pylori; double-stranded, circular
  misc_feature (B) LOCATION 1...825
  hypothetical: NO
  anti-sense: NO
atggatgaaattaaaacgctgttagtggattttttcccgcaggcaaagcattttgggataatcttaatcaaggctattgttgtcttttgtataggtttttatttttcgtttttcttacggaacaaaaccatgaaactcttatccaaaaaggatgagattttggcgaattttgtcgcgcaggttacttttatcttaatccttatcattactacaatcatcgcgctcagcacgctaggcgtccaaaccacctctattatcactgttttaggaacggtggggattgcggtggcgttggctttaaaagattatctttcaagcattgctggagggataatccttattattttacaccctttcaaaaaaggagacatcattgaaatctctggcctagagggcaaagtagaagcgcttaatttttttaatacttctttacgcttgcatgacgggcgcttggcggttttgcctaatagaagtgtcgctaattctaatattatcaatagcaataacactgcgtgtcggcgcattgaatgggtctgtggggtagggtatgggagcgatattgaactggtgcataagactataaaagatgttattgacgggatggaaaaaattgataaaaacatgcccactttcattggaatcacggattttggacaaagttcgctgaacttcaccattagggtttgggcaaagattgaagacgggatctttaatgtgaggagcgaactcattgaacgcatcaaaaacgccctggacgctaatcgtattgaaatccctttcaacaagctagatatttctatcaacaaacaagactcttctaagtga

SEQ ID NO: 1117 - DNA (genomic), 927 bp, Helicobacter pylori; double-stranded, circular
  misc_feature (B) LOCATION 1...927
  hypothetical: NO
  anti-sense: NO
gtggtaataaggttagtcctaaacatgctaacatgtcaaattagctatataaggataagttatcttgtctctgttagcgattttgtgatttgcaaggaaagatttatggatgaaattaaaacgctgttagtggattttttcccgcaggcaaagcattttgggataatcttaatcaaggctattgttgtcttttgtataggtttttatttttcgtttttcttacggaacaaaaccatgaaactcttatccaaaaaggatgagattttggcgaattttgtcgcgcaggttacttttatcttaatccttatcattactacaatcatcgcgctcagcacgctaggcgtccaaaccacctctattatcactgttttaggaacggtggggattgcggtggcgttggctttaaaagattatctttcaagcattgctggagggataatccttattattttacaccctttcaaaaaaggagacatcattgaaatctctggcctagagggcaaagtagaagcgcttaatttttttaatacttctttacgcttgcatgacgggcgcttggcggttttgcctaatagaagtgtcgctaattctaatattatcaatagcaataacactgcgtgtcggcgcattgaatgggtctgtggggtagggtatgggagcgatattgaactggtgcataagactataaaagatgttattgacgggatggaaaaaattgataaaaacatgcccactttcattggaatcacggattttggacaaagttcgctgaacttcaccattagggtttgggcaaagattgaagacgggatctttaatgtgaggagcgaactcattgaacgcatcaaaaacgccctggacgctaatcgtattgaaatccctttcaacaagctagatatttctatcaacaaacaagactcttctaag

SEQ ID NO: 1118 - DNA (genomic), 930 bp, Helicobacter pylori; double-stranded, circular
  misc_feature (B) LOCATION 1...930
  hypothetical: NO
  anti-sense: NO
gttgtggtaataaggttagtcctaaacatgctaacatgtcaaattagctatataaggataagttatcttgtctctgttagcgattttgtgatttgcaaggaaagatttatggatgaaattaaaacgctgttagtggattttttcccgcaggcaaagcattttgggataatcttaatcaaggctattgttgtcttttgtataggtttttatttttcgtttttcttacggaacaaaaccatgaaactcttatccaaaaaggatgagattttggcgaattttgtcgcgcaggttacttttatcttaatccttatcattactacaatcatcgcgctcagcacgctaggcgtccaaaccacctctattatcactgttttaggaacggtggggattgcggtggcgttggctttaaaagattatctttcaagcattgctggagggataatccttattattttacaccctttcaaaaaaggagacatcattgaaatctctggcctagagggcaaagtagaagcgcttaatttttttaatacttctttacgcttgcatgacgggcgcttggcggttttgcctaatagaagtgtcgctaattctaatattatcaatagcaataacactgcgtgtcggcgcattgaatgggtctgtggggtagggtatgggagcgatattgaactggtgcataagactataaaagatgttattgacgggatggaaaaaattgataaaaacatgcccactttcattggaatcacggattttggacaaagttcgctgaacttcaccattagggtttgggcaaagattgaagacgggatctttaatgtgaggagcgaactcattgaacgcatcaaaaacgccctggacgctaatcgtattgaaatccctttcaacaagctagatatttctatcaacaaacaagactcttctaag

SEQ ID NO: 1119 - DNA (genomic), 1449 bp, Helicobacter pylori; double-stranded, circular
  misc_feature (B) LOCATION 1...1449
  hypothetical: NO
  anti-sense: NO
atgattaaacaaatcctcaccattcttacccctttttttgtcgcaacgctattgtattttttaggtgcaccggatgggctaaaccctaacgcatggctttatttttgtattttcatgggcatgattatagggttaattttagagccggtgccatcaggtttgatagcgttgagcgcgttagtgccgtgtatagcgttaaaaattggagcgagcagtgaggtagcgagcgctaataaggccatttcgtggggtttgagcgggtatgcgaataaaacggtgtggcttgtgtttgtcgcttttattttgggtttagggtatgaaaaaagcttgttagggaaacggatcgctcttttactcattagatttttagggcaaacccctttaggtttaggctatgcgatcggtttgagcgaattgtgtctagccccctttatccctagcaattccgctagaagtgggggcatactttatccgatcgtttcttctatcccacctttaatgggttctacccccagcaataaccctgacaaaatcggcgcgtatttgatgtgggtcgctttggcttcaacttgcatcacttcgtccatgtttttaaccgcgctcgcccctaaccccctagcaatggaaatcgctaccaaaatgggggtgaatgaaatctcatggttttcgtggtttttggcgttcttgccttgtggggtggttttgatcttgcttgtgcctttattggcgtataaaacctgcaaacccaccttaaaaggctcaaaagaagtgagtttgtgggctaaaaaagaattagaaagcatggggaggttttctttaaaagaaattttaatgctcagcctcactttattggctttactaggttggatttttggcaaatctttaggcttgcatgcgagcgcgacggctttgattgtcatggtgttaatggcgttttgtaagattgtaagctatgaagacatcattaaaaacaagagcgcgtttaatatttttttattgctgggatcgttactcacgatggctggcgggcttaaaaatgtgggttttttaaattttatcggcaatgcggctcaaaattttttagagcatgctcacttggatccgttaatagcggtattgtttattgtagccttattctatctgtcgcactattttttcgctagcatcaccgctcatgtgagcgcattattcgcgctttttgtggggattggttcgcacattcaaggggtcaatttgcaagaattgagcttgtttttaatgctttctttagggattatggggattttaacgccctatggcacaggcccatccaccatttattacgggagcgggtatattcaaagcaaggatttttggaaatgggggtttatttttggctttttgtatttaatcgtgtttttaagcgtgtgtgcaccttgggtcaaattcatcgcttacaggtggttgtag

SEQ ID NO: 1120 - DNA (genomic), 1482 bp, Helicobacter pylori; double-stranded, circular
  misc_feature (B) LOCATION 1...1482
  hypothetical: NO
  anti-sense: NO
gccaaattattactatctttggctaaaggctacattatgattaaacaaatcctcaccattcttacccctttttttgtcgcaacgctattgtattttttaggtgcaccggatgggctaaaccctaacgcatggctttatttttgtattttcatgggcatgattatagggttaattttagagccggtgccatcaggtttgatagcgttgagcgcgttagtgctgtgtatagcgttaaaaattggagcgagcagtgaggtagcgagcgctaataaggccatttcgtggggtttgagcgggtatgcgaataaaacggtgtggcttgtgtttgtcgcttttattttgggtttagggtatgaaaaaagcttgttagggaaacggatcgctcttttactcattagatttttagggcaaacccctttaggtttaggctatgcgatcggtttgagcgaattgtgtctagccccctttatccctagcaattccgctagaagtgggggcatactttatccgatcgtttcttctatcccacctttaatgggttctacccccagcaataaccctgacaaaatcggcgcgtatttgatgtgggtcgctttggcttcaacttgcatcacttcgtccatgtttttaaccgcgctcgcccctaaccccctagcaatggaaatcgctaccaaaatgggggtgaatgaaatctcatggttttcgtggtttttggcgttcttgccttgtggggtggttttgatcttgcttgtgcctttattggcgtataaaacctgcaaacccaccttaaaaggctcaaaagaagtgagtttgtgggctaaaaaagaattagaaagcatggggaggttttctttaaaagaaattttaatgctcagcctcactttattggctttactaggttggatttttggcaaatctttaggcttgcatgcgagcgcgacggctttgattgtcatggtgttaatggcgttttgtaagattgtaagctatgaagacatcattaaaaacaagagcgcgtttaatatttttttattgctgggatcgttactcacgatggctggcgggcttaaaaatgtgggttttttaaattttatcggcaatgcggctcaaaattttttagagcatgctcacttggatccgttaatagcggtattgtttattgtagccttattctatctgtcgcactattttttcgctagcatcaccgctcatgtgagcgcattattcgcgctttttgtggggattggttcgcacattcaaggggtcaatttgcaagaattgagcttgtttttaatgctttctttagggattatggggattttaacgccctatggcacaggcccatccaccatttattacgggagcgggtatattcaaagcaaggatttttggaaatgggggtttatttttggctttttgtatttaatcgtgtttttaagcgtgtgtgcaccttgggtcaaattcatcgcttacaggtggttg

SEQ ID NO: 1121 - DNA (genomic), 633 bp, Helicobacter pylori; double-stranded, circular
  misc_feature (B) LOCATION 1...633
  hypothetical: NO
  anti-sense: NO
atgtttgtggtttttatagaaggttttggtttagcgatttctttgtgcgcggcggtgggggcgcaatccttgtttattgtggaaagggggatggctaggaattatgtgtttttgatttgcgccttgtgttttatgtgcgatattgtcttaatgagcatgggcgtgtttggcgtgggggcttatttcgctaaaaacctttatttgagcttgtttttgaatttatttggggcagtttttaccggattttacgcttttttggctttaaaaaccctttttcaaacctttaaaaaaaagcaagtccaaacccctaaaaaattatccttaaaaaagaccttattattcactttaggcgttaccttactcaatcctcaagtgtatttggaaatggtgtttttaattggcgcgagcgctatgtcttttaacctagtgcaaaaattcgtctttctagctggcactttatcggctgccttttcttggcttttattgttatgcaccatgtccttacgctatggctctaaacttttgaacaaccaaaaaatctttatgggcgtgaatctctttgtaaccgctatcatgggaacgctcagcgttactttattcagggattttttagcgttattgagcaaaacctaa

SEQ ID NO: 1122 - DNA (genomic), 630 bp, Helicobacter pylori; double-stranded, circular
  misc_feature (B) LOCATION 1...630
  hypothetical: NO
  anti-sense: NO
atgtttgtggtttttatagaaggttttggtttagcgatttctttgtgcgcggcggtgggggcgcaatccttgtttattgtggaaagggggatggctaggaattatgtgtttttgatttgcgccttgtgttttatgtgcgatattgtcttaatgagcatgggcgtgtttggcgtgggggcttatttcgctaaaaacctttatttgagcttgtttttgaatttatttggggcagtttttaccggattttacgcttttttggctttaaaaaccctttttcaaacctttaaaaaaaagcaagtccaaacccctaaaaaattatccttaaaaaagaccttattattcactttaggcgttaccttactcaatcctcaagtgtatttggaaatggtgtttttaattggcgcgagcgctatgtcttttaacctagtgcaaaaattcgtctttctagctggcactttatcggctgccttttcttggcttttattgttatgcaccatgtccttacgctatggctctaaacttttgaacaaccaaaaaatctttatgggcgtgaatctctttgtaaccgctatcatgggaacgctcagcgttactttattcagggattttttagcgttattgagcaaaacc

SEQ ID NO: 1123 - DNA (genomic), 645 bp, Helicobacter pylori; double-stranded, circular
  misc_feature (B) LOCATION 1...645
  hypothetical: NO
  anti-sense: NO
aaggatttaagcaagatgtttgtggtttttatagaaggttttggtttagcgatttctttgtgcgcggcggtgggggcgcaatccttgtttattgtggaaagggggatggctaggaattatgtgtttttgatttgcgccttgtgttttatgtgcgatattgtcttaatgagcatgggcgtgtttggcgtgggggcttatttcgctaaaaacctttatttgagcttgtttttgaatttatttggggcagtttttaccggattttacgcttttttggctttaaaaaccctttttcaaacctttaaaaaaaagcaagtccaaacccctaaaaaattatccttaaaaaagaccttattattcactttaggcgttaccttactcaatcctcaagtgtatttggaaatggtgtttttaattggcgcgagcgctatgtcttttaacctagtgcaaaaattcgtctttctagctggcactttatcggctgccttttcttggcttttattgttatgcaccatgtccttacgctatggctctaaacttttgaacaaccaaaaaatctttatgggcgtgaatctctttgtaaccgctatcatgggaacgctcagcgttactttattcagggattttttagcgttattgagcaaaacc

SEQ ID NO: 1124 - DNA (genomic), 315 bp, Helicobacter pylori; double-stranded, circular
  misc_feature (B) LOCATION 1...315
  hypothetical: NO
  anti-sense: NO
atgagagttcaaaattttatccatttttctgttgtggtggggtttttcttagggttagtgttttcggtgttgaaattcaatgagccagagagcattctattatggacggtgttatccacgcttggggggtatttgatcgccttattgttcgcgtctatttttatcgcttgcacggatttagatatttgtctttttgacaaaaaaggcactgaagagagtttgcttcgtttcaaccatgagtttaaaaacagagaaaaagaagtggctagtattttaaattacattagaaattatgattttgatgatggaaaatag

SEQ ID NO: 1125 - DNA (genomic), 330 bp, Helicobacter pylori; double-stranded, circular
  misc_feature (B) LOCATION 1...330
  hypothetical: NO
  anti-sense: NO
agtatttggggtaggctgatgagagttcaaaattttatccatttttctgttgtggtggggtttttcttagggttagtgttttcggtgttgaaattcaatgagccagagagcattctattatggacggtgttatccacgcttggggggtatttgatcgccttattgttcgcgtctatttttatcgcttgcacggatttagatatttgtctttttgacaaaaaaggcactgaagagagtttgcttcgtttcaaccatgagtttaaaaacagagaaaaagaagtggctagtattttaaattacattagaaattatgattttgatgatggaaaa

SEQ ID NO: 1126 - DNA (genomic), 615 bp, Helicobacter pylori; double-stranded, circular
  misc_feature (B) LOCATION 1...615
  hypothetical: NO
  anti-sense: NO
atgaaaaagaagccattgatgtggcgtatctgtgcgttaaggagacttcttctagggttcaagagagagagagagttattaagcttcgctaaacattggaatatcccaacgattgtcgttttcacacacactcaagccgaagccggcgatgcgtttgtccaagaaactaaagggatcatagacgaagaatgggggtttaaaggttttgtcagagcctatgtgagggtcaattccgttgccttttcatttagggggttgaaagtccctgttgaaggtttagaagaattggtagatgaaacgaaaaaatgcctttcagacgctgaaaaaaataagaaaaggcatttcttgagtattcaaagagttaagattcaagaaagaaaacaggctatgatagaggaatgtaaaaccattatccatgttgcatcaggcgctgcaggagttgctgggcttatccccataccttttagcgatgcgctcgctatcgcacccattcaagcagggatgatctataaaatgaatgacgcttttggaatggatttggataaatctgtgggcgcgagtttggtcgcaggattgttaggcgtaaactgtcgcgcaagtggggaggactctcgt

SEQ ID NO: 1127 - DNA (genomic), 912 bp, Helicobacter pylori; double-stranded, circular
  misc_feature (B) LOCATION 1...912
  hypothetical: NO
  anti-sense: NO
ttgaagataaagattaccacgacaccatgcaaagcattaaaaaagaaatggaagattcttttaaaacacttgatgaaaaagaagccattgatgtggcgtatctgtgcgttaaggagacttcttctagggttcaagagagagagagagttattaagcttcgctaaacattggaatatcccaacgattgtcgttttcacacacactcaagccgaagccggcgatgcgtttgtccaagaaactaaagggatcatagacgaagaatgggggtttaaaggttttgtcagagcctatgtgagggtcaattccgttgccttttcatttagggggttgaaagtccctgttgaaggtttagaagaattggtagatgaaacgaaaaaatgcctttcagacgctgaaaaaaataagaaaaggcatttcttgagtattcaaagagttaagattcaagaaagaaaacaggctatgatagaggaatgtaaaaccattatccatgttgcatcaggcgctgcaggagttgctgggcttatccccataccttttagcgatgcgctcgctatcgcacccattcaagcagggatgatctataaaatgaatgacgcttttggaatggatttggataaatctgtgggcgcgagtttggtcgcaggattgttaggcgtaaccgctgtcgcgcaagtggggaggactctcgttaatggtttccttaaattcattcctgttgtggggagtgttgcagggggcgcaaccgctgctgttatcacagaaggcattgggtttgcgtatttgaaagtgctagaaaagtgctttaatgatgagacgggtgaagtcaatttgcctggtgaagttggcatgatcacttctctctttaaggagaattatctcaacttggatacaatcaaaaaattaaaaccataa

SEQ ID NO: 1128 - DNA (genomic), 930 bp, Helicobacter pylori; double-stranded, circular
  misc_feature (B) LOCATION 1...930
  hypothetical: NO
  anti-sense: NO
ttttgtgggacactaaaggcattgaagataaagattaccacgacaccatgcaaagcattaaaaaagaaatggaagattcttttaaaacacttgatgaaaaagaagccattgatgtggcgtatctgtgcgttaaggagacttcttctagggttcaagagagagagagagttattaagcttcgctaaacattggaatatcccaacgattgtcgttttcacacacactcaagccgaagccggcgatgcgtttgtccaagaaactaaagggatcatagacgaagaatgggggtttaaaggttttgtcagagcctatgtgagggtcaattccgttgccttttcatttagggggttgaaagtccctgttgaaggtttagaagaattggtagatgaaacgaaaaaatgcctttcagacgctgaaaaaaataagaaaaggcatttcttgagtattcaaagagttaagattcaagaaagaaaacaggctatgatagaggaatgtaaaaccattatccatgttgcatcaggcgctgcaggagttgctgggcttatccccataccttttagcgatgcgctcgctatcgcacccattcaagcagggatgatctataaaatgaatgacgcttttggaatggatttggataaatctgtgggcgcgagtttggtcgcaggattgttaggcgtaaccgctgtcgcgcaagtggggaggactctcgttaatggtttccttaaattcattcctgttgtggggagtgttgcagggggcgcaaccgctgctgttatcacagaaggcattgggtttgcgtatttgaaagtgctagaaaagtgctttaatgatgagacgggtgaagtcaatttgcctggtgaagttggcatgatcacttctctctttaaggagaattatctcaacttggatacaatcaaaaaattaaaacca

SEQ ID NO: 1129 - DNA (genomic), 546 bp, Helicobacter pylori; double-stranded, circular
  misc_feature (B) LOCATION 1...546
  hypothetical: NO
  anti-sense: NO
gtggggaaaagcttgagatacagcttgaatttagatctcaatcaaaaagccgatttgtttttcaccgaattagagccaacaggtctcacgctctcccccatcatgaaacgctttactatcaaaggcgattttgattcagggctaaaatcctatgacatgagctacatgtatgcgagccttcaagctataagcgcgatcaggagattacccttagggctttatgatggggtgcatgtctattctaaaacgcccatgaaggatattgaaaaattacgcaacgctttaaaaacaatcaaccaccatggcataggcattgaagggtggtggcaacaaaacgggaattttttctcggcgatggaattggaaaaaagagcgttattcattgtgctcatgctcattattttaatggcgtctttgaatatcatcagctcgcttttaatggtggtgatgaacaggcgtaaagaaatcgccctactctttagcatggggagcagtcaaaaagaaatccaaaaaacctttttttatttgggtaatatcattagttta

SEQ ID NO: 1130 - DNA (genomic), 1095 bp, Helicobacter pylori; double-stranded, circular
  misc_feature (B) LOCATION 1...1095
  hypothetical: NO
  anti-sense: NO
aagctttttctaaaacccctaaaagaaacgagccttgcccttgtgggagtggcaaaaaatataaagattgttgcgctaaaagcgggcctaaaaagggcttatttgccaaatagatccttaatctttttccttatcaagcgttatttgcgttttgataaaagccagcctttcattagtatcactgctttgttagccttttttggcgtggcggttggcgtgatggttttaattgtggctatggcgatcatgaacggcatgagtaaggaatttgaaaaaaagctttttgtgatgaactaccccttaacgctctataccacaagcccttatgggatcagcgaagaagtggttcaagctttagaaaaaaagttccctaatttgctttttagcccctatttgcaaacccaaagtccgattaaaagcgcgcattccatgaatggcggcgtggtgtttggggttgatttttctaaagaaaggcacatcaatgaagttttaaatgacgccttaaaaaacattaatgaaaacgatctcttcaaaaacccttttaatttgatcgtggggaaaagcttgagatacagcttgaatttagatctcaatcaaaaagccgatttgtttttcaccgaattagagccaacaggtctcacgctctcccccatcatgaaacgctttactatcaaaggcgattttgattcagggctaaaatcctatgacatgagctacatgtatgcgagccttcaagctataagcgcgatcaggagattacccttagggctttatgatggggtgcatgtctattctaaaacgcccatgaaggatattgaaaaattacgcaacgctttaaaaacaatcaaccaccatggcataggcattgaagggtggtggcaacaaaacgggaattttttctcggcgatggaattggaaaaaagagcgttattcattgtgctcatgctcattattttaatggcgtctttgaatatcatcagctcgcttttaatggtggtgatgaacaggcgtaaagaaatcgccctactctttagcatggggagcagtcaaaaagaaatccaaaaaacctttttttatttgggtaatatcattagt

SEQ ID NO: 1131 - DNA (genomic), 1092 bp, Helicobacter pylori; double-stranded, circular
  misc_feature (B) LOCATION 1...1092
  hypothetical: NO
  anti-sense: NO
aagctttttctaaaacccctaaaagaaacgagccttgcccttgtgggagtggcaaaaaatataaagattgttgcgctaaaagcgggcctaaaaagggcttatttgccaaatagatccttaatctttttccttatcaagcgttatttgcgttttgataaaagccagcctttcattagtatcactgctttgttagccttttttggcgtggcggttggcgtgatggttttaattgtggctatggcgatcatgaacggcatgagtaaggaatttgaaaaaaagctttttgtgatgaactaccccttaacgctctataccacaagcccttatgggatcagcgaagaagtggttcaagctttagaaaaaaagttccctaatttgctttttagcccctatttgcaaacccaaagtccgattaaaagcgcgcattccatgaatggcggcgtggtgtttggggttgatttttctaaagaaaggcacatcaatgaagttttaaatgacgccttaaaaaacattaatgaaaacgatctcttcaaaaacccttttaatttgatcgtggggaaaagcttgagatacagcttgaatttagatctcaatcaaaaagccgatttgtttttcaccgaattagagccaacaggtctcacgctctcccccatcatgaaacgctttactatcaaaggcgattttgattcagggctaaaatcctatgacatgagctacatgtatgcgagccttcaagctataagcgcgatcaggagattacccttagggctttatgatggggtgcatgtctattctaaaacgcccatgaaggatattgaaaaattacgcaacgctttaaaaacaatcaaccaccatggcataggcattgaagggtggtggcaacaaaacgggaattttttctcggcgatggaattggaaaaaagagcgttattcattgtgctcatgctcattattttaatggcgtctttgaatatcatcagctcgcttttaatggtggtgatgaacaggcgtaaagaaatcgccctactctttagcatggggagcagtcaaaaagaaatccaaaaaacctttttttatttgggtaatatcatt

SEQ ID NO: 1132 - DNA (genomic), 1293 bp, Helicobacter pylori; double-stranded, circular
  misc_feature (B) LOCATION 1...1293
  hypothetical: NO
  anti-sense: NO
gtgggagtggcaaaaaatataaagattgttgcgctaaaagcgggcctaaaaagggcttatttgccaaatagatccttaatctttttccttatcaagcgttatttgcgttttgataaaagccagcctttcattagtatcactgctttgttagccttttttggcgtggcggttggcgtgatggttttaattgtggctatggcgatcatgaacggcatgagtaaggaatttgaaaaaaagctttttgtgatgaactaccccttaacgctctataccacaagcccttatgggatcagcgaagaagtggttcaagctttagaaaaaaagttccctaatttgctttttagcccctatttgcaaacccaaagtccgattaaaagcgcgcattccatgaatggcggcgtggtgtttggggttgatttttctaaagaaaggcacatcaatgaagttttaaatgacgccttaaaaaacattaatgaaaacgatctcttcaaaaacccttttaatttgatcgtggggaaaagcttgagatacagcttgaatttagatctcaatcaaaaagccgatttgtttttcaccgaattagagccaacaggtctcacgctctcccccatcatgaaacgctttactatcaaaggcgattttgattcagggctaaaatcctatgacatgagctacatgtatgcgagccttcaagctataagcgcgatcaggagattacccttagggctttatgatggggtgcatgtctattctaaaacgcccatgaaggatattgaaaaattacgcaacgctttaaaaacaatcaaccaccatggcataggcattgaagggtggtggcaacaaaacgggaattttttctcggcgatggaattggaaaaaagagcgttattcattgtgctcatgctcattattttaatggcgtctttgaatatcatcagctcgcttttaatggtggtgatgaacaggcgtaaagaaatcgccctactctttagcatggggagcagtcaaaaagaaatccaaaaaacctttttttatttgggtaatatcattggtttaggcggtgtgattcttggggtggttttagcgtttataagcatgtatcttttaagcgtgttccctatcatctcgctcccggcagatgtctatggcatcaacactttgcctttagatttgtctttaatggattttacgctcactctaataggctctgtgattatcgtagccctttcttcttattacccgtctaaaaaagcttctgctattgacgctttaagcgtgttaaggaatgaataa

SEQ ID NO: 1133 - DNA (genomic), 507 bp, Helicobacter pylori; double-stranded, circular
  misc_feature (B) LOCATION 1...507
  hypothetical: NO
  anti-sense: NO
ttggagggcttgtttgtagctcctgtactcgctattttgggggctattagcgctgatgaaatggaaaaaaagcgagacgatgctaaggcttattactctcaagttgaagtagctgtcaaaaaagcggatgtggtgattgataatctccaagccgttaagaaaatggcagatcttttcaccaggcagatcacaaagtttgatgcgctgtttttcttgctttctcaagacgccattgccacgatgaaaaagcatcactacgatacctctcgttacaatcaaaaagaaaaagatcaactctgcgttaccgtttcaacgctctttagtttgagcgcttttttgaaagcgcctatcatggacaaacaccaaaaacttaataaaaaagcgcaaaaagcccttaatctcatgcgagatcagatggatagcttagaaaatgggaattatagcttggatggtattagatttaggcaagcgcaacttaaagatctaagagacgataagacttcttaa

SEQ ID NO: 1134 - DNA (genomic), 510 bp, Helicobacter pylori; double-stranded, circular
  misc_feature (B) LOCATION 1...510
  hypothetical: NO
  anti-sense: NO
cagtgcttggagggcttgtttgtagctcctgtactcgctattctgggggctattagcgctgatgaaatggtaaaaaagcgagacgatgctgaggcttattactctcaagttgaagtagctgtcaaaaaagcggatgtggtgattgataatctccaagccgttaagaaaatggcagatcttttcaccaggcagatcacaaagtttgatgcgctgtttttcttgctttctcaagacgccattgccacgatgaaaaagcatcactacgatacctctcgttacaatcaaaaagaaaaagatcaactctgcgttaccgtttcaacgctctttagtttgagcgcttttttgaaagcgcctatcatggacaaacaccaaaaacttaataaaaaagcgcaaaaagcccttaatctcatgcgagatcagatggatagcttagaaaatgggaattatagcttggatggtattagatttaggcaagcgcaacttaaagatctaagagacgataagacttct

SEQ ID NO: 1135 - DNA (genomic), 99 bp, Helicobacter pylori; double-stranded, circular
  misc_feature (B) LOCATION 1...99
  hypothetical: NO
  anti-sense: NO
gtgcgagccgtgtttgtctttggtttgaaagcggcgttttgtatagggatttttttctatggcgcttattatttcctagatgagtttttaatcaagctc

SEQ ID NO: 1136 - DNA (genomic), 321 bp, Helicobacter pylori; double-stranded, circular
  misc_feature (B) LOCATION 1...321
  hypothetical: NO
  anti-sense: NO
atgcaagagactaaaagagcgatgaatatttattatgtgggctatgtttttttaggcatgactttgttgtgcgcggtgtttttccaatctattcaacgcactaaaagttcgtttatcatcacgatttcgcacacgctagggtttatcgttatcctattgccgattttaagtcatttttatggggttaatggcatttgggtaacttaccctattgcgcaatttttagcgtttttggtagcgttaggggtaacttattatgaaatcaaaaaaggggtttttaccacttataaagagaaaaaccctatcgctttgaaaacttaa

SEQ ID NO: 1137 - DNA (genomic), 363 bp, Helicobacter pylori; double-stranded, circular
  misc_feature (B) LOCATION 1...363
  hypothetical: NO
  anti-sense: NO
aaagcggcgttttgtatagggatttttttctatggcgcttattatttcctagatgaatttttaatcaagctttatttgcagccaagcgagcaagacgcgctctttatgcaagagactaaaagagcgatgaatatttattatgtgggctatgtttttttaggcatgactttgttgtgcgcggtgtttttccaatctattcaacgcactaaaagttcgtttatcatcacgatttcgcacacgctagggtttatcgttatcctattgccgattttaagtcatttttatggggttaatggcatttgggtaacttaccctattgcgcaatttttagccgtttttggtagcgttaggggtaacttatta

SEQ ID NO: 1138 - DNA (genomic), 180 bp, Helicobacter pylori; double-stranded, circular
  misc_feature (B) LOCATION 1...180
  hypothetical: NO
  anti-sense: NO
acggatgttgcgagcgcgatttttccggggagctataatgtggggattggatcaggagcgctgtttggcagtattgtgatccaccaattagggctagaatatattggctttgtgggtggggctttgggtttgttggcgctattttggcttagattcattacgataaaatttaaaaaaact

SEQ ID NO: 1139 - DNA (genomic), 183 bp, Helicobacter pylori; double-stranded, circular
  misc_feature (B) LOCATION 1...183
  hypothetical: NO
  anti-sense: NO
gccacggatgttgcgagcgcgatttttccggggagctataatgtggggattggatcaggagcgctgtttggcagtattgtgatccaccaattagggctagaatatattggctttgtgggtggggctttgggtttgttggcgctattttggcttagattcattacgataaaatttaaaaaaact

SEQ ID NO: 1140 - DNA (genomic), 978 bp, Helicobacter pylori; double-stranded, circular
  misc_feature (B) LOCATION 1...978
  hypothetical: NO
  anti-sense: NO
atgatgataaccaaacaatcgtatcaaagattcgctttaatgcgggtttttgtgttttcgctttcggcgtttatttttaacaccacggagtttgtccctgttgcacttctgtcagacattgcgaaaagctttgaaatggagagcgcaacagtggggcttatgatcactgcttatgcatgggtggtgtctcttggctcattgcccttgatgctgcttagcgctaaaattgaaaggaaacgcttattgctttttcttttcgctctttttattttcagccatatcctttcagcgttagcgtggaatttttgggtgcttctcctttctcgtatgggtatcgcttttgcccactctattttttggtccatcacggcttctttagtcattcgtgtcgcgccaagaaacaaaaaacaacaggccttagggctgttagcgttagggagttcgttagcgatgattttagggttgccgcttgggaggatcattgggcaaattttggattggcgatccacttttggcgtgattgggggcgttgcgactcttataatgctgcttatgtggaaattgctcccgcatctaccgagtagaaacgccggcacgctcgcaagtgtccctatattaatgaaacgcccgcttttagtggggatttatttgcttgtgatcatggttatttctgggcatttcaccacttatagctatattgagccttttatcattcaaatcagccaattttctcctgacattacaacgctaatgttgtttgtgtttgggttagcagacgtggtggggagttttttgttcggccgtttgtatgcgaaaaattcaagaaaatttatcgcttttgcaatggttttagtcatttgcccgcaactcttgctttttgtgtttaaaaacttagagtgggtgatctttttgcagattttcttgtgggggattgggattacttcactcaccattacgttacaaaatgagggtattcac

SEQ ID NO: 1141 - DNA (genomic), 981 bp, Helicobacter pylori; double-stranded, circular
  misc_feature (B) LOCATION 1...981
  hypothetical: NO
  anti-sense: NO
atgatgataaccaaacaatcgtatcaaagattcgctttaatgcgggtttttgtgttttcgctttcggcgtttatttttaacaccacggagtttgtccctgttgcacttctgtcagacattgcgaaaagctttgaaatggagagcgcaacagtggggcttatgatcactgcttatgcatgggtggtgtctcttggctcattgcccttgatgctgcttagcgctaaaattgaaaggaaacgcttattgctttttcttttcgctctttttattttcagccatatcctttcagcgttagcgtggaatttttgggtgcttctcctttctcgtatgggtatcgcttttgcccactctattttttggtccatcacggcttctttagtcattcgtgtcgcgccaagaaacaaaaaacaacaggccttagggctgttagcgttagggagttcgttagcgatgattttagggttgccgcttgggaggatcattgggcaaattttggattggcgatccacttttggcgtgattgggggcgttgcgactcttataatgctgcttatgtggaaattgctcccgcatctaccgagtagaaacgccggcacgctcgcaagtgtccctatattaatgaaacgcccgcttttagtggggatttatttgcttgtgatcatggttatttctgggcatttcaccacttatagctatattgagccttttatcattcaaatcagccaattttctcctgacattacaacgctaatgttgtttgtgtttgggttagcagacgtggtggggagttttttgttcggccgtttgtatgcgaaaaattcaagaaaatttatcgcttttgcaatggttttagtcatttgcccgcaactcttgctttttgtgtttaaaaacttagagtgggtgatctttttgcagattttcttgtgggggattgggattacttcactcaccattacgttacaaaatgagggtattcacaac

SEQ ID NO: 1142 - DNA (genomic), 1176 bp, Helicobacter pylori; double-stranded, circular
  misc_feature (B) LOCATION 1...1176
  hypothetical: NO
  anti-sense: NO
atgatgataaccaaacaatcgtatcaaagattcgctttaatgcgggtttttgtgttttcgctttcggcgtttatttttaacaccacggagtttgtccctgttgcacttctgtcagacattgcgaaaagctttgaaatggagagcgcaacagtggggcttatgatcactgcttatgcatgggtggtgtctcttggctcattgcccttgatgctgcttagcgctaaaattgaaaggaaacgcttattgctttttcttttcgctctttttattttcagccatatcctttcagcgttagcgtggaatttttgggtgcttctcctttctcgtatgggtatcgcttttgcccactctattttttggtccatcacggcttctttagtcattcgtgtcgcgccaagaaacaaaaaacaacaggccttagggctgttagcgttagggagttcgttagcgatgattttagggttgccgcttgggaggatcattgggcaaattttggattggcgatccacttttggcgtgattgggggcgttgcgactcttataatgctgcttatgtggaaattgctcccgcatctaccgagtagaaacgccggcacgctcgcaagtgtccctatattaatgaaacgcccgcttttagtggggatttatttgcttgtgatcatggttatttctgggcatttcaccacttatagctatattgagccttttatcattcaaatcagccaattttctcctgacattacaacgctaatgttgtttgtgtttgggttagcaggcgtggtggggagttttttgttcggccgtttgtatgcgaaaaattcaagaaaatttatcgcttttgcaatggttttagtcatttgcccgcaactcttgctttttgtgtttaaaaacttagagtgggtgatctttttgcagattttcttgtgggggattgggattacttcactcaccattgcgttacaaatgagggtgttgcaactcgcgcccgatgccacggatgttgcgagcgcgattttttcggggagctataatgtggggattggatcaggagcgctgtttggcagtattgtgatccaccaattagggctagaatatattggctttgtgggtggggctttgggtttgttggcgctattttggcttagattcattacgataaaatttaaaaaaacttaa

SEQ ID NO: 1143 - DNA (genomic), 1176 bp, Helicobacter pylori; double-stranded, circular
  misc_feature (B) LOCATION 1...1176
  hypothetical: NO
  anti-sense: NO
atgatgataaccaaacaatcgtatcaaagattcgctttaatgcgggtttttgtgttttcgctttcggcgtttatttttaacaccacggagtttgtccctgttgcacttctgtcagacattgcgaaaagctttgaaatggagagcgcaacagtggggcttatgatcactgcttatgcatgggtggtgtctcttggctcattgcccttgatgctgcttagcgctaaaattgaaaggaaacgcttattgctttttcttttcgctctttttattttcagccatatcctttcagcgttagcgtggaatttttgggtgcttctcctttctcgtatgggtatcgcttttgcccactctattttttggtccatcacggcttctttagtcattcgtgtcgcgccaagaaacaaaaaacaacaggccttagggctgttagcgttagggagttcgttagcgatgattttagggttgccgcttgggaggatcattgggcaaattttggattggcgatccacttttggcgtgattgggggcgttgcgactcttataatgctgcttatgtggaaattgctcccgcatctaccgagtagaaacgccggcacgctcgcaagtgtccctatattaatgaaacgcccgcttttagtggggatttatttgcttgtgatcatggttatttctgggcatttcaccacttatagctatattgagccttttatcattcaaatcagccaattttctcctgacattacaacgctaatgttgtttgtgtttgggttagcaggcgtggtggggagttttttgttcggccgtttgtatgcgaaaaattcaagaaaatttatcgcttttgcaatggttttagtcatttgcccgcaactcttgctttttgtgtttaaaaacttagagtgggtgatctttttgcagattttcttgtgggggattgggattacttcactcaccattgcgttacaaatgagggtgttgcaactcgcgcccgatgccacggatgttgcgagcgcgatttttccggggagctataatgtggggattggatcaggagcgctgtttggcagtattgtgatccaccaattagggctagaatatattggctttgtgggtggggctttgggtttgttggcgctattttggcttagattcattacgataaaatttaaaaaaacttaa

SEQ ID NO: 1144 - DNA (genomic), 267 bp, Helicobacter pylori; double-stranded, circular
  misc_feature (B) LOCATION 1...267
  hypothetical: NO
  anti-sense: NO
ttgcaccctttagcggatgtctttgtggtgaatgacaaacggyccgttttagcgatggtarcgatgttgattgrctcgttagcgaatatctttttcaattacttgtttatttttgkgttggaagtgggggttcaaggcagmgcgatagtcaccgtgatagggcatgcgatagggggtttagtcttaatgcagcatttttggcgcaaaaaaggggagttgtattttatcaaactgattttctttatcttcagtcatttcttcagctaa

SEQ ID NO: 1145 - DNA (genomic), 390 bp, Helicobacter pylori; double-stranded, circular
  misc_feature (B) LOCATION 1...390
  hypothetical: NO
  anti-sense: NO
atgctcaaaaaaaagattgatttgcataaagattctattaggaagctctttttttattacttcatccctttagttttttctatgatctcactttctacttactctatggtagatgacatgtttgtgggcaaaaaactgggtaaagaagctatcgctgcggtcaatatcgcatggcctatttttccaggactcattgcgtatgaattgctttttggttttggggcagcgagcattgtggggtattttttaggtcaaaataaaacccatagggctaggcttgtgtttagcagcgtgttttattttgtcgctctaagcgcctttattttgagcatggcgttattgccttttagcgaaaatatcgcgcgttttttgggagcaatgacgctttat

SEQ ID NO: 1146 - DNA (genomic), 423 bp, Helicobacter pylori; double-stranded, circular
  misc_feature (B) LOCATION 1...423
  hypothetical: NO
  anti-sense: NO
atgctcaaaaaaaagattgatttgcataaagattctattaggaagctctttttttattacttcatccctttagttttttctatgatctcactttctacttactctatggtagatgacatgtttgtgggcaaaaaactgggtaaagaagctatcgctgcggtcaatatcgcatggcctatttttccaggactcattgcgtatgaattgctttttggttttggggcagcgagcattgtggggtattttttaggtcaaaataaaacccatagggctaggcttgtgtttagcagcgtgttttattttgtcgctctaagcgcctttattttgagcatggcgttattgccttttagcgaaaatatcgcgcagttttttgggagcaatgacgctttattgaacatgtcaaacgctatattgaaatcattt

SEQ ID NO: 1147 - DNA (genomic), 441 bp, Helicobacter pylori; double-stranded, circular
  misc_feature (B) LOCATION 1...441
  hypothetical: NO
  anti-sense: NO
atgatctttgttgtgaatgacaaacggcccgttttagcgatggtagcgatgttgattggctcgttagcgaatatctttttcaattacttgtttatttttgtgttggaagtgggggttcaaggcagcgcgatagccaccgtgatagggcatgcgataggggttttagtcttaatgcagcatttttggcgcaaaaaagggcagttgtattttatcaaacgattttctttatcttcagtcatttcttcagctaaaagcggtgtgcctcaaagcacggcggaatttagcgcttctattatgattttattgtttaataccgctatcatgcacacggcgggggaaaggtttgtgagcatgtatgggatcgttatgtataatgcgattatcttttttacgactttgtttgcgatttctcaaggcatccaaccgattgcagagctttag

SEQ ID NO: 1148 - DNA (genomic), 483 bp, Helicobacter pylori; double-stranded, circular
  misc_feature (B) LOCATION 1...483
  hypothetical: NO
  anti-sense: NO
aatcattttaatggttgtgtttttagggttcagcaccttttagcggatgtctttgtggtgaatgacaaacggcccgttttagcgatggtagcgatgttgattggctcgttagcgaatatctttttcaattacttgtttatttttgtgttggaagtgggggttcaaggcagcgcgatagccaccgtgatagggcatgcgataggggttttagtcttaatgcagcatttttggcgcaaaaaagggcagttgtattttatcaaacgattttctttatcttcagtcatttcttcagctaaaagcggtgtgcctcaaagcacggcggaatttagcgcttctattatgattttattgtttaataccgctatcatgcacacggcgggggaaaggtttgtgagcatgtatgggatcgttatgtataatgcgattatcttttttacgactttgtttgcgatttctcaaggcatccaaccgattgcagagctt

SEQ ID NO: 1149 - DNA (genomic), 1251 bp, Helicobacter pylori; double-stranded, circular
  misc_feature (B) LOCATION 1...1251
  hypothetical: NO
  anti-sense: NO
gtgtatgcggatagtttccattcaagcagtcctttgctcgtgggtttggcggtgggtggcgcgtatctcacgcaaatcatttttcaaacccccatgggcattcttagcgataaaatcggccgtaaagtggtcgttatggtgtgcttgttattgtttttaattggctcgttagtgtgctttgtggcgaacgatattatcacgctcgttatcgggcgcttcattcaaggcatgggggctttagggggggtcgttagcgcgatggtggcggatgaggtgaaagaagaagagcgcaccaaagcgatggcgatcatgggggcgtttattttcattagctttaccataagcatggcgataggccctggggttgtggcgtttttggggggggcaaaatggctcttcttgctcacggcgatcttaaccttattgagtttattgatgcttttaaaagtcaaagacgctcccaaaatttcttaccaaatcaaaaacataaaagcttatcaacccaactctaaagccttgtatcttttgtatctaagctctttttttgaaaagatgttcatgacgcttatttttgtattaatccctttagccttagtgaatgaattccataaagatgaaagctttttgatcttagtgtatgtgcctggagccttgttaggggttttaagcatgggaatagcgagcgttatggctgaaaaatacaacaagcctaagggggtgatgctttctggcgtgctgttgtttattgtgagttatttgtgcttgtttttagcggactctagctttttgggtaaatatttatggctttttattgttggggtggcgtttttctttattggttttgccaccttagagccgatcatgcaatctttagcgtctaagttcgctaaagtgcatgaaaaaggcaaggttttagggcaattcactacttttggctatttagggagctttgttgggggcgtgagtggggggttgagttatcatcatttaggcgtttctaacacgagtctaatcattgtagctttagggcttatttggggcttatcgctctttttgctccataacccttccaagcaaaaaaatgtctatttccctttagacgcttataatgaggaacaatttgaaactttaggggacaaaatcattgaatggtatgtcaatattagcgaagaaatcatcattgtgaaatataattctgatcatatcagcgaagaaggaatcattcacttagcgcaaaactttagaaaataa

SEQ ID NO: 1150 - DNA (genomic), 1266 bp, Helicobacter pylori; double-stranded, circular
  misc_feature (B) LOCATION 1...1266
  hypothetical: NO
  anti-sense: NO
ttgcctgtcatcagttggtatgcggatagtttccattcaagcagtcctttgctcgtgggtttggcggtgggtggcgcgtatctcacgcaaatcatttttcaaacccccatgggcattcttagcgataaaatcggccgtaaagtggtcgttatggtgtgcttgttattgtttttaattggctcgttagtgtgctttgtggcgaacgatattatcacgctcgttatcgggcgcttcattcaaggcatgggggctttagggggggtcgttagcgcgatggtggcggatgaggtgaaagaagaagagcgcaccaaagcgatggcgatcatgggggcgtttattttcattagctttaccataagcatggcgataggccctggggttgtggcgtttttggggggggcaaaatggctcttcttgctcacggcgatcttaaccttattgagtttattgatgcttttaaaagtcaaagacgctcccaaaatttcttaccaaatcaaaaacataaaagcttatcaacccaactctaaagccttgtatcttttgtatctaagctctttttttgaaaagatgttcatgacgcttatttttgtattaatccctttagccttagtgaatgaattccataaagatgaaagctttttgatcttagtgtatgtgcctggagccttgttaggggttttaagcatgggaatagcgagcgttatggctgaaaaatacaacaagcctaagggggtgatgctttctggcgtgctgttgtttattgtgagttatttgtgcttgtttttagcggactctagctttttgggtaaatatttatggctttttattgttggggtggcgtttttctttattggttttgccaccttagagccgatcatgcaatctttagcgtctaagttcgctaaagtgcatgaaaaaggcaaggttttagggcaattcactacttttggctatttagggagctttgttgggggcgtgagtggggggttgagttatcatcatttaggcgtttctaacacgagtctaatcattgtagctttagggcttatttggggcttatcgctctttttgctccataacccttccaagcaaaaaaatgtctatttccctttagacgcttataatgaggaacaatttgaaactttaggggacaaaatcattgaatggtatgtcaatattagcgaagaaatcatcattgtgaaatataattctgatcatatcagcgaagaaggaatcattcacttagcgcaaaactttagaaaataa

SEQ ID NO: 1151 - DNA (genomic), 1278 bp, Helicobacter pylori; double-stranded, circular
  misc_feature (B) LOCATION 1...1278
  hypothetical: NO
  anti-sense: NO
ggctttttatcgttttgcctgtcatcagttgtgtatgcggatagtttccattcaagcagtcctttgctcgtgggtttggcggtgggtggcgcgtatctcacgcaaatcatttttcaaacccccatgggcattcttagcgataaaatcggccgtaaagtggtcgttatggtgcgcttgttattgtttttaattggctcgttagtgtgctttgtggcgaacgatattatcacgctcgttatcgggcgcttcattcaaggcatgggggctttagggggggtcgttagcgcgatggtggcggatgaggtgaaagaagaagagcgcaccaaagcgatggcgatcatgggggcgtttattttcattagctttaccataagcatggcgataggccctggggttgtggcgtttttggggggggcaaaatggctcttcttgctcacggcgatcttaaccttattgagtttattgatgcttttaaaagtcaaagacgctcccaaaatttcttaccaaatcaaaaacataaaagcttatcaacccaactctaaagccttgtatcttttgtatctaagctctttttttgaaaagatgttcatgacgcttattttggtattaatccctttagccttagtgaatgaattccataaagatgaaagctttttgatcttagtgtatgtgcctggagccttgttaggggttttaagcatgggaatagcgagcgttatggctgaaaaatacaacaagcctaagggggtgatgctttctggcgtgctgttgtttattgtgagttatttgtgcttgtttttagcggactctagctttttgggtaaatatttatggctttttattgttggggtggcgtttttctttattggttttgccaccttagagccgatcatgcaatctttagcgtctaagttcgctaaagtgcatgaaaaaggcaaggttttagggcaattcactacttttggctatttagggagctttgttgggggcgtgagtggggggttgagttatcatcatttaggcgtttctaacacgagtctaatcattgtagctttagggcttatttggggcttatcgctctttttgctccataacccttccaagcaaaaaaatgtctatttccctttagacgcttataatgaggaacaatttgaaactttaggggacaaaatcattgaatggtatgtcaatattagcgaagaaatcatcattgtgaaatataattctgatcatatcagcgaagaaggaatcattcacttagcgcaaaactttagaaaa

SEQ ID NO: 1152 - DNA (genomic), 654 bp, Helicobacter pylori; double-stranded, circular
  misc_feature (B) LOCATION 1...654
  hypothetical: NO
  anti-sense: NO
atgcctgttataagagttttagtaatgcttgcaacaatgatgatgaaattagtaaaaacggcaaaagaaaagaaagtttttaagaatgtgggaatatctataatggggattgctttttgggaagcgataaaagactcgataaaaaaacaaattaaaaaaagcgattggatatgcgggaatgttaagactgcggatgattatttaaaaacgcatcctaactcatggtttaattcagcaataggtgtaacagcgataacagccatgcttatgaatgtgtgttttgctgatgaccaatccaaaaaagaagtggctcaagctcaaaaggaagctgaaaacgctagggatagagcgaacaagagtgggatagaactggaacaagaagagcaaaagacagaacaagaaaaacaaaagacagaacaagaaaaacaaaagacagaacaagaaaaacaaaagacagaacaagaaaaacaaaagacagaacaagaaaaacaaaagacaagcaatatagagactaacaatcaaataaaagtagaacaagaacaacaaaagacagaacaggaaaaacaaaagacaaacaatacgcaaaaagatttggttaacaaagcagaacaaaattgccaagaaaatcataatcaattctttattaaaaattaa

SEQ ID NO: 1153 - DNA (genomic), 1152 bp, Helicobacter pylori; double-stranded, circular
  misc_feature (B) LOCATION 1...1152
  hypothetical: NO
  anti-sense: NO
atgcctgttataagagttttagtaatgcttgcaacaatgatgatgaaattagtaaaaacggcaaaagaaaagaaagtttttaagaatgtgggaatatctataatggggattgctttttgggaagcgataaaagactcgataaaaaaacaaattaaaaaaagcgattggatatgcgggaatgttaagactgcggatgattatttaaaaacgcatcctaactcatggtttaattcagcaataggtgtaacagcgataacagccatgcttatgaatgtgtgttttgctgatgaccaatccaaaaaagaagtggctcaagctcaaaaggaagctgaaaacgctagggatagagcgaacaagagtgggatagaactggaacaagaagagcaaaagacagaacaagaaaaacaaaagacagaacaagaaaaacaaaagacagaacaagaaaaacaaaagacagaacaagaaaaacaaaagacagaacaagaaaaacaaaagacaagcaatatagagactaacaatcaaataaaagtagaacaagaacaacaaaagacagaacaggaaaaacaaaagacaaacaatacgcaaaaagatttggttaacaaagcagaacaaaattgccaagaaaatcataatcaattctttattaaaaaattaggaattaaggctggcattgctatagaaatagaagctgaatgcaaaacccctaaacccacaaaaaccaatcaaacccctatccagccaaaacacctcccaaactccaaacaaccccattctcaaagaggatcaaaagcgcaagagcttatcgcttatttgcaaaaagagctagaatctctgccctattcacaaaaagctatcgctaaacaagtggatttttataggccaagttctatcgcttatttagaactagatcctagagattttaacgctacagaagaatggcaaaaagaaaatttaaaaatacgctctaaagctcaagctaaaatgcttgaaatgaggagtttaaaaccagacccacaagcccacctttcaacctctcaaagccttttgctcgttcaaaaaatatttgctgatgttagtaaagaaataaaagtagttgctaataccgagaaaaaagtagaaaaagcgggttatggttatagtaaaaggatgtag

SEQ ID NO: 1154 - DNA (genomic), 1149 bp, Helicobacter pylori; double-stranded, circular
  misc_feature (B) LOCATION 1...1149
  hypothetical: NO
  anti-sense: NO
atgcctgttataagagttttagtaatgcttgcaacaatgatgatgaaattagtaaaaacggcaaaagaaaagaaagtttttaagaatgtgggaatatctataatggggattgctttttgggaagcgataaaagactcgataaaaaaacaaattaaaaaaagcgattggatatgcgggaatgttaagactgcggatgattatttaaaaacgcatcctaactcatggtttaattcagcaataggtgtaacagcgataacagccatgcttatgaatgtgtgttttgctgatgaccaatccaaaaaagaagtggctcaagctcaaaaggaagctgaaaacgctagggatagagcgaacaagagtgggatagaactggaacaagaagagcaaaagacagaacaagaaaaacaaaagacagaacaagaaaaacaaaagacagaacaagaaaaacaaaagacagaacaagaaaaacaaaagacagaacaagaaaaacaaaagacaagcaatatagagactaacaatcaaataaaagtagaacaagaacaacaaaagacagaacaggaaaaacaaaagacaaacaatacgcaaaaagatttggttaacaaagcagaacaaaattgccaagaaaatcataatcaattctttattaaaaaattaggaattaaggctggcattgctatagaaatagaagctgaatgcaaaacccctaaacccacaaaaaccaatcaaacccctatccagccaaaacacctcccaaactccaaacaaccccattctcaaagaggatcaaaagcgcaagagcttatcgcttatttgcaaaaagagctagaatctctgccctattcacaaaaagctatcgctaaacaagtggatttttataggccaagttctatcgcttatttagaactagatcctagagattttaacgctacagaagaatggcaaaaagaaaatttaaaaatacgctctaaagctcaagctaaaatgcttgaaatgaggagtttaaaaccagacccacaagcccacctttcaacctctcaaagccttttgctcgttcaaaaaatatttgctgatgttagtaaagaaataaaagtagttgctaataccgagaaaaaagtagaaaaagcgggttatggttatagtaaaaggatg

SEQ ID NO: 1155 - DNA (genomic), 426 bp, Helicobacter pylori; double-stranded, circular
  misc_feature (B) LOCATION 1...426
  hypothetical: NO
  anti-sense: NO
gtgttttctggcaataaaagggctataaattatcgcacgattgtcagcgcctttgtgattcaagtggctttaggggcgttggctttatatgtgcctttgggcagagaaatactgcagggtttagctagcggcatacaaagcgtgattggttacggctatgagggggtacgctttttatttggcaatctcgctccaaacgctaagggcgatcaagggataggaggctttatctttgcgatcaacgttttagcgatcattatcttttttgctagcttgatttcacttctatattatttaaaaatcatgcctttagtaatcaacctcatcggsggggcgttgcaaaaatgcttaggcacttctaaagcagaaagcatgagcgcagcggctaataytyttgtggcgcacaccgaagacrcccttagtcat

SEQ ID NO: 1156 - DNA (genomic), 1257 bp, Helicobacter pylori; double-stranded, circular
  misc_feature (B) LOCATION 1...1257
  hypothetical: NO
  anti-sense: NO
atgatttttagctctctttttagtgttgtagggatggcggtgctttttcttattgcttgggtgttttctggcaataaaagggctataaattatcgcacgattgtcagcgcctttgtgattcaagtggctttaggggcgttggctttatatgtgcctttgggcagagaaatactgcagggtttagctagcggcatacaaagcgtgattggttacggctatgagggggtacgctttttatttggcaatctcgctccaaacgctaagggcgatcaagggataggaggctttatctttgcgatcaacgttttagcgatcattatcttttttgctagcttgatttcacttctatattatttaaaaatcatgcctttagtgatcaacctcatcggcggggcgttgcaaaaatgcttaggcacttctaaagcagaaagcatgagcgcagcggctaatatttttgtggcgcacaccgaagcgcccttagtcattaaaccctatttgaaaagcatgagcgattcagagatttttgcggtcatgtgcgtgggcatggctagcgttgcggggcctgtgttagccgggtatgcgagcatgggcattcctttaccttatttaatcgccgcatcgtttatgtccgctcctggggggttgttgttcgctaaaatcatttacccgcaaaacgaaaccatttctagccatgcagatgtttctgcagaagagcatgtcaatattatagaagctatcgctaatggggcaagcacagggcttcatttagccttgcatgtgggggcgatgcttttagcctttgtggggatgctcgcgctcgttaacgggcttttaggggttgtagggggatttttaggcatggagcatttgtctttaggggtggttttaggcacgcttttaaaacctttggcctttatgttaggcgttccttggagccaagccgggattgccggggaaatcataggcattaaaatcgcgctcaatgaatttgtgggctatatgcaattattgccttatttgggcgataaccctcctttaatcttgagcgagaaaaccaaagcgatcatcacctttgcgttgtgcggattcgctaacttaagttcagtcgccatgctcattggggggcttggcagtttagtgcctaaaaagaaagatttcattgccaggcttgctttaaaagcggtgcttgtaggcacgctttctaatttcatgagcgcgactatcgccgggttattcatagggttaagcgccaattaa

SEQ ID NO: 1157 - DNA (genomic), 1278 bp, Helicobacter pylori; double-stranded, circular
  misc_feature (B) LOCATION 1...1278
  hypothetical: NO
  anti-sense: NO
tttcttaacattagggatttgacgatgatttttagctctctttttagtgttgtagggatggcggtgctttttcttattgcttgggtgttttctggcaataaaagggctataaattatcgcacgattgtcagcgcctttgtgattcaagtggctttaggggcgttggctttatatgtgcctttgggcagagaaatactgcagggtttagctagcggcatacaaagcgtgattggttacggctatgagggggtacgctttttatttggcaatctcgctccaaacgctaagggcgatcaagggataggaggctttatctttgcgatcaacgttttagcgatcattatcttttttgctagcttgatttcacttctatattatttaaaaatcatgcctttagtgatcaacctcatcggcggggcgttgcaaaaatgcttaggcacttctaaagcagaaagcatgagcgcagcggctaatatttttgtggcgcacaccgaagcgcccttagtcattaaaccctatttgaaaagcatgagcgattcagagatttttgcggtcatgtgcgtgggcatggctagcgttgcggggcctgtgttagccgggtatgcgagcatgggcattcctttaccttatttaatcgccgcatcgtttatgtccgctcctggggggttgttgttcgctaaaatcatttacccgcaaaacgaaaccatttctagccatgcagatgtttctgcagaagagcatgtcaatattatagaagctatcgctaatggggcaagcacagggcttcatttagccttgcatgtgggggcgatgcttttagcctttgtggggatgctcgcgctcgttaacgggcttttaggggttgtagggggatttttaggcatggagcatttgtctttaggggtggttttaggcacgcttttaaaacctttggcctttatgttaggcgttccttggagccaagccgggattgccggggaaatcataggcattaaaatcgcgctcaatgaatttgtgggctatatgcaattattgccttatttgggcgataaccctcctttaatcttgagcgagaaaaccaaagcgatcatcacctttgcgttgtgcggattcgctaacttaagttcagtcgccatgctcattggggggcttggcagtttagtgcctaaaaagaaagatttcattgccaggcttgctttaaaagcggtgcttgtaggcacgctttctaatttcatgagcgcgactatcgccgggttattcatagggttaagcgccaat

SEQ ID NO: 1158 - DNA (genomic), 1263 bp, Helicobacter pylori; double-stranded, circular
  misc_feature (B) LOCATION 1...1263
  hypothetical: NO
  anti-sense: NO
atggccgctccactacttgctctgccctttctttctaaccctttagtgcttggtgctttagctgtcataggagtgggtgcttacttgtatcccaataagcaagattctttagttgtgcaagcagatgggctttatagtgaaattcttgggtttttcatttcgttttctagcaagatcttgaaaggaattggtgagcctttagccaatgttatccaaccttttggtatggttttaggaatgcttttaatccttttgtattcctttaaacgctatcaaaacaatgatttatttgaaatcaaaacctttttaatgctttttgtgtttgtaggatacctttctttgtaccattatgcttttaaatctgatggttctagtagcggtaatggtcgctccagttttgcctttcaaaatcatgtaacagaaatttttgacacgcctgctaacttgctaaatgctgggatttctaatgtggttaaggaatatcaaacaaatagtgcaagagaacacaagaatatagacacgcaccacagtatcactaacgctaatatttcattccatgtcagacaaattttaacgagtttgaataaactatatgaagacttcaaaattaataatggactatcgctaaaaacccttattgcagctgttttgttattagttattttaggattagaattgtttttattgttcaaagttttctgttatgtttttatgacttatttagaaaaaattatttacttgtctttggttattttcatgctactgctagggttttttcagcagactagaggttttttagtgtcttatgtgaaaaaaattatttcattgactttttacatgcctttgttgttgctattagtgttattcaactcttttgcattacaatacgcaatcaaagtgggagggagcaatgaaatagtggctaaatttggcattattgtagcaataggaatttcactgacatttattcaaaaagtccccgaaatgattaacgctatctttggcacacaaggtggtctaacggatgctaaaagcttcatatatcaaggtgtgcaaatggctagtgctggagctggagccatagctggaagtcttaagagtgtgggtcgttcagcatttggtagaacgctagaagcttataaagacgcaaaatctacgataaacagcactacggctaacatgagagacatgccaggacatcctggtgttagagtgggtgtggagacgattgaacttcccaagtctcatagagctagcaaatga

SEQ ID NO: 1159 - DNA (genomic), 1260 bp, Helicobacter pylori; double-stranded, circular
  misc_feature (B) LOCATION 1...1260
  hypothetical: NO
  anti-sense: NO
atggccgctccactacttgctctgccctttctttctaaccctttagtgcttggtgctttagctgtcataggagtgggtgcttacttgtatcccaataagcaagattctttagttgtgcaagcagatgggctttatagtgaaattcttgggtttttcatttcgttttctagcaagatcttgaaaggaattggtgagcctttagccaatgttatccaaccttttggtatggttttaggaatgcttttaatccttttgtattcctttaaacgctatcaaaacaatgatttatttgaaatcaaaacctttttaatgctttttgtgtttgtaggatacctttctttgtaccattatgcttttaaatctgatggttctagtagcggtaatggtcgctccagttttgcctttcaaaatcatgtaacagaaatttttgacacgcctgctaacttgctaaatgctgggatttctaatgtggttaaggaatatcaaacaaatagtgcaagagaacacaagaatatagacacgcaccacagtatcactaacgctaatatttcattccatgtcagacaaattttaacgagtttgaataaactatatgaagacttcaaaattaataatggactatcgctaaaaacccttattgcagctgttttgttattagttattttaggattagaattgtttttattgttcaaagttttctgttatgtttttatgacttatttagaaaaaattatttacttgtctttggttattttcatgctactgctagggttttttcagcagactagaggttttttagtgtcttatgtgaaaaaaattatttcattgactttttacatgcctttgttgttgctattagtgttattcaactcttttgcattacaatacgcaatcaaagtgggagggagcaatgaaatagtggctaaatttggcattattgtagcaataggaatttcactgacatttattcaaaaagtccccgaaatgattaacgctatctttggcacacaaggtggtctaacggatgctaaaagcttcatatatcaaggtgtgcaaatggctagtgctggagctggagccatagctggaagtcttaagagtgtgggtcgttcagcatttggtagaacgctagaagcttataaagacgcaaaatctacgataaacagcactacggctaacatgagagacatgccaggacatcctggtgttagagtgggtgtggagacgattgaacttcccaagtctcatagagctagcaaa

SEQ ID NO: 1160 - DNA (genomic), 1272 bp, Helicobacter pylori; double-stranded, circular
  misc_feature (B) LOCATION 1...1272
  hypothetical: NO
  anti-sense: NO
agattaaataacatggccgctccactacttgctctgccctttctttctaaccctttagtgcttggtgctttagctgtcataggagtgggtgcttacttgtatcccaataagcaagattctttagttgtgcaagcagatgggctttatagtgaaattcttgggtttttcatttcgttttctagcaagatcttgaaaggaattggtgagcctttagccaatgttatccaaccttttggtatggttttaggaatgcttttaatccttttgtattcctttaaacgctatcaaaacaatgatttatttgaaatcaaaacctttttaatgctttttgtgtttgtaggatacctttctttgtaccattatgcttttaaatctgatggttctagtagcggtaatggtcgctccagttttgcctttcaaaatcatgtaacagaaatttttgacacgcctgctaacttgctaaatgctgggatttctaatgtggttaaggaatatcaaacaaatagtgcaagagaacacaagaatatagacacgcaccacagtatcactaacgctaatatttcattccatgtcagacaaattttaacgagtttgaataaactatatgaagacttcaaaattaataatggactatcgctaaaaacccttattgcagctgttttgttattagttattttaggattagaattgtttttattgttcaaagttttctgttatgtttttatgacttatttagaaaaaattatttacttgtctttggttattttcatgctactgctagggttttttcagcagactagaggttttttagtgtcttatgtgaaaaaaattatttcattgactttttacatgcctttgttgttgctattagtgttattcaactcttttgcattacaatacgcaatcaaagtgggagggagcaatgaaatagtggctaaatttggcattattgtagcaataggaatttcactgacatttattcaaaaagtccccgaaatgattaacgctatctttggcacacaaggtggtctaacggatgctaaaagcttcatatatcaaggtgtgcaaatggctagtgctggagctggagccatagctggaagtcttaagagtgtgggtcgttcagcatttggtagaacgctagaagcttataaagacgcaaaatctacgataaacagcactacggctaacatgagagacatgccaggacatcctggtgttagagtgggtgtggagacgattgaacttcccaagtctcatagagctagcaaa

SEQ ID NO: 1161 - DNA (genomic), 852 bp, Helicobacter pylori; double-stranded, circular
  misc_feature (B) LOCATION 1...852
  hypothetical: NO
  anti-sense: NO
gtgttttctgacacgataagcaaagaagcccacacctctgatgtctttgaaagcctgctcaattatagcgatgctgaaacgactaaaccttggtatcattaccacaacatgatagatattttcaagcgatcccattatgaaactttttggttagaaaaacaaatcgtcgatgaatgggggatcacacaaaatctagtctctaatcgttctaaaaaccgctactatattttgggaaactatggtgcatacgatgaagagctagtgaaattttattctaaaaatgtccaaccccaattaaaaagcaagaattttatcgtgttccatttgcttggctctcattcttggtatgccgatcgtttccctaaaagctttgccaaattcaaaccaagcgatttgtctttttctaatttgcatgcaagcagcgatagagacaagcaaatcgtcgctgattatgtcaattcgctttattataacgactttgttttgaatggaatttttaacctctttaaagataaagacgctattgtgttttatttgagcgaccatgcgcaagatatttttgaaagcggccctacttatgggcatagctgttctaaagcgggattagaaatcccttttatgatttatgtgagcgatatttttaaagaaaaacaccccgagaaagtgaagttgattaaaaacgctttaaacaaacctttcatgagcgatgatttaatccattctcttttgcctttggtgggcattcacactaaagatgaaatagagagtaaaaacctttttagcccccaatttgacgcccaaagaaaaagggctgtttgttatggcagcatgaattatgataggactaaataa

SEQ ID NO: 1162 - DNA (genomic), 933 bp, Helicobacter pylori; double-stranded, circular
  misc_feature (B) LOCATION 1...933
  hypothetical: NO
  anti-sense: NO
atggctatagcgttcctaataatcccttatcgagcgaactcgccaacgagagagagagagagagagagtaacaacctgttcgtgttttctgacacgataagcaaagaagcccacacctctgatgtctttgaaagcctgctcaattatagcgatgctgaaacgactaaaccttggtatcattaccacaacatgatagatattttcaagcgatcccattatgaaactttttggttagaaaaacaaatcgtcgatgaatgggggatcacacaaaatctagtctctaatcgttctaaaaaccgctactatattttgggaaactatggtgcatacgatgaagagctagtgaaattttattctaaaaatgtccaaccccaattaaaaagcaagaattttatcgtgttccatttgcttggctctcattcttggtatgccgatcgtttccctaaaagctttgccaaattcaaaccaagcgatttgtctttttctaatttgcatgcaagcagcgatagagacaagcaaatcgtcgctgattatgtcaattcgctttattataacgactttgttttgaatggaatttttaacctctttaaagataaagacgctattgtgttttatttgagcgaccatgcgcaagatatttttgaaagcggccctacttatgggcatagctgttctaaagcgggattagaaatcccttttatgatttatgtgagcgatatttttaaagaaaaacaccccgagaaagtgaagttgattaaaaacgctttaaacaaacctttcatgagcgatgatttaatccattctcttttgcctttggtgggcattcacactaaagatgaaatagagagtaaaaacctttttagcccccaatttgacgcccaaagaaaaagggctgtttgttatggcagcatgaattatgataggactaaataa

SEQ ID NO: 1163 - DNA (genomic), 1698 bp, Helicobacter pylori; double-stranded, circular
  misc_feature (B) LOCATION 1...1698
  hypothetical: NO
  anti-sense: NO
aaaaagttttcgaactctcttaaaggacaaaaaaaaacgatgaaatttttaaaattctttgccagtagcgtaactctagatgaaaaatttttaatgttccttctttgcaacgctctttctaacgcttacaaaaatagcgatttgttttctttctctaaaggctttttaggcgcttttttaatcgggtttgtggtgtattatggttgcgcgctaatccctaaaaaacgcttgaaatattcattagaatggctgtttataggaagcggtattatttttagcgtggcagaaatttttacgctgtttatgtttaaaatgcctttttccaaaggcttgattgacacgcttttagccacaaacagctctgaaacgatggcgtttataaaaagctataaaaattatttgctttactacgctttgattttgatcgctttgttgatcgccattaaaatcattcgctttagagcgcttgtgcctggtgtgatagcgagcgttttagggctttctatccttacaatagggagcgttcgtaacattaaacaccttacaaagaacgatgcgattttaaaaagatcactcttttctctttctttagctagggggttttattccgcttatttgagtttgtttgatcgccaacaagccataaaattttatagctttttaaataatctttatttaccaagcgattatctttctagcacgggcgatatttcaaatgtcgtcttagtcatcggcgaaagcgcgagcagaaatttcatgcaactctatggctatagcgttcctaataatcccttatgcgagcgaactcgccaagcgagagagagagagagagagagtaacaacctgttcgtgttttctgacacgataagcaaagaagcccacacctctgatgtctttgaaagcctgctcaattatagcgatgctgaaacgactaaaccttggtatcattaccacaacatgatagatattttcaagcgatcccattatgaaactttttggttagaaaaacaaatcgtcgatgaatgggggatcacacaaaatctagtctctaatcgttctaaaaaccgctactatattttgggaaactatggtgcatacgatgaagagctagtgaaattttattctaaaaatgtccaaccccaattaaaaagcaagaattttatcgtgttccatttgcttggctctcattcttggtatgccgatcgtttccctaaaagctttgccaaattcaaaccaagcgatttgtctttttctaatttgcatgcaagcagcgatagagacaagcaaatcgtcgctgattatgtcaattcgctttattataacgactttgttttgaatggaatttttaacctctttaaagataaagacgctattgtgttttatttgagcgaccatgcgcaagatatttttgaaagcggccctacttatgggcatagctgttctaaagcgggattagaaatcccttttatgatttatgtgagcgatatttttaaagaaaaacaccccgagaaagtgaagttgattaaaaacgctttaaacaaacctttcatgagcgatgatttaatccattctcttttgcctttggtgggcattcacactaaagatgaaatagagagtaaaaacctttttagcccccaatttgacgcccaaagaaaaagggctgtttgttatggcagcatgaattatgataggactaaa

SEQ ID NO: 1164 - DNA (genomic), 798 bp, Helicobacter pylori; double-stranded, circular
  misc_feature (B) LOCATION 1...798
  hypothetical: NO
  anti-sense: NO
atgaaatttttaaaattctttgccagtagcgtaactctagatgaaaaatttttaatgttccttctttgcaacgctctttctaacgcttacaaaaatagcgatttgttttctttctctaaaggctttttaggcgcttttttaatcgggtttgtggtgtattatggttgcgcgctaatccctaaaaaacgcttgaaatattcattagaatggctgtttataggaagcggtattatttttagcgtggcagaaatttttacgctgtttatgtttaaaatgcctttttccaaaggcttgattgacacgcttttagccacaaacagctctgaaacgatggcgtttataaaaagctataaaaattatttgctttactacgctttgattttgatcgctttgttgatcgccattaaaatcattcgctttagagcgcttgtgcctggtgtgatagcgagcgttttagggctttctatccttacaatagggagcgttcgtaacattaaacaccttacaaagaacgatgcgattttaaaaagatcactcttttctctttctttagctagggggttttattccgcttatttgagtttgtttgatcgccaacaagccataaaattttatagctttttaaataatctttatttaccaagcgattatctttctagcacgggcgatatttcaaatgtcgtcttagtcatcggcgaaagcgcgagcagaaatttcatgcaactctatggctatagcgttcctaataatcccttatcgagcgaactcgccaacgagagagagagagagagagagtaa

SEQ ID NO: 1165 - DNA (genomic), 795 bp, Helicobacter pylori; double-stranded, circular
  misc_feature (B) LOCATION 1...795
  hypothetical: NO
  anti-sense: NO
atgaaatttttaaaattctttgccagtagcgtaactctagatgaaaaatttttaatgttccttctttgcaacgctctttctaacgcttacaaaaatagcgatttgttttctttctctaaaggctttttaggcgcttttttaatcgggtttgtggtgtattatggttgcgcgctaatccctaaaaaacgcttgaaatattcattagaatggctgtttataggaagcggtattatttttagcgtggcagaaatttttacgctgtttatgtttaaaatgcctttttccaaaggcttgattgacacgcttttagccacaaacagctctgaaacgatggcgtttataaaaagctataaaaattatttgctttactacgctttgattttgatcgctttgttgatcgccattaaaatcattcgctttagagcgcttgtgcctggtgtgatagcgagcgttttagggctttctatccttacaatagggagcgttcgtaacattaaacaccttacaaagaacgatgcgattttaaaaagatcactcttttctctttctttagctagggggttttattccgcttatttgagtttgtttgatcgccaacaagccataaaattttatagctttttaaataatctttatttaccaagcgattatctttctagcacgggcgatatttcaaatgtcgtcttagtcatcgcgaaagcgcgagcagaaatttcatgcaactctatggctatagcgttcctaataatcccttatscgagcgaactcgccaacgagagagagagagagagagag

SEQ ID NO: 1166 - DNA (genomic), 831 bp, Helicobacter pylori; double-stranded, circular
  misc_feature (B) LOCATION 1...831
  hypothetical: NO
  anti-sense: NO
atgaaatttttaaaattctttgccagtagcgtaactctagatgaaaaatttttaatgttccttctttgcaacgctctttctaacgcttacaaaaatagcgatttgttttctttctctaaaggctttttaggcgcttttttaatcgggtttgtggtgtattatggttgcgcgctaatccctaaaaaacgcttgaaatattcattagaatggctgtttataggaagcggtattatttttagcgtggcagaaatttttacgctgtttatgtttaaaatgcctttttccaaaggcttgattgacacgcttttagccacaaacagctctgaaacgatggcgtttataaaaagctataaaaattatttgctttactacgctttgattttgatcgctttgttgatcgccattaaaatcattcgctttagagcgcttgtgcctggtgtgatagcgagcgttttagggctttctatccttacaatagggagcgttcgtaacattaaacaccttacaaagaacgatgcgattttaaaaagatcactcttttctctttctttagctagggggttttattccgcttatttgagtttgtttgatcgccaacaagccataaaattttatagctttttaaataatctttatttaccaagcgattatctttctagcacgggcgatatttcaaatgtcgtcttagtcatcggcgaaagcgcgagcagaaatttcatgcaactctatggctatagcgttcctaataatcccttatcgagcgaactcgccaacgagagagagagagagagagagagagtaacaacctgttcgtgttttctgacacgataa

SEQ ID NO: 1167 - DNA (genomic), 504 bp, Helicobacter pylori; double-stranded, circular
  misc_feature (B) LOCATION 1...504
  hypothetical: NO
  anti-sense: NO
atgctaaaaaaaatatttttaaccaacagcttagggattttatgctctaggatttttggctttttacgggatttaatgatggccaatatcctaggggctggggtgtatagcgatattttctttgtggctttcaaattgcctaatctattcaggcgtatttttgcggagggctctttttctcaaagctttttaccgagcttcatacggagttccattaaggggggttttgcgagtttggtggggcttattttttgtggcgttttattcatgtggtgcttattagtagcgctcaatcccttatggctaaccaaactcctagcttacggctttgatgaagaaacgctcaaactatgcacccctattgtagcgatcaatttttggtatcttttattggtgtttatcaccacttttttaggcgcgcttttacaatacaaacacagcttttttgccgcgcttatgcgcaagcttactcaatttatgcatgattttagcccttttgatttc

SEQ ID NO: 1168 - DNA (genomic), 1263 bp, Helicobacter pylori; double-stranded, circular
  misc_feature (B) LOCATION 1...1263
  hypothetical: NO
  anti-sense: NO
atgctaaaaaaaatatttttaaccaacagcttagggattttatgctctaggatttttggctttttacgggatttaatgatggccaatatcctaggggctggggtgtatagcgatattttctttgtggctttcaaattgcctaatctattcaggcgtatttttgcggagggctctttttctcaaagctttttaccgagcttcatacggagttccattaaggggggttttgcgagtttggtggggcttattttttgtggcgttttattcatgtggtgcttattagtagcgctcaatcccttatggctaaccaaactcctagcttacggctttgatgaagaaacgctcaaactatgcacccctattgtagcgatcaatttttggtatcttttattggtgtttatcaccacttttttaggcgcgcttttacaatacaaacacagcttttttgccagcgcttatagcgcaagcttactcaatttatgcatgattttagcccttttgatttctaaagaaaaaacgcatttagaagcgttgtattatttgagctatggcgtgcttttagggggcgtggctcaaatcttattacacttttatcctttagtaaaattaggcttatgggatttattatttaaagggttgttgggttttaagactaaaaatacaaacaaaaaagaatatcgtttgaatagggctaaaaaggatctaaaagcgtttttcaagcaattcttccccagcgtcttaggcaattctagcgctcagatcgcttcttttttagacaccacaatcgcttcttttctggcgagcgggagcgtgtcttatttgtattacgccaatagagtcttccagctccctttagccttattcgctatcgctatctccacagctcttttccctagcattgcgatcgcgcttaaaaacaaccagcaggatttaatcttacaacgcttgcaaaaggcgtggttttttttggtgggggttttgcttctttgcagcattggggggataatgttaagcaaagaaatcaccgaacttttatttgaaagggggcaatttagccctaaagacaccctaatcacttcgcaagtcttttcgctctatcttttaggcttgctcccttttgggctaaccaaactcttttctttatggctttatgcgaaattagagcaaaaaaaagcggctaaaatctctttaatttcgctttttttaggtttagcggcttctttgagtttaatgcctttgttaggggttttgggtttgcgttag

SEQ ID NO: 1169 - DNA (genomic), 1278 bp, Helicobacter pylori; double-stranded, circular
  misc_feature (B) LOCATION 1...1278
  hypothetical: NO
  anti-sense: NO
gtaataaatacaactagtatgctaaaaaaaatatttttaaccaacagcttagggattttatgctctaggatttttggctttttacgggatttaatgatggccaatatcctaggggctggggtgtatagcgatattttctttgtggctttcaaattgcctaatctattcaggcgtatttttgcggagggctctttttctcaaagctttttaccgagcttcatacggagttccattaaggggggttttgcgagtttggtggggcttattttttgtggcgttttattcatgtggtgcttattagtagcgctcaatcccttatggctaaccaaactcctagcttacggctttgatgaagaaacgctcaaactatgcacccctattgtagcgatcaatttttggtatcttttattggtgtttatcaccacttttttaggcgcgcttttacaatacaaacacagcttttttgccagcgcttatagcgcaagcttactcaatttatgcatgattttagcccttttgatttctaaagaaaaaacgcatttagaagcgttgtattatttgagctatggcgtgcttttagggggcgtggctcaaatcttattacacttttatcctttagtaaaattaggcttatgggatttattatttaaagggttgttgggttttaagactaaaaatacaaacaaaaaagaatatcgtttgaatagggctaaaaaggatctaaaagcgtttttcaagcaattcttccccagcgtcttaggcaattctagcgctcagatcgcttcttttttagacaccacaatcgcttcttttctggcgagcgggagcgtgtcttatttgtattacgccaatagagtcttccagctccctttagccttattcgctatcgctatctccacagctcttttccctagcattgcgatcgcgcttaaaaacaaccagcaggatttaatcttacaacgcttgcaaaaggcgtggttttttttggtgggggttttgcttctttgcagcattggggggataatgttaagcaaagaaatcaccgaacttttatttgaaagggggcaatttagccctaaagacaccctaatcacttcgcaagtcttttcgctctatcttttaggcttgctcccttttgggctaaccaaactcttttctttatggctttatgcgaaattagagcaaaaaaaagcggctaaaatctctttaatttcgctttttttaggtttagcggcttctttgagtttaatgcctttgttaggggttttgggtttgcgt

SEQ ID NO: 1170 - DNA (genomic), 738 bp, Helicobacter pylori; double-stranded, circular
  misc_feature (B) LOCATION 1...738
  hypothetical: NO
  anti-sense: NO
atgcaaatgatgcagaatttgagttttttgggcatgtttttagccgctttgagcatgtccttagggcattgtgtgggcatgtgtggggggattgtgagcgcgtttagtcaaataaggttttctaaagttacaagcttttcctaccagatcgcttgccatgccctctataatgtggggaggatcagcacctacatgcttttaggggctataacggcaggtttagggaatagtcttagcgtgagcatgggttttaggggcgttttattgatgagcatggggattgttttgatccttttagcgctcttaggagctaaagcggaaaaattaagctttcaaatccctttcatctcttttttgatgaaaaaaaccttgcaatctcaaaacgttctggggttgtattttctaggcgtgttgaatgggtttttgccttgcatgatggtgtattcgtttttagcgagcgtgattctcagtcatagcacgtttatgggagcgatgctgggcctttcttttgggcttggcactagcgtgccgttgtttttaatggggatttttttaagcaagatttccatttcttataggaaatttttcaatcttttgtctaaaggtttaatgggggtttttgggctttatgtcctttatatggggatcatgctcattagccaccaaacaccccatgcgatgcgccatcaaaacaacgccacaccacagcaagagggccacttccatgatcaccactaa

SEQ ID NO: 1171 - DNA (genomic), 231 bp, Helicobacter pylori; double-stranded, circular
  misc_feature (B) LOCATION 1...231
  hypothetical: NO
  anti-sense: NO
atggrcatgtctcatattattaagagcattgaagctttagatgactataccattagattcacgcttaatgggccagaagccccgtttttagcgaatttgggcatggactttttaagcattttgagtaaggattacgctgattacttggctcaaaataataaaaaagacgagttggctaaaaamcctgttgggacagggcctttcaaattctttttgtggaataaaagatga

SEQ ID NO: 1172 - DNA (genomic), 348 bp, Helicobacter pylori; double-stranded, circular
  misc_feature (B) LOCATION 1...348
  hypothetical: NO
  anti-sense: NO
atgctcatgaccgggcataatctcaatgaagtggagcaattagaaaaacttcataatatcgtggtggatagaagccctgggttgatcgccaactggctttcattgaacacgcaaaaaaagtattttaataaccctttggtgcgtttggctatcaatcatgccatcaatgttgatgattacatcaaggtgatttatgaaggttttgctcaaaaaatggtcaatcccttcccgcccaccatatggggttataactataatatcaaaccctacgaatacgatttgaaaaaggctaaggagttgttgaaacaagcgggctatcctaacggctttaaaaccactatttttacc

SEQ ID NO: 1173 - DNA (genomic), 633 bp, Helicobacter pylori; double-stranded, circular
  misc_feature (B) LOCATION 1...633
  hypothetical: NO
  anti-sense: NO
atggcgaaagctatgtggcgacggggcaatatttatgacacgctcgtgcaattcaaatacggcacgacagaagttgaaccagcgttagcgacaagttgggaaatatctccagatggtcttgtatatacctttcatttacgcaaaggggtttatttccaccaaacgaagtattggaataaaaaagtagagtttagcgctaaagacgtgctgttttcttttgaacgccaaatggataaggctaaacgatactatagcccaggggctaaaagctataagtattgggaaggcatgggcatgtctcatattattaagagcattgaagctttagatgactataccattagattcacgcttaatgggccagaagccccgtttttagcgaatttgggcatggactttttaagcattttgagtaaggattacgctgattacttggctcaaaataataaaaaagacgagttggctaaaaaacctgttgggacagggcctttcaaattctttttgtggaataaagatgagaaaatcattctggttaaaaaccaggattattgggggcctaaaacgtatttgataaggtggtggtgcgcaccattcataattttccactcgcgccttagcgttaagaaccggtga

SEQ ID NO: 1174 - DNA (genomic), 753 bp, Helicobacter pylori; double-stranded, circular
  misc_feature (B) LOCATION 1...753
  hypothetical: NO
  anti-sense: NO
acgatactatgcccaggggctaaaagctataagtattgggaaggcatgggcatgtctcatattattaagagcattgaagctttagatgactataccattagattcacgcttaatgggccagaagccccgtttttagcgaatttgggcatggactttttaagcattttgagtaaggattacgctgattacttggctcaaaataataaaaaagacgagttggctaaaaaacctgttgggacagggcctttcaaattctttttgtggaataaagatgagaaaatcattctggttaaaaaccaggattattggggccttaaagcgtatttggataaggtggtggtgcgcaccattcataatttttccactcgcgccttagcgttaagaaccggtgaaatcatgctcatgaccgggcataatctcaatgaagtggagcaattagaaaaacttcataatatcgtggtggatagaagccctgggttgatcgccaactggctttcattgaacacgcaaaaaaagtattttaataaccctttggtgcgtttggctatcaatcatgccatcaatgttgatgattacatcaaggtgatttatgaaggttttgctcaaaaaatggtcaatcccttcccgcccaccatatggggttataactataatatcaaaccctacgaatacgatttgaaaaaggctaaggagttgttgaaacaagcgggctatcctaacggctttaaaaccaatatttgtacatctttactc

SEQ ID NO: 1175 - DNA (genomic), 1518 bp, Helicobacter pylori; double-stranded, circular
  misc_feature (B) LOCATION 1...1518
  hypothetical: NO
  anti-sense: NO
ttgggaggcgttttagtttttgctagaggtgctgatggctcaagcatggatcctgctttagtaactgatggcgaaagctatgtggcgacgggcaatatttatgacacgctcgtgcaattcaaatacggcacgacagaagttgaaccagcgttagcgacaagttgggaaatatctccagatggtcttgtatatacctttcatttacgcaaaggggtttatttccaccaaacgaagtattggaataaaaaagtagagtttagcgctaaagacgtgctgttttcttttgaacgccaaatggataaggctaaacgatactatagcccaggggctaaaagctataagtattgggaaggcatgggcatgtctcatattattaagagcattgaagctttagatgactataccattagattcacgcttaatgggccagaagccccgtttttagcgaatttgggcatggactttttaagcattttgagtaaggattacgctgattacttggctcaaaataataaaaaagacgagttggctaaaaaacctgttgggacagggcctttcaaattctttttgtggaataaagatgagaaaatcattctggttaaaaaccaggattattgggggcctaaagcgtatttggataaggtggtggtgcgcaccattcctaattcttccactcgcgccttagcgctaagaaccggtgaaatcatgctcatgaccgggcctaatctcaatgaagtggagcaattagaaaaacttcctaatatcgtggtggatagaagccctgggttgatcgccaactggctttcattgaacacgcaaaaaaagtattttaataaccctttggtgcgtttggctatcaatcatgccatcaatgttgatgattacatcaaggtgatttatgaaggttttgctcaaaaaatggtcaatcccttcccgcccaccatatggggttataactataatatcaaaccctacgaatacgatttgaaaaaggctaaggagttgttgaaacaagcgggctatcctaacggctttaaaaccactatttttaccacttctactcgtaacccaaagggagcggtgttcatacaagcgagcctggctaaaattggcattgatgtgaaaattgaagtgtatgagtggggggcttatttgaaaagaacgggattaggcgagcatgaaatggcgtttgcaggctggatggcagacattgcggatccggataatttcttatacaccttatggagcaagcaagccgcctcagccatacccactcaaaatggttccttttataagagcgacgccttttccgatctgctcataaaggctaaacgggtttcggatcaaaaagagcgagaagccctttatttaaaggctcaagaaattatccataaagacgcgccttatgtgcctttagcctacccttattcagtggtaccgcatttgtctaaagttaagggttataagacgaccggggtgagcgtgaatcgcttctttaaggtgtatttagaaaaatga

SEQ ID NO: 1176 - DNA (genomic), 156 bp, Helicobacter pylori; double-stranded, circular
  misc_feature (B) LOCATION 1...156
  hypothetical: NO
  anti-sense: NO
aatccttctatcaaccatcaaaaaatagcgagttttagagagattagagagatagtggcgcgttctcaaggcgagttaattttagaaatagagcgaaacaatcagattttagaaaaacgactgacccccaaaatcgtggcggggataaagcgagtc

SEQ ID NO: 1177 - DNA (genomic), 225 bp, Helicobacter pylori; double-stranded, circular
  misc_feature (B) LOCATION 1...225
  hypothetical: NO
  anti-sense: NO
agcgagtctaatgatcctaatgaaatcatcaagtataaaataataggcattaaaccggacatgcaaaaaatgggcgttgtctcttattccgtgtttcaagcgtttgaaaaggctttgagtcggtttaaagagggcgttgttttgattgtggattctttaaggcgtttgattatggggagcgcttcagttaaagaattgagtggggtaataggcattgtggggcgt

SEQ ID NO: 1178 - DNA (genomic), 267 bp, Helicobacter pylori; double-stranded, circular
  misc_feature (B) LOCATION 1...267
  hypothetical: NO
  anti-sense: NO
aaattaaagggcatggataaagaagaaaatgaagaaaataaaattaaccaagcgaatgatagctacggccaaaaaagccctttccaaaagctatggatattgtttggtggggcgttttttaattttctttttgcggttttagtgtatttttttctggcattgagcggggaaaaagtcttactgcccgtcattggcggtttagaaaaaaacgcgctagaagccgggctgttaaagggggatagaatccttctatcaaccatcaaaaaa

SEQ ID NO: 1179 - DNA (genomic), 279 bp, Helicobacter pylori; double-stranded, circular
  misc_feature (B) LOCATION 1...279
  hypothetical: NO
  anti-sense: NO
agaattgagtggggtaataggcattgtggggcgttaagccatgccaatagcgtgagcatgcttttgttgtttggggcgtttttatctatcaatctagggattttaaatttattacccattccagccttagatggggcgcaaatgctaggggtcgtttttaaaaatatttttcatatcgctttgccaacgcccatacaaaatgcgttgtggctagtgggggtggggtttttggtttttgtcatgtttttagggctttttaatgacattactcgtttgcta

SEQ ID NO: 1180 - DNA (genomic), 333 bp, Helicobacter pylori; double-stranded, circular
  misc_feature (B) LOCATION 1...333
  hypothetical: NO
  anti-sense: NO
atgatgttcattgtagcggttttgatgctggcgtttttgatctttgtccatgagttagggcatttcattatcgctaggatttgtggggtgaaagtggaagtgtttagcattggttttggtaaaaaactctggtttttcaagctttttggcacgcaattcgctctgtctttgatcccgcttgggggctatgtgaaattaaagggcatggataaagaagaaaatgaagaaaataaaattaatcaagcgaatgatagctacgccaaaaaagccctttccaaaagctatggatattgtttggtggggcgttttttaattttctttttgcggttttag

SEQ ID NO: 1181 - DNA (genomic), 411 bp, Helicobacter pylori; double-stranded, circular
  misc_feature (B) LOCATION 1...411
  hypothetical: NO
  anti-sense: NO
atgcaaaaaatgggcgttgtctcttattccgtgtttcaagcgtttgaaaaggctttgagtcggtttaaagagggcgttgttttgattgtggattctttaaggcgtttgattatggggagcgcttcagttaaagaattgagtggggtaataggcattgtgggggcgttaagccatgccaatagcgtgagcatgcttttgttgtttggggcgtttttatctatcaatctagggattttaaatttattacccattccagccttagatggggcgcaaatgctaggggtcgtttttaaaaatatttttcatatcgctttgccaacgcccatacaaaatgcgttgtggctagtgggggtggggtttttggtttttgtcatgtttttagggctttttaatgacattactcgtttgcta

SEQ ID NO: 1182 - DNA (genomic), 765 bp, Helicobacter pylori; double-stranded, circular
  misc_feature (B) LOCATION 1...765
  hypothetical: NO
  anti-sense: NO
ttgtttggtggggcgttttttaattttctttttgcggttttagtgtatttttttctggcattgagcggggaaaaagtcttactgcccgtcattggcggtttagaaaaaaacgcgctagaagccgggctgttaaagggggatagaatcctttctatcaaccatcaaaaaatagcgagttttagagagattagagagatagtggcgcgttctcaaggcgagttaattttagaaatagagcgaaacaatcagattttagaaaaacgactgacccccaaaatcgtggcggtgataagcgagtctaatgatcctaatgaaatcatcaagtataaaataataggcattaaaccggacatgcaaaaaatgggcgttgtctcttattccgtgtttcaagcgtttgaaaaggctttgagtcggtttaaagagggcgttgttttgattgtggattctttaaggcgtttgattatggggagcgcttcagttaaagaattgagtggggtaataggcattgtgggggcgttaagccatgccaatagcgtgagcatgcttttgttgtttggggcgtttttatctatcaatctagggattttaaatttattacccattccagccttagatggggcgcaaatgctaggggtcgtttttaaaaatatttttcatatcgctttgccaacgcccatacaaaatgcgttgtggctagtgggggtggggtttttggtttttgtcatgtttttagggctttttaatgacattactcgtttgctataa

SEQ ID NO: 1183 - DNA (genomic), 1056 bp, Helicobacter pylori; double-stranded, circular
  misc_feature (B) LOCATION 1...1056
  hypothetical: NO
  anti-sense: NO
atgatgttcattgtagcggttttgatgctggcgtttttgatctttgtccatgagttagggcatttcattatcgctaggatttgtggggtgaaagtggaagtgtttagcattggttttggtaaaaaactctggtttttcaagctttttggcacgcaattcgctctgtctttgatcccgcttgggggctatgtgaaattaaagggcatggataaagaagaaaatgaagaaaataaaattaatcaagcgaatgatagctacgcgcaaaaaagccctttccaaaagctatggatattgtttggtggggcgttttttaattttctttttgcggttttagtgtatttttttctggcattgagcggggaaaaagtcttactgcccgtcattggcggtttagaaaaaaacgcgctagaagccgggctgttaaagggggatagaatcctttctatcaaccatcaaaaaatagcgagttttagagagattagagagatagtggcgcgttctcaaggcgagttaattttagaaatagagcgaaacaatcagattttagaaaaacgactgacccccaaaatcgtggcggtgataagcgagtctaatgatcctaatgaaatcatcaagtataaaataataggcattaaaccggacatgcaaaaaatgggcgttgtctcttattccgtgtttcaagcgtttgaaaaggctttgagtcggtttaaagagggcgttgttttgattgtggattctttaaggcgtttgattatggggagcgcttcagttaaagaattgagtggggtaataggcattgtgggggcgttaagccatgccaatagcgtgagcatgcttttgttgtttggggcgtttttatctatcaatctagggattttaaatttattacccattccagccttagatggggcgcaaatgctaggggtcgtttttaaaaatatttttcatatcgctttgccaacgcccatacaaaatgcgttgtggctagtgggggtggggtttttggtttttgtcatgtttttagggctttttaatgacattactcgtttgctataa

SEQ ID NO: 1184 - DNA (genomic), 1053 bp, Helicobacter pylori; double-stranded, circular
  misc_feature (B) LOCATION 1...1053
  hypothetical: NO
  anti-sense: NO
atggcattaagggtattattattcttttgttttttgtttttgcaagcagaagataagagccaagaattatcatctatacaaaaacaaatggctttggtggataaaaaactcgccaaagacgataacgtgtggttgaaaaaatttgaaaactataaaatttacaaccaaatttatactgaaaaagagagcgtgaggcaggaattaaggcgcttaaaaaacaaaaaaagcaaggatttattaaagattagcaccttagagcataccttaaaggctttagagtcccagcaaaaaatgtttgaaagctatggggtcaatccttttaaggacttgatagagcgccccaatatccccaatatccctaatatcgctaaccctattgcgatcattgatggcatttctttcatcaagagcatgcgtttaaagcatgaaaatcttaaaaataaccagacttctttaggagaagttttaaagcttttagatcaaaaacaccagcttttaaatcagtggcacgctttggataaaagcgcgaaattaagcgatgagatttatcaaactcaagccaaacgcttagaattgcaaggggctcaaaacattctaaaaaccacratcgggattttccaaaaagacagcgatgaagctataagcattgtcaaatctcaagttaaaaaccagctttttaaattggtttatgtgtttttagcggcccttttgagcgtggtgtttgcgtggattttaaaaatcatttccagtaaatacattgaaaataatgagcgcgtctataccgtgaataaagccattaacttcgtgaatgtgagcgtgatcgktkkaatcttkcttttttcttatttagaaaacgttacttacttggtaacggttttaggctttgcgagcgcgggcttagcgattkcgatgaaggatttattcatgagcttgctcgggtggtttatcattttgattggggggagcgtgcatgtgggcgatagggtgcgtatcgctaaggggacggatatttttattggcgatgtgttggatacttctaatgttgtacattaa

SEQ ID NO: 1185 - DNA (genomic), 1572 bp, Helicobacter pylori; double-stranded, circular
  misc_feature (B) LOCATION 1...1572
  hypothetical: NO
  anti-sense: NO
atggcattaagggtattattattcttttgttttttgtttttgcaagcagaagataagagccaagaattatcatctatacaaaaacaaatggctttggtggataaaaaactcgccaaagacgataacgtgtggttgaaaaaatttgaaaactataaaatttacaaccaaatttatactgaaaaagagagcgtgaggcaggaattaaggcgcttaaaaaacaaaaaaagcaaggatttattaaagattagcaccttagagcataccttaaaggctttagagtcccagcaaaaaatgtttgaaagctatggggtcaatccttttaaggacttgatagagcgccccaatatccccaatatccctaatatcgctaaccctattgcgatcattgatggcatttctttcatcaagagcatgcgtttaaagcatgaaaatcttaaaaataaccagacttctttaggagaagttttaaagcttttagatcaaaaacaccagcttttaaatcagtggcacgctttggataaaagcgcgaaattaagcgatgagatttatcaaactcaagccaaacgcttagaattgcaaggggctcaaaacattctaaaaaccacgatcgggattttccaaaaagacagcgatgaagctataagcattgtcaaatctcaagttaaaaaccagctttttaaattggtttatgtgtttttagcggcccttttgagcgtggtgtttgcgtggattttaaaaatcatttccagtaaatacattgaaaataatgagcgcgtctataccgtgaataaagccattaacttcgtgaatgtgagcgtgatcgttttaatctttcttttttcttatttagaaaacgttacttacttggtaacggttttaggctttgcgagcgcgggcttagcgattgcgatgaaggatttattcatgagcttgctcgggtggtttatcattttgattggggggagcgtgcatgtgggcgatagggtgcgtatcgctaaggggacggatatttttattggcgatgtgttggatatttctatgttgcacattacgattttagaagacgtaacctttaccacttacacgaataacaggagagcgggccgaattatctttgtgcctaacaattacattttcaccaccatgttcgctaattacagccattttgggatgaaaacggtttgggatggcgtggatttttgcgttacatttgattctgattttaaaaaagcgtctaaaattgcgctcaatatcgctacggaattgtctaaagaatacacggatattacctataaacagctcaataaaatgcgcgaccggtattctttaaggagtttgagcgtcaagcctcgatgctttttgatgcctgaaaataacgggataaaaatctcggtgtggtatcaaaccaattcgtatgccaccatgtctttaaggagcaagattgtggctgaaattgttgaagcctttttgaaagaagaaaatatccatatcgcttatacgaccagcaagctgcttaaagtggatgctgatgctctaggcgatggttttgggaataaaagggaacaaaaatga

SEQ ID NO: 1186 - DNA (genomic), 1596 bp, Helicobacter pylori; double-stranded, circular
  misc_feature (B) LOCATION 1...1596
  hypothetical: NO
  anti-sense: NO
agaaacgattttaaaggtgttagaaaaatggcattaagggtattattattcttttgttttttgtttttgcaagcagaagataagagccaagaattatcatctatacaaaaacaaatggctttggtggataaaaaactcgccaaagacgataacgtgtggttgaaaaaatttgaaaactataaaatttacaaccaaatttatactgaaaaagagagcgtgaggcaggaattaaggcgcttaaaaaacaaaaaaagcaaggatttattaaagattagcaccttagagcataccttaaaggctttagagtcccagcaaaaaatgtttgaaagctatggggtcaatccttttaaggacttgatagagcgccccaatatccccaatatccctaatatcgctaaccctattgcgatcattgatggcatttctttcatcaagagcatgcgtttaaagcatgaaaatcttaaaaataaccagacttctttaggagaagttttaaagcttttagatcaaaaacaccagcttttaaatcagtggcacgctttggataaaagcgcgaaattaagcgatgagatttatcaaactcaagccaaacgcttagaattgcaaggggctcaaaacattctaaaaaccacgatcgggattttccaaaaagacagcgatgaagctataagcattgtcaaatctcaagttaaaaaccagctttttaaattggtttatgtgtttttagcggcccttttgagcgtggtgtttgcgtggattttaaaaatcatttccagtaaatacattgaaaataatgagcgcgtctataccgtgaataaagccattaacttcgtgaatgtgagcgtgatcgttttaatctttcttttttcttatttagaaaacgttacttacttggtaacggttttaggctttgcgagcgcgggcttagcgattgcgatgaaggatttattcatgagcttgctcgggtggtttatcattttgattggggggagcgtgcatgtgggcgatagggtgcgtatcgctaaggggacggatatttttattggcgatgtgttggatatttctatgttgcacattacgattttagaagacgtaacctttaccacttacacgaataacaggagagcgggccgaattatctttgtgcctaacaattacattttcaccaccatgttcgctaattacagccattttgggatgaaaacggtttgggatggcgtggatttttgcgttacatttgattctgattttaaaaaagcgtctaaaattgcgctcaatatcgctacggaattgtctaaagaatacacggatattacctataaacagctcaataaaatgcgcgaccggtattctttaaggagtttgagcgtcaagcctcgatgctttttgatgcctgaaaataacgggataaaaatctcggtgtggtatcaaaccaattcgtatgccaccatgtctttaaggagcaagattgtggctgaaattgttgaagcctttttgaaagaagaaaatatccatatcgcttatacgaccagcaagctgcttaaagtggatgctgatgctctaggcgatggttttgggaataaaagggaacaaaaa

SEQ ID NO: 1187 - DNA (genomic), 756 bp, Helicobacter pylori; double-stranded, circular
  misc_feature (B) LOCATION 1...756
  hypothetical: NO
  anti-sense: NO
atgggtgcaattttatctattttaaaacttgaaatcaaatcttatctcaccaatacaagcgcgctattttggacttttatttatcctattttaatgctcctattactaatttttgttttttcaaaaaataccactgaaattttttactttaataacattataggtctaatgggacttcttattatttctagcgcgatctttggtctcacacaagctataacaagctctagatcgcataatatattcttattctacatgctatcaccagcaactttcaaacaaataactctagcattaatcgcttcaagactaatcgttgtaatcctatatgcttttatctttattgttctctctttttatgcgctcaatatcatcactattcttaattttaaagcgcttattttggggtttattagcattttttcaagcgcattgttttgtttttgcttggcaatttttgtagctagaatttttcaaaacgaacaaagcatcttaggattttgtaatatcatcaatctctatgcgctaatgtcttgtaatgtttttgttcctttagaatacctacctaatattggtcaattatttatcaaaacatctattttttactaccttaatcaacttctaatcaaagcttttcaagggattgatactatactggttttagcaacttcaacatttttcattattggtggcattattttatttttactaagcgctaatcgcatgttactaacaccaaaagaacgcatgcgttaa

SEQ ID NO: 1188 - DNA (genomic), 753 bp, Helicobacter pylori; double-stranded, circular
  misc_feature (B) LOCATION 1...753
  hypothetical: NO
  anti-sense: NO
atgggtgcaattttatctattttaaaacttgaaatcaaatcttatctcaccaatacaagcgcgctattttggacttttatttatcctattttaatgctcctattactaatttttgttttttcaaaaaataccactgaaattttttactttaataacattataggtctaatgggacttcttattatttctagcgcgatctttggtctcacacaagctataacaagctctagatcgcataatatattcttattctacatgctatcaccagcaactttcaaacaaataactctagcattaatcgcttcaagactaatcgttgtaatcctatatgcttttatctttattgttctctctttttatgcgctcaatatcatcactattcttaattttaaagcgcttattttggggtttattagcattttttcaagcgcattgttttgtttttgcttggcaatttttgtagctagaatttttcaaaacgaacaaagcatcttaggattttgtaatatcatcaatctctatgcgctaatgtcttgtaatgtttttgttcctttagaatacctacctaatattggtcaattatttatcaaaacatctattttttactaccttaatcaacttctaatcaaagcttttcaagggattgatactatactggttttagcaacttcaacatttttcattattggtggcattattttatttttactaagcgctaatcgcatgttactaacaccaaaagaacgcatgcgt

SEQ ID NO: 1189 - DNA (genomic), 801 bp, Helicobacter pylori; double-stranded, circular
  misc_feature (B) LOCATION 1...801
  hypothetical: NO
  anti-sense: NO
agaaaaaccaaccacaaaagacttattagcgttactaaaggatatttaatgggtgcaattttatctattttaaaacttgaaatcaaatcttatctcaccaatacaagcgcgctattttggacttttatttatcctattttaatgctcctattactaatttttgttttttcaaaaaataccactgaaattttttactttaataacattataggtctaatgggacttcttattatttctagcgcgatctttggtctcacacaagctataacaagctctagatcgcataatatattcttattctacatgctatcaccagcaactttcaaacaaataactctagcattaatcgcttcaagactaatcgttgtaatcctatatgcttttatctttattgttctctctttttatgcgctcaatatcatcactattcttaattttaaagcgcttattttggggtttattagcattttttcaagcgcattgttttgtttttgcttggcaatttttgtagctagaatttttcaaaacgaacaaagcatcttaggattttgtaatatcatcaatctctatgcgctaatgtcttgtaatgtttttgttcctttagaatacctacctaatattggtcaattatttatcaaaacatctattttttactaccttaatcaacttctaatcaaagcttttcaagggattgatactatactggttttagcaacttcaacatttttcattattggtggcattattttatttttactaagcgctaatcgcatgttactaacaccaaaagaacgcatgcgt

SEQ ID NO: 1190 - DNA (genomic), 252 bp, Helicobacter pylori; double-stranded, circular
  misc_feature (B) LOCATION 1...252
  hypothetical: NO
  anti-sense: NO
gtgagtttgggggcgtttcaggggtattatggagggctagtggatttagtggggcaaaggttgagcgaaatttggagcgcgatccccatgctttttttactcattgtgatttctagcgcgttcaattctaatttttggatcatcttgtttttagtcttgctctttagctggatggggctttctcaagtcgtgcgcacggagtttttaaaagcaaggaatatggactacaccaaagccgctagagcgttgggg

SEQ ID NO: 1191 - DNA (genomic), 1023 bp, Helicobacter pylori; double-stranded, circular
  misc_feature (B) LOCATION 1...1023
  hypothetical: NO
  anti-sense: NO
ttgagcgtgagcggtttgtttaaaatgcgtattctgagttttaaaaagaataagcgggcggtgttttcactctatctttttatcgctttgttagcgctttctcttttagcccccttgtgggtcaatgatcgccctttattcatctataaagacaataaagcgtatttccctatgtttaaaaactatgcggaagtggagtttggaggcgattttttcacccctacggactataacgatccttatgtgcaaaacacgcttttaaaagacgctttcatcatccatgcgctcatcccttatagctacgatacgatcattatggatttagactcgcctgcccccacccccccaagcttcaaacaccttttaggcacagacgatcaagccagagacgtgttagccaggctggtttatggctatcgggtttcgttagtgtttgggattttactcaccctttttagcgttcttattggcgtgagtttgggggcgtttcaggggtattatggagggctagtggatttagtggggcaaaggttgagcgaaatttggagcgcgatccccatgctttttttactcattgtgatttctagcgcgttcaattctaatttttggatcatcttgtttttagtcttgctctttagctggatggggctttctcaagtcgtgcgcacggagtttttaaaagcaaggaatatggactacaccaaagccgctagagcgcttggggtgaatgatttaaaaatcattttctaccatgttttacccaacgctttagtggcaacgatcacttacattccttttttaatggcggctagtatttccactttagtgtctttggatttcttaggttttggcatgcctatagggagcgcgagcttgggcgaattggtcaatcaaggcaaggataacctcaccacgcctcatttagcggttgtagcctttgtagccattagcttgttgctttctgttttggtgttcattggcgaaggggtgcgcgatgctttcaacgctaacatgctcaaataa

SEQ ID NO: 1192 - DNA (genomic), 1041 bp, Helicobacter pylori; double-stranded, circular
  misc_feature (B) LOCATION 1...1041
  hypothetical: NO
  anti-sense: NO
attgtttttcatcaagggagtttgagcgtgagcggtttgtttaaaatgcgtattctgagttttaaaaagaataagcgggcggtgttttcactctatctttttatcgctttgttagcgctttctcttttagcccccttgtgggtcaatgatcgccctttattcatctataaagacaataaagcgtatttccctatgtttaaaaactatgcggaagtggagtttggaggcgattttttcacccctacggactataacgatccttatgtgcaaaacacgcttttaaaagacgctttcatcatccatgcgctcatcccttatagctacgatacgatcattatggatttagactcgcctgcccccacccccccaagcttcaaacaccttttaggcacagacgatcaagccagagacgtgttagccaggctggtttatggctatcgggtttcgttagtgtttgggattttactcaccctttttagcgttcttattggcgtgagtttgggggcgtttcaggggtattatggagggctagtggatttagtggggcaaaggttgagcgaaatttggagcgcgatccccatgctttttttactcattgtgatttctagcgcgttcaattctaatttttggatcatcttgtttttagtcttgctctttagctggatggggctttctcaagtcgtgcgcacggagtttttaaaagcaaggaatatggactacaccaaagccgctagagcgcttggggtgaatgatttaaaaatcattttctaccatgttttacccaacgctttagtggcaacgatcacttacattccttttttaatggcggctagtatttccactttagtgtctttggatttcttaggttttggcatgcctatagggagcgcgagcttgggcgaattggtcaatcaaggcaaggataacctcaccacgcctcatttagcggttgtagcctttgtagccattagcttgttgctttctgttttggtgttcattggcgaaggggtgcgcgatgctttcaacgctaacatgctcaaa

SEQ ID NO: 1193 - DNA (genomic), 453 bp, Helicobacter pylori; double-stranded, circular
  misc_feature (B) LOCATION 1...453
  hypothetical: NO
  anti-sense: NO
gtgagcgattctaacgctttaaaggaagtgtttttaaacatcagcgctaaagaagatcattgcgacgttttgatcaattccgccggttatggggtgtttgggagcgtggaagacacgcccattgaagaggttaaaaagcaatttagcgtgaattttttcgccctttgtgaagtggtgcaactttgtttgcccttattaaaaaacaagccttattctaagattttcaatctttcttccatagcggggcgtgtgagcatgctctttttaggccattacagcgcgagtaagcatgccttagaggcttatagcgatgccttgcgtttagagcttaagccctttaacgttcaagtgtgtttgattgagccaggcccggtgaaaagcaattgggaaaaaaccgcttttgaaaatgatgagcggaaagatagcgtttatgctttggaagtgaatgcggct

SEQ ID NO: 1194 - DNA (genomic), 648 bp, Helicobacter pylori; double-stranded, circular
  misc_feature (B) LOCATION 1...648
  hypothetical: NO
  anti-sense: NO
ataatgggcgttggagagaaagaagagaaaaaagaaagccaaaaggtggcggttatcactggggcgagttctgggattgggttagagtgcgtgttaatgctgttaaatcaaggctataaggtctatgcgctctctaggcacgcgactttgtgcgtagcgttaaaccatgcgttatgcgagtgcgttgatattgatgtgagcgattctaacgctttaaaggaagtgtttttaaacatcagcgctaaagaagatcattgcgacgttttgatcaattccgccggttatggggtgtttgggagcgtggaagacacgcccattgaagaggttaaaaagcaatttagcgtgaattttttcgccctttgtgaagtggtgcaactttgtttgcccttattaaaaaacaagccttattctaagattttcaatctttcttccatagcggggcgtgtgagcatgctctttttaggccattacagcgcgagtaagcatgccttagaggcttatagcgatgccttgcgtttagagcttaagccctttaacgttcaagtgtgtttgattgagccaggcccggtgaaaagcaattgggaaaaaaccgcttttgaaaatgatgagcggaaagatagcgtttatgctttggaagtgaatgcggct

SEQ ID NO: 1195 - DNA (genomic), 681 bp, Helicobacter pylori; double-stranded, circular
  misc_feature (B) LOCATION 1...681
  hypothetical: NO
  anti-sense: NO
atgggcgttggagagaaagaagagaaaaaagaaagccaaaaggtggcggttatcactggggcgagttctgggattgggttagagtgcgtgttaatgctgttaaatcaaggctataaggtctatgcgctctctaggcacgcgactttgtgcgtagcgttaaaccatgcgttatgcgagtgcgttgatattgatgtgagcgattctaacgctttaaaggaagtgtttttaaacatcagcgctaaagaagatcattgcgacgttttgatcaattccgccggttatggggtgtttgggagcgtggaagacacgcccattgaagaggttaaaaagcaatttagcgtgaattttttcgccctttgtgaagtggtgcaactttgtttgcccttattaaaaaacaagccttattctaagattttcaatctttcttccatagcggggcgtgtgagcatgctctttttaggccattacagcgcgagtaagcatgccttagaggcttatagcgatgccttgcgtttagagcttaagccctttaacgttcaagtgtgtttgattgagccaggcccggtgaaaagcaattgggaaaaaaccgcttttgaaaatgatgagcggaaagatagcgtttatgctttggaagtgaatgcggctaaaacttttattctggcgtgtatcaaaaagccttaa

SEQ ID NO: 1196 - DNA (genomic), 804 bp, Helicobacter pylori; double-stranded, circular
  misc_feature (B) LOCATION 1...804
  hypothetical: NO
  anti-sense: NO
atgggcgttggagagaaagaagagaaaaaagaaagccaaaaggtggcggttatcactggggcgagttctgggattgggttagagtgcgtgttaatgctgttaaatcaaggctataaggtctatgcgctctctaggcacgcgactttgtgcgtagcgttaaaccatgcgttatgcgagtgcgttgatattgatgtgagcgattctaacgctttaaaggaagtgtttttaaacatcagcgctaaagaagatcattgcgacgttttgatcaattccgccggttatggggtgtttgggagcgtggaagacacgcccattgaagaggttaaaaagcaatttagcgtgaattttttcgccctttgtgaagtggtgcaactttgtttgcccttattaaaaaacaagccttattctaagattttcaatctttcttccatagcggggcgtgtgagcatgctctttttaggccattacagcgcgagtaagcatgccttagaggcttatagcgatgccttgcgtttagagcttaagccctttaacgttcaagtgtgtttgattgagccaggcccggtgaaaagcaattgggaaaaaaccgcttttgaaaatgatgagcggaaagatagcgtttatgctttggaagtgaatgcggctaaaagcttttattctggcgtgtatcaaaaagccttaaacgctaaagaagtggcgcaaaaaatcgtttttcttagcatgagtcacaaaatcaaggctcgctatttgatcggcttaaaaacccaattgttgttagcgttgtatcaaatcctcccgagtagc

SEQ ID NO: 1197 - DNA (genomic), 357 bp, Helicobacter pylori; double-stranded, circular
  misc_feature (B) LOCATION 1...357
  hypothetical: NO
  anti-sense: NO
atgttaatgcattctatactcattcttttagtcatcataataacgacttatttcacgcgcatttggccttttatggtgtttaattctaaaaacccgcccaacgactttgtgcgttatttgggtagggctttgtcatgttcagtgataggcatgctcgtggtttattgctttaaagacattcatgttttaaaacccccttatgggatcaatgaaatcaccgcttttttatccgttatccttttacaccgcatttttaaggtgtttgttttaagcatcacgctccctaccattctttatatggttttagtccaaagccatgcgttagaaaaggctttttttaatattcacgtttcctga

SEQ ID NO: 1198 - DNA (genomic), 240 bp, Helicobacter pylori; double-stranded, circular
  misc_feature (B) LOCATION 1...240
  hypothetical: NO
  anti-sense: NO
ttgattatacctaaagaatgcttaattgcacttatggggtgcggctctgtttttatcaaagataaacgctcaaagccttacttgatgttctttattttcttaaaaaacaagattttggttattttgattttaataaaagttaataaggctcattttcttaaagggatagggggtattttgcgctttaacacccctacaacccctcaaactaaatcccctaatctcttaagatcgcattag

SEQ ID NO: 1199 - DNA (genomic), 240 bp, Helicobacter pylori; double-stranded, circular
  misc_feature (B) LOCATION 1...240
  hypothetical: NO
  anti-sense: NO
tttttgattatacctaaagaatgcttaattgcacttatggggtgcggctctgtttttatcaaagataaacgctcaaagccttacttgatgttctttattttcttaaaaaacaagattttggttattttgattttaataaaagttaataaggctcattttcttaaagggatagggggtattttgcgctttaacacccctacaacccctcaaactaaatcccctaatctcttaagatcgcat

SEQ ID NO: 1200 - DNA (genomic), 240 bp, Helicobacter pylori; double-stranded, circular
  misc_feature (B) LOCATION 1...240
  hypothetical: NO
  anti-sense: NO
atgaaaaatttaaggcattttagaaagcttatcgcctttttaggtttttcacctcttttattacaagcggatatgactaccttttttaattccattgaacaacagctcactagccctacggctaaaggcattttaatggttatttttttaggacttgctatttttatatggaaaaacttagatagatggaaagaaattttaatgaccgtgcttgctttaaaagragtccccatgcaatmw

SEQ ID NO: 1201 - DNA (genomic), 495 bp, Helicobacter pylori; double-stranded, circular
  misc_feature (B) LOCATION 1...495
  hypothetical: NO
  anti-sense: NO
atgaaaaatttaaggcattttagaaagcttatcgcctttttaggtttttcacctcttttattacaagcggatatgactaccttttttaattccattgaacaacagctcactagccctacggctaaaggcattttaatggttatttttttaggacttgctatttttatatggaaaaacttagatagatggaaagaaattttaatgaccgtgcttgctttaaaagaagtccccatgcaattagttgctatttcagtttctaatctcaaagaaatcagctccaaagaaaaatttctttggctcaatgctaagagttttttactctcaggatttgtgccttttattatgataccttggctagatatattgaactcttttgtgctttatgtgtgctttctcttaatttttagcatagcggagttctttgatgaagatataagtgacattttaatcgctcattccaaaattaaaaccaaagctaattcattttacgcttaa

SEQ ID NO: 1202 - DNA (genomic), 510 bp, Helicobacter pylori; double-stranded, circular
  misc_feature (B) LOCATION 1...510
  hypothetical: NO
  anti-sense: NO
aaaagaaaggaacattgcatgaaaaatttaaggcattttagaaagcttatcgcctttttaggtttttcacctcttttattacaagcggatatgactaccttttttaattccattgaacaacagctcactagccctacggctaaaggcattttaatggttatttttttaggacttgctatttttatatggaaaaacttagatagatggaaagaaattttaatgaccgtgcttgctttaaaagaagtccccatgcaattagttgctatttcagtttctaatctcaaagaaatcagctccaaagaaaaatttctttggctcaatgctaagagttttttactctcaggatttgtgccttttattatgataccttggctagatatattgaactcttttgtgctttatgtgtgctttctcttaatttttagcatagcggagttctttgatgaagatataagtgacattttaatcgctcattccaaaattaaaaccaaagctaattcattttacgct

SEQ ID NO: 1203 - DNA (genomic), 384 bp, Helicobacter pylori; double-stranded, circular
  misc_feature (B) LOCATION 1...384
  hypothetical: NO
  anti-sense: NO
gtgatggctcaatccttgcttgtycatgccttttttgccgccttgctcgccctagcctttatgatcaatctttacaccctttttaaagaaaagaatttcatccaattgaaccggaaaatctatcttgtcatgccagcgatttatattcttttaagcatcgctcttttgagtggggtttttatttgggcgatgcaacaatttgaattttcttttagcgctgttgtcatgcttttggggttgttgttgatgctcattgcagaaatcaaacgccataaaagcgtgaaattcgctatcactaaaaaagaaaggatgaaagcctatatcaaaaaagctaaaatcctgtattttttagaaacgattcttatcatcgtgttaatgggcatt

SEQ ID NO: 1204 - DNA (genomic), 432 bp, Helicobacter pylori; double-stranded, circular
  misc_feature (B) LOCATION 1...432
  hypothetical: NO
  anti-sense: NO
atgttagagatgagtttgcaagcattaaatacacaagattcttctgtgatggctcaatccttgcttgtccatgccttttttgccgccttgctcgccctagcctttatgatcaatctttacaccctttttaaagaaaagaatttcatccaattgaaccggaaaatctatcttgtcatgccagcgatttatattcttttaagcatcgctcttttgagtggggtttttatttgggcgatgcaacaatttgaattttcttttagcgctgttgtcatgcttttggggttgttgttgatgctcattgcagaaatcaaacgccataaaagcgtgaaattcgctatcactaaaaaagaaaggatgaaagcctatatcaaaaaagctaaaatcctgtattttttagaaacgattcttatcatcgtgttaatgggcatttga

SEQ ID NO: 1205 - DNA (genomic), 447 bp, Helicobacter pylori; double-stranded, circular
  misc_feature (B) LOCATION 1...447
  hypothetical: NO
  anti-sense: NO
atcgttagaaagaagttaatgttagagatgagtttgcaagcattaaatacacaagattcttctgtgatggctcaatccttgcttgtccatgccttttttgccgccttgctcgccctagcctttatgatcaatctttacaccctttttaaagaaaagaatttcatccaattgaaccggaaaatctatcttgtcatgccagcgatttatattcttttaagcatcgctcttttgagtggggtttttatttgggcgatgcaacaatttgaattttcttttagcgctgttgtcatgcttttggggttgttgttgatgctcattgcagaaatcaaacgccataaaagcgtgaaattcgctatcactaaaaaagaaaggatgaaagcctatatcaaaaaagctaaaatcctgtattttttagaaacgattcttatcatcgtgttaatgggcatt

SEQ ID NO: 1206 - DNA (genomic), 339 bp, Helicobacter pylori; double-stranded, circular
  misc_feature (B) LOCATION 1...339
  hypothetical: NO
  anti-sense: NO
atggattggggtcgggtcattcatgtgctgttcagccttatttctttaacgaccattgcagggtttttgtatgagcctaatacggtggtgttatttgtagcgttagctttaaaccttatttccgttacgctcaaaattggggtgtgcaagcgtttcgcttcagagctgttggccagctctttagccaccgtgttgcacctcataccggcgtttgtgtttttacagattttaaacaatttggttacagcttacatgctcatgattggggctttgattagcaacgcttttagcctcatctttttgttgattgaaagcgttgtaacgagcgaaacagactaa

SEQ ID NO: 1207 - DNA (genomic), 579 bp, Helicobacter pylori; double-stranded, circular
  misc_feature (B) LOCATION 1...579
  hypothetical: NO
  anti-sense: NO
ttgttattagcgactgttggggcgttactgggtttaatgaattttcaagccgtagtgcagtataaatgggtattttttatcgctgaaattgtggcgttttttggtttgatgttttctaaatccaaacccggtttgaatttgttcatgctgtttgctttcacttcattatcaggggttactttagtgcctttgttgggtatggtgattgcaaaagctggtttaggagcggtttggcaagctttgggcatgacaactattgtttttggtttgatgagcgtgtatgcccttaagactaaaaacgatctagcgaatatgggtaaaatgctctttatcgctttgattgtggtggtggtgtgttcgctcattaacttgtttttgggtagccccatgttccaagtcgtcattgcgggagcgagtgcgattttattcagtctttatatcgcttatgacactcaaaacatcgttaaaggcatgtatgatagccccattgatgcggcggtgagcttgtatttagactttttgaatgtcttcatttctatcttgcaaatcattggtattttttcagacagagacaaatag

SEQ ID NO: 1208 - DNA (genomic), 579 bp, Helicobacter pylori; double-stranded, circular; identical to SEQ ID NO: 1207
  misc_feature (B) LOCATION 1...579
  hypothetical: NO
  anti-sense: NO

SEQ ID NO: 1209 - DNA (genomic), 645 bp, Helicobacter pylori; double-stranded, circular
  misc_feature (B) LOCATION 1...645
  hypothetical: NO
  anti-sense: NO
gatcctgtgttgcatgaaagcgagctggtaagttttgttaaaacgacttataagttctttgcgggcagtttgttattagcgactgttggggcgttactgggtttaatgaattttcaagccgtagtgcagtataaatgggtattttttatcgctgaaattgtggcgttttttggtttgatgttttctaaatccaaacccggtttgaatttgttcatgctgtttgctttcacttcattatcaggggttactttagtgcctttgttgggtatggtgattgcaaaagctggtttaggagcggtttggcaagctttgggcatgacaactattgtttttggtttgatgagcgtgtatgcccttaagactaaaaacgatctagcgaatatgggtaaaatgctctttatcgctttgattgtggtggtggtgtgttcgctcattaacttgtttttgggtagccccatgttccaagtcgtcattgcgggagcgagtgcgattttattcagtctttatatcgcttatgacactcaaaacatcgttaaaggcatgtatgatagccccattgatgcggcggtgagcttgtatttagactttttgaatgtcttcatttctatcttgcaaatcattggtattttttcagacagagacaaa

SEQ ID NO: 1210 - DNA (genomic), 642 bp, Helicobacter pylori; double-stranded, circular
  misc_feature (B) LOCATION 1...642
  hypothetical: NO
  anti-sense: NO
cctgtgttgcatgaaagcgagctggtaagttttgttaaaacgacttataagttctttgcgggcagtttgttattagcgactgttggggcgttactgggtttaatgaattttcaagccgtagtgcagtataaatgggtattttttatcgctgaaattgtggcgttttttggtttgatgttttctaaatccaaacccggtttgaatttgttcatgctgtttgctttcacttcattatcaggggttactttagtgcctttgttgggtatggtgattgcaaaagctggtttaggagcggtttggcaagctttgggcatgacaactattgtttttggtttgatgagcgtgtatgcccttaagactaaaaacgatctagcgaatatgggtaaaatgctctttatcgctttgattgtggtggtggtgtgttcgctcattaacttgtttttgggtagccccatgttccaagtcgtcattgcgggagcgagtgcgattttattcagtctttatatcgcttatgacactcaaaacatcgttaaaggcatgtatgatagccccattgatgcggcggtgagcttgtatttagactttttgaatgtcttcatttctatcttgcaaatcattggtattttttcagacagagacaaa

SEQ ID NO: 1211 - DNA (genomic), 195 bp, Helicobacter pylori; double-stranded, circular
  misc_feature (B) LOCATION 1...195
  hypothetical: NO
  anti-sense: NO
tttttgatacgcatgcgccgaatttggggagcattgagcaaggaggtttcaggatttcatttcatcattatccccaaaaatttggattttaaaatggtgttaggattgttgccttacgctctttctttagcactagtaggcacgatagaaagtttattgacggctaaacctttagatgttattttaaaagacgcg

SEQ ID NO: 1212 - DNA (genomic), 216 bp, Helicobacter pylori; double-stranded, circular
  misc_feature (B) LOCATION 1...216
  hypothetical: NO
  anti-sense: NO
gtgagtgcgatcgctttaatttttgatacgcatgcgccgaatttggggagcattgagcaaggggtttcaggatttcatttcatcattatccccaaaaatttggattttaaaatggtgttaggattgttgccttacgctctttctttagcactagtaggcacgatagaaagtttattgacggctaaacctttagatgttattttaaaagacgcgtga

SEQ ID NO: 1213 - DNA (genomic), 279 bp, Helicobacter pylori; double-stranded, circular
  misc_feature (B) LOCATION 1...279
  hypothetical: NO
  anti-sense: NO
gtggcactcattttggtgggcgtggttaaaaattatgggcttgaatacgcgggcgtggcgactcttatggcaggaatattgcaaattcttttaggctatttgaaaatagggaatcttttaaaatttatccctcaatcagtgatgtatggctttgtgaacgcgctaggcattttgcttttaacagagcaattcaaattccttcaaaaccaaaatttaggggtgtttgtcttactcgctatagggatattgattattatcttttgccctctaatgcactaa

SEQ ID NO: 1214 - DNA (genomic), 291 bp, Helicobacter pylori; double-stranded, circular
  misc_feature (B) LOCATION 1...291
  hypothetical: NO
  anti-sense: NO
cgcaggaccggctcagtggcactcattttggtgggcgtggttaaaaattatgggcttgaatacgcgggcgtggcgactcttatggcaggaatattgcaaattcttttaggctatttgaaaatagggaatcttttaaaatttatccctcaatcagtgatgtatggctttgtgaacgcgctaggcattttgcttttaacagagcaattcaaattccttcaaaaccaaaatttaggggtgtttgtcttactcgctatagggatattgattattatcttttgccctctaatgcac

SEQ ID NO: 1215 - DNA (genomic), 753 bp, Helicobacter pylori; double-stranded, circular
  misc_feature (B) LOCATION 1...753
  hypothetical: NO
  anti-sense: NO
atgttggaaaagatacaaaaagaatggctgagcaacattcaaaaagatttgttgtctggttttgtggtggggctttctgtgatcccagagacggccggttttgcgattatggtgggtttagatgtgggcgtggcgttttatacgaccttttacatggcttttgtgttatctctttttggggctagaaaggcgatgattagcgcagcggccggctcagtggcactcattttggtgggcgtggttaaaaattatgggcttgaatacgcgggcgtggcgactcttatggcaggaatattgcaaattcttttaggctatttgaaaatagggaatcttttaaaatttatccctcaatcagtgatgtatggctttgtgaacgcgctaggcattttgcttttaacagagcaattcaaattccttcaaaaccaaaatttaggggtgtttgtcttactcgctatagggatattgattatttatcttttccctctaatcactaaaaaaatcccctctaatctgatttgtatccttgcggtgagtgcgatcgctttaatttttgatacgcatgcgccgaatttggggagcattgagcaaggggtttcaggatttcatttcatcattatccccaaaaatttggattttaaaatggtgttaggattgttgccttacgctctttctttagcactagtaggcacgatagaaagtttattgacggctaaaactttagatgttattttaaaagacgcgcgtgagcgataa

SEQ ID NO: 1216 - DNA (genomic), 408 bp, Helicobacter pylori; double-stranded, circular
  misc_feature (B) LOCATION 1...408
  hypothetical: NO
  anti-sense: NO
atgatcttttacaccaccattaaagagcctttaaaaaacctccaataccgctatgcgcaattttttggcaagatcaagccttgttcgttcttagagtctctaaaatcatgcttttttcaaacctattctttttctttaacgcgaaaacaagatttcaaatcgcatttgcgccatttcattgacagcgcccattccaacgccttagtgggtaatttgtatcgagcgttattcataggggatagcttgaataaagacttaagagacagggctaacgcgctagggatcaaccacttactggccattagcgggtttcatttagggattttgagcgcgagcgtgtattttcttttctctcttttttatacccccttacaaaaacgctatttcccttacaggaacgctttttwa

SEQ ID NO: 1217 - DNA (genomic), 1314 bp, Helicobacter pylori; double-stranded, circular
  misc_feature (B) LOCATION 1...1314
  hypothetical: NO
  anti-sense: NO
ttgaaagataaaacctttcagggggcgtttgaacttcttacgacccccaaagaatactcatggtgtggggttgttttaagccttttgttggcgattaacctttatttagaatacttgaatcaccaaaagcttgatttttcaaaacctacaagcttgaacgctcaaatcttattacaataccctaaaacgaaagatcaaaaaacctattttgtcttaaaactccaatctaagggcatgatcttttacaccaccattaaagagcctttaaaaaacctccaataccgctatgcgcaattttttggcaagatcaagccttgttcgttcttagagtctctaaaatcatgcttttttcaaacctattctttttctttaacgcgaaaacaagatttcaaatcgcatttgcgccatttcattgacagcgcccattccaacgccttagtgggtaatttgtatcgagcgttattcataggggatagcttgaataaagacttaagagacagggctaacgcgctagggatcaaccacttactggccattagcgggtttcatttagggattttgagcgcgagcgtgtattttcttttctctcttttttatacccccttacaaaaacgctatttcccttacaggaacgctttttatgatataggggttttggtgtgggtttttttgctggggtatttattgctattagattttttaccctcttttttcagggcgtttttaatgggcttattagggtttttggcatgcttttttggggtaaggattttgagttttaaacttttggttttagcgtgctgtatcgccatagcgttactccctaaattgctttttagcgtggggtttttgctttctgtttgtggggtgtggtatatctttttgtttttaaaacacactcaaattttttttaaagattcttcttttttcaagcgatcgtttcaagcgatcgctttaagcgtgttagtgtttttgaacatgctcattgttgcgcatgcctttttccctatgttttcgccctaccagctctttagcattcctttaggcttgatttttatcgtgtttttccctttgagcttgttcttgcatgcggtgggtttagggtctttattggataatattctaagcatgcctttaaccatccccacgatttcggtttcttcgcctttatggcttttgggggcgcatttgtttttaacgattttaagcgtgcgtttttttaaggtttatttaagcatgaatgttttgagcatgggctttttcttgtattgttgctatcaatatattataatgcctagtttaattgtgggttag

SEQ ID NO: 1218 - DNA (genomic), 1323 bp, Helicobacter pylori; double-stranded, circular
  misc_feature (B) LOCATION 1...1323
  hypothetical: NO
  anti-sense: NO
aatgcccacaacttgaaagataaaacctttcagggggggtttgaacttcttacgacccccaaagaatactcatggtgtggggttgttttaagccttttgttggcgattaacctttatttagaatacttgaatcaccaaaagcttgatttttcaaaacctacaagcttgaacgctcaaatcttattacaataccctaaaacgaaagatcaaaaaacctattttgtcttaaaactccaatctaagggcatgatcttttacaccaccattaaagagcctttaaaaaacctccaataccgctatgcgcaattttttggcaagatcaagccttgttcgttcttagagtctctaaaatcatgcttttttcaaacctattctttttctttaacgcgaaaacaagatttcaaatcgcatttgcgccatttcattgacagcgcccattccaacgccttagtgggtaatttgtatcgagcgttattcataggggatagcttgaataaagacttaagagacagggctaacgcgctagggatcaaccacttactggccattagcgggtttcatttagggattttgagcgcgagcgtgtattttcttttctctcttttttatacccccttacaaaaacgctatttcccttacaggaacgctttttatgatataggggttttggtgtgggtttttttgctggggtatttattgctattagattttttaccctcttttttcagggcgtttttaatgggcttattagggtttttggcatgcttttttggggtaaggattttgagttttaaacttttggttttagcgtgctgtatcgccatagcgttactccctaaattgctttttagcgtggggtttttgctttctgtttgtggggtgtggtatatctttttgtttttaaaacacactcaaattttttttaaagattcttcttttttcaagcgatcgtttcaagcgatcgctttaagcgtgttagtgtttttgaacatgctcattgttgcgcatgcctttttccctatgttttcgccctaccagctctttagcattcctttaggcttgatttttactgtgtttttccctttgagcttgttcttgcatgcggtgggtttagggtctttattggataatattctaagcatgcctttaaccatccccacgatttcggtttcttcgcctttatggcttttgggggcgcatttgtttttaacgattttaagcgtgcgtttttttaaggtttatttaagcatgaatgttttgagcatgggctttttcttgtattgttgctatcaatatattataatgcctagtttaattgtgggt

SEQ ID NO: 1219 - DNA (genomic), 747 bp, Helicobacter pylori; double-stranded, circular
  misc_feature (B) LOCATION 1...747
  hypothetical: NO
  anti-sense: NO
atgcgtttttattttaaattcctttggcttttagggatttttcttattttttattttttagacattaaaggcagctcttcttatatcagcgaccgggttaaaagcgccttgatgagcgcgaaaaacagcttactagacaacgttcaagcgtatttttttcaagcccaaaacattaaggaatttcaaaaagaacgcttgattttagaagctttaaaactagaaaacgctgatttgaaagagcgtttgaatagtatttatcctttagaaaatccaaaaatgacttatacccctactttcatgacttcattcatcaatttagaagacacacacagcgtttctctcaaccctattgtgaatttagaagaaaacaagatttatggccttgtctctcacaaccaagccataggcattgccgtgctagaaaaagggcgcttgaacgggtttttgaacgcccacaagcggtgtgcttatagcgtgatgataggccaaaatcaagtcttaggctttatagggactaatttcaagcaagaattagtcgtggatttcattgtcccaagcgctgaaatcaacataggcgatcaagtgctaacgagcgggctagatgggatttttggagcgggggtgtttgtgggtgaagtttcaagcgttgaagatcattacacttataaaagcgcggtgttgaaaaacgcttttttaagcgaagccaaacttttaaggcatgtgtttttaagcggtgtgaaaaactag

SEQ ID NO: 1220 - DNA (genomic), 747 bp, Helicobacter pylori; double-stranded, circular; identical to SEQ ID NO: 1219
  misc_feature (B) LOCATION 1...747
  hypothetical: NO
  anti-sense: NO

SEQ ID NO: 1221 - DNA (genomic), 747 bp, Helicobacter pylori; double-stranded, circular
  misc_feature (B) LOCATION 1...747
  hypothetical: NO
  anti-sense: NO
tgcatgcgtttttattttaaattcctttggcttttagggatttttcttattttttattttttagacattaaaggcagctcttcttatatcagcgaccgggttaaaagcgccttgatgagcgcgaaaaacagcttactagacaacgttcaagcgtatttttttcaagcccaaaacattaaggaatttcaaaaagaacgcttgattttagaagctttaaaactagaaaacgctgatttgaaagagcgtttgaatagtatttatcctttagaaaatccaaaaatgacttatacccctactttcatgacttcattcatcaatttagaagacacacacagcgtttctctcaaccctattgtgaatttagaagaaaacaagatttatggccttgtctctcacaaccaagccataggcattgccgtgctagaaaaagggcgcttgaacgggtttttgaacgcccacaagcggtgtgcttatagcgtgatgataggccaaaatcaagtcttaggctttatagggactaatttcaagcaagaattagtcgtggatttcattgtcccaagcgctgaaatcaacataggcgatcaagtgctaacgagcgggctagatgggatttttggagcgggggtgtttgtgggtgaagtttcaagcgttgaagatcattacacttataaaagcgcggtgttgaaaaacgcttttttaagcgaagccaaacttttaaggcatgtgtttttaagcggtgtgaaaaac

SEQ ID NO: 1222 - DNA (genomic), 243 bp, Helicobacter pylori; double-stranded, circular
  misc_feature (B) LOCATION 1...243
  hypothetical: NO
  anti-sense: NO
ttgcctattattttayctgtaatcgtgatgatgtttttttccaaaatcgttggcgattttattgaaaagcattatcgcgtcaaaactttagcctttgtgtttttgctcgttgtgggcgtgtttttgtttttagaaggcttgcatttacacatcaataaaaactatttgtatgcgggtattggttttgccttgctcatagaatgcttgratattttcatagaaaagaaaatgaaaaaaagttaa

SEQ ID NO: 1223 - DNA (genomic), 729 bp, Helicobacter pylori; double-stranded, circular
  misc_feature (B) LOCATION 1...729
  hypothetical: NO
  anti-sense: NO
atggaatttttatcctcactcttagacgctctttctacaccgcatggcatagtctccttggctacgctcacgcttttagagatcgttctagggattgataatatcatttttatcacggtgatggtttataaactccccaaacaccagcaaaataaggtcatgattttaggcttgggcttagcgatgatcactcgtatagggcttttagggagcttgtttttcatcagccatttgcaaaagcctttattcgctatagcgggcatgagcttttcatggcgtgatgtggtgctgcttttagggggggcgtttttggcttttaaggcgttagtggaattaaaagagcagatctatcctaaagaaaaacgccaagaaaaagcgtttggctttttcatcactttaatagaaatcatgtttttagacattgttttttctttggactccgtgatcacggctattgggatcgctaaacacttagaagtcatggcgcttgctattattttatctgtaatcgtgatgatgtttttttccaaaatcgttggcgattttattgaaaagcattatcgcgtcaaaactttagcctttgtgtttttgctcgttgtgggcgtgtttttgtttttagaaggcttgcatttacacatcaataaaaactatttgtatgcgggtattggttttgccttgctcatagaatgcttgaatattttcatagaaaagaaaatgaaaaaaagttaa

SEQ ID NO: 1224 - DNA (genomic), 732 bp, Helicobacter pylori; double-stranded, circular
  misc_feature (B) LOCATION 1...732
  hypothetical: NO
  anti-sense: NO
cctttcatggaatttttatcctcactcttagacgctctttctacaccgcatggcatagtctccttggctacgctcacgcttttagagatcgttctagggattgataatatcatttttatcacggtgatggtttataaactccccaaacaccagcaaaataaggtcatgattttaggcttgggcttagcgatgatcactcgtatagggcttttagggagcttgtttttcatcagccatttgcaaaagcctttattcgctatagcgggcatgagcttttcatggcgtgatgtggtgctgcttttagggggggcgtttttggcttttaaggcgttagtggaattaaaagagcagatctatcctaaagaaaaacgccaagaaaaagcgtttggctttttcatcactttaatagaaatcatgtttttagacattgttttttctttggactccgtgatcacggctattgggatcgctaaacacttagaagtcatggcgcttgctattattttatctgtaatcgtgatgatgtttttttccaaaatcgttggcgattttattgaaaagcattatcgcgtcaaaactttagcctttgtgtttttgctcgttgtgggcgtgtttttgtttttagaaggcttgcatttacacatcaataaaaactatttgtatgcgggtattggttttgccttgctcatagaatgcttgaatattttcatagaaaagaaaatgaaaaaaagt

SEQ ID NO: 1225 - DNA (genomic), 1164 bp, Helicobacter pylori; double-stranded, circular
  misc_feature (B) LOCATION 1...1164
  hypothetical: NO
  anti-sense: NO
atggggtttttatttgaaaaatcgttaatgggtttttgcgcccactcaatcaaaatcattaaagtcactggcttgattttaagctttttggcggcttttttggttgctgaggacactcatgagccagaagagatcaaggctaaagtggcttatgtgaaaatcccccaattagaagatttggaaaacaccccagtttatatcggtcaaaccataggcgtaacttatgatttattgttgtttgacgctgagtttttggaagccaaaatcaaagacgggtgggataaaacccaaattgagcttttaaataagatgcccaaatggaaaaaggtggaaaaagagcttttcagagcgacttattattacaagattaagggcataagagcgagtatcccgtccttagaagtgagcgcgttttccaataaagacaaatacatcgatcattccatagccccaaaagttgctttgcaggtaacggatttgtccaaaaaccctcgttatgcgaatgtcatggccaaagatttacaagttgtgcaatacaaaacaaaagactatgacgataaaaacaatattttggtgatggaattagcgttcaaagaggctaattgggaagattttcatgtcaaagaagcgatcaaacaggggtttgataacgcctctttaaatcagatcaaggctaaagaagggagcgttttttattattgcgtgttgcctaaaacccttcaaaacctttcttttgattacttttcgctttctaataggcagtttaaaaccttatctttttcagccattcccactcaagacactaccggtattcaaagcgatctcatccctaaaaacaattttttagtcttttctaatgtggcgttgctcgctttgtgcgtgtttttcttggcgttgtttttcatttttgggcgcaaactcatttttttagggcttgggattttgtgcttagggtttgttttgtataaccttttattcacgcaaaaatcagccctattgctcgctcataaaaaaatccgcatcctgcccacgcaaaattccaccattttagggctttctagagatgaaatgcccattaaaatcttaggctcgcatgatgattattacaaaatcctaacgccgcatgaacaaataggatgggtcaaaaaagatgaagtcaaataa

SEQ ID NO: 1226 - DNA (genomic), 1167 bp, Helicobacter pylori; double-stranded, circular
  misc_feature (B) LOCATION 1...1167
  hypothetical: NO
  anti-sense: NO
aaactcatggggtttttatttgaaaaatcgttaatgggtttttgcgcccactcaatcaaaatcattaaagtcactggcttgattttaagctttttggcggcttttttggttgctgaggacactcatgagccagaagagatcaaggctaaagtggcttatgtgaaaatcccccaattagaagatttggaaaacaccccagtttatatcggtcaaaccataggcgtaacttatgatttattgttgtttgacgctgagtttttggaagccaaaatcaaagacgggtgggataaaacccaaattgagcttttaaataagatgcccaaatggaaaaaggtggaaaaagagcttttcagagcgacttattattacaagattaagggcataagagcgagtatcccgtccttagaagtgagcgcgttttccaataaagacaaatacatcgatcattccatagccccaaaagttgctttgcaggtaacggatttgtccaaaaaccctcgttatgcgaatgtcatggccaaagatttacaagttgtgcaatacaaaacaaaagactatgacgataaaaacaatattttggtgatggaattagcgttcaaagaggctaattgggaagattttcatgtcaaagaagcgatcaaacaggggtttgataacgcctctttaaatcagatcaaggctaaagaagggagcgttttttattattgcgtgttgcctaaaacccttcaaaacctttcttttgattacttttcgctttctaataggcagtttaaaaccttatctttttcagccattcccactcaagacactaccggtattcaaagcgatctcatccctaaaaacaattttttagtcttttctaatgtggcgttgctcgctttgtgcgtgtttttcttggcgttgtttttcatttttgggcgcaaactcatttttttagggcttgggattttgtgcttagggtttgttttgtataaccttttattcacgcaaaaatcagccctattgctcgctcataaaaaaatccgcatcctgcccacgcaaaattccaccattttagggctttctagagatgaaatgcccattaaaatcttaggctcgcatgatgattattacaaaatcctaacgccgcatgaacaaataggatgggtcaaaaaagatgaagtcaaa

SEQ ID NO: 1227 - DNA (genomic), 573 bp, Helicobacter pylori; double-stranded, circular
  misc_feature (B) LOCATION 1...573
  hypothetical: NO
  anti-sense: NO
aaattcgttttgcgttcaatttcaaggataaagatgctttcagtgtatgaaaaagggaatgccctagacaaaagggtgcttgaagaatggcttttaagcgaagacattttaatggaaaacgccgctatggctttagaaagggcggttttacaaaacgcttctttgggcgctaaggtcattattctttgtgggagtggggataatggaggtgatggctatactctagccaggcgtttagtggggcgttttaaaacgctggtctttgaaatgaaattagcaaaaagccccatgtgccaattgcaaaaagaaagggctaaaaaagtaggggtagtcatcaaagcatgggaagaaaagaatgaagatttagaatgcgatgtgttagtagattgcgtggtagggagcgcttttaagggcggattagagccgtttttagattttgaaagcctttctcaaaaagcacgctttaaaatcgcttgcgacattcctagcgggatagattctaaaggcagggtggataagaggcgtttaaggcggatacgactatcagcatgggcgctatcaagtcatgcttac

SEQ ID NO: 1228 - DNA (genomic), 684 bp, Helicobacter pylori; double-stranded, circular
  misc_feature (B) LOCATION 1...684
  hypothetical: NO
  anti-sense: NO
gtgcttttgggcaagcatagtggggcggggttgttgagcgctttawgcgcgttaagttttggatctggggtggtgagtatccaagcgttagagtgcgagataacttctaataacaagcctttagaattggttttttgtgaaaatttccctaaaaagctcagcgcgttcgctcttggcatggggttagaaaatattccaaaggattttaagaagtggcttgaattagccccatgcgttttagatgcgggcgttttttatcataaagaagtgttacaagccttagaaaaagaagtgatcttaacccctcaccctaaagagtttttatcgttattgaaatcagtggggatcaatataagcatgctagaattactagacaataaactagaaatcgcaagggatttttctcaaaaataccccaaggtggttttgcttttaaagggggctaataccctaatcgctcatcaagggcgggtttttatcaacaatttagggagcgtggctttrgccaaagcaggcagtggcgatgtgttagcggggctgattgtaagcctactttctcaaaactacacgcctttagrcgccgcsattaacgcaagtttggcgcacgccctagcgggtttaraatttaagaatmattamgctttaacgcccstagatttgatagaaaagrtcaaacgactataa

SEQ ID NO: 1229 - DNA (genomic), 759 bp, Helicobacter pylori; double-stranded, circular
  misc_feature (B) LOCATION 1...759
  hypothetical: NO
  anti-sense: NO
ttgcgttcaatttcaaggataaagatgctttcagtgtatgaaaaagggaatgccctagacaaaagggtgcttgaagaatggcttttaagcgaagacattttaatggaaaacgccgctatggctttagaaagggcggttttacaaaacgcttctttgggcgctaaggtcattattctttgtgggagtggggataatggaggtgatggctatactctagccaggcgtttagtggggcgttttaaaacgctggtctttgaaatgaaattagcaaaaagccccatgtgccaattgcaaaaagaaagggctaaaaaagtaggggtagtcatcaaagcatgggaagaaaagaatgaagatttagaatgcgatgtgttagtagattgcgtggtagggagcgcttttaagggcggattagagccgtttttagattttgaaagcctttctcaaaaagcacgctttaaaatcgcttgcgacattcctagcgggatagattctaaaggcagggtggataagagggcgtttaargscggataccgactatcagcatgggcgctattcaagtcatgcttactaagcrataarrctaaaractatatarrrraattgaaartrrrrcatttarrrgtttttaatcaaatttatgagatcccaacaracacttttttactmgaaaaaarcgatttgaarctgcccttaagggatagaaagaaacgctcacaaaggcgattacgggcatgcgcatgtgcttttgggcaagcatag

SEQ ID NO: 1230 - DNA (genomic), 906 bp, Helicobacter pylori; double-stranded, circular
  misc_feature (B) LOCATION 1...906
  hypothetical: NO
  anti-sense: NO
gaggcgtttaaggcggatacgactatcagcatgggcgctatcaagtcatgcttactaagcgataaggctaaagactatataggggaattgaaagtggggcatttaggggtttttaatcaaatttatgagatcccaacagacacttttttactagaaaaaagcgatttgaaactgcccttaagggatagaaaaaacgctcacaaaggcgattacgggcatgcgcatgtgcttttgggcaagcatagtggggcggggttgttgagcgctttaagcgcgttaagttttggatctggggtggtgagtatccaagcgttagagtgcgagataacttctaataacaagcctttagaattggttttttgtgaaaatttccctaaaaagctcagcgcgttcgctcttggcatggggttagaaaatattccaaaggattttaagaagtggcttgaattagccccatgcgttttagatgcgggcgttttttatcataaagaagtgttacaagccttagaaaaagaagtgatcttaacccctcaccctaaagagtttttatcgttattgaaatcagtggggatcaatataagcatgctagaattactagacaataaactagaaatcgcaagggatttttctcaaaaataccccaaggtggttttgcttttaaagggggctaataccctaatcgctcatcaagggcgggtttttatcaacaatttagggagcgtggctttagccaaagcaggcagtggcgatgtgttagcggggctgattgtaagcctactttctcaaaactacacgcctttagacgccgccattaacgcaagtttggcgcacgccctagcgggtttagaatttaagaatcattacgctttaacgcccctagatttgatagaaaagatcaaacgacta

SEQ ID NO: 1231 - DNA (genomic), 1419 bp, Helicobacter pylori; double-stranded, circular
  misc_feature (B) LOCATION 1...1419
  hypothetical: NO
  anti-sense: NO
ttgcgttcaatttcaaggataaagatgctttcagtgtatgaaaaagggaatgccctagacaaaagggtgcttgaagaatggcttttaagcgaagacattttaatggaaaacgccgctatggctttagaaagggcggttttacaaaacgcttctttgggcgctaaggtcattattctttgtgggagtggggataatggaggtgatggctatactctagccaggcgtttagtggggcgttttaaaacgctggtctttgaaatgaaattagcaaaaagccccatgtgccaattgcaaaaagaaagggctaaaaaagtaggggtagtcatcaaagcatgggaagaaaagaatgaagatttagaatgcgatgtgttagtagattgcgtggtagggagcgcttttaagggcggattagagccgtttttagattttgaaagcctttctcaaaaagcacgctttaaaatcgcttgcgacattcctagcgggatagattctaaaggcagggtggataagagggcgtttaaggcggatacgactatcagcatgggcgctatcaagtcatgcttactaagcgataaggctaaagactatataggggaattgaaagtggggcatttaggggtttttaatcaaatttatgagatcccaacagacacttttttactagaaaaaagcgatttgaaactgcccttaagggatagaaaaaacgctcacaaaggcgattacgggcatgcgcatgtgcttttgggcaagcatagtggggcggggttgttgagcgctttaagcgcgttaagttttggatctggggtggtgagtatccaagcgttagagtgcgagataacttctaataacaagcctttagaattggttttttgtgaaaatttccctaaaaagctcagcgcgttcgctcttggcatggggttagaaaatattccaaaggattttaagaagtggcttgaattagccccatgcgttttagatgcgggcgttttttatcataaagaagtgttacaagccttagaaaaagaagtgatcttaacccctcaccctaaagagtttttatcgttattgaaatcagtggggatcaatataagcatgctagaattactagacaataaactagaaatcgcaagggatttttctcaaaaataccccaaggtggttttgcttttaaagggggctaataccctaatcgctcatcaagggcgggtttttatcaacaatttagggagcgtggctttagccaaagcaggcagtggcgatgtgttagcggggctgattgtaagcctactttctcaaaactacacgcctttagacgccgccattaacgcaagtttggcgcacgccctagcgggtttagaatttaagaatcattacgctttaacgcccctagatttgatagaaaagatcaaacgactataa

SEQ ID NO: 1232 - DNA (genomic), 366 bp, Helicobacter pylori; double-stranded, circular
  misc_feature (B) LOCATION 1...366
  hypothetical: NO
  anti-sense: NO
gtgtttgtagggctttatcatggggcaagcatctttgatttaaaatttgaagtctatcttactatgctaatctctttaatgccctttgtggctacgatttatatcaatttcccaaaaaccacagaaacttcgcatggctatgcgagatgggctaatgttaaagatatagaatgctttaaaatttttagcaaagagggcttttgtaaagtggtgcatagattaggggtgcaatttgataatggctttattctaggtaaatttggttttccaaagcttagaaatgtgtgctatgacaagcccttaggaacgatgattgttgcaccccctggtgcggaaaaactgcatgtgtggctttgccaaatttat

SEQ ID NO: 1233 - DNA (genomic), 2046 bp, Helicobacter pylori; double-stranded, circular
  misc_feature (B) LOCATION 1...2046
  hypothetical: NO
  anti-sense: NO
atgctaatctctttaatgccctttgtggctacgatttatatcaatttcccaaaaaccacagaaacttcgcatggctatgcgagatgggctaatgttaaagatatagaatgctttaaaatttttagcaaagagggcttttgtaaagtggtgcatagattaggggtgcaatttgataatggctttattctaggtaaatttggttttccaaagcttagaaatgtgtgctatgacaagcccttaggaacgatgattgttgcaccccctggtgctggaaaaactgcatgtgtggctttgccaaatttattgactttgcctaatagctgtattatcactgatattaaaggcgaactaagagataagaccgcaggttatagacaaaaattcttaaacaatagaattttaatttttaatccttatggtgatgataacacttgctatttcaatccttttgataaaaggattgttgaaaagatgacctttgcggagcaattaaggcatgttaaagcagtaggcgatggtatttttgtagatgaagaagaccattgggtatctaaagctaaagagctttttgtcttttttgctcttttacaagtagtaaccaaagggcatagctctttttatgatgtctctatcgcaccagctaatgattatgcccccttaatacaccctaaaagcccttattacaagcaactttaccaacacgataaaaagacaggcgaagttatcttagacccacaaactaacgcccctatgaaaaatccccaagctaatgttttaaaactctttttaaatcaagtggctgaccaaaaatacatagatatgaatgatgaaaaaaactatgacccaagagaacctgaacccccttatggaacaaaaggggcgttagatgagattataaggacagatgctaggagttgggcaaacactcctgatgatgaatttgggagcattatgtcttcttttaagcgttttatgtatgtctataaagacccaaaagtgcgtgaagctacttctaaaatgagctttgattatgaagaattaagaacgggcaatatcagtatttacattgtaatcgctcaaattgatataggcacactttcttctttagtaagagcctttttagagagtattgctaaaaaccttatggtcaaagaaagctctaaacctgaagagcgtatttttatcattgctgatgaatttgttagatttggtaagttgcctttcttgttagaaatgccagcactttgtcgctcttataatgttgtccccttattcatcacgcaagattatgctatgattagaaaatactatagcgatgatgatttgaaaatcttaaaaggcgtggtgcattataacattgtctttaagatgaatagtgctgaagatgctgagattgtctctaaggaagtgggcgaatttacaagacgatctaaaaattattctaccgaaaaaggtcaattggtctttggaggtagctcttcttatagccatgagggtagaaacttactcacagcccaagatattatgaatatcaattcagatgaagtcattgttattgttacaggggctaaagctacccccttaaaactcaaagctaattattggttcaaagataaagagcttttaaaaagagctaatttgcctattgatttagaagtagagagacaaagagttgaagagcctatacaacccactacagagattgaaacaacccctaatcaaaacaaagctgacttagaaccaagtaataagggggaaaaagtagagaatgagagcaatgagagaaacactaacgagaataatcccactacaccacaagagcttgaaaattcaaacttaaaagaaagcgagaaagacaatgaaagtcccattaccttagaaaatgctaatgaaaatatagagcaaggaaatcacaatgaaattgatgagattttaaaaaagccactgagtgaaatcagtatggaagagaaaagagccttgtttaagaaaatgcaacaaagcgatgaagaaagcgaacaagaagttacacaaagcacccaaagttaa

SEQ ID NO: 1234 - DNA (genomic), 2139 bp, Helicobacter pylori; double-stranded, circular
  misc_feature (B) LOCATION 1...2139
  hypothetical: NO
  anti-sense: NO
ttgagacaggcttatttcttttctcaaagcgtgtttgtagggctttatcatggggcaagcatctttgatttaaaatttgaagtctatcttactatgctaatctctttaatgccctttgtggctacgatttatatcaatttcccaaaaaccacagaaacttcgcatggctatgcgagatgggctaatgttaaagatatagaatgctttaaaatttttagcaaagagggcttttgtaaagtggtgcatagattaggggtgcaatttgataatggctttattctaggtaaatttggttttccaaagcttagaaatgtgtgctatgacaagcccttaggaacgatgattgttgcaccccctggtgctggaaaaactgcatgtgtggctttgccaaatttattgactttgcctaatagctgtattatcactgatattaaaggcgaactaagagataagaccgcaggttatagacaaaaattcttaaacaatagaattttaatttttaatccttatggtgatgataacacttgctatttcaatccttttgataaaaggattgttgaaaagatgacctttgcggagcaattaaggcatgttaaagcagtaggcgatggtatttttgtagatgaagaagaccattgggtatctaaagctaaagagctttttgtcttttttgctcttttacaagtagtaaccaaagggcatagctctttttatgatgtctctatcgcaccagctaatgattatgcccccttaatacaccctaaaagcccttattacaagcaactttaccaacacgataaaaagacaggcgaagttatcttagacccacaaactaacgcccctatgaaaaatccccaagctaatgttttaaaactctttttaaatcaagtggctgaccaaaaatacatagatatgaatgatgaaaaaaactatgacccaagagaacctgaacccccttatggaacaaaaggggcgttagatgagattataaggacagatgctaggagttgggcaaacactcctgatgatgaatttgggagcattatgtcttcttttaagcgttttatgtatgtctataaagacccaaaagtgcgtgaagctacttctaaaatgagctttgattatgaagaattaagaacgggcaatatcagtatttacattgtaatcgctcaaattgatataggcacactttcttctttagtaagagcctttttagagagtattgctaaaaaccttatggtcaaagaaagctctaaacctgaagagcgtatttttatcattgctgatgaatttgttagatttggtaagttgcctttcttgttagaaatgccagcactttgtcgctcttataatgttgtccccttattcatcacgcaagattatgctatgattagaaaatactatagcgatgatgatttgaaaatcttaaaaggcgtggtgcattataacattgtctttaagatgaatagtgctgaagatgctgagattgtctctaaggaagtgggcgaatttacaagacgatctaaaaattattctaccgaaaaaggtcaattggtctttggaggtagctcttcttatagccatgagggtagaaacttactcacagcccaagatattatgaatatcaattcagatgaagtcattgttattgttacaggggctaaagctacccccttaaaactcaaagctaattattggttcaaagataaagagcttttaaaaagagctaatttgcctattgatttagaagtagagagacaaagagttgaagagcctatacaacccactacagagattgaaacaacccctaatcaaaacaaagctgacttagaaccaagtaataagggggaaaaagtagagaatgagagcaatgagagaaacactaacgagaataatcccactacaccacaagagcttgaaaattcaaacttaaaagaaagcgagaaagacaatgaaagtcccattaccttagaaaatgctaatgaaaatatagagcaaggaaatcacaatgaaattgatgagattttaaaaaagccactgagtgaaatcagtatggaagagaaaagagccttgtttaagaaaatgcaacaaagcgatgaagaaagcgaacaagaagttacacaaagcacccaaagttaa

SEQ ID NO: 1235 - DNA (genomic), 2151 bp, Helicobacter pylori; double-stranded, circular
  misc_feature (B) LOCATION 1...2151
  hypothetical: NO
  anti-sense: NO
tatgccttaaagtcgttgagacaggcttatttcttttctcaaagcgtgtttgtagggctttatcatggggcaagcatctttgatttaaaatttgaagtctatcttactatgctaatctctttaatgccctttgtggctacgatttatatcaatttcccaaaaaccacagaaacttcgcatggctatgcgagatgggctaatgttaaagatatagaatgctttaaaatttttagcaaagagggcttttgtaaagtggtgcatagattaggggtgcaatttgataatggctttattctaggtaaatttggttttccaaagcttagaaatgtgtgctatgacaagcccttaggaacgatgattgttgcaccccctggtgctggaaaaactgcatgtgtggctttgccaaatttattgactttgcctaatagctgtattatcactgatattaaaggcgaactaagagataagaccgcaggttatagacaaaaattcttaaacaatagaattttaatttttaatccttatggtgatgataacacttgctatttcaatccttttgataaaaggattgttgaaaagatgacctttgcggagcaattaaggcatgttaaagcagtaggcgatggtatttttgtagatgaagaagaccattgggtatctaaagctaaagagctttttgtcttttttgctcttttacaagtagtaaccaaagggcatagctctttttatgatgtctctatcgcaccagctaatgattatgcccccttaatacaccctaaaagcccttattacaagcaactttaccaacacgataaaaagacaggcgaagttatcttagacccacaaactaacgcccctatgaaaaatccccaagctaatgttttaaaactctttttaaatcaagtggctgaccaaaaatacatagatatgaatgatgaaaaaaactatgacccaagagaacctgaacccccttatggaacaaaaggggcgttagatgagattataaggacagatgctaggagttgggcaaacactcctgatgatgaatttgggagcattatgtcttcttttaagcgttttatgtatgtctataaagacccaaaagtgcgtgaagctacttctaaaatgagctttgattatgaagaattaagaacgggcaatatcagtatttacattgtaatcgctcaaattgatataggcacactttcttctttagtaagagcctttttagagagtattgctaaaaaccttatggtcaaagaaagctctaaacctgaagagcgtatttttatcattgctgatgaatttgttagatttggtaagttgcctttcttgttagaaatgccagcactttgtcgctcttataatgttgtccccttattcatcacgcaagattatgctatgattagaaaatactatagcgatgatgatttgaaaatcttaaaaggcgtggtgcattataacattgtctttaagatgaatagtgctgaagatgctgagattgtctctaaggaagtgggcgaatttacaagacgatctaaaaattattctaccgaaaaaggtcaattggtctttggaggtagctcttcttatagccatgagggtagaaacttactcacagcccaagatattatgaatatcaattcagatgaagtcattgttattgttacaggggctaaagctacccccttaaaactcaaagctaattattggttcaaagataaagagcttttaaaaagagctaatttgcctattgatttagaagtagagagacaaagagttgaagagcctatacaacccactacagagattgaaacaacccctaatcaaaacaaagctgacttagaaccaagtaataagggggaaaaagtagagaatgagagcaatgagagaaacactaacgagaataatcccactacaccacaagagcttgaaaattcaaacttaaaagaaagcgagaaagacaatgaaagtcccattaccttagaaaatgctaatgaaaatatagagcaaggaaatcacaatgaaattgatgagattttaaaaaagccactgagtgaaatcagtatggaagagaaaagagccttgtttaagaaaatgcaacaaagcgatgaagaaagcgaacaagaagttacacaaagcacccaaagt

SEQ ID NO: 1236 - DNA (genomic), 672 bp, Helicobacter pylori; double-stranded, circular
  misc_feature (B) LOCATION 1...672
  hypothetical: NO
  anti-sense: NO
atggaagaatcaacagcgtttattttggctcttgtggggctattcaccggcattaccgccgggttttttggtattggtgggggggagattgtcgtccctagcgcgatttttgcccattttagttatagccatgcggtgggtatttcgctcatgcagatgcttttttcttcagtggtcggctctatcatcaattacaaaaagggcttgttggatttgaaagaaggctcatttgctgcgcttggagggctaatgggggcgattttagggagctttatcttaaaagtcattaacgataaaattttaatgagcgtgtttgtggtggtggtgtgctacacctttatcaaatacgctttttctagcaacaagaaaccagagcattttgaagaaatgcattttgatttgcatgcgaataacaaaacgcccgaaaaaaagcgcgcaatcccttttgtgtctatggatagaacgcatggggttttgatgctcgccggttttgttaccggcatcttttctatcccgctaggcatgggtggggggattttaatggtgccgtttttaggctattttttgaaatacgattctaaaaaaatcgtgcctttggggctattttttgtggtgttcgcttctttatctggggttatttctctttataatgggaagttcttgatgatataa

SEQ ID NO: 1237 - DNA (genomic), 834 bp, Helicobacter pylori; double-stranded, circular
  misc_feature (B) LOCATION 1...834
  hypothetical: NO
  anti-sense: NO
atggaagaatcaacagcgtttattttggctcttgtggggctattcaccggcattaccgccgggttttttggtattggtgggggggagattgtcgtccctagcgcgatttttgcccattttagttatagccatgcggtgggtatttcgctcatgcagatgcttttttcttcagtggtcggctctatcatcaattacaaaaagggcttgttggatttgaaagaaggctcatttgctgcgcttggagggctaatgggggcgattttagggagctttatcttaaaagtcattaacgataaaattttaatgagcgtgtttgtggtggtggtgtgctacacctttatcaaatacgctttttctagcaacaagaaaccagagcattttgaagaaatgcattttgatttgcatgcgaataacaaaacgcccgaaaaaaagcgcgcaatcccttttgtgtctatggatagaacgcatggggttttgatgctcgccggttttgttaccggcatcttttctatcccgctaggcatgggtggggggattttaatggtgccgtttttaggctattttttgaaatacgattctaaaaaaatcgtgcctttggggctattttttgtggtgttcgcttctttatctggggttatttctctttataatgggaaggttcttgatgatataagcgttcaagccggggtgatcaccggtgttggagcgtttttaggggtgggcattggcattaagctcattgctttggctaatgaaaaggtgcataaaatcttattgctcctcatttatgctttaagcattttagcgactttacacaagctcattatgggttaa

SEQ ID NO: 1238 - DNA (genomic), 1059 bp, Helicobacter pylori; double-stranded, circular
  misc_feature (B) LOCATION 1...1059
  hypothetical: NO
  anti-sense: NO
atggatttcgtagggtttgaagatttaaaatgcaaagacaaagaaaactctcaaaaagtttttgtgatccgtaacgataagttaggcgattttattttagcgattcccgctttaatcgctctcaagcatgcttttttagaaaaaggcgtagaagtgtatttgggcgtggttgtgcctagctataccaccccaatcgctttagaattccctttcattgatgaagtcatcatagaagacaaccatttagccaccaccctcaaaaaccgctccattgacgctcttatctttttattttctaattttaaaaacgccaaactcgctttcagtttgagaaaatccatcccttatatcctagccccaaagaccaaaatctattcttggctttatcaaaagagagtgcgccaaaaccgctctttatgcttaaaaaccgaatacgaatacaatttggacttaatccatgcgttttgtaaagactacgatctccctaacgctcaacttaaaaaaatcgcatggaagcttaaagacaaatccaaagagcgatccatcatcgcttcaaaactcaacgctaatgttgatctattgtggattggcgtgcatatgcatagcggaggcagttcgcccgtattgcccgcttcgcatttcattgagttgattgcaatcttgcatgaaaaattaagttgtgagatcattcttatttgcgggccaggcgagagaaaagccacagaagaactccttaaagaagtccctttcgctcacctctatgatacgagccatagtttagtggatttagccaaattgtgcgcgaatttaagcgtctgtatcgggaacgcttcaggccctttgcatgtgaacgctttatttgacaaccaatctatcgggttttaccctaacgaactcaccgcctctattgccagatggcggcctttcaacgaacaatttttaggcatcaccccgcctaatggctcaaacgatatgggtttgattgacattcaaaaagaaagcgaaaagattatgggatttatcacaaaaaatctttctcatcacatgcaagaaagataa

SEQ ID NO: 1239 - DNA (genomic), 1056 bp, Helicobacter pylori; double-stranded, circular
  misc_feature (B) LOCATION 1...1056
  hypothetical: NO
  anti-sense: NO
atggatttcgtagggtttgaagatttaaaatgcaaagacaaagaaaactctcaaaaagtttttgtgatccgtaacgataagttaggcgattttattttagygattcccgctttaatcgctctcaagcatgcttttttagaaaaaggcgtagaagtgtatttgggcgtggttgtgcctagctataccaccccaattgctttagaattccctttcattgatgaagttatcatagaagacaaccatttagccaccacccycaaaaaccgctccattgacgctcttatctttttattttctaattttaaaaacgccaaactcgctttcagtttgagaaaatccatcccttatatcctagccccaaagaccaaaatctattcttggctttatcaaaagagagtgcgccaaaaccgctctttatgcttaaaaaccgaatacgaatacaatttggacttaatccatgcgttttgtaaagactacgatctccctaacgctcaacttaaaaaaatcgcatggaagcttaaagacaaatccaaagagcgatccatcatcgcttcaaaactcaacgctaatgttgatctattgtggattggcgtgcatatgcatagcggaggcagttcgcccgtattgcccgcttcgcatttcattgagttgattgcaatcttgcatgaaaaattaagttgtgagatcattcttatttgcgggccaggcgagagaaaagccacagaagaactccttaaagaagtccctttcgctcacctctatgatacgagccatagtttagtggatttagccaaattgtgcgcgaatttaagcgtctgtatcgggaacgcttcaggccctttgcatgtgaacgctttatttgacaaccaatctatcgggttttaccctaacgaactcaccgcctctattgccagatggcggcctttcaacgaacaatttttaggcatcaccccgcctaatggctcaaacgatatgggtttgattgacattcaaaaagaaagcgaaaagattatgggatttatcacaaaaaatctttctcatcacatgcaagaaaga

SEQ ID NO: 1240 - DNA (genomic), 1089 bp, Helicobacter pylori; double-stranded, circular
  misc_feature (B) LOCATION 1...1089
  hypothetical: NO
  anti-sense: NO
catgacaaaaaatttgatctcttaggcggagtcatggatttcgtagggtttgaagatttaaaatgcaaagacaaagaaaactctcaaaaagtttttgtgatccgtaacgataagttaggcgattttattttagtgattcccgctttaatcgctctcaagcatgcttttttagaaaaaggcgtagaagtgtatttgggcgtggttgtgcctagctataccaccccaatcgctttagaattccctttcattgatgaagttatcatagaagacaaccatttagccaccacccccaaaaaccgctccaccgacgcccttatctttttattttctaattttaaaaacgccaaacttgctttcagtttgagaaaatccatcccttatatcctagccccaaagaccaaaatctattcttggctttatcaaaagagagtgcgccaaaaccgctctttatgcttaaaaaccgaatacgaatacaatttggacttaatccatgcgttttgtaaagactacgatctccctaacgctcaacttaaaaaaatcgcatggaagcttaaagacaaatccaaagagcgatccatcatcgcttcaaaactcaacgctaatgttgatctattgtggattggcgtgcatatgcatagcggaggcagttcgcccgtattgcccgcttcgcatttcattgagttgattgcaatcttgcatgaaaaattaagttgtgagatcattcttatttgcgggccaggcgagagaaaagccacagaagaactccttaaagaagtccctttcgctcacctctatgatacgagccatagtttagtggatttagccaaattgtgcgcgaatttaagcgtctgtatcgggaacgcttcaggccctttgcatgtgaacgctttatttgacaaccaatctatcgggttttaccctaacgaactcaccgcctctattgccagatggcggcctttcaacgaacaatttttaggcatcaccccgcctaatggctcaaacgatatgggtttgattgacattcaaaaagaaagcgaaaagattatgggatttatcacaaaaaatctttctcatcacatgcaagaaaga

SEQ ID NO: 1241 - DNA (genomic), 207 bp, Helicobacter pylori; double-stranded, circular
  misc_feature (B) LOCATION 1...207
  hypothetical: NO
  anti-sense: NO
gcagaggggcaaaaattttcaatctctagcttaagatttttgtcgttattttgcattgttgttgcagcagtgataggcttgtgtctcatttggagtttcaacgggtggtctttttgggaagtaacaggtttgtttcttttttatgtggttgtttgttccgctccaacatttccaaatatatttattgctaatatattagatgaccga

SEQ ID NO: 1242 - DNA (genomic), 411 bp, Helicobacter pylori; double-stranded, circular
  misc_feature (B) LOCATION 1...411
  hypothetical: NO
  anti-sense: NO
gtgtttgtgaagaacttaaaaagagagatggaagagatagaaaattctgatcccaaccaaaacaatcctctcattactgctactatgggtattggaggagcggctatcagtatttttttcccagataccaaaccaatcgttgatggcgtcaagccgttggctgagaaaggtttgcaagaggcgtttagaaaagacaagctcgcagaggggcaaaaattttcaatctctagcttaagatttttgtcgttattttgcattgttgttgcagcagtgataggcttgtgtctcatttggagtttcaacgggtggtctttttgggaagtaacaggtttgtttcttttttatgtggttgtttgttccgctccaacatttccaaatatatttattgctaatatattagatgaccgataa

SEQ ID NO: 1243 - DNA (genomic), 393 bp, Helicobacter pylori; double-stranded, circular
  misc_feature (B) LOCATION 1...393
  hypothetical: NO
  anti-sense: NO
atgaatcttgtctttttgtgggccgctctaggaggggctatagggagctcgttaaggtattttgtgggcaaaatgatgcccagtaaatttttaatgtttgaaagtttccctttagggacttttagcgtgaatctcatagggtgttttatcatcggctttatggggcatttggccgctaaaaaagtttttggtgatgattttgggattttctttgtaaccggagttttagggggttttacgaccttttcttcttatgggttagacactttaaaactcttgcaaaaatcccaataccttgaagccatttcttatgtcttaggcactaaccttttagggcttattggggtagctatcggttggtttttggctaagaattttgtaggcgttaattaa

SEQ ID NO: 1244 - DNA (genomic), 390 bp, Helicobacter pylori; double-stranded, circular
  misc_feature (B) LOCATION 1...390
  hypothetical: NO
  anti-sense: NO
atgaatcttgtctttttgtgggccgctctaggaggggctatagggagctcgttaaggtattttgtgggcaaaatgatgcccagtaaatttttaatgtttgaaagtttccctttagggacttttagcgtgaatctcatagggtgttttatcatcggctttatggggcatttggccgctaaaaaagtttttggtgatgattttgggattttctttgtaaccggagttttagggggttttacgaccttttcttcttatgggttagacactttaaaactcttgcaaaaatcccaataccttgaagccatttcttatgtcttaggcactaaccttttagggcttattggggtagctatcggttggtttttggctaagaattttgtaggcgttaat

SEQ ID NO: 1245 - DNA (genomic), 393 bp, Helicobacter pylori; double-stranded, circular
  misc_feature (B) LOCATION 1...393
  hypothetical: NO
  anti-sense: NO
tgcatgaatcttgtctttttgtgggccgctctaggaggggctatagggagctcgttaaggtattttgtgggcaaaatgatgcccagtaaatttttaatgtttgaaagtttccctttagggacttttagcgtgaatctcatagggtgttttatcatcggctttatggggcatttggccgctaaaaaagtttttggtgatgattttgggattttctttgtaaccggagttttagggggttttacgaccttttcttcttatgggttagacactttaaaactcttgcaaaaatcccaataccttgaagccatttcttatgtcttaggcactaaccttttagggcttattggggtagctatcggttggtttttggctaagaattttgtaggcgttaat

SEQ ID NO: 1246 - DNA (genomic), 354 bp, Helicobacter pylori; double-stranded, circular
  misc_feature (B) LOCATION 1...354
  hypothetical: NO
  anti-sense: NO
gtgattttagcgttcgcctttggcatgagtcttcttggattagcgggcatgttcattgatattccttttttatccacaggcgttcatatccctagaaaagaggatattttatggatttctttaatagggattagcgggactttagggcagtatttcttaacctatgcttacatgaacgctcctgctgggatcatcgcccccattgaatacacccgcattgtttgggggctattgtttgggctgtatttaggcgatacatttttggatcttaaaagctctttaggggtggctttgatcttatgttcaggcttgctcattgccttgcccgctcttttaaaagaattaaaaaaaatt

SEQ ID NO: 1247 - DNA (genomic), 792 bp, Helicobacter pylori; double-stranded, circular
  misc_feature (B) LOCATION 1...792
  hypothetical: NO
  anti-sense: NO
atggaaaacgtgttttaccgctccattaccatgacgcttttactcttgcttatttatcctttcaaaccctaccgcttgaagagttacaaacaaggcggttttaaaaagctcgcctttagggtcgttgtggggggcttagccatgctggcgtttttttataatattgaaaaaatttcgctcgccacagcgacggctttctcgcaatgcgcgcctatttatacggtgctcctttcccctttgcttttgaaagaaaagctcaaaagaagcgcgttaatttccgcatgcatcgggctagtgggggtggtgttgatttcagatcctagcgtggaaaatgtaggactagttgaaatcattatgggcatattgagcgggatctttgtgtctttagcgtatatcactttaagggatttgagggaatattacgacaagcaggccgtgattttagcgttcgcctttggcatgagtcttcttggattagcgggcatgttcattgatattccttttttatccacaggcgttcatatccctagaaaagaggatattttatggatttctttaatagggattagcgggactttagggcagtatttcttaacctatgcttacatgaacgctcctgctgggatcatcgcccccattgaatacacccgcattgtttgggggctattgtttgggctgtatttaggcgatacatttttggatcttaaaagctctttaggggtggctttgatcttatgttcaggcttgctcattgccttgcccgctcttttaaaagaattaaaaaaaatttaa

SEQ ID NO: 1248 - DNA (genomic), 828 bp, Helicobacter pylori; double-stranded, circular
  misc_feature (B) LOCATION 1...828
  hypothetical: NO
  anti-sense: NO
gcgcgttttgttaaaatcacagcggattatttttcccctatggaaaacgtgttttaccgctccattaccatgacgcttttactcttgcttatctatcctttcaaaccctaccgcttgaagagttacaaacaaggcggttttaaaaagctcgcctttagggtcgttgtggggggcttagccatgctggcgtttttttataatattgaaaaaatttcgctcgccacagcgaacgctttctcacaatgcgcgcctatttatacggtgctcctttcccctttgcttttgaaagaaaagctcaaaagaagcgcgttaatttccgcatgcatcgggctagtgggggtggtgttgatttcagatcctagcgtggaaaatgtaggactagttgaaatcattatgggcatattgagcgggatctttgtgtctttagcgtatatcactttaagggatttgagggaatattacgacaagcaggccgtgattttagcgttcgcctttggcatgagtcttcttggattagcgggcatgttcattgatattccttttttatccacaggcgttcatatccctagaaaagaggatattttatggatttctttaatagggattagcgggactttagggcagtatttcttaacctatgcttacatgaacgctcctgctgggatcatcgcccccattgaatacacccgcattgtttgggggctattgtttgggctgtatttaggcgatacatttttggatcttaaaagctctttaggggtggctttgatcttatgttcaggcttgctcattgccttgcccgctcttttaaaagaattaaaaaaaatt

SEQ ID NO: 1249 - DNA (genomic), 897 bp, Helicobacter pylori; double-stranded, circular
  misc_feature (B) LOCATION 1...897
  hypothetical: NO
  anti-sense: NO
atgcgtaataccattttatttggcgtttcaatgatactcttggcgaatttatgctttgggatcatgagcgcgtttgttaaaatcacagcggattatttttcccctatggaaaacgtgttttaccgctccattaccatgacgcttttactcttgcttatttatcctttcaaaccctaccgcttgaagagttacaaacaaggcggttttaaaaagctcgcctttagggtcgttgtggggggcttagccatgctggcgtttttttataatattgaaaaaatttcgctcgccacagcgacggctttctcgcaatgcgcgcctatttatacggtgctcctttcccctttgcttttgaaagaaaagctcaaaagaagcgcgttaatttccgcatgcatcgggctagtgggggtggtgttgatttcagatcctagcgtggaaaatgtaggactagttgaaatcattatgggcatattgagcgggatctttgtgtctttagcgtatatcactttaagggatttgagggaatattacgacaagcaggccgtgattttagcgttcgcctttggcatgagtcttcttggattagcgggcatgttcattgatattccttttttatccacaggcgttcatatccctagaaaagaggatattttatggatttctttaatagggattagcgggactttagggcagtatttcttaacctatgcttacatgaacgctcctgctgggatcatcgcccccattgaatacacccgcattgtttgggggctattgtttgggctgtatttaggcgatacatttttggatcttaaaagctctttaggggtggctttgatcttatgttcaggcttgctcattgccttgcccgctcttttaaaagaattaaaaaaaatttaa

SEQ ID NO: 1250 - DNA (genomic), 573 bp, Helicobacter pylori; double-stranded, circular
  misc_feature (B) LOCATION 1...573
  hypothetical: NO
  anti-sense: NO
atggagcttattttaggctctcaatccagcgctagggcgaatcttttaaaagagcatgggattaagtttgaacaaaaagcgctctattttgatgaagaaagcctaaaaaccacagaccctagggagtttgtctatttggcgtgcaaggggaaattagaaaaagctaaagagttacttgcgaataattgcgctatcgtggtggctgatagcgtggtgagcgtgggtaatcgcatgcaacgaaaagctaaaaacaagcgagaagcccttgaatttttaaaacgccaaaatggcaatgaaatagaggttttaacttgctctgcattgatttctcctgtgttggaatggctggatctatcggtttttagagcgcgtttaaaggcgtttgattgcagcgaaatagaaaaatatttagagagcggtttatggcaaggaagtgcgggctgtgtgcgtttagaggactttcataagccttatattaaaagctcaagcaagaatttaagcgtggggttggggctgaatgtggaaggcttgttaggggcactaaaattaggggttaaactttcattattataa

SEQ ID NO: 1251 - DNA (genomic), 570 bp, Helicobacter pylori; double-stranded, circular
  misc_feature (B) LOCATION 1...570
  hypothetical: NO
  anti-sense: NO
atggagcttattttaggctctcaatccagcgctagggcgaatcttttaaaagagcatgggattaagtttgaacaaaaagcgctctattttgatgaagaaagcctaaaaaccacagaccctagggagtttgtctatttggcgtgcaaggggaaattagaaaaagctaaagagttacttgcgaataattgcgctatcgtggtggctgatagcgtggtgagcgtgggtaatcgcatgcaacgaaaagctaaaaacaagcgagaagcccttgaatttttaaaacgccaaaatggcaatgaaatagaggttttaacttgctctgcattgatttctcctgtgttggaatggctggatctatcggtttttagagcgcgtttaaaggcgtttgattgcagcgaaatagaaaaatatttagagagcggtttatggcaaggaagtgcgggctgtgtgcgtttagaggactttcataagccttatattaaaagctcaagcaagaatttaagcgtggggttggggctgaatgtggaaggcttgttaggggcactaaaattaggggttaaactttcattatta

SEQ ID NO: 1252 - DNA (genomic), 579 bp, Helicobacter pylori; double-stranded, circular
  misc_feature (B) LOCATION 1...579
  hypothetical: NO
  anti-sense: NO
agggataacatggagcttattttaggctctcaatccagcgctagggcgaatcttttaaaagagcatgggattaagtttgaacaaaaagcgctctattttgatgaagaaagcctaaaaaccacagaccctagggagtttgtctatttggcgtgcaaggggaaattagaaaaagctaaagagttacttgcgaataattgcgctatcgtggtggctgatagcgtggtgagcgtgggtaatcgcatgcaacgaaaagctaaaaacaagcgagaagcccttgaatttttaaaacgccaaaatggcaatgaaatagaggttttaacttgctctgcattgatttctcctgtgttggaatggctggatctatcggtttttagagcgcgtttaaaggcgtttgattgcagcgaaatagaaaaatatttagagagcggtttatggcaaggaagtgcgggctgtgtgcgtttagaggactttcataagccttatattaaaagctcaagcaagaatttaagcgtggggttggggctgaatgtggaaggcttgttaggggcactaaaattaggggttaaactttcattatta

SEQ ID NO: 1253 - DNA (genomic), 453 bp, Helicobacter pylori; double-stranded, circular
  misc_feature (B) LOCATION 1...453
  hypothetical: NO
  anti-sense: NO
agcagctcacaatctatagccttactcattggcttgtggtttgggtttcaaaaacgcatcgctttgggggtgtggtttttctttagcatcttattaggtgaattcaccttaaaatcccttaagcttttagtggcgcgcccacggcctgtaaccaatggcgaattggtttttgcgcatggctttagtttccctagcgggcatgctttagcttcagcgcttttttacggctctttggcgttgttgttatgctattctaacgcaaacaatcgcattaaaactattggtgctattattttacttttttggatttttttaatggcgtatgatagggtttatttaggggtgcattaccctagcgatgttttaggagggtttttattagggattgcttggtcgtgctgctctttagcgctttatttggggtttttgaaacgcccttataaagccgcttaa

SEQ ID NO: 1254 - DNA (genomic), 447 bp, Helicobacter pylori; double-stranded, circular
  misc_feature (B) LOCATION 1...447
  hypothetical: NO
  anti-sense: NO
agctcacaatctatagccttactcattggcttgtggtttgggtttcaaaaacgcatcgctttgggggtgtggtttttctttagcatcttattaggtgaattcaccttaaaatcccttaagcttttagtggcgcgcccacggcctgtaaccaatggcgaattggtttttgcgcatggctttagtttccctagcgggcatgctttagcttcagcgcttttttacggctctttggcgttgttgttatgctattctaacgcaaacaatcgcattaaaactattggtgctattattttacttttttggatttttttaatggcgtatgatagggtttatttaggggtgcattaccctagcgatgttttaggagggtttttattagggattgcttggtcgtgctgctctttagcgctttatttggggtttttgaaacgcccttataaagccgct

SEQ ID NO: 1255 - DNA (genomic), 687 bp, Helicobacter pylori; double-stranded, circular
  misc_feature (B) LOCATION 1...687
  hypothetical: NO
  anti-sense: NO
atggtatttgacagaacaacaagcgtaagagaaaaaaaagcggctaaggcgcttgggattgtggggatcgtcttttttattttgtttggcatcgtgataagcggggtggcttctcaaaaagagtgggtgcaacaattggatttattttttatagacttgatccgcaaccctgcccccattcaagggagcacgtggctttctttcgtgttttttagcacttggtttgcgcaaagcaagctcaccactcctatagccttactcattggcttgtggtttgggtttcaaaaacgcatcgctttgggggtgtggtttttctttagcatcttattaggtgaattcaccttaaaatcccttaagcttttagtggcgcgcccacggcctgtaaccaatggcgaattggtttttgcgcatggctttagtttccctagcgggcatgctttagcttcagcgcttttttacggctctttggcgttgttgttatgctattctaacgcaaacaatcgcattaaaactattggtgctattattttacttttttggatttttttaatggcgtatgatagggtttatttaggggtgcattaccctagcgatgttttaggagggtttttattagggattgcttggtcgtgctgctctttagcgctttatttggggtttttgaaacgcccttataaagccgcttaa

SEQ ID NO: 1256 - DNA (genomic), 552 bp, Helicobacter pylori; double-stranded, circular
  misc_feature (B) LOCATION 1...552
  hypothetical: NO
  anti-sense: NO
atgtttatatcttcttcttacacgctgagttttgtatggctttttttaattttcttttttttcaaaaataagccattgggtttgaggttttcgctctctttgataagcgtgattttaagcaatatcgctttgaaagactccctatcgctcaatgaatttttaagcagttttacagcccccttaagcccctttagctgtcttttgatccttgcttatgcaagcttttcttgccatatactcaaaaagccccctttagaaaccttgcaatcttatagcgtcatgctgtttttcaatctgttgcttttgacagatattttagggtttttgcctttttcaatctaccatcatttcatggcttctctgatttttagcgcgcttttttgcagcagtttgtttttgagtagccccttattaggcgtgatcgctttagtggctttatccagttcgcttttgatgcgttctaattttcaaatcttagattctttattggatttcccattatttctttttgtcttttttaagactttatatcttgctaaaaaaaggttatag

SEQ ID NO: 1257 - DNA (genomic), 549 bp, Helicobacter pylori; double-stranded, circular
  misc_feature (B) LOCATION 1...549
  hypothetical: NO
  anti-sense: NO
atgtttatatcttcttcttacacgctgagttttgtatggctttttttaattttcttttttttcaaaaataagccattgggtttgaggttttcgctctctttgataagcgtgattttaagcaatatcgctttgaaagactccctatcgctcaatgaatttttaagcagttttacagcccccttaagcccctttagctgtcttttgatccttgcttatgcaagcttttcttgccatatactcaaaaagccccctttagaaaccttgcaatcttatagcgtcatgctgtttttcaatctgttgcttttgacagatattttagggtttttgcctttttcaatctaccatcatttcatggcttctctgatttttagcgcgcttttttgcagcagtttgtttttgagtagccccttattaggcgtgatcgctttagtggctttatccagttcgcttttgatgcgttctaattttcaaatcttagattctttattggatttcccattatttctttttgtcttttttaagactttatatcttgctaaaaaaaggtta

SEQ ID NO: 1258 - DNA (genomic), 555 bp, Helicobacter pylori; double-stranded, circular
  misc_feature (B) LOCATION 1...555
  hypothetical: NO
  anti-sense: NO
ttagtcatgtttatatcttcttcttacacgctgagttttgtatggctttttttaattttcttttttttcaaaaataagccattgggtttgaggttttcgctctctttgataagcgtgattttaagcaatatcgctttgaaagactccctatcgctcaatgaatttttaagcagttttacagcccccttaagcccctttagctgtcttttgatccttgcttatgcaagcttttcttgccatatactcaaaaagccccctttagaaaccttgcaatcttatagcgtcatgctgtttttcaatctgttgcttttgacagatattttagggtttttgcctttttcaatctaccatcatttcatggcttctctgatttttagcgcgcttttttgcagcagtttgtttttgagtagccccttattaggcgtgatcgctttagtggctttatccagttcgcttttgatgcgttctaattttcaaatcttagattctttattggatttcccattatttctttttgtcttttttaagactttatatcttgctaaaaaaaggtta

SEQ ID NO: 1259 - DNA (genomic), 321 bp, Helicobacter pylori; double-stranded, circular
  misc_feature (B) LOCATION 1...321
  hypothetical: NO
  anti-sense: NO
atggataccataaaaagcattcccataagaacttttattttactctataaaagctcaccaaaatgtgttgtgttggcatcaattacagtgctatttgtcggcattcttycatctctgaatattcttgttatgataaaattgattgatattgtggtgaatctattacaaaagcatacgcattttgaatacagcttgctgttaccaactttactactatggggagccttgctgtttttaacgcatgtgttctcaggaaattttatcaagcttgcaaaccattattgccgaacaattttctataaatatcatcactcagcttgc

SEQ ID NO: 1260 - DNA (genomic), 1770 bp, Helicobacter pylori; double-stranded, circular
  misc_feature (B) LOCATION 1...1770
  hypothetical: NO
  anti-sense: NO
atggataccataaaaagcattcccataagaacttttattttactctataaaagctcaccaaaatgtgttgtgttggcatcaattacagtgctatttgtcggcattcttccatctctgaatattcttgttatgataaaattgattgatattgtggtgaatctattacaaaagcatacgcattttgaatacagcttgctgttaccaactttactactatggggagccttgctgtttttaacgcatgtgttctcaggaattttatcaagcttgcaaaccattattgccgaacaattttctataaatatcatcactcagcttgctaataaactcacacaagttaaaaatctaaatttttttgagaataaagaccatactatcaagcttaacactatccataacggactgcacatccgccccctaaattatgtcagtaatctttttttcaatctacaacgcattatagggcttatcagtctgtttgggatattattttccattagtatttatctaccctttataatgatttttgcaacagtgccttgtattctcatttccaaccatatagcaaaaaaacatagtgcttccatagataaacttcaagaccaaaaagaaagcatgcaaaattacttatactctggactagataaccaaaagaacaaggacaacctattatttaacttcatgctaaattttcaccataaatttattgaaacaaaagaattgtatctcaataattttgtgaaagtagcccaaaaaaacttaatatttaccatatatgctgatgttttaatcaccactctaagtattgcactattttttctaatggtttttattatcctttcaaaattaattggtgtgggagcaattgctgggtatatccaagcatttagctctacccaacaacaactacaagatttatcattttatggaaagtggttttttgctatcaataaatactttgaaaattatttctgtattttagattacaaaataccgaaaccagaaacacaaatcaaattagaagaaaaaatccatagcattacatttgaaaatattagtttctcttatcctaattcaaaacttatttttgaaaactttaatctctctttacactctaataaaatttatgcattagtcggcaagaatgctagcggaaaaagcacgctgattaatttattattaggtttttataccccaaattcaggtcaaattatcattaataacaaatacccattacaagacttggaactaaatagctaccatcaacaaatgagtgccatatttcaagatttttctctttatgctgggtatagcattgatgataatctttttatgcaaaacaatatcactaaagagcaattgaagcaaaaaagagaaatactaaaatcttttgatgagaattttcaaaattgtcttaatgattgcaacaacacactatttggagcgcaatataatggggtagatttttctttaggtcaaaagcaacgcatagctaccatgagagcctttttaaaaccaagtaattgcattgttttagatgagccaagcagcgccatcgatcccattatggaaaaagagtttttagattttatttttaaaaaatcgcaatctaagatggctttaattattacacaccgcatgaatagtgtcaagcaagctaatgaaattatcgtgttagatcaaggcaaactaatagaacagggcaactttgaaacccttatgaaaaaacagggattattttgcgaattgtttttgaaacaacaatactag

SEQ ID NO: 1261 - DNA (genomic), 1779 bp, Helicobacter pylori; double-stranded, circular
  misc_feature (B) LOCATION 1...1779
  hypothetical: NO
  anti-sense: NO
atacgaacaccaatggataccataaaaagcattcccataagaacttttattttactctataaaagctcaccaaaatgtgttgtgttggcatcaattacagtgctatttgtcggcattcttccatctctgaatattcttgttatgataaaattgattgatattgtggtgaatctattacaaaagcatacgcattttgaatacagcttgctgttaccaactttactactatggggagccttgctgtttttaacgcatgtgttctcaggaattttatcaagcttgcaaaccattattgccgaacaattttctataaatatcatcactcagcttgctaataaactcacacaagttaaaaatctaaatttttttgagaataaagaccatactatcaagcttaacactatccataacggactgcacatccgccccctaaattatgtcagtaatctttttttcaatctacaacgcattatagggcttatcagtctgtttgggatattattttccattagtatttatctaccctttataatgatttttgcaacagtgccttgtattctcatttccaaccatatagcaaaaaaacatagtgcttccatagataaacttcaagaccaaaaagaaagcatgcaaaattacttatactctggactagataaccaaaagaacaaggacaacctattatttaacttcatgctaaattttcaccataaatttattgaaacaaaagaattgtatctcaataattttgtgaaagtagcccaaaaaaacttaatatttaccatatatgctgatgttttaatcaccactctaagtattgcactattttttctaatggtttttattatcctttcaaaattaattggtgtgggagcaattgctgggtatatccaagcatttagctctacccaacaacaactacaagatttatcattttatggaaagtggttttttgctatcaataaatactttgaaaattatttctgtattttagattacaaaataccgaaaccagaaacacaaatcaaattagaagaaaaaatccatagcattacatttgaaaatattagtttctcttatcctaattcaaaacttatttttgaaaactttaatctctctttacactctaataaaatttatgcattagtcggcaagaatgctagcggaaaaagcacgctgattaatttattattaggtttttataccccaaattcaggtcaaattatcattaataacaaatacccattacaagacttggaactaaatagctaccatcaacaaatgagtgccatatttcaagatttttctctttatgctgggtatagcattgatgataatctttttatgcaaaacaatatcactaaagagcaattgaagcaaaaaagagaaatactaaaatcttttgatgagaattttcaaaattgtcttaatgattgcaacaacacactatttggagcgcaatataatggggtagatttttctttaggtcaaaagcaacgcatagctaccatgagagcctttttaaaaccaagtaattgcattgttttagatgagccaagcagcgccatcgatcccattatggaaaaagagtttttagattttatttttaaaaaatcgcaatctaagatggctttaattattacacaccgcatgaatagtgtcaagcaagctaatgaaattatcgtgttagatcaaggcaaactaatagaacagggcaactttgaaacccttatgaaaaaacagggattattttgcgaattgtttttgaaacaacaatac

SEQ ID NO: 1262 - DNA (genomic), 141 bp, Helicobacter pylori; double-stranded, circular
  misc_feature (B) LOCATION 1...141
  hypothetical: NO
  anti-sense: NO
gtggtttgggtgtttgtgggttcgctttttgtggcttctaaattgggtatggagttcatgctgaaagaagatagggggaggtttttagtgtggcttaaggctaaaccgggcgtgagcatagattacatgacggcaaaagag

SEQ ID NO: 1263 - DNA (genomic), 159 bp, Helicobacter pylori; double-stranded, circular
  misc_feature (B) LOCATION 1...159
  hypothetical: NO
  anti-sense: NO
gtttgttcatcagcctttgagcatgttcccatgataggcttgattttgctcattggtatggtgggtaaaaacgccacgcttttaattgatgtgtcgaatgaagaacgtaaaaaaggtttgaatatccaagaagccattttatttgccggaaaacccgtc

SEQ ID NO: 1264 - DNA (genomic), 186 bp, Helicobacter pylori; double-stranded, circular
  misc_feature (B) LOCATION 1...186
  hypothetical: NO
  anti-sense: NO
agcgttacggtgcttgctgagcctaataggaatgcgggcgtttctttgggcgagattttaacgcaagtgagtaaaaacactaaagaatggctggttgaaggggcgaattacagattcaccggagaagcggataacgccaaagagagcaatggggagtttttagtcgctttagcgacgcgtttgtgt

SEQ ID NO: 1265 - DNA (genomic), 513 bp, Helicobacter pylori; double-stranded, circular
  misc_feature (B) LOCATION 1...513
  hypothetical: NO
  anti-sense: NO
ttgtttgtcaggagttcaaacgtgccggatacaacccttaatgactatgctaaaaacaccattagacccatgctccaaaaaatcaatggggtggggggcgtgcaactcaacggctttagggagcgccagattaagatttatgcggatcccactttgatgaataaatacaacctgacttatgcggatcttttcagcacgcttaaagcggagaatgtggaaattgatggggggcgcattgtcaatacccaaagggaattgtctattttgattaatgcgaatacttatagcgtcgcggatgtagaaaagatccaagtgggtaatcatgtgcgtcttggcgatattgcaaaaattgaaatccgtttggaacaaaacaacacttttgcgatctttaaagacaaacccggtgtgaatttagatatccaaaagattgccggagcgaatgaaattgacatcgtggatagggtgtatcaaccgttaaaacacattccaaccattatccctagctatgaaatc

SEQ ID NO: 1266 - DNA (genomic), 3087 bp, Helicobacter pylori; double-stranded, circular
  misc_feature (B) LOCATION 1...3087
  hypothetical: NO
  anti-sense: NO
atgtataaaacagcgattaatcgtcctattacgaccttgatgtttgctttggcgattgtcttttttggggtgatgggttttaaaaaattgagcgtggcgcttttccctaaaattgatttgcctacagtggtggttactacgacttatcctggggctagcgctgaaatcatagagagtaaggtaaccgataagattgaagaagcggtgatggggattgatgggatcaaaaaggttacttccacgagttctaaaaatgtgagcattgttgtcattgaatttgagttagaaaaacctaatgaagaagccttaaacgatgtggtgaataaaatttcttcggtgcgttttgatgactctaacattaaaaaaccctctatcaataaatttgataccgacagccaagccattatttcattgtttgtgagcagttcaagcgtgccggctacaacccttaatgactatgctaaaaacaccattaaacccatgctccaaaaaatcaatggggtggggggcgtgcagctcaacggctttagggagcgccagattaggatttatgcggatcccactttgatgaataaatacaacctgacttatgcggatcttttcagcacgcttaaagcggagaatgtggaaattgatggggggcgcattgtcaatagccaaagggaattgtctattttgattaatgcgaatagttatagcgttgcggatgtagaaaagatccaagtgggtaatcatgtgcgtcttggcgatattgcaaaaattgaaatcggtttggaagaagacaacacttttgcgagctttaaagacaaacccggtgtgattttagaaatccaaaagattgccggagcgaatgaaattgaaatcgtggatagggtgtatgaagcgttaaaacacattcaagccattagccctagctatgaaatcagaccctttttagacaccacgagctatatccgcacctctattgaagacgtgaaatttgacttgattttaggggcgattttagcggttttagtggtgtttgcgttcttgcgtagtggtacgatcaccctcgtttcagcgatctctatccctatttctatcatggggacttttgcccttattcaatggatgggcttttcattgaacatgctcaccatggtggctttaacgctagcgatagggattatcattgatgatgcgatcgtggtgattgaaaacatccataaaaagctagaaatgggcatgagtaaacgcaaagcgagttatgagggggtgaaggagattggctttgctctagtggcgatttcggcgatgctgctctctgtgtttgtgcctatagggaacatgaaaggcattatcgggcgctttttccaaagctttgggatcacggtggctttagcgatcgctctatcgtatgtggtggtcgttacgattatccctatggtaagctcagtggtggtcaatcccaggcattctcgtttttacatgtggagtgagcctttttttaaggctttagagtctcgttataccaaattgctccaatgggttttaaaccacaagctcattatctttatagcggtggttttggtgtttgtgggttcgctttttgtggcttctaaattgggtatggagttcatgctgaaagaagatagggggaggtttttagtgtggcttaaggctaaaccgggcgtgagcatagattacatgacgcaaaagagtaagatctttcaaaaagcgattgaaaaacatgatgaagtggaatttaccactctgcaagtgggttatggcaccacacaaaacccttttaaggctaagatttttgtgcaactcaagcctttaaaagagcgcaaaaaagagcatgaattggggcaatttgagttgatgagcgctttaaaaaaggaattaaaaagcatgcctgaagctaaagatttggacagcattaatctttctgaagtcgctcttatagggggcggtggggatagttcgccctttcaaaccttcgtattctcccattctcaagaagcggtggataaaagcgtggagaatttgagaaaattcttattagaaagccctgaattaaagggcaaggttgaaagctatcatacaagcacgagcgaatcgcaaccgcaattgcaactgaaaatcttaaggcaaaacgccaacaaatacggcgtgagcgctcaaaccattggctcagtggtgagctctgctttctctgggacttctcaagcgagcgtgttcaaagaagatggtaaagaatacgacatgatcattagagtgcctgatgacaagcgcgtttctgtagaagacatcaaacgcttgcaagtgcgtaacaaatacgataaattgatgtttttagacgctttagtggaaatcacagaaactaaaagcccgtctagtatttctcgctataaccgccaacgcagcgttacggtgcttgctgagcctaataggaatgcgggcgtttctttgggcgagattttaacgcaagtgagtaaaaacactaaagaatggctggttgaaggggcgaattacagattcaccggagaagcggataacgccaaagagagcaatggggagtttttagtcgctttagcgacagcgtttgtgttgatctatatgattttagcggcgttgtatgagtccattttagagccttttatcatcatggttaccatgcctttaagcttttcaggggcgttttttgctctaggtttggtccatcagcctttgagcatgttctctatgataggcttgattttgctcattggtatggtgggtaaaaacgccacgcttttaattgatgtggcgaatgaagagcgtaaaaaaggtttgaatatccaagaagccattttatttgccggcaaaacccgtctaagaccgattttaatgacgaccattgcgatggtttgtggcatgctgcctttagcgttggcgagtggggatggaacggcgatgaaatcccctatagggattgcgatgagtgggggcttgatgatttctatggtgttaagcctactgattgtgccggtgttttatcgtttgctcgctcccatagacgacaaaatcaagcggttttatcaaaaccaaaaagctttagaatga

SEQ ID NO: 1267 - DNA (genomic), 768 bp, Helicobacter pylori; double-stranded, circular
  misc_feature (B) LOCATION 1...768
  hypothetical: NO
  anti-sense: NO
atgggttttttaaaagttttaaaacatgacgctttagggcaagtagggaatattgttatagggaatttcttaataacgctcactgttttagcggtttgtttttcctctcaaagcgctgaagaaacgaccatgctcaccctaagctacacgctcttttttattttaggggcgtttttattagtcgcaatcagcgtgggagcgatcaaaaacctcaacgcgcttttttctaaaagaggggttttaagcttttccttacccattagtttggaatctttattgctccctaaaatcttgctccccatggtgttttttatcttcagtttgttctggtttgtggcgagcgtgcgtttgggctattacctttttaacgcgcaatccagcgtgctgtttatcttgcacaccgctttaaaaacctttgcgttaaaacccactaaaactataggcgttgcgctgtttttagggcttgttttaatgaaatttttatttgttttgagcgttttaaacgctactaggatcaaaaaagcgcgttttttactcggggggttgttgttcattctggtgggggttgttttggaattggctttcaattcgttactgcccttaatgagttctagtttgagcatcaatgaggggttttattatttcttgcaacaacaagaattacaagaaaataaatactatcttttatggggggtggattttttaaaaatccttttattgtatggggtgatccgttacttgctcacgcataaattagaattggattaa

SEQ ID NO: 1268 - DNA (genomic), 795 bp, Helicobacter pylori; double-stranded, circular
  misc_feature (B) LOCATION 1...795
  hypothetical: NO
  anti-sense: NO
attttctatccaaatgggtataataatcgcatgggttttttaaaagttttaaaacatgacgctttagggcaagtagggaatattgttatagggaatttcttaataacgctcactgttttagcggtttgtttttcctctcaaagcgctgaagaaacgaccatgctcaccctaagctacacgctcttttttattttaggggcgtttttattagtcgcaatcagcgtgggagcgatcaaaaacctcaacgcgcttttttctaaaagaggggttttaagcttttccttacccattagtttggaatctttattgctccctaaaatcttgctccccatggtgttttttatcttcagtttgttctggtttgtggcgagcgtgcgtttgggctattacctttttaacgcgcaatccagcgtgctgtttatcttgcacaccgctttaaaaacctttgcgttaaaacccactaaaactataggcgttgcgctgtttttagggcttgttttaatgaaatttttatttgttttgagcgttttaaacgctactaggatcaaaaaagcgcgttttttactcggggggttgttgttcattctggtgggggttgttttggaattggctttcaattcgttactgcccttaatgagttctagtttgagcatcaatgaggggttttattatttcttgcaacaacaagaattacaagaaaataaatactatcttttatggggggtggattttttaaaaatccttttattgtatggggtgatccgttacttgctcacgcataaattagaattggat

SEQ ID NO: 1269 - DNA (genomic), 474 bp, Helicobacter pylori; double-stranded, circular
  misc_feature (B) LOCATION 1...474
  hypothetical: NO
  anti-sense: NO
ttggcgtctcgctattctgtggctgttgggaatttattttcagagcatttgtatgatttaagaaatgaaaccatgaccaatctcattggttttttactggtgttggcgtccatttgggtgttttttttagctcttggagtgttgctaggcaagatgttagtctttagcggtctaggcattatagacaaggcgttagggtttattttttcatgtttgaagacttttttagtgctttctttcatcctttatgcgctctctaaaatggatttaatgaaagacgctaacgcctatttgcaagaaaagamcrctattttccccaccatraaaarcrtcrctagtaagatcatgcgccttgatggcgtcaaacatgtggagaaaaaccttaaagacaaccttgaagaaatgagcgatgaagttaaaaataaaggatctattgataacgccaaagaatcttttaataagggctacggataa

SEQ ID NO: 1270 - DNA (genomic), 711 bp, Helicobacter pylori; double-stranded, circular
  misc_feature (B) LOCATION 1...711
  hypothetical: NO
  anti-sense: NO
ttgaactatattgatttggcgttacttgtggtagtggtagcctttgggattagggggttttatcatggcttcgtgagtgaaatagcagcgactttggggattgtgcttggcgtttatttggcgtctcgctattctgtggctgttgggaatttattttcagagcatttgtatgatttaagaaatgaaaccatgaccaatctcattggttttttactggtgttggcgtccatttgggtgttttttttagctcttggagtgttgctaggcaagatgttagtctttagcggtctaggcattatagacaaggcgttagggtttattttttcatgtttgaagacttttttagtgctttctttcatcctttatgcgctctctaaaatggatttaatgaaagacgctaacgcctatttgcaagaaaagagcgctattttccccaccatgaaaagcgtcgctagtaagatcatgcgccttgatggcgtcaaacatgtggagaaaaaccttaaagacaaccttgaagaaatgagcgatgaagttaaaaataaaggatctattgataacgccaaagaatcttttaataaggctacggataagggcgtagaagctttaaaagaaaaggctaaagatttgcctaaaaacatgctagagccaaaacacaataaacccaaccaaaccccaccaatcccaaccccatctaataaagaacccctataa

SEQ ID NO: 1271 - DNA (genomic), 711 bp, Helicobacter pylori; double-stranded, circular
  misc_feature (B) LOCATION 1...711
  hypothetical: NO
  anti-sense: NO
ggtttgaactatattgatttggcgttacttgtggtagtggtagcctttgggattagggggttttatcatggcttcgtgagtgaaatagcagcgactttggggattgtgcttggcgtttatttggcgtctcgctattctgtggctgttgggaatttattttcagagcatttgtatgatttaagaaatgaaaccatgaccaatctcattggttttttactggtgttggcgtccatttgggtgttttttttagctcttggagtgttgctaggcaagatgttagtctttagcggtctaggcattatagacaaggcgttagggtttattttttcatgtttgaagacttttttagtgctttctttcatcctttatgcgctctctaaaatggatttaatgaaagacgctaacgcctatttgcaagaaaagagcgctattttccccaccatgaaaagcgtcgctagtaagatcatgcgccttgatggcgtcaaacatgtggagaaaaaccttaaagacaaccttgaagaaatgagcgatgaagttaaaaataaaggatctattgataacgccaaagaatcttttaataaggctacggataagggcgtagaagctttaaaagaaaaggctaaagatttgcctaaaaacatgctagagccaaaacacaataaacccaaccaaaccccaccaatcccaaccccatctaataaagaaccccta

SEQ ID NO: 1272 - DNA (genomic), 237 bp, Helicobacter pylori; double-stranded, circular
  misc_feature (B) LOCATION 1...237
  hypothetical: NO
  anti-sense: NO
atgttggaaaaactgattgaaagagtgttgtttgccactcgttggttgctagcccctttatgcattgccatgtcgttagtgttggtggttttaggctatgtgttcatgaaagagttgtggcacatgctcagccatttaracaccattagtgaaacggatttggttttatcagccttaggtttagtggatttgttggttcatggccgggcttgttttgatggtgctgctcgccagtta

SEQ ID NO: 1273 - DNA (genomic), 534 bp, Helicobacter pylori; double-stranded, circular
  misc_feature (B) LOCATION 1...534
  hypothetical: NO
  anti-sense: NO
atgttggaaaaactgattgaaagagtgttgtttgccactcgttggttgctagcccctttatgcattgccatgtcgttagtgttggtggttttaggctatgtgttcatgaaagagttgtggcacatgctcagccatttagacaccattagtgaaacggatttggttttatcagccttaggtttagtggatttgttgttcatggccgggcttgttttgatggtgctgctcgccagttatgaaagctttgtttctaaattagacaaggtggatgctagcgaaatcacttggctaaaacacacagattttaacgctttaaaattaaaggtttccctctccattgtagccatttcggcgattttcttgctcaaacgctacatgagtttagaagacgttttatccagtattcctaaagacacgcccctatcgcataaccctattttttggcaagtggtgatccatttggtgtttgtgtgttcagcgctgttaaccgctgttaccaataacatcgctttttcgcagaaagaaaggcattga

SEQ ID NO: 1274 - DNA (genomic), 567 bp, Helicobacter pylori; double-stranded, circular
  misc_feature (B) LOCATION 1...567
  hypothetical: NO
  anti-sense: NO
tcaaggcttcaaaaagccataattaaaagagttgagatgttggaaaaactgattgaaagagtgttgtttgccactcgttggttgctagcccctttatgcattgccatgtcgttagtgttggtggttttaggctatgtgttcatgaaagagttgtggcacatgctcagccatttagacaccattagtgaaacggatttggttttatcagccttaggtttagtggatttgttgttcatggccgggcttgttttgatggtgctgctcgccagttatgaaagctttgtttctaaattagacaaggtggatgctagcgaaatcacttggctaaaacacacagattttaacgctttaaaattaaaggtttccctctccattgtagccatttcggcgattttcttgctcaaacgctacatgagtttagaagacgttttatccagtattcctaaagacacgcccctatcgcataaccctattttttggcaagtggtgatccatttggtgtttgtgtgttcagcgctgttaaccgctgttaccaataacatcgctttttcgcagaaagaaaggcat

SEQ ID NO: 1275 - DNA (genomic), 957 bp, Helicobacter pylori; double-stranded, circular
  misc_feature (B) LOCATION 1...957
  hypothetical: NO
  anti-sense: NO
atgttaagtagagacattgtccaatattccaagatccgcaccgagttatacgcctacctcacttatttgttttcgcacaatatccgcaaccaccttcctgaaatcactttggattatttaaacaggcaaatcagtaagatgcaagctgaaatcaaaatggcaaaaagtttttttgttttagacgctaagggcatgctcatgcttaagccaagccaatttaaagagcaggggcataaggaagggctattagagcatgatttaacagaagggattgaattagaatcgcatgtcagttttagcgataagtattatttttatcaagccgtgaatgaaaagcgttgcattttaaccgacccctatccttctaaaaaagggaaccatttggtagtgagcgcgtcttacccggtgtatgatcaaaataacgatctagcgtttgtggtgtgcttgcaaatccctttgagggtggcgattgaaatcagctcgccttcaaagtattttaaaacttttagcgaagggagcatggtcatgtattttatgatttctatcatgctcactttagtgtcgctgcttttattcgtgaaatgcatttctagcttttggacagcgatcgtgcattttagcagttttgacattaaagaagtgttccaccccattgtgcttttaaccctagctttagccacctttgatttggtcaaggcgatttttgaagaagaagtgttgggtaaaaatagcggggacaaccaccatgcgatccaccgcaccatgatcaggtttttaggctctatcattatcgcattagccattgaagcgttaatgctcgtgtttaaattcagcgtgagcgagccggataaaatcacttatgcggtgtatttggctatcggcgtggcggtgcttttgatcagtttggcgatttatgttaaattcgcttatagcgtgttgcccaaacgagaacgctaa

SEQ ID NO: 1276 - DNA (genomic), 957 bp, Helicobacter pylori; double-stranded, circular
  misc_feature (B) LOCATION 1...957
  hypothetical: NO
  anti-sense: NO
gtgatgttaagtagagacattgtccaatattccaagatccgcaccgagttatacgcctacctcacttatttgttttcgcacaatatccgcaaccaccttcctgaaatcactttggattatttaaacaggcaaatcagtaagatgcaagctgaaatcaaaatggcaaaaagtttttttgttttagacgctaagggcatgctcatgcttaagccaagccaatttaaagagcaggggcataaggaagggctattagagcatgatttaacagaagggattgaattagaatcgcatgtcagttttagcgataagtattatttttatcaagccgtgaatgaaaagcgttgcattttaaccgacccctatccttctaaaaaagggaaccatttggtagtgagcgcgtcttacccggtgtatgatcaaaataacgatctagcgtttgtggtgtgcttgcaaatccctttgagggtggcgattgaaatcagctcgccttcaaagtattttaaaacttttagcgaagggagcatggtcatgtattttatgatttctatcatgctcactttagtgtcgctgcttttattcgtgaaatgcatttctagcttttggacagcgatcgtgcattttagcagttttgacattaaagaagtgttccaccccattgtgcttttaaccctagctttagccacctttgatttggtcaaggcgatttttgaagaagaagtgttgggtaaaaatagcggggacaaccaccatgcgatccaccgcaccatgatcaggtttttaggctctatcattatcgcattagccattgaagcgttaatgctcgtgtttaaattcagcgtgagcgagccggataaaatcacttatgcggtgtatttggctatcggcgtggcggtgcttttgatcagtttggcgatttatgttaaattcgcttatagcgtgttgcccaaacgagaacgc

SEQ ID NO: 1277 - DNA (genomic), 975 bp, Helicobacter pylori; double-stranded, circular
  misc_feature (B) LOCATION 1...975
  hypothetical: NO
  anti-sense: NO
attttttttaaaggccttgtgatgttaagtagagacattgtccaatattccaagatccgcaccgagttatacgcctacctcacttatttgttttcgcacaatatccgcaaccaccttcctgaaatcactttggattatttaaacaggcaaatcagtaagatgcaagctgaaatcaaaatggcaaaaagtttttttgttttagacgctaagggcatgctcatgcttaagccaagccaatttaaagagcaggggcataaggaagggctattagagcatgatttaacagaagggattgaattagaatcgcatgtcagttttagcgataagtattatttttatcaagccgtgaatgaaaagcgttgcattttaaccgacccctatccttctaaaaaagggaaccatttggtagtgagcgcgtcttacccggtgtatgatcaaaataacgatctagcgtttgtggtgtgcttgcaaatccctttgagggtggcgattgaaatcagctcgccttcaaagtattttaaaacttttagcgaagggagcatggtcatgtattttatgatttctatcatgctcactttagtgtcgctgcttttattcgtgaaatgcatttctagcttttggacagcgatcgtgcattttagcagttttgacattaaagaagtgttccaccccattgtgcttttaaccctagctttagccacctttgatttggtcaaggcgatttttgaagaagaagtgttgggtaaaaatagcggggacaaccaccatgcgatccaccgcaccatgatcaggtttttaggctctatcattatcgcattagccattgaagcgttaatgctcgtgtttaaattcagcgtgagcgagccggataaaatcacttatgcggtgtatttggctatcggcgtggcggtgcttttgatcagtttggcgatttatgttaaattcgcttatagcgtgttgcccaaacgagaacgc

SEQ ID NO: 1278 - DNA (genomic), 594 bp, Helicobacter pylori; double-stranded, circular
  misc_feature (B) LOCATION 1...594
  hypothetical: NO
  anti-sense: NO
atgaaaggcttatggcttgtaatctctttagtttttgttggttttttgtgggctaatgaatcttatgtttttaacaattctaaggggcgtttaacagaaaaaagcgttgcgtttatagagggcgtttctaaagagctttatcttaaaaccggcgtgcgttttgcgattgatatgacggattttgaaaaaaatcctatcgctctagcgaataaaaaagagcgccaaagctatcaagagggctttttaaagcagctcaaacccccttttgtggtattctttttctaccatgacgctcaaaaaatagaattagtggctaaccctaaagatttgctagacactgataaaatcttttttgaaaaaatcgctcccttactccccacaaacgctaaagaatacacgccccaaagaatttcagccatgctcattaacggctattcggtcgcagtagatgctttagcggaaaaatatcatgtgaatatcacgcaaaattttagcgctcctaagggagtaacttttgtaaaggtggttatttatattttgttattgacgcttttgggcgcgtttttggggctttatttttttaaaaaatcttaa

SEQ ID NO: 1279 - DNA (genomic), 591 bp, Helicobacter pylori; double-stranded, circular
  misc_feature (B) LOCATION 1...591
  hypothetical: NO
  anti-sense: NO
atgaaaggcttatggcttgtaatctctttagtttttgttggttttttgtgggctaatgaatcttatgtttttaacaattctaaggggcgtttaacagaaaaaagcgttgcgtttatagagggcgtttctaaagagctttatcttaaaaccggcgtgcgttttgcgattgatatgacggattttgaaaaaaatcctatcgctctagcgaataaaaaagagcgccaaagctatcaagagggctttttaaagcagctcaaacccccttttgtggtattctttttctaccatgacgctcaaaaaatagaattagtggctaaccctaaagatttgctagacactgataaaatcttttttgaaaaaatcgctcccttactccccacaaacgctaaagaatacacgccccaaagaatttcagccatgctcattaacggctattcggtcgcagtagatgctttagcggaaaaatatcatgtgaatatcacgcaaaattttagcgctcctaagggagtaacttttgtaaaggtggttatttatattttgttattgacgcttttgggcgcgtttttggggctttatttttttaaaaaatct

SEQ ID NO: 1280 - DNA (genomic), 594 bp, Helicobacter pylori; double-stranded, circular
  misc_feature (B) LOCATION 1...594
  hypothetical: NO
  anti-sense: NO
cacatgaaaggcttatggcttgtaatctctttagtttttgttggttttttgtgggctaatgaatcttatgtttttaacaattctaaggggcgtttaacagaaaaaagcgttgcgtttatagagggcgtttctaaagagctttatcttaaaaccggcgtgcgttttgcgattgatatgacggattttgaaaaaaatcctatcgctctagcgaataaaaaagagcgccaaagctatcaagagggctttttaaagcagctcaaacccccttttgtggtattctttttctaccatgacgctcaaaaaatagaattagtggctaaccctaaagatttgctagacactgataaaatcttttttgaaaaaatcgctcccttactccccacaaacgctaaagaatacacgccccaaagaatttcagccatgctcattaacggctattcggtcgcagtagatgctttagcggaaaaatatcatgtgaatatcacgcaaaattttagcgctcctaagggagtaacttttgtaaaggtggttatttatattttgttattgacgcttttgggcgcgtttttggggctttatttttttaaaaaatct

SEQ ID NO: 1281 - DNA (genomic), 705 bp, Helicobacter pylori; double-stranded, circular
  misc_feature (B) LOCATION 1...705
  hypothetical: NO
  anti-sense: NO
aaaaggcttatggttttgtttctatccatttttaaaaaaagctttaatgattttttaagcgctagaatgcttttaatcaatcttggccctatccttttgagtttggcgttttttggagctatcttttattacaatggcgggagtattgtgaattattgccaaactttattaccgcaatctttgaatgattacgctcattctcaaggcttttttgccggtgtgttcgcatgggtttttaaagcgttagtgtattttcttattttttggatcgtaattcttttgagtttagtcatcaatatttttgcgtctattttttacacccctttagtggtctcttatttgcaccaaaaatattatccccatgtcgttttagaagaatttggctctatccttttttctattaaatattttttaaaatcgctcacttttatgcttttattcttagcggttttaacgcccctttatttcattccctttataggggtctttggggtctttttttctatagtcccgcatttcctctttttcaaaaacaccatgagtttggatatagccagcatgattttcaaccatcaaagctatcaaaatttactcaaacagcaccgattgaagcattatcgtttttcgtttttttgctatcttttttccttgattcctttttttaatttttttgccaccttgttgcaaaccctaatgttaacgcac

SEQ ID NO: 1282 - DNA (genomic), 723 bp, Helicobacter pylori; double-stranded, circular
  misc_feature (B) LOCATION 1...723
  hypothetical: NO
  anti-sense: NO
ttgtttctatccatttttaaaaaaagctttaatgattttttaagcgctagaatgcttttaatcaatcttggccctatccttttgagtttggcgttttttggagctatcttttattacaatggcgggagtattgtgaattattgccaaactttattaccgcaatctttgaatgattacgctcattctcaaggcttttttgccggtgtgttcgcatgggtttttaaagcgttagtgtattttcttattttttggatcgtaattcttttgagtttagtcatcaatatttttgcgtctattttttacacccctttagtggtctcttatttgcaccaaaaatattatccccatgtcgttttagaagaatttggctctatccttttttctattaaatattttttaaaatcgctcacttttatgcttttattcttagcggttttaacgcccctttatttcattccctttataggggtctttggggtctttttttctatagtcccgcatttcctctttttcaaaaacaccatgagtttggatatagccagcatgattttcaaccatcaaagctatcaaaatttactcaaacagcaccgattgaagcattatcgtttttcgtttttttgctatcttttttccttgattcctttttttaatttttttgccaccttgttgcaaaccctaatgctaacgcactacttttttatctttaaagagaaagaatgctag

SEQ ID NO: 1283 - DNA (genomic), 729 bp, Helicobacter pylori; double-stranded, circular
  misc_feature (B) LOCATION 1...729
  hypothetical: NO
  anti-sense: NO
atggttttgtttctatccatttttaaaaaaagctttaatgattttttaagcgctagaatgcttttaatcaatcttggccctatccttttgagtttggcgttttttggagctatcttttattacaatggcgggagtattgtgaattattgccaaactttattaccgcaatctttgaatgattacgctcattctcaaggcttttttgccggtgtgttcgcatgggtttttaaagcgttagtgtattttcttattttttggatcgtaattcttttgagtttagtcatcaatatttttgcgtctattttttacacccctttagtggtctcttatttgcaccaaaaatattatccccatgtcgttttagaagaatttggctctatccttttttctattaaatattttttaaaatcgctcacttttatgcttttattcttagcggttttaacgcccctttatttcattccctttataggggtctttggggtctttttttctatagtcccgcatttcctctttttcaaaaacaccatgagtttggatatagccagcatgattttcaaccatcaaagctatcaaaatttactcaaacagcaccgattgaagcattatcgtttttcgtttttttgctatcttttttccttgattcctttttttaatttttttgccaccttgttgcaaaccctaatgctaacgcactacttttttatctttaaagagaaagaatgctag

SEQ ID NO: 1284 - DNA (genomic), 726 bp, Helicobacter pylori; double-stranded, circular
  misc_feature (B) LOCATION 1...726
  hypothetical: NO
  anti-sense: NO
atggttttgtttctatccatttttaaaaaaagctttaatgattttttaagcgctagaatgcttttaatcaatcttggccctatccttttgagtttggcgttttttggagctatcttttattacaatggcgggagtattgtgaattattgccaaactttattaccgcaatctttgaatgattacgctcattctcaaggcttttttgccggtgtgttcgcatgggtttttaaagcgttagtgtattttcttattttttggatcgtaattcttttgagtttagtcatcaatatttttgcgtctattttttacacccctttagtggtctcttatttgcaccaaaaatattatccccatgtcgttttagaagaatttggctctatccttttttctattaaatattttttaaaatcgctcacttttatgcttttattcttagcggttttaacgcccctttatttcattccctttataggggtctttggggtctttttttctatagtcccgcatttccyctttttcaaaaacaccatgagtttggatatagccagcatgattttcaaccatcaaagctatcaaaatttactcaaacagcaccgattgaagcattatcgtttttcgtttttttgctatcttttttccttgattcctttttttaatttttttgccaccttgttgcaaaccctaaygctaacgcactacytttttatctttaaagagaaagaatgc

SEQ ID NO: 1285 - DNA (genomic), 309 bp, Helicobacter pylori; double-stranded, circular
  misc_feature (B) LOCATION 1...309
  hypothetical: NO
  anti-sense: NO
ctcaacctgctggcggtgcactattcgatgcgcccggccgacgacgaccaccgctacggccacggcaaggccgaggccctggccggcatggcccaggccatgttcatcggtgccagcgcggtgctggtggctatccaggcggtcgagcaattgcgcgacccgcagcccctcggcgcggccacctggggcatcgcggtgatgctgctgtcgctgctgctcacggcccttctcctggccttccagacccacgtcatccgccgcaccggtaccaccgcgatacgcgccgactcgcgcactaccggtcggaca

SEQ ID NO: 1286 - DNA (genomic), 501 bp, Helicobacter pylori; double-stranded, circular
  misc_feature (B) LOCATION 1...501
  hypothetical: NO
  anti-sense: NO
atgagtcccgattccccccacgcccgcgtgaggcgcctggccaccctggcatcgctcggagtcgccgtcaccatggtcatcggcaaggccatcgcctggtggctgagcaaaacggtgagcctgctcgccggcctcacagactccctgctggacagtgccgcctcgctgctcaacctgctggcggtgcactattcgatgcgcccggccgacgacgaccaccgctacggccacggcaaggccgaggccctggccggcatggcccaggccatgttcatcggtgccagcgcggtgctggtggctatccaggcggtcgagcaattgcgcgacccgcagcccctcggcgcggccacctggggcatcgcggtgatgctgctgtcgctgctgctcacggcccttctcctggccttccagacccacgtcatccgccgcaccggttccaccgcgatacgcgccgactcgctgcactaccgctcggacctgctgctcaacgccagcatcctc

SEQ ID NO: 1287 - DNA (genomic), 210 bp, Helicobacter pylori; double-stranded, circular
  misc_feature (B) LOCATION 1...210
  hypothetical: NO
  anti-sense: NO
gggggggggtttgaagtacctggcgaatatgtgtcgatcttgaaaagggatttttatgcgatgcttttaacgatgccctttattgccgctatccatgagatttcggcgtattgtgggcatcctagcaacttccttgtagagggtttggttatgcttggccttgtgtgtgtttttgggatttgttctaggctttgcgctaaattagggtgg

SEQ ID NO: 1288 - DNA (genomic), 441 bp, Helicobacter pylori; double-stranded, circular
  misc_feature (B) LOCATION 1...441
  hypothetical: NO
  anti-sense: NO
gtggctctagtctatacgatatgtatctccataaacgctaggattttttatgacatagatggttcagctagcgattcgatttttgaccctaaaaatagctattatatgtggctagtgggtctaatagcggctttgttgtctaaccttttatttgacccacgaggtagggattgttataaatctttccaagtaagattccctaagtttctcaaagccatttttaaggctaggttttttggtgcgttttatgacgctgtgttaggatcaaggctaagggatttttatgtgatgcttttaacgatgccctttattgccgctatccatgagatttcggcgtattgtgggcatcctagcaacttccttgtagagggtttggttatgcttggccttgtgtgtgtttttgggatttgttctaggctttgcgctaaattagggtggtga

SEQ ID NO: 1289 - DNA (genomic), 486 bp, Helicobacter pylori; double-stranded, circular
  misc_feature (B) LOCATION 1...486
  hypothetical: NO
  anti-sense: NO
atgaatatcaaaaagcgtttgagcgattgggaatatcaatgggcagtggctctagtctatacgatatgtatctccataaacgctaggattttttatgacatagatggttcagctagcgattcgatttttgaccctaaaaatagctattatatgtggctagtgggtctaatagcggctttgttgtctaaccttttatttgacccacgaggtagggattgttataaatctttccaagtaagataccctaggtttctcaaagccatttttaaggctaggttttttggcgcgttttataacgctgtgttaggatcaaggctaagggatttttatgtgatgcttttaacgatgccctttattgccgctatccatgagatttcggcgtattgtgggcatcctagcaacttccttgtagagggtttggttatgcttggccttgtgtgtgtttttgggatttgttctaggctttgcgctaaattagggtggtga

SEQ ID NO: 1290 - DNA (genomic), 348 bp, Helicobacter pylori; double-stranded, circular
  misc_feature (B) LOCATION 1...348
  hypothetical: NO
  anti-sense: NO
gtgccggctgttgggggggctttgatttggatycytatagygatttatgagctttatcatgggyatgtgaatgaggytatttttayygttttgtattccattttgttaattggtgtgttgattgatagcgtgatcaagccaattttaatcgtttttatcaaaaaaagaatctttaaaaccacccttaaaatcaatgaaatattgattttcttttctatgattgctgggatttctcaatttggtttttgggggattatcgtagggcctaccatcacggcgttttttatcgcgttactgcgattgtatgaaaattactttattcaaaaggagcaaaaaacatgcgaatgt

SEQ ID NO: 1291 - DNA (genomic), 1050 bp, Helicobacter pylori; double-stranded, circular
  misc_feature (B) LOCATION 1...1050
  hypothetical: NO
  anti-sense: NO
atgaaagctcagtatttcttttggattctttttttgattggtttttattggatgctttatctgtatcaagattttttaatggacgcactgatcgctgggcttttgtgtgtggggctttttcaagtgaaagtttttttgaataaacgcttttctaatgttatcagttcgtttttatgcgttttggttttagcgagcgttgtgatcgtgccgttgtattttattgtttataagggttctaatgtcatttttgaaatcaattttgaaaaactttcagccttaatcaaatggcttaaagggacaatcaccgaaaatttgtcgcattttcctgccattcatgatggggttagcaagtttttagaaaattttagcgccgcttccatcacgggctatttgttgaaagtgagcagttatattgggaaatacagcttgaaactcgttacagacgctttatttatcttggggttattgtttttctttttttactatggggagaaattttatcgttattttttaggggtcttgcctcttgaaatgaatcaaagtaaaaaaatttttgaagaagtggctgggattttacgaatcgtgcttttaacttctctcatcacggttattttagagggcgtggcgtttgggacgatgataatatggtttgggcatgatggctggtctttagggattttatacggcctagcgtctttggtgccggctgttgggggggctttgatttggatccctatagcgatttatgagctttatcatgggcatgtgaatgaggctatttttatcgttttgtattccattttgttaattggtgtgttgattgatagcgtgatcaagccaattttaatcgtttttatcaaaaaaagaatctttaaaaccacccttaaaatcaatgaaatattgattttcttttctatgattgctgggatttctcaatttggtttttgggggattatcgtagggcctaccatcacggcgttttttatcgcgttactgcgattgtatgaaaattactttattcaaaaggagcaaaaaacatgcgaatgttga

SEQ ID NO: 1292 - DNA (genomic), 1077 bp, Helicobacter pylori; double-stranded, circular
  misc_feature (B) LOCATION 1...1077
  hypothetical: NO
  anti-sense: NO
tttttggttcagtttaatggggataattgcatgaaagctcagtatttcttttggattctttttttgattggtttttattggatgctttatctgtatcaagattttttaatggacgcactgatcgctgggcttttgtgtgtggggctttttcaagtgaaagtttttttgaataaacgcttttctaatgttatcagttcgtttttatgcgttttggttttagcgagcgttgtgatcgtgccgttgtattttattgtttataagggttctaatgtcatttttgaaatcaattttgaaaaactttcagccttaatcaaatggcttaaagggacaatcaccgaaaatttgtcgcattttcctgccattcatgatggggttagcaagtttttagaaaattttagcgccgcttccatcacgggctatttgttgaaagtgagcagttatattgggaaatacagcttgaaactcgttacagacgctttatttatcttggggttattgtttttctttttttactatggggagaaattttatcgttattttttaggggtcttgcctcttgaaatgaatcaaagtaaaaaaatttttgaagaagtggctgggattttacgaatcgtgcttttaacttctctcatcacggttattttagagggcgtggcgtttgggacgatgataatatggtttgggcatgatggctggtctttagggattttatacggcctagcgtctttggtgccggctgttgggggggctttgatttggatccctatagcgatttatgagctttatcatgggcatgtgaatgaggctatttttatcgttttgtattccattttgttaattggtgtgttgattgatagcgtgatcaagccaattttaatcgtttttatcaaaaaaagaatctttaaaaccacccttaaaatcaatgaaatattgattttcttttctatgattgctgggatttctcaatttggtttttgggggattatcgtagggcctaccatcacggcgttttttatcgcgttactgcgattgtatgaaaattactttattcaaaaggagcaaaaaacatgcgaatgt

SEQ ID NO: 1293 - DNA (genomic), 264 bp, Helicobacter pylori; double-stranded, circular
  misc_feature (B) LOCATION 1...264
  hypothetical: NO
  anti-sense: NO
gtgggtgtcttatccctcaaaatagaggcaatttctaatttttatgggttatgcgttttaggggtgttgttagcatgtttttatcttttagacgcttattatctcatgcaagaaaggctgtttagggagcaataccaatggctaataaaaaaccgacttaaaaccgatgaaaggctgtttgaagtcttccctattcatcaaacttgccaatcaacgcaattcttatcgccatgcgttcgtttagtcttttcccctattgggcgt

SEQ ID NO: 1294 - DNA (genomic), 426 bp, Helicobacter pylori; double-stranded, circular
  misc_feature (B) LOCATION 1...426
  hypothetical: NO
  anti-sense: NO
atggaaaataccccgaaagacagagcaagaatccttatagaagagcttaaaatcttgcaaggcgttatcaacagaatggcacaaaattctttagaatgcaaaaaatggactctcgctctcgctgtgggtgtcttatccctcaaaatagaggcaatttctaatttttatgggttatgcgttttaggggtgttgttagcatgtttttatcttttagacgcttattatctcatgcaagaaaggctgtttagggagcaataccaatggctaataaaaaaccgacttaaaaccgatgaaaggctgtttgaagtcttccctattcatcaaacttgccaatcaacgcaattcttatccgccatgcgttcgtttagtcttttcccctattgggcgttaggtttgtgtttggtgggctatggtttttgttgttaa

SEQ ID NO: 1295 - DNA (genomic), 432 bp, Helicobacter pylori; double-stranded, circular
  misc_feature (B) LOCATION 1...432
  hypothetical: NO
  anti-sense: NO
atatcaaacatggaaaataccccgaaagacagagcaagaatccttatagaagagcttaaaatcttgcaaggcgttatcaacagaatggcacaaaattctttagaatgcaaaaaatggactctcgctctcgctgtgggtgtcttatccctcaaaatagaggcaatttctaatttttatgggttatgcgttttaggggtgttgttagcatgtttttatcttttagacgcttattatctcatgcaagaaaggctgtttagggagcaataccaatggctaataaaaaaccgacttaaaaccgatgaaaggctgtttgaagtcttccctattcatcaaacttgccaatcaacgcaattcttatccgccatgcgttcgtttagtcttttcccctattgggcgttaggtttgtgtttggtgggctatggtttttgttgt

SEQ ID NO: 1296 - DNA (genomic), 513 bp, Helicobacter pylori; double-stranded, circular
  misc_feature (B) LOCATION 1...513
  hypothetical: NO
  anti-sense: NO
atgaaaatttttgggactgatggcgtgaggggtaaagcaggggtgaaactcacccccatgtttgtgatgcgtttaggcattgctgccggattgtattttaaaaaacattctcaaacgaataaaattctaatcggtaaagacaccagaaagagcggctatatggtagaaaacgctttagtgagcgctctcacttccataggctataatgtgatccaaatagggcctatgcctacccctgcgatcgcttttttaaccgaagacatgcgctgtgatgcgggcattatgataagcgcgagccacaacccttttgaagacaatggcatcaagtttttcaattcctatggttataaactcaaagaagaagaagaaagagcgattgaagaaatctttcatgatgaagaattactgcattctagctataaagtgggcgagagcgtcggtagcgctaaaaggatagacgatgtgatagggccgctatatcgcgcatttgaagcactctytycccaaacattt

SEQ ID NO: 1297 - DNA (genomic), 1338 bp, Helicobacter pylori; double-stranded, circular
  misc_feature (B) LOCATION 1...1338
  hypothetical: NO
  anti-sense: NO
atgaaaatttttgggactgatggcgtgaggggtaaagcaggggtgaaactcacccccatgtttgtgatgcgtttaggcattgctgccggattgtattttaaaaaacattctcaaacgaataaaattctaatcggtaaagacaccagaaagagcggctatatggtagaaaacgctttagtgagcgctctcacttccataggctataatgtgatccaaatagggcctatgcctacccctgcgatcgcttttttaaccgaagacatgcgctgtgatgcgggcattatgataagcgcgagccacaacccttttgaagacaatggcatcaagtttttcaattcctatggttataaactcaaagaagaagaagaaagagcgattgaagaaatctttcatgatgaagaattactgcattctagctataaagtgggcgagagcgtcggtagcgctaaaaggatagacgatgtgatagggcgctatatcgcgcatttgaagcactctttccccaaacatttgaatttacaaaaattaaggatcgtgctagatacggctaatggcgcggcttataaggtggctccggtcgtttttagcgagcttggggctgatgttttagtgatcaatgatgagcctaatgggtgtaacattaatgagcaatgcggggctttacaccctaaccaattgagccaggaagtgaaaaaataccgtgcggatctaggctttgcttttgatggcgatgccgataggctagtggtggcggataatttagggaatatcgtgcatggggataagcttttaggggtgttaggggtttatcaaaaatctaaaaacgccctttcttctcaagcggttgtcgctacgagcatgagcaatttagcccttaaagaatacctgaaatcccaagatttagaattgaagcattgcgcgattggggataagtttgtgagcgaatgcatgcgattgaataaagccaattttgggggcgagcaaagcgggcatatcatttttagcgattacgctaaaacgggcgatggtttggtgtgcgctttgcaagtgagcgcgttagtgttagaaagcaagcttgtaagctctattgcgttaaacccctttgaactatacccccaaagcctagtgaatttgaatatccaaaaaaagccccctttagaaagcctgaaaggttatagcgctcttttaaaagaattagaccaactagagatccgccatttgatccgttatagcggcactgaaaacaaattacgaatccttttagaagctaaagacgaaaaacttttagaatccaaaatgcaagaattaaaagaattttttgaagggcagttgtgctaa

SEQ ID NO: 1298 - DNA (genomic), 1338 bp, Helicobacter pylori; double-stranded, circular
  misc_feature (B) LOCATION 1...1338
  hypothetical: NO
  anti-sense: NO
atgaaaatttttgggactgatggcgtgaggggtaaagcaggggtgaaactcacccccatgtttgtgatgcgtttaggcattgctgccggattgtattttaaaaaacattctcaaacgaataaaattctaatcggtaaagacaccagaaagagcggctatatggtagaaaacgctttagtgagcgctctcacttccataggctataatgtgatccaaatagggcctatgcctacccctgcgatcgcttttttaaccgaagacatgcgctgtgatgcgggcattatgataagcgcgagccacaacccttttgaagacaatggcatcaagtttttcaattcctatggttataaactcaaagaagaagaagaaagagcgattgaagaaatctttcatgatgaagaattactgcattctagctataaagtgggcgagagcgtcggtagcgctaaaaggatagacgatgtgatagggcgctatatcgcgcatttgaagcactctttccccaaacatttgaatttacaaaaattaaggatcgtgctagatacggctaatggcgcggcttataaggtggctccggtcgtttttagcgagcttggggctgatgttttagtgatcaatgatgagcctaatgggtgtaacattaatgagcaatgcggggctttacaccctaaccaattgagccaggaagtgaaaaaataccgtgcggatctaggctttgcttttgatggcgatgccgataggctagtggtggtggataatttagggaatatcgtgcatggggataagcttttaggggtgttaggggtttatcaaaaatctaaaaacgccctttcttctcaagcggttgtcgctacgagcatgagcaatttagcccttaaagaatacctgaaatcccaagatttagaattgaagcattgcgcgattggggataagtttgtgagcgaatgcatgcgattgaataaagccaattttgggggcgagcaaagcgggcatatcatttttagcgattacgctaaaacgggcgatggtttggtgtgcgctttgcaagtgagcgcgttagtgttagaaagcaagcttgtaagctctattgcgttaaacccctttgaactatacccccaaagcctagtgaatttgaatatccaaaaaaagccccctttagaaagcctgaaaggttatagcgctcttttaaaagaattagaccaactagagatccgccatttgatccgttatagcggcactgaaaacaaattacgaatccttttagaagctaaagacgaaaaacttttagaatccaaaatgcaagaattaaaagaattttttgaagggcagttgtgctaa

SEQ ID NO: 1299 - DNA (genomic), 1356 bp, Helicobacter pylori; double-stranded, circular
  misc_feature (B) LOCATION 1...1356
  hypothetical: NO
  anti-sense: NO
tttaaaaggtattttataacgatgaaaatttttgggactgatggcgtgaggggtaaagcaggggtgaaactcacccccatgtttgtgatgcgtttaggcattgctgccggattgtattttaaaaaacattctcaaacgaataaaattctaatcggtaaagacaccagaaagagcggctatatggtagaaaacgctttagtgagcgctctcacttccataggctataatgtgatccaaatagggcctatgcctacccctgcgatcgcttttttaaccgaagacatgcgctgtgatgcgggcattatgataagcgcgagccacaacccttttgaagacaatggcatcaagtttttcaattcctatggttataaactcaaagaagaagaagaaagagcgattgaagaaatctttcatgatgaagaattactgcattctagctataaagtgggcgagagcgtcggtagcgctaaaaggatagacgatgtgatagggcgctatatcgcgcatttgaagcactctttccccaaacatttgaatttacaaaaattaaggatcgtgctagatacggctaatggcgcggcttataaggtggctccggtcgtttttagcgagcttggggctgatgttttagtgatcaatgatgagcctaatgggtgtaacattaatgagcaatgcggggctttacaccctaaccaattgagccaggaagtgaaaaaataccgtgcggatataggctttgcttttgatggcgatgccgataggctagtggtggcggataatttagggaatatcgtgcatggggataagcttttaggggtgttaggggtttatcaaaaatctaaaaacgccctttcttctcaagcggttgtcgctacgagcatgagcaatttagcccttaaagaatacctgaaatcccaagatttagaattgaagcattgcgcgattggggataagtttgtgagcgaatgcatgcgattgaataaagccaattttgggggcgagcaaagcgggcatatcatttttagcgattacgctaaaacgggcgatggtttggtgtgcgctttgcaagtgagcgcgttagtgttagaaagcaagcttgtaagctctattgcgttaaacccctttgaactatacccccaaagcctagtgaatttgaatatccaaaaaaagccccctttagaaagcctgaaaggttatagcgctcttttaaaagaattagaccaactagagatccgccatttgatccgttatagcggcactgaaaacaaattacgaatccttttagaagctaaagacgaaaaacttttagaatccaaaatgcaagaattaaaagaattttttgaagggcagttgtgc

SEQ ID NO: 1300 - DNA (genomic), 945 bp, Helicobacter pylori; double-stranded, circular
  misc_feature (B) LOCATION 1...945
  hypothetical: NO
  anti-sense: NO
aagacaatgagtatggaatttgatgccgtgattattggaggtggggtttcagggtgcgcgaccttttatactttgagcgaatacagctctttaaagcgcgtggctattgtggaaaaatgctctaaattagctcaaatcagctccagcgctaaggctaattcacaaaccattcatgatggctctattgaaacgaattacactccagaaaaagctaaaaaagtgcgtttgagcgcttataagaccagacaatacgcgctcaataaaggcttgcaaaatgaagtgatttttgaaacccaaaaaatggctataggcgtgggcgatgaagaatgcgagttcatgaaaaaacgctacgaatcctttaaagaaatctttgtggggttagaggaatttgacaagcaaaagattaaagaattagagcctaatgtgattttaggggctaatggcatagacaggcatgaaaacattatcgggcatgggtatagaaaggattggagcacgatgaattttgcgaagttgagtgaaaacttcgttgaagaagccctaaaattaaagcctaacaaccaggtgtttttgaatttcaaagtgaaaaagattgaaaaacgcaacgacacttacgccgtaatttccgaagacgctgaagaagtgtatgctaaattcgtgctggtcaatgccggctcttacgctttgctggctcagagcatgggatatggcctggatttagggtgcttgcctgtggcgggtagcttttattttgtgccggatttattaaggggtaaggtttataccgttcaaaaccccaagctcccttttgcagccgtgcatggcgaccctgatgccgtcattaaaggaaaaacacgaatcgggcctaccgctttaacgatgcctaaattagaacgcaacaaatgctggcttaagggcattagcttggaattgttgaaatggatt

SEQ ID NO: 1301 - DNA (genomic), 1353 bp, Helicobacter pylori; double-stranded, circular
  misc_feature (B) LOCATION 1...1353
  hypothetical: NO
  anti-sense: NO
atgagtatggaatttgatgccgtgattattggaggtggggtttcagggtgcgcgaccttttatactttgagcgaatacagctctttaaagcgcgtggctattgtggaaaaatgctctaaattagctcaaatcagctccagcgctaaggctaattcacaaaccattcatgatggctctattgaaacgaattacactccagaaaaagctaaaaaagtgcgtttgagcgcttataagaccagacaatacgcgctcaataaaggcttgcaaaatgaagtgatttttgaaacccaaaaaatggctataggcgtgggcgatgaagaatgcgagttcatgaaaaaacgctacgaatcctttaaagaaatctttgtggggttagaggaatttgacaagcaaaagattaaagaattagagcctaatgtgattttaggggctaatggcatagacaggcatgaaaacattatcgggcatgggtatagaaaggattggagcacgatgaattttgcgaagttgagtgaaaacttcgttgaagaagccctaaaattaaagcctaacaaccaggtgtttttgaatttcaaagtgaaaaagattgaaaaacgcaacgacacttacgccgtaatttctgaagacgctgaagaagtgtatgctaaattcgtgctggtcaatgccggctcttacgctttgcctttggctcagagcatgggatatggcctggatttagggtgcttgcctgtggcgggtagcttttattttgtgccggatttattaaggggtaaggtttataccgttcaaaaccccaagctcccttttgcagccgtgcatggcgaccctgatgccgtcattaaaggaaaaacacgaatcgggcctaccgctttaacgatgcctaaattagaacgcaacaaatgctggcttaagggcattagcttggaattgttgaaaatggatttgaatagagatgtgtttaaaatcgcgtttgatttgatgagcgataaagaaatccgtaattatgtgtttaaaaacatggtttttgaattgcccattatcggtaaaaggaaatttttaaaagacgctcaaaaaatcatccccactcttagcctagaagatttagaatacgctcatggttttggcgaagtgcgcccgcaagttttagacagaactaagcgaaaattggaattaggcgaaaaaaagatttgcacccataaaggcatcacttttaacatgaccccctctccaggcgcgacgagttgtttgcaaaacgcccttgtggattcccaagaaatcgctgcgtatttgggcgagagctttgaattagaacgcttttataaagatttatccccagaagaattggaaaattaa

SEQ ID NO: 1302 - DNA (genomic), 348 bp, Helicobacter pylori; double-stranded, circular
  misc_feature (B) LOCATION 1...348
  hypothetical: NO
  anti-sense: NO
gtgatgaacttttttgtgggcggactttccattgtttgtaatgtggtggtcatcacttactccgcgctccaccctacagcccctgtagaaggtgcagaagatattgttcaagtatcgcaccatttgaccagtttctatgggccagcgactgggttattgtttggktttacctacttgtatgccgctatcaaccacacttttggtttggattggagaccctattcttggtatagcttattcgtagcgatcaacactgttcctgctgcgattttatcccactatagcgatatgcttgatgaccacaaagtgttaggcatcactgaaggcgattggtgggcaatcatatkg

SEQ ID NO: 1303 - DNA (genomic), 588 bp, Helicobacter pylori; double-stranded, circular
  misc_feature (B) LOCATION 1...588
  hypothetical: NO
  anti-sense: NO
atgctaggacttgtattgttatatgttgggattgttttaatcagcaatgggatttgcggattaaccaaagtcgatcctaaaagcaccgcggtgatgaacttttttgtgggcggactttccattgtttgtaatgtggtggtcatcacttactccgcgctccaccctacagcccctgtagaaggtgcagaagatattgttcaagtatcgcaccatttgaccagtttctatgggccagcgactgggttattgtttggttttacctacttgtatgccgctatcaaccacacttttggtttggattggagaccctattcttggtatagcttattcgtagcgatcaacactgttcctgctgcgattttatcccactatagcgatatgcttgatgaccacaaagtgttaggcatcactgaaggcgattggtgggcaatcatatggttggcttggggtgttttgtggcttaccgctttcattgaaaacatcttgaaaatccctttagggaaattcactccatggcttgctatcattgagggtattttaaccgcttggatccctgcttggttactctttatccaacactgggtgtga

SEQ ID NO: 1304 - DNA (genomic), 588 bp, Helicobacter pylori; double-stranded, circular
  misc_feature (B) LOCATION 1...588
  hypothetical: NO
  anti-sense: NO
ggcaatgctaggacttgtattgttatatgttgggattgtcttaatcagcaatgggattgcggattaaccaaagtcgatcctaaaagcaccgcggtgatgaacttttttgtgggcggactttccattgtttgtaatgtggtggtcatcacttactccgcgctccaccctacagcccctgtagaaggtgcagaagatattgttcaagtatcgcaccatttgaccagtttctatgggccagcgactgggttattgtttggttttacctacttgtatgccgctatcaaccacacttttggtttggattggagaccctattcttggtatagcttattcgtagcgatcaacactgttcctgctgcgattttatcccactatagcgatatgcttgatgaccacaaagtgttaggcatcactgaaggcgattggtgggcaatcatatggttggcttggggtgttttgtggcttaccgctttcattgaaaacatcttgaaaatccctttagggaaattcactccatggcttgctatcattgagggtattttaaccgcttggatccctgcttggttactctttatccaacactgggtg

SEQ ID NO: 1305 - DNA (genomic), 348 bp, Helicobacter pylori; double-stranded, circular
  misc_feature (B) LOCATION 1...348
  hypothetical: NO
  anti-sense: NO
atgaaattttttacaagaatcactgacagctacaagaaagttgtagtaactttagggctagtggtaacaaccaatcctttaatggcggtcaccagtcctgcaacaggcgttactgagactaaaagtttggttattcagatcatttctgttctagcgatcgtaggtggttgcgctttaggggtcaaaggcatagcagatatttggaaaatctctgatgacatcaaaagaggtcaggcgactgtttttgcttacgcgcaacccatagctatgttagcggtggcaggtggcattatctatttgagcactaagtttggcttcaatattggcgagagtggaggagctagctaa

SEQ ID NO: 1306 - DNA (genomic), 345 bp, Helicobacter pylori; double-stranded, circular
  misc_feature (B) LOCATION 1...345
  hypothetical: NO
  anti-sense: NO
atgaaattttttacaagaatcactgacagctacaagaaagttgtagtaactttagggctagtggtaacaaccaatcctttaatggcggtcaccagtcctgcaacaggcgttactgagactaaaagtttggttattcagatcatttctgttctagcgatcgtaggtggttgcgctttaggggtcaaaggcatagcagatatttggaaaatctctgatgacatcaaaagaggtcaggcgactgtttttgcttacgcgcaacccatagctatgttagcggtggcaggtggcattatctatttgagcactaagtttggcttcaatattggcgagagtggaggagctagc

SEQ ID NO: 1307 - DNA (genomic), 366 bp, Helicobacter pylori; double-stranded, circular
  misc_feature (B) LOCATION 1...366
  hypothetical: NO
  anti-sense: NO
tttcaatttgaaaggaaacgcatgaaattttttacaagaatcactgacagctacaagaaagttgtagtaactttagggctagtggtaacaaccaatcctttaatggcggtcaccagtcctgcaacaggcgttactgagactaaaagtttggttattcagatcatttctgttctagcgatcgtaggtggttgcgctttaggggtcaaaggcatagcagatatttggaaaatctctgatgacatcaaaagaggtcaggcgactgtttttgcttacgcgcaacccatagctatgttagcggtggcaggtggcattatctatttgagcactaagtttggcttcaatattggcgagagtggaggagctagc

SEQ ID NO: 1308 - DNA (genomic), 477 bp, Helicobacter pylori; double-stranded, circular
  misc_feature (B) LOCATION 1...477
  hypothetical: NO
  anti-sense: NO
caatggttacaggccggtggcgatttagacagctacaccttttcaggcgtgcttttagaaaacaccgacaaaaaaattgaaaaaattgaagataaagacgctaaagaaatcaaacgcttttctaacaccctctttttatccagcgtggataggtatttcactactttgcttttcactaaagatcctcaaggttttgaagccttaattgattcagaaatagggactaaaaaccccttagggttcatttcccttaaaaacgaagcgaatttgcatggctatattggccctaaagattaccgctctttgaaagcgatttcacccatgctcactgatgtgatagagtatggcttgatcactttctttgccaaaggcgtgtttgttttactggattatttgtatcaatttgtgggcaattgggggttgggctatcattcttttaacgattatcgtgcgcattatcctctaccccttaagcta

SEQ ID NO: 1309 - DNA (genomic), 474 bp, Helicobacter pylori; double-stranded, circular
  misc_feature (B) LOCATION 1...474
  hypothetical: NO
  anti-sense: NO
tggttacaggccggtggcgatttagacagctacaccttttcaggcgtgcttttagaaaacaccgacaaaaaaattgaaaaaattgaagataaagacgctaaagaaatcaaacgcttttctaacaccctctttttatccagcgtggataggtatttcactactttgcttttcactaaagatcctcaaggttttgaagccttaattgattcagaaatagggactaaaaaccccttagggttcatttcccttaaaaacgaagcgaatttgcatggctatattggccctaaagattaccgctctttgaaagcgatttcacccatgctcactgatgtgatagagtatggcttgatcactttctttgccaaaggcgtgtttgttttactggattatttgtatcaatttgtgggcaattgggggttgggctatcattcttttaacgattatcgtgcgcattatcctctaccccttaagcta

SEQ ID NO: 1310 - DNA (genomic), 510 bp, Helicobacter pylori; double-stranded, circular
  misc_feature (B) LOCATION 1...510
  hypothetical: NO
  anti-sense: NO
agcatgcaaaagctcaaagaattagcccctaaaatgaaagaactccaagaaaaatacaagggcgaaccccaaaagttacaagcccacatgatgcagctttacaaaaaacatggggctaacccgctagggggttgtttgcccttaatcttacaaatcccagtattttttgcgatttatagagtgctttataacgctgtggaattgaaaagctcagagtgggttttatggatccatgatttatccatcatggatccgtatttcattttaccgcttcttatgggagcgtctatgtattggcaccagagcgttacgccaaacaccatgaccgatcccatgcaagcaaagatttttaaactcttgcccctattattcacgatctttctaatcactttccctgcagggttagtcttgtattggaccacacacaacatcctttcggtgttgcagcaactcatcattaataaagtcttagagaataaaaaacgcgcgcacgctcaaaacataaaggaa

SEQ ID NO: 1311 - DNA (genomic), 594 bp, Helicobacter pylori; double-stranded, circular
  misc_feature (B) LOCATION 1...594
  hypothetical: NO
  anti-sense: NO
atggataaaaacaacaataataatctccgcttgattttagcgatcgctctgtctttcttgtttatcgctctttatagctattttttccaagaaccaaacaaaacaacaaccgaaaccacaaagcaagaaacaaccaacaaccacacagcaacaagccccaccgcgtccaataccatcacccaagattttagcgttacccaaaccatccctcaagagagtttgttaagcacgatttcttttgaacatgccaaaattgaaattgattctttagggcgcatcaaacaggtttatctcaaagataaaaagtatctaacccctaaagaaaagggctttttagagcatgtgagccatctttttagctccaaagaaaactcgcaaccctccctaaaagagctcccccttttagcagccgataaactcaagcctttagaagtgcgttttttagaccccacgctcaataataaagcgttcaacaccccttatagcgcctcaaaaaccacccttgggcctaacgaacagctcgttttaacccaagatttaggcactcttagcatcattaaaaccctgactttttatgatgatttgcattattga

SEQ ID NO: 1312 - DNA (genomic), 603 bp, Helicobacter pylori; double-stranded, circular
  misc_feature (B) LOCATION 1...603
  hypothetical: NO
  anti-sense: NO
ggtttaatcacaatggataaaaacaacaataataatctccgcttgattttagcgatcgctctgtctttcttgttaatcgctcttaatagctattttttccaagaaccaaacaaaacaacaaccgaaaccacaaagcaagaaacaaccaacaaccacacagcaacaagccccaccgcgtccaataccatcacccaagattttagcgttacccaaaccatccctcaagagagtttgttaagcacgatttcttttgaacatgccaaaattgaaattgattctttagggcgcatcaaacaggtttatctcaaagataaaaagtatctaacccctaaagaaaagggctttttagagcatgtgagccatctttttagctccaaagaaaactcgcaaccctccctaaaagagctcccccttttagcagccgataaactcaagcctttagaagtgcgttttttagaccccacgctcaataataaagcgttcaacaccccttatagcgcctcaaaaaccacccttgggcctaacgaacagctcgttttaacccaagatttaggcactcttagcatcattaaaaccctgactttttatgatgatttgcattat

SEQ ID NO: 1313 - DNA (genomic), 1077 bp, Helicobacter pylori; double-stranded, circular
  misc_feature (B) LOCATION 1...1077
  hypothetical: NO
  anti-sense: NO
atgatgatttgcattattgatttaaaaatcgcattcaaatcgcccaataaccttatccctagctatgtgatcaccaatggttacaggccggtggctgatttagacagctacaccttttcaggcgtgcttttagaaaacaccgacaaaaaaattgaaaaaattgaagataaagacgctaaagaaatcaaacgcttttctaacaccctctttttatccagcgtggataggtatttcactactttgcttttcactaaagatcctcaaggttttgaagccttaattgattcagaaatagggactaaaaaccccttagggttcatttcccttaaaaacgaagcgaatttgcatggctatattggccctaaagattaccgctctttgaaagcgatttcacccatgctcactgatgtgatagagtatggcttgatcactttctttgccaaaggcgtgtttgttttactggattatttgtatcaatttgtgggcaattggggttgggctatcattcttttaacgattatcgtgcgcattatcctctaccccttaagctataagggcatggtgagcatgcaaaagctcaaagaattagcccctaaaatgaaagaactccaagaaaaatacaagggcgaaccccaaaagttacaagcccacatgatgcagctttacaaaaaacatggggctaacccgctagggggttgtttgcccttaatcttacaaatcccagtattttttgcgatttatagagtgctttataacgctgtggaattgaaaagctcagagtgggttttatggatccatgatttatccatcatggatccgtatttcattttaccgcttcttatgggagcgtctatgtattggcaccagagcgttacgccaaacaccatgaccgatcccatgcaagcaaagatttttaaactcttgcccctattattcacgatctttctaatcactttccctgcagggttagtcttgtattggaccacacacaacatcctttcggtgttgcagcaactcatcattaataaagtcttagagaataaaaaacgcgcgcacgctcaaaacataaaggaataa

SEQ ID NO: 1314 - DNA (genomic), 1650 bp, Helicobacter pylori; double-stranded, circular
  misc_feature (B) LOCATION 1...1650
  hypothetical: NO
  anti-sense: NO
atggataaaaacaacaataataatctccgcttgattttagcgatcgctctgtctttcttgtttatcgctctttatagctattttttccaagaaccaaacaaaacaacaaccgaaaccacaaagcaagaaacaaccaacaaccacacagcaacaagccccaccgcgtccaataccatcacccaagattttagcgttacccaaaccatccctcaagagagtttgttaagcacgatttcttttgaacatgccaaaattgaaattgattctttagggcgcatcaaacaggtttatctcaaagataaaaagtatctaacccctaaagaaaagggctttttagagcatgtgagccatctttttagctccaaagaaaactcgcaaccctccctaaaagagctcccccttttagcagccgataaactcaagcctttagaagtgcgttttttagaccccacgctcaataataaagcgttcaacaccccttatagcgcctcaaaaaccacccttgggcctaacgaacagctcgttttaacccaagatttaggcactcttagcatcattaaaaccctgactttttatgatgatttgcattatgatttaaaaatcgcattcaaatcgcccaataaccttatccctagctatgtgatcaccaatggttacaggccggtggctgatttagacagctacaccttttcaggcgtgcttttagaaaacaccgacaaaaaaattgaaaaaattgaagataaagacgctaaagaaatcaaacgcttttctaacaccctctttttatccagcgtggataggtatttcactactttgcttttcactaaagatcctcaaggttttgaagccttaattgattcagaaatagggactaaaaaccccttagggttcatttcccttaaaaacgaagcgaatttgcatggctatattggccctaaagattaccgctctttgaaagcgatttcacccatgctcactgatgtgatagagtatggcttgatcactttctttgccaaaggcgtgtttgttttactggattatttgtatcaatttgtgggcaattggggttgggctatcattcttttaacgattatcgtgcgcattatcctctaccccttaagctataagggcatggtgagcatgcaaaagctcaaagaattagcccctaaaatgaaagaactccaagaaaaatacaagggcgaaccccaaaagttacaagcccacatgatgcagctttacaaaaaacatggggctaacccgctagggggttgtttgcccttaatcttacaaatcccagtattttttgcgatttatagagtgctttataacgctgtggaattgaaaagctcagagtgggttttatggatccatgatttatccatcatggatccgtatttcattttaccgcttcttatgggagcgtctatgtattggcaccagagcgttacgccaaacaccatgaccgatcccatgcaagcaaagatttttaaactcttgcccctattattcacgatctttctaatcactttccctgcagggttagtcttgtattggaccacacacaacatcctttcggtgttgcagcaactcatcattaataaagtcttagagaataaaaaacgcgcgcacgctcaaaacataaaggaataa

SEQ ID NO: 1315 - DNA (genomic), 1650 bp, Helicobacter pylori; double-stranded, circular; identical to SEQ ID NO: 1314
  misc_feature (B) LOCATION 1...1650
  hypothetical: NO
  anti-sense: NO

SEQ ID NO: 1316 - DNA (genomic), 390 bp, Helicobacter pylori; double-stranded, circular
  misc_feature (B) LOCATION 1...390
  hypothetical: NO
  anti-sense: NO
atgaaaaagattattcttgcatgccttgtggcttttgtgggtgccaatttaagcgcagagcctaagtggtatagcaaggcctataacaaaacaaacgcccaaaaaggctatctttatgggagtggttcagccacttctaaagaggcttctaaacaaaaagcgttagcggatttagtggcgtctattagcgtggtggtcaattcacaaatccacattcaaaaaagtcgtgtggataataagttaaaatccagcgattcacaaacgatcaacttaaaaaccgatgacttggaattgaataatgtagaaattgtcaatcaagaagcgcaaaaagggatctactacaccagagtgaggaatcaatcaaaacttgtttttgcagggtttaaggga

SEQ ID NO: 1317 - DNA (genomic), 912 bp, Helicobacter pylori; double-stranded, circular
  misc_feature (B) LOCATION 1...912
  hypothetical: NO
  anti-sense: NO
atgaaaaagattattcttgcatgccttgtggcttttgtgggtgccaatttaagcgcagagcctaagtggtatagcaaggcctataacaaaacaaacgcccaaaaaggctatctttatgggagtggttcagccacttctaaagaggcttctaaacaaaaagcgttagcggatttagtggcgtctattagcgtggtggtcaattcacaaatccacattcaaaaaagtcgtgtggataataagttaaaatccagcgattcacaaacgatcaacttaaaaaccgatgacttggaattgaataatgtagaaattgtcaatcaagaagcgcaaaaagggatctactacaccagagtgaggatcaatcaaaacttgtttttgcagggtttaagggataagtataacgctctttatgggcagttttccaccttaatgcctaaggtttgcaaaggggtttttttacaacaatccaagagcatgggggatttattggctaaagcggcgcctatggaaaggattttaaaagcgtattctgtcccggtgagttcgttagaaaattatgaaaaaatctattaccaaaacgctttcaaacctaaagtgcgaatcgcttttgatgataacagcgacacagagattaaaaacgctctcatgagtgcttacgctagagtgctaacccctagcgatgaagaaaaactttatcaaatcaaaaatgaagttttcacggacagtgctaatggcatcacacgcattagagtgattattagcgcgagcgattgtcaaggcacgcctgtattgaataggagtcttgaagtggatgaaaagaataagaattttgctatcacgcgcttgcaatctttactttataaagaattgaaaggttatgccaataaagaaggacaaggcaatacagggctataa

SEQ ID NO: 1318 - DNA (genomic), 918 bp, Helicobacter pylori; double-stranded, circular
  misc_feature (B) LOCATION 1...918
  hypothetical: NO
  anti-sense: NO
ggattgataatgaaaaagattattcttgcatgccttgtggcttttgtgggtgccaatttaagcgcagagcctaagtggtatagcaaggcctataacaaaacaaacgcccaaaaaggctatctttatgggagtggttcagccacttctaaagaggcttctaaacaaaaagcgttagcggatttagtggcgtctattagcgtggtggtcaattcacaaatccacattcaaaaaagtcgtgtggataataagttaaaatccagcgattcacaaacgatcaacttaaaaaccgatgacttggaattgaataatgtagaaattgtcaatcaagaagcgcaaaaagggatctactacaccagagtgaggatcaatcaaaacttgtttttgcagggtttaagggataagtataacgctctttatgggcagttttccaccttaatgcctaaggtttgcaaaggggttttttacaaacaatccaagagcatgggggatttattggctaaagcggcgcctatggaaaggattttaaaagcgtattctgtcccggtgagttcgttagaaaattatgaaaaaatctattaccaaaacgctttcaaacctaaagtgcgaatcgcttttgatgataacagcgacacagagattaaaaacgctctcatgagtgcttacgctagagtgctaacccctagcgatgaagaaaaactttatcaaatcaaaaatgaagttttcacggacagtgctaatggcatcacacgcattagagtgattattagcgcgagcgattgtcaaggcacgcctgtattgaataggagtcttgaagtggatgaaaagaataagaattttgctatcacgcgcttgcaatctttactttataaagaattgaaaggttatgccaataaagaaggacaaggcaatacagggcta

SEQ ID NO: 1319 - DNA (genomic), 345 bp, Helicobacter pylori; double-stranded, circular
  misc_feature (B) LOCATION 1...345
  hypothetical: NO
  anti-sense: NO
atagttagccaacgaatgaaaagcaatttccaatacagcacgctagaaaatatccctaaagcctttgacattctcaaagacccccctaaaaagctctattgtgtgggcgatataaagcttttagaagcgcctttaaaagtggctatcataggcacaagaagacccaccccttacagcaagcaacacacgatcaccctagccagagagcttgctaaaaatggtgcggttattgtgagcggaggagcgttaggcgtggatattatcgctcaagaaaacgccttaccaaaaaccatcatgctttcgcttgcagtttggattttatctatcccacgaacaaccataaag

SEQ ID NO: 1320 - DNA (genomic), 411 bp, Helicobacter pylori; double-stranded, circular
  misc_feature (B) LOCATION 1...411
  hypothetical: NO
  anti-sense: NO
atgcccattaaaggctcttttttagccagaaaccgcctggtgatcgctttaaccgatgcggtgattatcccccaagcggatttaaaaagcggctctatgagcagtgcgagattagcccagaaataccaaaaacccttgtttgttttaccccaacgcctgaatgagagcgacggcactaatgagcttttagaaaaagggcaggctcaagggatatttaatattcaaaattttataaacacccttttaaaagattaccatttaaaagaaatgcctgaaatgaaagatgaatttttagaatattgcgcgaaaaaccctagctatgaagaagcgtatctcaaatttggggataagcttttagaatacgagctgttgggtaagattaagcgcatcaatcatctcgtggtgttagca

SEQ ID NO: 1321 - DNA (genomic), 597 bp, Helicobacter pylori; double-stranded, circular
  misc_feature (B) LOCATION 1...597
  hypothetical: NO
  anti-sense: NO
aaatggtgcggttattgtgagcggaggagcgttaggcgtggatattatcgctcaagaaaacgccttaccaaaaaccatcatgctttcgcttgcagtttggattttatctatcccacgaacaaccataaagtgatccaagaaatcgcgcaaaacggtttgattttaagcgaacatgaaaaggatttcatgtttattaaaggtttttttttagttagaaattgtctggtgatcgctttaaccgacgcggtgattatcccccaagcggatttaaaaagcggctctatgagtagtgtgagattagcccagaaataccaaaaacccttgtttgttttaccccaacgcctgaatgagagcgacggcactaatgagcttttagaaaaagggcaggctcaagggatatttaatattcaaaattttataaacacccttttaaaagattaccatttaaaagaaatgcctgaaatgaaagatgaatttttagaatattgcgcgaaaaaccctagctatgaagaagcgtatctcaaatttggggataagcttttagaatacgagctgttgggtaagattaagcgcatcaatcatctcgtggtgttagca

SEQ ID NO: 1322 - DNA (genomic), 765 bp, Helicobacter pylori; double-stranded, circular
  misc_feature (B) LOCATION 1...765
  hypothetical: NO
  anti-sense: NO
atgaaaagcaatttccaatacagcacgctagaaaatatccctaaagcctttgacattctcaaagacccccctaaaaagctctattgtgtgggcgatataaagcttttagaagcgcctttaaaagtggctatcataggcacaagaagacccaccccttacagcaagcaacacacgatcaccctagccagagagcttgctaaaaatggtgcggttattgtgagcggaggagcgttaggcgtggatattatcgctcaagaaaacgccttaccaaaaaccatcatgctttcgccttgcagtttggattttatctatcccacgaacaaccataaagtgatccaagaaatcgcgcaaaacggcttgattttaagcgaatatgaaaaggatttcatgcccattaaaggctcttttttagccagaaaccgcctggtgatcgctttaagcgatgcggtgattatcccccaagcggatttaaaaagcggctctatgagcagcgcgagattagcccagaaataccaaaaacccttgtttgttttaccccaacgcctgaatgagagcgacggcactaatgagcttttagaaaaagggcaggctcaagggatatttaatattcaaaattttataaacacccttttaaaagattaccatttaaaagaaatgcctgaaatgaaagatgaatttttagaatattgcgcgaaaaaccctagctatgaagaagcgtatctcaaatttggggataagcttttagaataccgagctgttgggtaa

SEQ ID NO: 1323 - DNA (genomic), 462 bp, Helicobacter pylori; double-stranded, circular
  misc_feature (B) LOCATION 1...462
  hypothetical: NO
  anti-sense: NO
gtgatagtggcgtggctttttaggtttaaaagcattgcgttttctattttaatcactctgttggttattttagtggatatttgggtgtatagcgatgtgcgccagtttttattggacacttctagctcttttatttggcttttaatcgctttactaatcaagtggggcgtgattgttataagtgcgcgcaaatgctaccaattcagccaaaaaatgtttgcgttaatccaaagaaaaaggcaaatcagagagaatttaaaaaaccgctccaatcgcaaagatgctaaaaattttgaaaaactctctaacatcgctgaagaaatcatttcaaaaaaacaagaagagtcccaccacaaagaagattctaatgatgaaaaccacaaagacaagctttctaacattaccgaagaaatgattctcaaaaaacaagaggaactgaaagctagaaaggataagggggat

SEQ ID NO: 1324 - DNA (genomic), 561 bp, Helicobacter pylori; double-stranded, circular
  misc_feature (B) LOCATION 1...561
  hypothetical: NO
  anti-sense: NO
atgaacaagaaaaatagcgtaatttctggtttgatgaatttttttagcgaaaagaatgagcgctggctgttagcccacaggcacacgagggggtttgtgatagtggcgtggctttttaggtttaaaagcattgcgttttctattttaatcactctgttggttattttagtggatatttgggtgtatagcgatgtgcgccagtttttattggacacttctagctcttttatttggcttttaatcgctttactaatcaagtggggcgtgattgttataagtgcgcgcaaatgctaccaattcagccaaaaaatgtttgcgttaatccaaagaaaaaggcaaatcagagagaatttaaaaaaccgctccaatcgcaaagatgctaaaaattttgaaaaactctctaacatcgctgaagaaatcatttcaaaaaaacaagaagagtcccaccacaaagaagattctaatgatgaaaaccacaaagacaagctttctaacattaccgaagaaatgattctcaaaaaacaagaggaactgaaagctagaaaggataagggggattaa

SEQ ID NO: 1325 - DNA (genomic), 582 bp, Helicobacter pylori; double-stranded, circular
  misc_feature (B) LOCATION 1...582
  hypothetical: NO
  anti-sense: NO
agaagtttgggaaaagggcgaccaatgaacaagaaaaatagcgtaatttctggtttgatgaatttttttagcgaaaagaatgagcgctggctgttagcccacaggcacacgagggggtttgtgatagtggcgtggctttttaggtttaaaagcattgcgttttctattttaatcactctgttggttattttagtggatatttgggtgtatagcgatgtgcgccagtttttattggacacttctagctcttttatttggcttttaatcgctttactaatcaagtggggcgtgattgttataagtgcgcgcaaatgctaccaattcagccaaaaaatgtttgcgttaatccaaagaaaaaggcaaatcagagagaatttaaaaaaccgctccaatcgcaaagatgctaaaaattttgaaaaactctctaacatcgctgaagaaatcatttcaaaaaaacaagaagagtcccaccacaaagaagattctaatgatgaaaaccacaaagacaagctttctaacattaccgaagaaatgattctcaaaaaacaagaggaactgaaagctagaaaggataagggggat

SEQ ID NO: 1326 - DNA (genomic), 852 bp, Helicobacter pylori; double-stranded, circular
  misc_feature (B) LOCATION 1...852
  hypothetical: NO
  anti-sense: NO
agccgaattaaaagccatgatcgcagagagagaataaaaatgagtaagattgcaaaaacagccattatttctcctaaagcagagattggcaaaggtgtagagattggggaattttgcgttattggggatggcgtcaaattagatgaaggcgtgaaactccacaacaatgtaaccttacaagggcatactttcattgggaaaaacaccgaaattttcccttttgccgtcttaggcacacagcctcaagatttaaaatacaagggcgaatacagcgagctgatggttggagaagacaaccttattcgtgaattttgcatgataaatcccggcactgaaggggggattaaaaaaacccttattggggataaaaacctgctcatggcttatgtgcatgtcgctcatgattgcgtgattggcagtcattgtattttggctaatggcgtaactttagcagggcatattgaaataggcgattatgtcaatattggcggccttaccgcaatccatcagtttgtgcgtatcgctaaagggtgcatgatagccggtaagagcgctttaggcaaagacgtgccgccttattgcaccgtggagggcaatcgcgcttttattagggggttaaaccgccaccggatgcgccaattattagagagtaaggatattgattttattcatgcgctttataagaggttgttccgccctatcccctctttaagagagagcgctaaattagagttagaagagcatgccaataacccttttgtaaaagagatttgctcttttattttagagagttctaggggcgtggcgtataagtcaagcgaatattctagcgaagaaaaacaagaggaataa

SEQ ID NO: 1327 - DNA (genomic), 573 bp, Helicobacter pylori; double-stranded, circular
  misc_feature (B) LOCATION 1...573
  hypothetical: NO
  anti-sense: NO
atgattttccccgagcgctttcaaaacgcctttttagggttaagcgaattgttttactacgcttccagcttgagtttttatacgattttgtctttatcgcctattttgttgttcgtgttcagtctttttgtgtctcattacttgcaagcgcacagcggtgaaatggaagccttgattttccctaacgctcctaaactcattggcgcgattaaggattttttagaaaattttaaaaaaacagacatgaccttaggcacgcttgaagaggtgtctattgtggtggcgttggtgcttttttgtgaaaactaccgctccatcgcgtcaaaaatttttgacgcaaagcccagagattatgcgcattttaagggtaaagaaatctttttattttgggggtttggcacgactttagtgtttttattcgctttgcctttggtggtgttttttgatattaagatccaagtgttttttgaagataaagattcaagcttgttgcatgttttaagatggataggcacttacgcgttttttttgatcctttttaccattcccacgaataaggtgtttaaactayya

SEQ ID NO: 1328 - DNA (genomic), 816 bp, Helicobacter pylori; double-stranded, circular
  misc_feature (B) LOCATION 1...816
  hypothetical: NO
  anti-sense: NO
aaaagatatagaaaaactgctctcttacggcttgacaatggcgacaagctgtcattaatgagggaattttttaaaagcgttagagggtttttgaaccttcttagaatgattttccccgagcgctttcaaaacgcctttttagggttaagcgaattgttttactacgcttccagcttgagtttttatacgattttgtctttatcgcctattttgttgttcgtgttcagtctttttgtgtctcattacttgcaagcgcacagcggtgaaatggaagccttgattttccctaacgctcctaaactcattggcgcgattaaggattttttagaaaattttaaaaaaacagacatgaccttaggcacgcttgaagaggtgtctattgtggtggcgttggtgcttttttgtgaaaactaccgctccatcgcgtcaaaaatttttgacgcaaagcccagagattatgcgcattttaagggtaaagaaatctttttattttgggggtttggcacgactttagtgtttttattcgctttgcctttggtggtgttttttgatattaagatccaagtgttttttgaagataaagattcaagcttgttgcatgttttaagatggataggcacttacgcgttttttttgatcctttttaccattcccacgaataaggtgtttaaacattatttttgggtgtttttatgggtgttttttacgagcgtttcttggcatgtgctgaaatgggcttccaccttatttatgtgttataccaatccgcacttactcatgagcctgtatgggagccgtttcccattttgtggtttt

SEQ ID NO: 1329 - DNA (genomic), 879 bp, Helicobacter pylori; double-stranded, circular
  misc_feature (B) LOCATION 1...879
  hypothetical: NO
  anti-sense: NO
atgagggaattttttaaaagcgttagagggtttttgaaccttcttagaatgattttccccgagcgctttcaaaacgcctttttagggttaagcgaattgttttactacgcttccagcttgagtttttatacgattttgtctttatcgcctattttgttgttcgtgttcagtctttttgtgtctcattacttgcaagcgcacagcggtgaaatggaagccttgattttccctaacgctcctaaactcattggcgcgattaaggattttttagaaaattttaaaaaaacagacatgaccttaggcacgcttgaagaggtgtctattgtggtggcgttggtgcttttttgtgaaaactaccgctccatcgcgtcaaaaatttttgacgcaaagcccagagattatgcgcattttaagggtaaagaaatctttttattttgggggtttggcacgactttagtgtttttattcgctttgcctttggtggtgttttttgatattaagatccaagtgttttttgaagataaagattcaagcttgttgcatgttttaagatggataggcacttacgcgttttttttgatcctttttaccattcccacgaataaggtgtttaaacattatttttgggtgtttttatgggtgttttttacgagcgtttcttggcatgtgctgaaatgggctttcacttattatgtgttatacaaccgcacttatcatgagctgtatgggagcgtttctattttgtggtttttgatgagttgggtgtatgtgagctggcttgtgattttaattggcatgtatgggtgtaaaatgtgcgacacatacgatcctaaaggagtgtttaagaaatttttaggtttttttaaaaaagaaacttga

SEQ ID NO: 1330 - DNA (genomic), 549 bp, Helicobacter pylori; double-stranded, circular
  misc_feature (B) LOCATION 1...549
  hypothetical: NO
  anti-sense: NO
atggcagaagaacaagaaaataccgcgcaacaaccccaaaaaaaaagcaaagcccttttatttgtcattattggaagcgtgctagtgatgcttttattggtgggggtgattatcatgctgcttatggggaataaggaagaatctaaagaaaacgcttctaaaaacacccaagaagtccaagctaatcctatggcgaacaagaatcaagaagccaaagaaggctctaatatccagcaatatttggtgcttgggcctttgtatgcgattgatgcgccttttgcggtgaatttggtctctcaaaatggcagacgctaccttaaggcttctatttcgctagaattgagcaatgaaaagcttttgaatgaagtcaaggttaaagacacggcgattaaggacacgattatagaaattctatcgtctaaaagcgtggaagaagtggttactaacaaaggcaaaaacaagcttaaagatgaaattaagagccatttgaattcgtttttgattgatggctttattaaaaatgtctttttcactgatttcattatccaa

SEQ ID NO: 1331 - DNA (genomic), 552 bp, Helicobacter pylori; double-stranded, circular
  misc_feature (B) LOCATION 1...552
  hypothetical: NO
  anti-sense: NO
atggcagaagaacaagaaaataccgcgcaacaaccccaaaaaaaaagcaaagcccttttatttgtcattattggaagcgtgctagtgatgcttttattggtgggggtgattatcatgctgcttatggggaataaggaagaatctaaagaaaacgcttctaaaaacacccaagaagtccaagctaatcctatggcgaacaagaatcaagaagccaaagaaggctctaatatccagcaatatttggtgcttgggcctttgtatgcgattgatgcgccttttgcggtgaatttggtctctcaaaatggcagacgctaccttaaggcttctatttcgctagaattgagcaatgaaaagcttttgaatgaagtcaaggttaaagacacggcgattaaggacacgattatagaaattctatcgtctaaaagcgtggaagaagtggttactaacaaaggcaaaaacaagcttaaagatgaaattaagagccatttgaattcgtttttgattgatggctttattaaaaatgtctttttcactgatttcattatccaatag

SEQ ID NO: 1332 - DNA (genomic), 627 bp, Helicobacter pylori; double-stranded, circular
  misc_feature (B) LOCATION 1...627
  hypothetical: NO
  anti-sense: NO
aagtctcgcaactttagctataatcaaacagaaaaaatttgggaaaaccactttaacttattttcagtaggaataggcatggcagaagaacaagaaaataccgcgcaacaaccccaaaaaaaaagcaaagcccttttatttgtcattattggaagcgtgctagtgatgcttttattggtgggggtgattatcatgctgcttatggggaataaggaagaatctaaagaaaacgcttctaaaaacacccaagaagtccaagctaatcctatggcgaacaagaatcaagaagccaaagaaggctctaatatccagcaatatttggtgcttgggcctttgtatgcgattgatgcgccttttgcggtgaatttggtctctcaaaatggcagacgctaccttaaggcttctatttcgctagaattgagcaatgaaaagcttttgaatgaagtcaaggttaaagacacggcgattaaggacacgattatagaaattctatcgtctaaaagcgtggaagaagtggttactaacaaaggcaaaaacaagcttaaagatgaaattaagagccatttgaattcgtttttgattgatggctttattaaaaatgtctttttcactgatttcattatccaa

SEQ ID NO: 1333 - DNA (genomic), 267 bp, Helicobacter pylori; double-stranded, circular
  misc_feature (B) LOCATION 1...267
  hypothetical: NO
  anti-sense: NO
ttatctcagcgatcctttctggggcggtttatggggatcacacaagccccatttctgacacgactatactatcggctacgggggcagggtgttcggtgcaaagccatttcatcacgcaactcccttatgcgactattgcgatgctttgcagcgccggtgagtttaggggtggcaagttttatgcattcgcgcccgctcgctcttttaattggtgtagctttacttgtaggggtgttttatcttttaaaaaggttttatggtgaaaac

SEQ ID NO: 1334 - DNA (genomic), 402 bp, Helicobacter pylori; double-stranded, circular
  misc_feature (B) LOCATION 1...402
  hypothetical: NO
  anti-sense: NO
aatatatttatcataaaatcacttccggttttttacacttatgagccagaaaaggggcttaatttcaatctttccaacctctatgtttttgggtttttaatctttttaggcatcttaagccaagtgattttaaaatccggtagcgtgcagaactttgtcaaaaaagccaaaaaatactctaaaaacgctaaaacccctgaatttatcgcctttttttcaggaatcattatttttgtagatgattattttaacgccttaaccgtggggcaaatctcaaagtctttaaacgacgctcataattccacacgagagcgcttggcctatattatagactccacttcagcgccggtgtgtttattggtccctatttctagctgggggcatatatcatgggattatgaa

SEQ ID NO: 1335 - DNA (genomic), 921 bp, Helicobacter pylori; double-stranded, circular
  misc_feature (B) LOCATION 1...921
  hypothetical: NO
  anti-sense: NO
aactcgcccttattaaaagatagtttttcggtgcttctccaaagcttgagcagtaattattatgcgatttttgcgctcattgcggtttttcttactattttatggcaaatcaacctccctagcatgaggaagtatcaaaacataggcgtgaaggatttttatagcgagcaagaagaggattcttcaaaactagcccccttaagcttgttacccctttccattttattattgatcgtatccatttcatcattgattttttatactggagtgatcttaaaaaacaccgatgcgagtttttcgctcttttatggagggctgttttcgctcattgtcacttatcttttggcttatccatttttagaaaaagggagttttttaaaactcattattgaaggctttaaaagtgtggggccggcgatactggttttaacgctcgcttgggctattgggcctgtgatcagagatgacgctcaaacggggctttacttggctcaagtgagcaaggggtttttaaatagtgggggaggcgtgtacatgcctttaatcttttttttaatctctgggtttatcgccttttctactggaacaagctggggggcgtttgcgatcatgctgcccattggagcgggcatggccaatgaaagcgatattattttgattatctcagcgatcctttctggggcggtttatggggatcacacaagccccatttctgacacgactatactatcggctacgggggcagggtgttcggtgcaaagccatttcatcacgcaactcccttatgcgactattgcgatgctttgcagcgccggtgagtttaggggtggcaagttttatgcattcgcgcccgctcgctcttttaattggtgtagctttacttgtaggggtgttttatcttttaaaaaggttttatggtga

SEQ ID NO: 1336 - DNA (genomic), 915 bp, Helicobacter pylori; double-stranded, circular
  misc_feature (B) LOCATION 1...915
  hypothetical: NO
  anti-sense: NO
tcgcccttattaaaagatagtttttcggtgcttctccaaagcttgagcagtaattattatgcgatttttgcgctcattgcggtttttcttactattttatggcaaatcaacctccctagcatgaggaagtatcaaaacataggcgtgaaggatttttatagcgagcaagaagaggattcttcaaaactagcccccttaagcttgttacccctttccattttattattgatcgtatccatttcatcattgattttttatactggagtgatcttaaaaaacaccgatgcgagtttttcgctcttttatggagggctgttttcgctcattgtcacttatcttttggcttatccatttttagaaaaagggagttttttaaaactcattattgaaggctttaaaagtgtggggccggcgatactggttttaacgctcgcttgggctattgggcctgtgatcagagatgacgctcaaacggggctttacttggctcaagtgagcaaggggtttttaaatagtgggggaggcgtgtacatgcctttaatcttttttttaatctctgggtttatcgccttttctactggaacaagctggggggcgtttgcgatcatgctgcccattggagcgggcatggccaatgaaagcgatattattttgattatctcagcgatcctttctggggcggtttatggggatcacacaagccccatttctgacacgactatactatcggctacgggggcagggtgttcggtgcaaagccatttcatcacgcaactcccttatgcgactattgcgatgctttgcagcgccggtgagtttaggggtggcaagttttatgcattcgcgcccgctcgctcttttaattggtgtagctttacttgtaggggtgttttatcttttaaaaaggttttatgg

SEQ ID NO: 1337 - DNA (genomic), 990 bp, Helicobacter pylori; double-stranded, circular
  misc_feature (B) LOCATION 1...990
  hypothetical: NO
  anti-sense: NO
gtgtgtttattggtccctatttctagctggggggcatatatcatggggatcatgaataacgacaactcgcccttattaaaagatagtttttcggtgcttctccaaagcttgagcagtaattattatgcgatttttgcgctcattgcggtttttcttactattttatggcaaatcaacctccctagcatgaggaagtatcaaaacataggcgtgaaggatttttatagcgagcaagaagaggattcttcaaaactagcccccttaagcttgttacccctttccattttattattgatcgtatccatttcatcattgattttttatactggagtgatcttaaaaaacaccgatgcgagtttttcgctcttttatggagggctgttttcgctcattgtcacttatcttttggcttatccatttttagaaaaagggagttttttaaaactcattattgaaggctttaaaagtgtggggccggcgatactggttttaacgctcgcttgggctattgggcctgtgatcagagatgacgctcaaacggggctttacttggctcaagtgagcaaggggtttttaaatagtgggggaggcgtgtacatgcctttaatcttttttttaatctctgggtttatcgccttttctactggaacaagctggggggcgtttgcgatcatgctgcccattggagcgggcatggccaatgaaagcgatattattttgattatctcagcgatcctttctggggcggtttatggggatcacacaagccccatttctgacacgactatactatcggctacgggggcagggtgttcggtgcaaagccatttcatcacgcaactcccttatgcgactattgcgatgctttgcagcgcggtgagtttaggggtggcaagttttatgcattcgcgcccgctcgctcttttaattggtgtagctttacttgtaggggtgttttatcttttaaaaaggttttatggtgaaaactaa

SEQ ID NO: 1338 - DNA (genomic), 1434 bp, Helicobacter pylori; double-stranded, circular
  misc_feature (B) LOCATION 1...1434
  hypothetical: NO
  anti-sense: NO
atggtggttttcactaaaagagtcgcgctctcgttatttacaggcattttagtgagcgctgttttaacgcattcgttgcacctttcccaactcgtagaatatatttatcataaaatcacttccgttttttacacttatgagccagaaaaggggcttaatttcaatctttccaacctctatgtttttgggtttttaatctttttaggcatcttaagccaagtgattttaaaatccggtagcgtgcagaactttgtcaaaaaagccaaaaaatactctaaaaacgctaaaacccctgaatttatcgcctttttttcaggaatcattatttttgtagatgattattttaacgccttaaccgtggggcaaatctcaaagtctttaaacgacgctcataattccacacgagagcgcttggcctatattatagactccacttcagcgccggtgtgtttattggtccctatttctagctggggggcatatatcatggggatcatgaataacgacaactcgcccttattaaaagatagtttttcggtgcttctccaaagcttgagcagtaattattatgcgatttttgcgctcattgcggtttttcttactattttatggcaaatcaacctccctagcatgaggaagtatcaaaacataggcgtgaaggatttttatagcgagcaagaagaggattcttcaaaactagcccccttaagcttgttacccctttccattttattattgatcgtatccatttcatcattgattttttatactggagtgatcttaaaaaacaccgatgcgagtttttcgctcttttatggagggctgttttcgctcattgtcacttatcttttggcttatccatttttagaaaaagggagttttttaaaactcattattgaaggctttaaaagtgtggggccggcgatactggttttaacgctcgcttgggctattgggcctgtgatcagagatgacgctcaaacggggctttacttggctcaagtgagcaaggggtttttaaatagtgggggaggcgtgtacatgcctttaatcttttttttaatctctgggtttatcgccttttctactggaacaagctggggggcgtttgcgatcatgctgcccattggagcgggcatggccaatgaaagcgatattattttgattatctcagcgatcctttctggggcggtttatggggatcacacaagccccatttctgacacgactatactatcggctacgggggcagggtgttcggtgcaaagccatttcatcacgcaactcccttatgcgactattgcgatgctttgcagcgcggtgagtttaggggtggcaagttttatgcattcgcgcccgctcgctcttttaattggtgtagctttacttgtaggggtgttttatcttttaaaaaggttttatggtgaaaactaa

SEQ ID NO: 1339 - DNA (genomic), 1434 bp, Helicobacter pylori; double-stranded, circular; identical to SEQ ID NO: 1338
  misc_feature (B) LOCATION 1...1434
  hypothetical: NO
  anti-sense: NO

SEQ ID NO: 1340 - DNA (genomic), 477 bp, Helicobacter pylori; double-stranded, circular
  misc_feature (B) LOCATION 1...477
  hypothetical: NO
  anti-sense: NO
agttttaacaaacgcgcaaatccctttggaattacgccgctacgccttatagaaatcgcccaaaaaggcagcaaaaaagaggttttaaaggctgtgaatgcgatgcaagaggatttggataaagagtgcgtgaaagcttttttaaaagccttttttgaaaaatctttaaacacagacactttaaaaatttcagagctttgcaaaaaggtgggttatgacaaagacgattatttaaaggctcgcgcaaaagcgcgaaaatttcttgttcccgatcaatggttccaattttttgagattttaagccaagaagacgataaggcgcaaaaagcctttttattcgtgttgttagaattagaaatgaatgatcttgctaaagagcatctagcggttttatcttttgaagaatacatgcttttaaacgcctacatggatttgaaacaagagcataaaaaagcctataagttggaagcgtttttg

SEQ ID NO: 1341 - DNA (genomic), 519 bp, Helicobacter pylori; double-stranded, circular
  misc_feature (B) LOCATION 1...519
  hypothetical: NO
  anti-sense: NO
atgggcgttttgggcatgttcgcttttttttcatgggtttttttattcaagcacaatctcagccataaaatccgcttataccatgaaaaaaaggattttgacaaattgctcaaacaaatcctatcccaagacacccaaaagacttttttaaaaacaaaatttaaaagcgatctcgctaaaaacctctctcaaatcttagcccgctatgatttaaaagctgatttaaacacgccaaatagcgggtgcgaaaaagtggataacctttttaaacattaccacaatatagaaaataacacccttgagcctaaagatcacgctaaacattccctagcttatgagcatgcttatttttctaaacgcttgaaggctttcattcataacgatttgaaaaacgcctttgaagttttaacaaacgcgcaaatccctttggaattacgccgctacgcttatagaaatcgcccaaaaaggcagcaaaaaagaggttttaaaggctgtgaatgcgatgcaagaggatttgga

SEQ ID NO: 1342 - DNA (genomic), 594 bp, Helicobacter pylori; double-stranded, circular
  misc_feature (B) LOCATION 1...594
  hypothetical: NO
  anti-sense: NO
ataggaggtgcgcatgcgtttttatattatcttacatttttgtttattgtgggttttggcgtgtttgtttatagtattgatccgcaagcttacgctttcaatttagggagctatagctttaacctccccattgccgtatggcttatgggcgttttgggcatgttcgcttttttttcatgggtttttttattcaagcacaatctcagccataaaatccgcttataccatgaaaaaaaggattttgacaaattgctcaaacaaatcctatcccaagacacccaaaagacttttttaaaaacaaaatttaaaagcgatctcgctaaaaacctctctcaaatcttagcccgctatgatttaaaagctgatttaaacacgccaaatagcgggtgcgaaaaagtggataacctttttaaacattaccacaatatagaaaataacacccttgagcctaaagatcacgctaaacattccctagcttatgagcatgcttatttttctaaacgcttgaaggctttcattcataacgatttgaaaaacgcctttgaagttttaacaaacgcgcaaatccctttggaattacgccgctacgcctta

SEQ ID NO: 1343 - DNA (genomic), 1014 bp, Helicobacter pylori; double-stranded, circular
  misc_feature (B) LOCATION 1...1014
  hypothetical: NO
  anti-sense: NO
atgcgtttttatattatctttacatttttgtttattgtgggttttggcgtgtttgtttatagtattgatccgcaagcttacgctttcaatttagggagctatagctttaacctccccattgccgtatggcttatgggcgttttgggcatgttcgcttttttttcatgggtttttttattcaagcacaatctcagccataaaatccgcttataccatgaaaaaaaggattttgacaaattgctcaaacaaatcctatcccaagacacccaaaagacttttttaaaaacaaaatttaaaagcgatctcgctaaaaacctctctcaaatcttagcccgctatgatttaaaagctgatttaaacacgccaaatagcgggtgcgaaaaagtggataacctttttaaacattaccacaatatagaaaataacacccttgagcctaaagatcacgctaaacattccctagcttatgagcatgcttatttttctaaacgcttgaaggctttcattcataacgatttgaaaaacgcctttgaagttttaacaaacgcgcaaatccctttggaattacgccgctacgcttttatagaaatcgcccaaaaaggcagcaaaaaagaggttttaaaggctgtgaatgcgatgcaagaggatttggataaagagtgcgtgaaagcttttttaaaagccttttttgaaaaatctttaaacacagacactttaaaaatttcagagctttgcaaaaaggtgggttatgacaaagacgattatttaaagctcgcgcaaaaagcgcaaaaatttcttgttcccgatcaatggttccaattttttgagattttaagccaagaagacgataaggcgcaaaaagcctttttattcgtgttgttagaattagaaatgaatgatcttgctaaagagcatctagcggttttatcttttgaagaatacatgcttttaaacgcctacatggatttgaaacaagagcataaaaaagcctataagttggaagcgtttttgtag

SEQ ID NO: 1344 - DNA (genomic), 294 bp, Helicobacter pylori; double-stranded, circular
  misc_feature (B) LOCATION 1...294
  hypothetical: NO
  anti-sense: NO
caaaaaattactcgctacaagggaattttaatgggttgggcgttaaaaaaagtttgttttttaggcgttatttttttgattagtgcttgcacggttaaaaaaaatggggtaaagaatttgtcttataagcatgaaagcttgcgtgcttatgaaaacgctaaagactatgatccgacaaccaaaaaagccacctataaacgcaatttttttgaacgccatttcaaacaccacaccgattcgcaaggtaacaatacaaaacaacccctagataacggcatgcgcgattctaacgcg

SEQ ID NO: 1345 - DNA (genomic), 297 bp, Helicobacter pylori; double-stranded, circular
  misc_feature (B) LOCATION 1...297
  hypothetical: NO
  anti-sense: NO
caaaaaattactcgctacaagggaattttaatgggttgggcgttaaaaaaagtttgttttttaggcgttatttttttgattagtgcttgcacggttaaaaaaaatggggtaaagaatttgtcttataagcatgaaagcttgcgtgcttatgaaaacgctaaagactatgatccgacaaccaaaaaagccacctataaacgcaatttttttgaacgccatttcaaacaccacaccgattcgcaaggtaacaatacaaaacaacccctagataacggcatgcgcgattctaacgcgatc

SEQ ID NO: 1346 - DNA (genomic), 408 bp, Helicobacter pylori; double-stranded, circular
  misc_feature (B) LOCATION 1...408
  hypothetical: NO
  anti-sense: NO
cggcccaaccaacttgcagaatacagagcgaccagacgaaggcacatggttgattcacgcacggcaaacgtgcgcttcattgttttgggttttggtggggttatctccaaacaatccgaacaatcctttaacgccaactattcaaagatcttacacaaagaatttaaagtcggcgagagtgaaaaaagcgtgagcggaaggaaattttctttgcaaatgggggcttttataaaccaaatatgcgctcaaactctatcggataaattgccagcagagaataataattacagcgttaaggttgcttttaaagacgatttgtataaagttttagttcaagggtttcaaagcgaagaagaggctagggattttatgaaaaaatacaaccagaatgcggttttaacgagagaa

SEQ ID NO: 1347 - DNA (genomic), 945 bp, Helicobacter pylori; double-stranded, circular
  misc_feature (B) LOCATION 1...945
  hypothetical: NO
  anti-sense: NO
atgggttgggcgttaaaaaaagtttgttttttaggcgttatttttttgattagtgcttgcacggttaaaaaaaatggggtaaagaatttgtcttataagcatgaaagcttgcgtgcttatgaaaacgctaaagactatgatccgacaaccaaaaaagccacctataaacgcaatttttttgaacgccatttcaaacaccacaccgattcgcaaggtaacaatacaaaacaacccctagataacggcatgcgcgattctaacgcgatccaaagagccaccatgcacccttatcaagtagggggcaagtggtattaccccactaaagtggatttaggcgagaaatttgatggcattgcgagctggtatggccctaacttccatgccaaaaaaaccagtaatggggaaatctataacatgtatgcccacaccgccgcgcacaagactttacccatgaacaccgtggtgaaagtcattaacgttgataacaattcaagcaccatcgtacgcatcaacgatagagggccttttgtgagcaatcgcatcattgatttgtctaatgcggccgctagggatattgacatggttcaaaaaggcacggctagcgtgcgcctcattgttttgggttttggtggggttatctccaaacaatacgaacaatcctttaacgccaactattcaaagatcttacacaaagaatttaaagtcggcgagagtgaaaaaagcgtgagcggagggaaattttctttgcaaatgggggcttttagaaaccaaataggcgctcaaactctagcggataaattgcaagcagagaataagaattacagcgttaaggttgcttttaaagacgatttgtataaagttttagttcaagggtttcaaagcgaagaagaggctagggattttatgaaaaaatacaaccagaatgcggttttaacgagagaatga

SEQ ID NO: 1348 - DNA (genomic), 282 bp, Helicobacter pylori; double-stranded, circular
  misc_feature (B) LOCATION 1...282
  hypothetical: NO
  anti-sense: NO
atgtccgctcattttttaaaaatcgtttttttagtaggcatgtgcgtttcaagtttgttcgctgaaggtttagaggggttttttaacgctctagaagcccagctcaaaagccccatcgctaaggggattttaatggtgattttcatagggatcgctatttatgtgtggagaaatttagaccggtggaaagagattttattcacgatccttggcgtggtgtttgggatttttttattctttaaagccccgagtttggcgaattggtttatgggagttttttaa

SEQ ID NO: 1349 - DNA (genomic), 303 bp, Helicobacter pylori; double-stranded, circular
  misc_feature (B) LOCATION 1...303
  hypothetical: NO
  anti-sense: NO
ttaagattaaacaaaagggttatgatgtccgctcattttttaaaactcgtttttttagtaggcatgtgcgtttcaagtttgttcgctgaaggtttagaggggttttttaacgctctagaagcccagctcaaaagccccatcgctaaggggattttaatggtgattttcatagggatcgctatttatgtgtggagaaatttagaccggtggaaagagattttattcacgatccttggcgtggtgtttgggatttttttattctttaaagccccgagtttggcgaattggtttatgggagttttt

SEQ ID NO: 1350 - DNA (genomic), 195 bp, Helicobacter pylori; double-stranded, circular
  misc_feature (B) LOCATION 1...195
  hypothetical: NO
  anti-sense: NO
gccatgattattatcgtgcttttttgcgttaatggcgctctttttttggcgttaggcttgatctctgcttatttgatgcgttggagtgcgatagtttttagttggctcaattctgccgctttctatttcattagtgcttataaggtgtttttaaataagagcatgatgggcaatgtcttaaacaccaacacggca

SEQ ID NO: 1351 - DNA (genomic), 207 bp, Helicobacter pylori; double-stranded, circular
  misc_feature (B) LOCATION 1...207
  hypothetical: NO
  anti-sense: NO
cgtgaacgctttagagtgagcgctcttaaatttttcgcccccactatcaagccgctccctctcttttcgcccaaccattctcattcgtttgtggtgctagtcattggcgaaagcgccagaaagagcaattacgccctttatggctatgaaaaacccaccaccccaagattaagcaaacgcttagaaaatcatgaactcacccttttt

SEQ ID NO: 1352 - DNA (genomic), 420 bp, Helicobacter pylori; double-stranded, circular
  misc_feature (B) LOCATION 1...420
  hypothetical: NO
  anti-sense: NO
ggttgtaagccttattgttcaagtgctgatttgtcttcttgctccaaagaaagcctgattaacgcctatgacaacaccattttttataacgactacctgttagacaaaatcattagcatgcttgaaaacgccaagcagcccgccttaatgatttatttaagcgatcatggcgaaagcttgggcgaaggggcgtattatttgcatggcattcctaaaagcatcgcccctaaagagcaatacgagatcccctttattctttatgccaacgatctttttaaagagaagcattccatcattcaaacccaaacccccattaatcaaaacaccattttccatagcgttttaggggtgtttgaagattttaaaacccctagcgctgtttatcgcccttctttagacctgcttaaacacaaaaaagag

SEQ ID NO: 1353 - DNA (genomic), 1572 bp, Helicobacter pylori; double-stranded, circular
  misc_feature (B) LOCATION 1...1572
  hypothetical: NO
  anti-sense: NO
ttgacatcattattccatctgaagtttttaaagcccctaagttgtctgcaagccggtttgctttatagccttatttttggcgttttataccatttccctttgttcgcttatgtttataaagaaagcaaccaggttagttttatagccatgattattatcgtgcttttttgcgttaatggcgctctttttttggcgttaggcttgatctctgcttatttgatgcgttggagtgcgatagtttttagttggctcaattctgtcgctttctatttcattagtgcttataaggtgtttttaaataagagcatgatgggcaatgtcttaaacaccaacacgcatgaagttttaggctttttgagcgttaaattattcgtttttatcgttgtttttggggtgttgcctggctatgtcatctataaaatcccccttaaaaattcttctaaaaaagcaccattcttagcgatcttggctttagtgtttatctttatcgctagcgcttttatgaacgctaaaaattggctgtggtttgacaagcatgcgaaattcatagggggcttaatcctgcccttcgcttatagcgtgaacgcctttagagtgagcgctcttaaatttttcgcccccactatcaagccgctccctctcttttcgcccaaccattctcattcgtttgtggtgctagtcattggcgaaagcgccagaaagagcaattacgccctttatggctatgaaaaacccaccaccccaagattaagcaaacgcttagaaaatcatgaactcaccctttttaacgccacttcttgcgccacttacacgacagcgagtttggaatgcattttagattcttcttttaaaaacagcttgggcgcttatgaaaacttgcccacttacttgactaaagcgggtgtcaaagtcttttggtatagcgcgaatgacggcgaaaagaacgttaaggttaccagctatcttaaaaactatgaattgattcaaaaatgccccaattgcgaagcgatcgccccttatgatgaatccttgctctataatttgcccaaccttttaaaagaacgctctaatgaaaacatcttgctcatcttacaccttgccggctcgcatggccccaactatgacaacaaagtgcctttaaattttagggtgtttaagccctattgttcaagcgctgatctgtcttcttgctccaaagaaagcctgattaacgcctatgacaacaccattttttataacgactatctgttagacaaaatcattagcatgcttgaaaacgccaagcagcccgccttaatgatttatttaagcgatcatggcgaaagcttgggcgaaggggcgtattatttgcatggcattcctaaaagcatcgcccctaaagagcaatacgagatcccctttattctttatgccaacgatctttttaaagagaagcattccatcattcaaacccaaacccccattaatcaaaacaccattttccatagcgttttaggggtgtttgaagattttaaaacccctagcgctgtttatcgcccttctttagacctgcttaaacacaaaaaagagtaa

SEQ ID NO: 1354 - DNA (genomic), 267 bp, Helicobacter pylori; double-stranded, circular
  misc_feature (B) LOCATION 1...267
  hypothetical: NO
  anti-sense: NO
gcaagtttgcgctttagaaaagcgggcgttttaatgaaaaagctcaaaggtctttttttgagtctgctcttatgggtatatcctttaaagagtgagccgatcaatgagggggcatacattttagaagagattggcgatgtgctcaggtttttgcctatttttgtaggcacggtcagtttagcgatgcgcgattatagaggattaggggaattagcggtcggcactttggttactcaaggggtgatttatggccttaaaggagctttt

SEQ ID NO: 1355 - DNA (genomic), 348 bp, Helicobacter pylori; double-stranded, circular
  misc_feature (B) LOCATION 1...348
  hypothetical: NO
  anti-sense: NO
agatgggggctagagtggggatttgctaaacggccatgctgtaattcctggaggggcatgccaagcgggcatgctgggggggcgtttagcgcggctgggtttgtgtattaccgctatgggtggaagccggctcttcctgtgatcgctcttgcaatcctcactgatactagcagagtggtggcaggacaacacacgatcttgcaagttacgatcggcagtcttatcgcatgggggtttgcctatttattcacttcacgctacaaacccaagcgatggatgctctatcctgaaatctctagcgactttaagggcagtagccgctatggggtgggcttttcttatcaatgg

SEQ ID NO: 1356 - DNA (genomic), 624 bp, Helicobacter pylori; double-stranded, circular
  misc_feature (B) LOCATION 1...624
  hypothetical: NO
  anti-sense: NO
ttgcgctttagaaaagcgggcgttttaatgaaaaagctcaaaggtctttttttgagtctgctcttatgggtatatcctttaaagagtgagccgatcaatgagggggcatacattttagaagagattggcgatgtgctcaggtttttgcctatttttgtaggcacggtcagtttagcgatgcgcgattatagaggattaggggaattagcggtcggcactttggttactcaaggggtgatttatggccttaaaggagcttttagcaccgcccataaagatggggctagagtgggatttgctaaacggccatgctgtaattcctggaggggcatgccaagcgggcatgctgggggggcgtttagcgcggctgggtttgtgtattaccgctatgggtggaagccggctcttcctgtgatcgctcttgcaatcctcactgatactagcagagtggtggcaggacaacacacgatcttgcaagttacgatcggcagtcttatcgcatgggggtttgcctatttattcacttcacgctacaaacccaagcgatggatgctctatcctgaaatctctagcgactttaagggcagtagccgctatggggtgggcttttcttatcaatggtaa

SEQ ID NO: 1357 - DNA (genomic), 519 bp, Helicobacter pylori; double-stranded, circular
  misc_feature (B) LOCATION 1...519
  hypothetical: NO
  anti-sense: NO
ggcacttttttagcgtttgggtttttccaaacctggaggagcgttgtggttatatgctttaaaaaatgcttcgctcttgggttttacaagccttttttgttgttagtggggtttttgaatgtgtcggttactaaggcgttaatggacgctagcatgcaagaaaaacaagacttaagccttttattggtggtggcgttatttttgtgttgcgtttttatcatcggtgtgccttttttcatcaacgctttgtttagggtgcaaaacagccttaaagaaacttacaaactcgccaccaatttgagcgctaacctcactcaaagcgctttccaatctttacagcatgccacgacctcgcccgctccttctcatatttcctcttctgcaagtcaaagcgtttctaaagaaaaggaaacgcattcccccacattcaaggtagaaaccactcaattagatgtaaaaatcccaaatttcaagcaaaaaaaggttaaaaaggatacaatagatacaaaaaatgaaatt

SEQ ID NO: 1358 - DNA (genomic), 639 bp, Helicobacter pylori; double-stranded, circular
  misc_feature (B) LOCATION 1...639
  hypothetical: NO
  anti-sense: NO
tctggcgtcaaggctttgaattttacattaaagtccgttgaaacattgatgaaacatgacgcttatgaaatcattctttcttggtttatcacgcctctcacagcgattttagggcgtttcgctgaatttttcctctacaccttgcatgcgcaattggtgtttaatagcgcggtcgctttggcgttcatgctctttgcttacaggagtttgaaagaacagaattttttcagtgctagcgcgcttttagaagcgttatggtttgtggggttttttgcgctgtttaactacgctttgaaaaatccttcgcgcttttatgaattgtttcaaaacgctatttttattgcgcctaacatgatcactcaaagcctttctcaaagcttgagtaacttttctaaccacgcgctttctttagattttatttttaatcatggtttttatgcccttagcttcattagcgatttgagccataatgaaatgtccgtgtggctttttttaagcattttgcaagcgctttttttgagcgtgctgtttgcgatcatcattttagtgtatttggaagcgcatgtgtggtgctccttagggcacttttttagcgtttgggtttttccaaacctggaggagcgttgtggttatatgctt

SEQ ID NO: 1359 - DNA (genomic), 1089 bp, Helicobacter pylori; double-stranded, circular
  misc_feature (B) LOCATION 1...1089
  hypothetical: NO
  anti-sense: NO
ttgaattttacattaaagtccgttgaaacattgatgaaacatgacgcttatgaaatcattctttcttggtttatcacgcctctcacagcgattttagggcgtttcgctgaatttttcctctacaccttgcatgcgcaattggtgtttaatagcgcggtcgctttggcgttcatgctctttgcttacaggagtttgaaagaacagaattttttcagtgctagcgcgcttttagaagcgttatggtttgtggggttttttgcgctgtttaactacgctttgaaaaatccttcgcgcttttatgaattgtttcaaaacgctatttttattgcgcctaacatgatcactcaaagcctttctcaaagcttgagtaacttttctaaccacgcgctttctttagattttatttttaatcatggtttttatgcccttagcttcattagcgatttgagccataatgaaatgtccgtgtggctttttttaagcattttgcaagcgctttttttgagcgtgctgtttgcgatcatcattttagtgtatttggaagcgcatgtgtggtgctctttaggggcactgtttttagcgtttgggtttttcaaaacctggaggagcgttgtggttatatgccttaaaaaatgcttcgctcttgggttttacaagccttttttgttgttagtggggtttttgaatgtgtcggttactaaggcgttaatggacgctagcatgcaagaaaaacaagacttaagccttttattggtggtggcgttatttttgtgttgcgtttttatcatcggtgtgccttttttcatcaacgctttgtttagggtgcaaaacagccttaaagaaacttacaaactcgccaccaatttgagcgctaacctcactcaaagcgctttccaatctttacagcatgccacgacctcgcccgctccttctcatatttcctcttctgcaagtcaaagcgtttctaaagaaaaggaaacgcattcccccacattcaaggtagaaaccactcaattagatgtaaaaatcccaaatttcaagcaaaaaaaggttaaaaaggatacaatagatacaaaaaatgaaatttaa

SEQ ID NO: 1360 - DNA (genomic), 234 bp, Helicobacter pylori; double-stranded, circular
  misc_feature (B) LOCATION 1...234
  hypothetical: NO
  anti-sense: NO
ttgattaccgatgcgagcttcaaagcgtatttcaaatacgttattgtagtgatttttattgtagcagccattatcactcctcctgatgtggtgagtcaaatctttatggcattgcctttagtggggctttatgggctttctattttgattgccaaaatggtcaatccggctcctaaagacaacgaaaacgatcacgaaaatgacgccaaagagcatacaaagagcgagtcgtag

SEQ ID NO: 1361 - DNA (genomic), 228 bp, Helicobacter pylori; double-stranded, circular
  misc_feature (B) LOCATION 1...228
  hypothetical: NO
  anti-sense: NO
attaccgatgcgagcttcaaagcgtatttcaaatacgttattgtagtgatttttattgtagcagccattatcactcctcctgatgtggtgagtcaaatctttatggcattgcctttagtggggctttatgggctttctattttgattgccaaaatggtcaatccggctcctaaagacaacgaaaacgatcacgaaaatgacgccaaagagcatacaaagagcgagtcg

SEQ ID NO: 1362 - DNA (genomic), 750 bp, Helicobacter pylori; double-stranded, circular
  misc_feature (B) LOCATION 1...750
  hypothetical: NO
  anti-sense: NO
atgtttgaagatttaaaaccgcatttacaggaattaagaaagcgtttgatggtttctgtgggaacgattttagtggcgtttttggggtgttttcatttttggaaaaatatttttgaatttgttaaaaattcttataaaggcacgctcattcagctctcccctattgaaggggtcatggtagcggttaaaatcagtttttcagccgctatcgtcatttccatgcccattattttttggcaattgtggctttttatcgctccagggctttataagaatgaaaaaaaagtgattttgccttttgtgttttttgggagcggcatgtttttaatgggggcggcgttttcttactatgtggtgtttcctttcatcattgaatacttagccacttttgggagcgatgtgtttgcggctaatatttctgcgtccagttacgtgagctttttcacgcgtttgattttaggctttggcgtggcgtttgaattgcctgttttggcgtattttttagccaaagtgggcttgattaccgatgcgagcttgaaagcgtatttcaaatacgctattgtagtgatttttattgtagcagccattatcactcctcctgatgtggtgagtcaaatctttatggcattgcctttagtggggctttatgggctttctattttgattgccaaaatggtcaatccggctcctaaagacaacgaaaacgatcacgaaaatgacgccaaagagcatacaaagagcgagtcgtag

SEQ ID NO: 1363 - DNA (genomic), 1656 bp, Helicobacter pylori; double-stranded, circular
  misc_feature (B) LOCATION 1...1656
  hypothetical: NO
  anti-sense: NO
ttgaaactctttttcaggcgttattctaaataccttaaagaacattataaaagttttatagtggttttattttcttctttagtggtagctttaagcacggcttgggggacttatttagtcaagcccactttagatgaaatttttatcaataaagacactcacatgctcaaaatcctgccttttttagtgattttggcgtatttgggtaagagtgggggcatgtatgttggcacttatttcactaactttattgggcttgatattgtcaaaaaaatacgcaacgccatgttagaaagccttctcaaaatggaaatggatttttttaacaggactaaaaaaggcgaattgatcgcaaggatcaccaatgatataggtttgattagagcgagtttgtccaattacctttcagagagcctaagagaagggctaacgattgtgggattagtgggggtggtgatctatcaaagccctaaattagcgctagtggggctagtgatcatgccgctagccgccattcctattagtaaaatcattcgtaaggttaaaaaactcgctaaagcccaccaagagagtaacgccaaaatcaccgctcgtttgagtgaagtctttaacaatgtggaagcgattaaaatctctaatggcgaaaaattagagcatagggcttttgtgaaagaaaatgaagcgttttttaaaatcggtatcaaaaacatcgccgtggctgaaatttcttcgcctttaatggagtttttaggctctatcgctatagcgttagtgatctatttaggggggaatgaagtgattaagggtcatattagcgtgggggcgtttttttctttcatcacggccctttttatgctctatacgccgatcaaacgcctaactaggattgtctctaattttcaagaagccttagtcgctagcgataggatccatgagattttagaaagagagccggccattattgatggggaattgacgctggatgatgccatacacaccattgaatttaaaaaggtatggctggcttatgcgctagaagatcaagagcgttatgttttaagcgatattaatttgaaattccaacaaaatgaaatcgtcgctctaaaaggcgaaagcgggagcggcaaaagctcattagtgaatctgatcttacgcctttatgagccaagcaagggcgaaattttcatcaatgatcaaaaaatagagagcatcactcaaaaatccttgagggaaaagattagcgttgtcactcaaagggtgtttatctttaacgggagcgtggctgaaaatgtggcgtatggcttagaaattgatgaaataaaaatcaaagaatgcctaaaaaaagcccaagccttagattttgtggaaaaaatgcctcatgggatagagagcgttttagatgaatttggcgctaaccttagcggcgggcaacgccaaagaatcgccattgcaagagctttgtataaagacgctcaagttttaatctttgatgaagccacttccgctttagacaatcacacagaagagagcgtcaaacaaagcattttagaattgaaacaaaaccgcttgatcattctcatctcgcacaacccaagcacgcttaaattagccactaagcatgtgaaattagagcatgggcgtttgatagaatgttaa

SEQ ID NO: 1364 - DNA (genomic), 1710 bp, Helicobacter pylori; double-stranded, circular
  misc_feature (B) LOCATION 1...1710
  hypothetical: NO
  anti-sense: NO
aaatcccctaataaaaacactataataagagttcaatcaaatccaaaggttaagcatttgaaactctttttcaggcgttcttctaaataccttaaagaacattataaaagttttatagtggttttattttcttctttagtggtagctttaagcacggcttgggggacttatttagtcaagcccactttagatgaaatttttatcaataaagacactcacatgctcaaaatcctgccttttttagtgattttggcgtatttgggtaagagtgggggcatgtatgttggcacttatttcactaactttattgggcttgatattgtcaaaaaaatacgcaacgccatgttagaaagccttctcaaaatggaaatggatttttttaacaggactaaaaaaggcgaattgatcgcaaggatcaccaatgatataggtttgattagagcgagtttgtccaattacctttcagagagcctaagagaagggctaacgattgtgggattagtgggggtggtgatctatcaaagccctaaattagcgctagtggggctagtgatcatgccgctagccgccattcctattagtaaaatcattcgtaaggttaaaaaactcgctaaagcccaccaagagagtaacgccaaaatcaccgctcgtttgagtgaagtctttaacaatgtggaagcgattaaaatctctaatggcgaaaaattagagcatagggcttttgtgaaagaaaatgaagcgttttttaaaatcggtatcaaaaacatcgccgtggctgaaatttcttcgcctttaatggagtttttaggctctatcgctatagcgttagtgatctatttaggggggaatgaagtgattaagggtcatattagcgtgggggcgtttttttctttcatcacggccctttttatgctctatacgccgatcaaacgcctaactaggattgtctctaattttcaagaagccttagtcgctagcgataggatccatgagattttagaaagagagccggccattattgatggggaattgacgctggatgatgccatacacaccattgaatttaaaaaggtatggctggcttatgcgctagaagatcaagagcgttatgttttaagcgatattaatttgaaattccaacaaaatgaaatcgtcgctctaaaaggcgaaagcgggagcggcaaaagctcattagtgaatctgatcttacgcctttatgagccaagcaagggcgaaattttcatcaatgatcaaaaaatagagagcatcactcaaaaatccttgagggaaaagattagcgttgtcactcaaagggtgtttatctttaacgggagcgtggctgaaaatgtggcgtatggcttagaaattgatgaaataaaaatcaaagaatgcctaaaaaaagcccaagccttagattttgtggaaaaaatgcctcatgggatagagagcgttttagatgaatttggcgctaaccttagcggcgggcaacgccaaagaatcgccattgcaagagctttgtataaagacgctcaagttttaatctttgatgaagccacttccgctttagacaatcacacagaagagagcgtcaaacaaagcattttagaattgaaacaaaaccgcttgatcattctcatctcgcacaacccaagcacgcttaaattagccactaagcatgtgaaattagagcatgggcgtttgatagaatgt

SEQ ID NO: 1365 - DNA (genomic), 1317 bp, Helicobacter pylori; double-stranded, circular
  misc_feature (B) LOCATION 1...1317
  hypothetical: NO
  anti-sense: NO
atgaaaaaaatatggcttttggtgtggggcttgtattctttggcgtttttgcatgcgatagaaacgatagaaaaagcccctacaaatgtagaggatagagacaaagccccccatttgttgcttttagcagggattcaaggcgatgagcctggagggtttaatgcgactaatttgtttttaatgcactatagcgttttaaaaggcttggtggaagtggttcccgtattgaataagccttccatgttaagaaatcacaggggcttgtatggggatatgaaccgcaaatttgctgctttagacaagaatgaccctgaataccccactatccaagaaatcaaatccttgattgcaaagcctagcgtggatgccgtcttgcacttgcatgatggcggtgggtattatcgccctgtttatattgatgcgatgctcaatcctaaacgctgggggaattgctttatcattgatcaagatgaggttaagggggcgaaattccctaatttgcttgcttttgctaacaatacgattgagaatattaacgcccatttattgcaccccattgaaaaataccatttaaaaaacacgcgcaccgctcaaggcgatacagaaatgcaaaaagccctaactttttatgcgatcaaccaaaaaaagagcgcttttgccaatgaagccagcaaagaactccctttagaatcaagggtgttttaccatttgcaagccattgagggcttactcaatcagctcaatatcccttttaagcgcgattttgaacttaaccctaacagcgttcatgccctaatcaacgataaaagcttgtgggcaaaaatcagctctctgcctaaaatgcccctttttaacttacgccctaaactcaatcatttccctttacctagcaacactaaaatcccacaaatccccatagagagcaacgcttacattgtagggctagtcaaaaacaaacaagaagtgtttttaaaatacggcaacaagctcatgacacgattgtcgcccttttacatagagtttgatcattctttagaagaagtgaaaatgcaaattgacaataaggatcaaatggttaagatagggagcgtggttgaagtgaaagagagtttttatatccacgctatggataatatccgcgcgaatgtgattggttttagcgtttctaatgaaagtaagcctaatgaaacgggctatacgattaaatttaaagattttcagaaacgcttttcattggacaagcaagaaaggatctatcgcatagaattttacaaaaacaacgcatttagcgggatgatcttggtgaaatttgtgtag

SEQ ID NO: 1366 - DNA (genomic), 1323 bp, Helicobacter pylori; double-stranded, circular
  misc_feature (B) LOCATION 1...1323
  hypothetical: NO
  anti-sense: NO
agagattggatgaaaaaaatatggcttttggtgtggggcttgtattctttggcgtttttgcatgcgatagaaacgatagaaaaagcccctacaaatgtagaggatagagacaaagccccccatttgttgcttttagcagggattcaaggcgatgagcctggagggtttaatgcgactaatttgtttttaatgcactatagcgttttaaaaggcttggtggaagtggttcccgtattgaataagccttccatgttaagaaatcacaggggcttgtatggggatatgaaccgcaaatttgctgctttagacaagaatgaccctgaataccccactatccaagaaatcaaatccttgattgcaaagcctagcgtggatgccgtcttgcacttgcatgatggcggtgggtattatcgccctgtttatattgatgcgatgctcaatcctaaacgctgggggaattgctttatcattgatcaagatgaggttaagggggcgaaattccctaatttgcttgcttttgctaacaatacgattgagaatattaacgcccatttattgcaccccattgaaaaataccatttaaaaaacacgcgcaccgctcaaggcgatacagaaatgcaaaaagccctaactttttatgcgatcaaccaaaaaaagagcgcttttgccaatgaagccagcaaagaactccctttagaatcaagggtgttttaccatttgcaagccattgagggcttactcaatcagctcaatatcccttttaagcgcgattttgaacttaaccctaacagcgttcatgccctaatcaacgataaaagcttgtgggcaaaaatcagctctctgcctaaaatgcccctttttaacttacgccctaaactcaatcatttccctttacctagcaacactaaaatcccacaaatccccatagagagcaacgcttacattgtagggctagtcaaaaacaaacaagaagtgtttttaaaatacggcaacaagctcatgacacgattgtcgcccttttacatagagtttgatcattctttagaagaagtgaaaatgcaaattgacaataaggatcaaatggttaagatagggagcgtggttgaagtgaaagagagtttttatatccacgctatggataatatccgcgcgaatgtgattggttttagcgtttctaatgaaagtaagcctaatgaaacgggctatacgattaaatttaaagattttcagaaacgcttttcattggacaagcaagaaaggatctatcgcatagaattttacaaaaacaacgcatttagcgggatgatcttggtgaaatttgtg

SEQ ID NO: 1367 - DNA (genomic), 747 bp, Helicobacter pylori; double-stranded, circular
  misc_feature (B) LOCATION 1...747
  hypothetical: NO
  anti-sense: NO
atgactaaagcgtttgtgcctttaagtttgttagtgagcgcgattttattagcgttttcgctcatcttaatccccacttctaagagcgcttattacgggtttttgcgtcaaaaaaaagacaagattgacattaacatcagagcgggtgaattcgggcaaaaattaggcgattggctcgtgtatgtggataagactgaaaacaattcctatgataatttggtgcttttttctaataaaagtctctctcaagaaagctttattttggctcaaaaaggcaatatcaacaatcaaaacggcgtgtttgaattgaatttgtataacgggcatgcgtatttcactcaaggcgataaaatgcgtaaggttgattttgaagaattgcatttgcgcaacaagctcaagtctttcaattctaatgatgcggcttatttgcaaggcacggattatttgggttattggaaaaaagcctttggtaaaaacgctaataaaaatcaaaaacgccgtttttctcaagcgatcttagtttccttgttccctttagcgagcgtgtttttaatccccttatttggcatcgccaacccgcgattcaaaacgaattggagttatttcyawgtccttggagcggttggggtwtattttttaatggtgcatgtgatttctacggatttgtttttgatgacctttttcttcccctttatttgggcgtttatttcttatttattgtttagaaaattcattttaaagcgttat

SEQ ID NO: 1368 - DNA (genomic), 1038 bp, Helicobacter pylori; double-stranded, circular
  misc_feature (B) LOCATION 1...1038
  hypothetical: NO
  anti-sense: NO
atggttaaacactatcttttcatggcggtttcgcaggtctttttctccttctttttagtgctgttttttatctcttccattgtgttattaatcagtattgcaagcgtaacgctcgtgattaaagtgagctttttggatctggtgcaactctttttgtattccttgccaggaaccattttttttattttgccgatcactttttttgcggcttgcgctttggggctttcaaggcttagctatgaccatgaattgttagtgtttttctctttaggggtttcgcctaaaaaaatgactaaagcgtttgtgcctttaagtttgttagtgagcgcgattttattagcgttttcgctcatcttaatccccacttctaagagcgcttattacgggtttttgcgtcaaaaaaaagacaagattgacattaacatcagagcgggtgaattcgggcaaaaattaggcgattggctcgtgtatgtggataagactgaaaacaattcctatgataatttggtgcttttttctaataaaagtctctctcaagaaagctttattttggctcaaaaaggcaatatcaacaatcaaaacggcgtgtttgaattgaatttgtataacgggcatgcgtatttcactcaaggcgataaaatgcgtaaggttgattttgaagaattgcatttgcgcaacaagctcaagtctttcaattctaatgatgcggcttatttgcaaggcacggattatttgggttattggaaaaaagcctttggtaaaaacgctaataaaaatcaaaaacgccgtttttctcaagcgatcttagtttccttgttccctttagcgagcgtgtttttaatccccttatttggcatcgccaacccgcgattcaaaacgaattggagttatttctatgtccttggagcggttggggtttattttttaatggtgcatgtgatttctacggatttgtttttgatgacctttttcttcccctttatttgggcgtttatttcttatttattgtttagaaaattcattttaaagcgttattaa

SEQ ID NO: 1369 - DNA (genomic), 1038 bp, Helicobacter pylori; double-stranded, circular
  misc_feature (B) LOCATION 1...1038
  hypothetical: NO
  anti-sense: NO
ggcatggttaaacactatcttttcatggcggtttcgcaggtctttttctccttctttttagtgctgttttttatctcttccattgtgttattaatcagtattgcaagcgtaacgctcgtgattaaagtgagctttttggatctggtgcaactctttttgtattccttgccaggaaccactttttttattttgccgatcactttttttgcggcttgcgctttggggctttcaaggcttagctatgaccatgaattgttagtgtttttctctttaggggtttcgcctaaaaaaatgactaaagcgtttgtgcctttaagtttgttagtgagcgcgattttattagcgttttcgctcatcttaatccccacttctaagagcgcttattacgggtttttgcgtcaaaaaaaagacaagattgacattaacatcagagcgggtgaattcgggcaaaaattaggcgattggctcgtgtatgtggataagactgaaaacaattcctatgataatttggtgcttttttctaataaaagtctctctcaagaaagctttattttggctcaaaaaggcaatatcaacaatcaaaacggcgtgtttgaattgaatttgtataacgggcatgcgtatttcactcaaggcgataaaatgcgtaaggttgattttgaagaattgcatttgcgcaacaagctcaagtctttcaattctaatgatgcggcttatttgcaaggcacggattatttgggttattggaaaaaagcctttggtaaaaacgctaataaaaatcaaaaacgccgtttttctcaagcgatcttagtttccttgttccctttagcgagcgtgtttttaatccccttatttggcatcgccaacccgcgattcaaaacgaattggagttatttccatgtccttggagcggttggggtttattttttaatggtgcatgtgatttctacggatttgtttttgatgacctttttcttcccctttatttgggcgtttatttcttatttattgtttagaaaattcattttaaagcgttat

SEQ ID NO: 1370 - DNA (genomic), 240 bp, Helicobacter pylori; double-stranded, circular
  misc_feature (B) LOCATION 1...240
  hypothetical: NO
  anti-sense: NO
tatctaataaacagacattctcaattgcccaacattttcccggataaaagcgcgcgcaatgtggtgatcaatactggtgtgggtaatggtaaggattttagcgctcttgtaagcgattttatttgtgattctagtttgatctcacccaatcaggcttaccccttatattattatgatgatctggggaaccgctataacgctatcagcggctatggcgctcaacctcttcaggaggcatta

SEQ ID NO: 1371 - DNA (genomic), 1029 bp, Helicobacter pylori; double-stranded, circular
  misc_feature (B) LOCATION 1...1029
  hypothetical: NO
  anti-sense: NO
ctctacaacactttctttaaagaagcctttagaaagcaaagcgaaaaactagggatcgtttatacgcctatagaggtggtggatttcattttaagggccactaacggcattttgaaaaagcatttcaacacggattttaacgatcaaagcatcacgatttttgacccattcatgggcaccgggagttttatcgcccggttgctttctaaagaaaacgattttattagcgatgaagccttaaaagagaaatttcaaaaaggtttgttcgcttttgacatcgtgcttttatcttattatatcgctttaatcaatatcacccaagccgcgcaaaatagggacagctcgttaaaaaatttcaaaaacatcgcgctcacggacagcttggattacttggaagagaaaaacgataagggggtaatccctggctttgaatatttatttgaagatttgaaagaaaacaaagaaatcaaaaccactatggaaaagcaaaacattagagtcatcatcggcaacccgccttattcaagcggcgctaaaagcgaaaacgataacaaccaaaacctctcacaccctaagcttgaaaaacgggtttatgaaacttacggcaaaaattccaccgctcaaaacaagaactccacacgagacacgctcatccacagcattcgcatggcgagcgatcttttaaaagataagggggtgctaggctttgtggtgaacgggagcttcattgactctaaaagcgcggacgggtttagaaaatgcgtggcacaagatttttcgcacctttatgcgctgaatttgagaggcaatgcgaggacttcaggagaggagcgaaaaaaacaaggagatggaatatttgatagcggatccagggtgacggtagcgatcatcttttttgtcaaagataaggacgcgcccaatcatacgattttttactatgaagtggaggattatttgaaaagagaagccaaactcaacttgctcgctaattttgaaaatctggattcggtgccttttaaggaaatcacc

SEQ ID NO: 1372 - DNA (genomic), 1026 bp, Helicobacter pylori; double-stranded, circular
  misc_feature (B) LOCATION 1...1026
  hypothetical: NO
  anti-sense: NO
tacaacactttctttaaagaagcctttagaaagcaaagcgaaaaactagggatcgtttatacgcctatagaggtggtggatttcattttaagggccactaacggcattttgaaaaagcatttcaacacggattttaacgatcaaagcatcacgatttttgacccattcatgggcaccgggagttttatcgcccggttgctttctaaagaaaacgattttattagcgatgaagccttaaaagagaaatttcaaaaaggtttgttcgcttttgacatcgtgcttttatcttattatatcgctttaatcaatatcacccaagccgcgcaaaatagggacagctcgttaaaaaatttcaaaaacatcgcgctcacggacagcttggattacttggaagagaaaaacgataagggggtaatccctggctttgaatatttatttgaagatttgaaagaaaacaaagaaatcaaaaccactatggaaaagcaaaacattagagtcatcatcggcaacccgccttattcaagcggcgctaaaagcgaaaacgataacaaccaaaacctctcacaccctaagcttgaaaaacgggtttatgaaacttacggcaaaaattccaccgctcaaaacaagaactccacacgagacacgctcatccacagcattcgcatggcgagcgatcttttaaaagataagggggtgctaggctttgtggtgaacgggagcttcattgactctaaaagcgcggacgggtttagaaaatgcgtggcacaagatttttcgcacctttatgcgctgaatttgagaggcaatgcgaggacttcaggagaggagcgaaaaaaacaaggagatggaatatttgatagcggatccagggtgacggtagcgatcatcttttttgtcaaagataaggacgcgcccaatcatacgattttttactatgaagtggaggattatttgaaaagagaagccaaactcaacttgctcgctaattttgaaaatctggattcggtgccttttaaggaaatcacc

SEQ ID NO: 1373 - DNA (genomic), 1182 bp, Helicobacter pylori; double-stranded, circular
  misc_feature (B) LOCATION 1...1182
  hypothetical: NO
  anti-sense: NO
ataagaaaatcagccagcttgaagccaaaaggcactaaattggataaaaagcttattaataacgaatttgtgtgtaagatcgttggcacgcataaagggttagccaagcaggatgtgatcgccttagacgatgaaaaccaagaagacaacgacttgaaaaacaaagccgacacctttgtttctcaaagagccataagcttttgtaaaagcatacaaacgagtaaaaatatcaaagactcctttgaaacgatcatggaatgctatgatgaagagctgaagaaaaagagttttaaaaacctaaaaatcagcatcgatcatgttgatggcaccatgaattgtaaggagaggcttgacaaattagaaaacttgaatacatttgaacctaacatttgtaaggttttgagtaacgctaggtgtttgagcgagggggtggatgtcccatcgcttgatagcgtgatctttagtgatggcagaagcgcgatggtggatattatccaagcggtgggtagggtgatgcgaaaagccaaaaacaagaaaagaggctatatcattttgcctatcgctttaagagagagcgagattaaaaacttagatgaagccgtcaaaaacaccaatttccaaaacatttggaaagtgctaaaagctttaagaagccatgattcaagcctcgttgatgaagccattttcaaagaaaaaatcaaaatctttggaagcgatgacgcaagcaatccagacgatgaggaagagttacaaaaagataaaactgagcaatcctcaaacgatcccaaagaagcccaaaaaaccctttttgacgctatcttgctgcaagatctagcgaacgccgtgtataacgtcatgcccactaaattaggggacaggaattattgggaaaatttcgctaaaaaaacgggcaacatcgcaaggaccttgaatgagcgcctgaaagaactttttggcaaaaaccctgaaatttttgacaactttttaacttcgttaagaggcaatatccatcaaagcattaaagaagaggaagccttggatatgatcatttctcacatcatcactaagcccatttttgatgcgatttttggggacaatataaaaaaccctatcgcaaaagccttggataaaatggttttaaaactctccgatttgggattagaaggggaaactaaagatcct

SEQ ID NO: 1374 - DNA (genomic), 3480 bp, Helicobacter pylori; double-stranded, circular
  misc_feature (B) LOCATION 1...3480
  hypothetical: NO
  anti-sense: NO
ttggataaaaagcttattaataacgaatttgtgtgtaagatcgttggcacgcataaagggttagccaagcaggatgtgatcgccttagacgatgaaaaccaagaagacaacgacttgaaaaacaaagccgacacctttgtttctcaaagagccataagcttttgtaaaagcatacaaacgagtaaaaatatcaaagactcctttgaaacgatcatggaatgctatgatgaagagctgaagaaaaagagttttaaaaacctaaaaatcagcatcgatcatgttgatggcaccatgaattgtaaggagaggcttgacaaattagaaaacttgaatacatttgaacctaacatttgtaaggttttgagtaacgctaggtgtttgagcgagggggtggatgtcccagcgcttgatagcgtgatcttttttgatggcagaagcgcgatggtggatattatccaagcggtgggtagggtgatgcgaaaagccaaaaacaagaaaagaggctatatcattttgcctatcgctttaagagagagcgagattaaaaacttagatgaagccgtcaaaaacaccaatttccaaaacatttggaaagtgctaaaagctttaagaagccatgattcaagcctcgttgatgaagccattttcaaagaaaaaatcaaaatctttggaagcgatgacgcaagcaatccagacgatgaggaagagttacaaaaagataaaactgagcaatcctcaaacgatcccaaagaagcccaaaaaaccctttttgacgctatcttgctgcaagatctagcgaacgccgtgtataacgtcatgcccactaaattaggggacaggaattattgggaaaatttcgctaaaaaaacgggcaacatcgcaaggaccttgaatgagcgcctgaaagaactttttggcaaaaaccctgaaatttttgacaactttttaacttcgttaagaggcaatatccatcaaagcattaaagaagaggaagccttggatatgatcatttctcacatcatcactaagcccatttttgatgcgatttttggggacaatataaaaaaccctatcgcaaaagccttggataaaatggttttaaaactctccgatttgggattagaaggggaaactaaagatcttaaaaacctctatgaaagcgtgaaaaccgaagcggcgcgcgccaaaagccaaaaaagccaacaagaactcattaaaaacctctacaacactttctttaaagaagcctttagaaagcaaagcgaaaaactagggatcgtttatacgcctatagaggtggtggatttcattttaagggccactaacggcattttgaaaaagcatttcaacacggattttaacgatcaaagcatcacgatttttgacccattcatgggcaccgggagttttatcgcccggttgctttctaaagaaaacgattttattagcgatgaagccttaaaagagaaatttcaaaaaggtttgttcgcttttgacatcgtgcttttatcttattatatcgctttaatcaatatcacccaagccgcgcaaaatagggacagctcgttaaaaaatttcaaaaacatcgcgctcacggacagcttggattacttggaagagaaaaacgataagggggtaatccctggctttgaatatttatttgaagatttgaaagaaaacaaagaaatcaaaaccactatggaaaagcaaaacattagagtcatcatcggcaacccgccttattcaagcggcgctaaaagcgaaaacgataacaaccaaaacctctcacaccctaagcttgaaaaacgggtttatgaaacttacggcaaaaattccaccgctcaaaacaagaactccacacgagacacgctcatccacagcattcgcatggcgagcgatcttttaaaagataagggggtgctaggctttgtggtgaacgggagcttcattgactctaaaagcgcggacgggtttagaaaatgcgtggcacaagatttttcgcacctttatgcgctgaatttgagaggcaatgcgaggacttcaggagaggagcgaaaaaaacaaggagatggaatatttgatagcggatccagggtgacggtagcgatcatcttttttgtcaaagataaggacgcgcccaatcatacgattttttactatgaagtggaggattatttgaaaagagaagccaaactcaacttgctcgctaattttgaaaatctggattcggtgccttttaaggaaatcaccccgaatgacaaaggcgattggatcaaccaaaggaatgacgattttgaaaagctcatccctttgaaaagagacaaaaaatcaaaaatattcaatgctatttttgatctcaattctaatggggtgaaaacaagtcgtgatccttgggtgtataacttttcgcaaaaaactttaatgcaatcggtgcaaaactgcattgacacttataacgctgatttgaagcgcttcaatgagcgtttcagggaagccttcaaacaacgcacagctaaagataaaggtatcaaaaagtcagccgatcgctacaagcacctaaacgatagagaaatcaccactgataaaacgaaaatcgcttggactgatggtttgaaaaacaaactcattaaaaatgaaaatctgccagaaagcggcatggagcgcgtaaggttagccttgtatcgcccttttaacaaacaatggctttattgggataaaaatttaataaacagacaatctcaattgcccaaaattttcccggataaaagcgcgcgcaatgtggtgatcaatactggtgtgggtaatggtaaggattttagcgctcttgtaagcgattttatttctgattttagtttgatctcacccaatcaggcttaccccttatattattatgatgatctggggaaccgctataacgctatcagcggctatgcgctcaacctcttcaggaggcattataaagataatgctattactgaagaagagattttttactatatttatgcgattttccaccataaaggctatttggaaaaatacaaaaactctctcgccaaagaagcgccgcgaatcgctttgagcgaagactttaaagaactctctatgcttggcaaagaattggccgaattgcacctgaactatgagagtggggaaatgcacacaagcgttaaacataacctactagagagtgccgaaatggagggctattatgatgtgatccaaatgaaaaaggataaaaaaggggatcgcatcaaatacaaccaccatatcactatcactcaaatccctaaaaaagcctttgactatgtggtgaatggcaaaagcgcgattgactgggtgatcgaacgctatcaaatcactaaagataaagacagcttgattgaaaacaacccgaatcattacgccggcggcaaatatatttttgaactcctttgtagggtcatcaccctttcggtaaaaagcgtggatttgattgaaaag

SEQ ID NO: 1375 - DNA (genomic), 768 bp, Helicobacter pylori; double-stranded, circular
  misc_feature (B) LOCATION 1...768
  hypothetical: NO
  anti-sense: NO
atggatatttatgcgttatacatagcgatagggctttttactggcattctatcagggatctttggtattggtggggggatgatcattgtccctatcatgctcgcaaccgggcattcttttgaagaatccatcggcatttccattttacaaatggttctttcatcatttgttggctctgttttgaatttcaaaaaaaaatcgcttgatttttctttaggcttgttgataggggcaggggggctgataggggcgagttttagcggtttcattttaaaaatcgtttccagtaaaattttaatggttattttcgcacttttagtcgtgtattctatgatccaatttgttctaaaacccaaaaaaaaagatttgataacggacactaaacgctaccatttacaaggtttaaaattatttttaattggcgcgctcacagggttttttgccatcactttagggattggtggagggatgctcatggtgcctttgatgcattattttttagggtatgattctaaaaaatgcgtggcgttagggctatttttcatcttgttttcttccatttcaggagccttttctttaatgtatcaccacatcatcaataaggaagtgcttttagcaggggcgattgtgggcttaggatcagttatgggcgtgagtattgggattaaatggatcatggggcttttgaatgaaaagatgcataaagctttgattttaggggtgtatggtttgtcgctattgattgttttatacaaaatctttttttga

SEQ ID NO: 1376 - DNA (genomic), 792 bp, Helicobacter pylori; double-stranded, circular
  misc_feature (B) LOCATION 1...792
  hypothetical: NO
  anti-sense: NO
ggggggttttactttttaagggtttttatggatatttatgcgttatacatagcgatagggctttttactggcattctatcagggatctttggtattggtggggggatgatcattgtccctatcatgctcgcaaccgggcattcttttgaagaatccatcggcatttccattttacaaatggttctttcatcatttgttggctctgttttgaatttcaaaaaaaaatcgcttgatttttctttaggcttgttgataggggcaggggggctgataggggcaagttttagcggtttcattttaaaaatcgtttccagtaaaattttaatggttattttcgcacttttagtcgtgtattctatgatccaatttgttctaaaacccaaaaaaaaagatttgataacggacactaaacgctaccatttacaaggtttaaaattatttttaattggcgcgctcacagggttttttgccatcactttagggattggtggagggatgctcatggtgcctttgatgcattattttttagggtatgattctaaaaaatgcgtggcgttagggctatttttcatcttgttttcttccatttcaggagccttttctttaatgtatcaccacatcatcaataaggaagtgcttttagcaggggcgattgtgggcttaggatcagttatgggcgtgagtattgggattaaatggatcatggggcttttgaatgaaaagatgcataaagctttgattttaggggtgtatggtttgtcgctattgattgttttatacaaaatctttttt

SEQ ID NO: 1377 - DNA (genomic), 165 bp, Helicobacter pylori; double-stranded, circular
  misc_feature (B) LOCATION 1...165
  hypothetical: NO
  anti-sense: NO
ttcaaaaaagacgtgatgctaaaaatcatggggattgtagaaaagcaccatttgagttttgctttcccatcacagagtttgtatgtggagagtttgccagaagttagcctgaaagaaagggctaaaatctataacttgcaattattggtagatgtattctttggt

SEQ ID NO: 1378 - DNA (genomic), 735 bp, Helicobacter pylori; double-stranded, circular
  misc_feature (B) LOCATION 1...735
  hypothetical: NO
  anti-sense: NO
atagcgctctttaaaggctatggggaagcgttagttacgaatgtggctaccaaaagcacgcacaattttagaaaagaagtgatcaacttgattttaaaagtcgtgtattttttgatttttattgtcgcgcttttaggggttttgaaacaactagggtttaacgtttcagccatcatcgcttctttagggattggggggttagcggtggctttggcggttaaagacgtgttggcgaacttttttgcttctgtcatcttgttgttagacaattcgttttctcaaggggattggatcgtgtgcggtgaagtggaaggcacggtggtggaaatggggctaaggcgcaccacaatcagggcttttgataacgctcttttgtccgtgcctaattcagaattagccggaaaacccatcaggaattggagccggcgtaaagtgggaaggcgtattaaaatggaaataggcttaacttatagctccagtcaaagcgccttacagctttgcgtgaaagacattaaagaaatgttagaaaaccaccctaaaatcgccaatggggccgatagcgctttgcaaaatgcgagcgattaccgctacatgtttaaaaaagatattgtttctattgacgattttttagggtataaaaacaatctgtttgtctttttggatcagtttgcggacagctctattaatattttggtgtattgcttttctaagacggtggtttgggaagagtggcta

SEQ ID NO: 1379 - DNA (genomic), 732 bp, Helicobacter pylori; double-stranded, circular
  misc_feature (B) LOCATION 1...732
  hypothetical: NO
  anti-sense: NO
gcgctctttaaaggctatggggaagcgttagttacgaatgtggctaccaaaagcacgcacaattttagaaaagaagtgatcaacttgattttaaaagtcgtgtattttttgatttttattgtcgcgcttttaggggttttgaaacaactagggtttaacgtttcagccatcatcgcttctttagggattggggggttagcggtggctttggcggttaaagacgtgttggcgaacttttttgcttctgtcatcttgttgttagacaattcgttttctcaaggggattggatcgtgtgcggtgaagtggaaggcacggtggtggaaatggggctaaggcgcaccacaatcagggcttttgataacgctcttttgtccgtgcctaattcagaattagccggaaaacccatcaggaattggagccggcgtaaagtgggaaggcgtattaaaatggaaataggcttaacttatagctccagtcaaagcgccttacagctttgcgtgaaagacattaaagaaatgttagaaaaccaccctaaaatcgccaatggggccgatagcgctttgcaaaatgcgagcgattaccgctacatgtttaaaaaagatattgtttctattgacgattttttagggtataaaaacaatctgtttgtctttttggatcagtttgcggacagctctattaatattttggtgtattgcttttctaagacggtggtttgggaagagtggcta

SEQ ID NO: 1380 - DNA (genomic), 981 bp, Helicobacter pylori; double-stranded, circular
  misc_feature (B) LOCATION 1...981
  hypothetical: NO
  anti-sense: NO
gaaagattttatcttgtttgtgtggggttttgcatgcgtttattattgtggtgggtattagtattatcgctctttttagatcctttgagggcggttgaagagcatgaaacagatgcggtggatttgtttttgattttcaatcaaatcaaccagctcaatcaagtcattgaaacttacaaaaaaaaccctgaaagaagcgctgaaatttctctgtataacacccaaaagaacgatttgattaaaagtttgacttctaaagtgttgaatgaaagggataaaattggcattgacatcaatcaaaatttaaaagagcaggagaaaatcaaaaagcgtttgtctaaaagcattaagggtgatgatttctacactttcatgaaagatagattgtctttagatattttgttgatagatgaaactttgtatcgttttatagataagatcaggagcagtattgatatttttagcgaacaaaaagatgtggaaagtatcagcgatgcttttcttttgcgtttaggacaattcaaactctacactttccctaaaaatttaggcaatgtcaaaatgcatgaattagagcagatgtttagcgattatgaattgcgtttgaacacttacactgaagtcttgcgttacattaaaaaccaccctaaagaagtgcttcctaaaaacttgatcatggaagtgaatatggattttgtgttaaacaaaatcagcaaggttttgcctttcacagcccatagcttgcaagtgagtaagatcgcactggctttgatgattttagccttattgttaggtttaaggaaattgatcacttggcttttagccttattattagatcgtatttttgaaatcatgcagcgcaataaaaaaatgcatgtcaatgtgcaaagcagcattgtttcgccggtttctgtctttttagccctattcattgcgatatggcttttcacatttgaaggacctaacgctctctttttacat

SEQ ID NO: 1381 - DNA (genomic), 1884 bp, Helicobacter pylori; double-stranded, circular
  misc_feature (B) LOCATION 1...1884
  hypothetical: NO
  anti-sense: NO
gtggggttttgcatgcgtttattattgtggtgggtattagtattatcgctctttttagatcctttgagggcggttgaagagcatgaaacagatgcggtggatttgtttttgattttcaatcaaatcaaccagctcaatcaagtcattgaaacttacaaaaaaaaccctgaaagaagcgctgaaatttctctgtataacacccaaaagaacgatttgattaaaagtttgacttctaaagtgttgaatgaaagggataaaattggcattgacatcaatcaaaatttaaaagagcaggagaaaatcaaaaagcgtttgtctaaaagcattaagggtgatgatttctacactttcatgaaagatagattgtctttagatattttgttgatagatgaaactttgtatcgttttatagataagatcaggagcagtattgatatttttagcgaacaaaaagatgtggaaagtatcagcgatgcttttcttttgcgtttaggacaattcaaactctacactttccctaaaaatttaggcaatgtcaaaatgcatgaattagagcagatgtttagcgattatgaattgcgtttgaacacttacactgaagtcttgcgttacattaaaaaccaccctaaagaagtgcttcctaaaaacttgatcatggaagtgaatatggattttgtgttaaacaaaatcagcaaggttttgcctttcacagcccatagcttgcaagtgagtaagatcgcactggctttgatgattttagccttattgttaggtttaaggaaattgatcacttggcttttagccttattattagatcgtatttttgaaatcatgcagcgcaataaaaaaatgcatgtcaatgtgcaaagcagcattgtttcgccggtttctgtctttttagccctattcagttgcgatgtggctttagacattttctactaccctaacgcatcgcctcctaaagtttctatgtgggtgggcgcggtgtatatcatgcttttagcatggttagtgatagcgctctttaaaggctatggggaagcgttagttacgaatgtggctaccaaaagcacgcacaattttagaaaagaagtgatcaacttgattttaaaagtcgtgtattttttgatttttattgtcgcgcttttaggggttttgaaacaactagggtttaacgtttcagccatcatcgcttctttagggattggggggttagcggtggctttggcggttaaagacgtgttggcgaatttttttgcttctgtcatcttgttgttagacaattcgttttctcaaggggattggatcgtgtgcggtgaagtggaaggcacggtggtggaaatggggctaaggcgcaccacaatcagggcttttgataacgctcttttgtccgtgcctaattcagaattagccggaaaacccatcaggaattggagccggcgtaaagtgggaaggcgtattaaaatggaaataggcttaacttatagctccagtcaaagcgccttacagctttgcgtgaaagacattaaagaaatgttagaaaaccaccctaaaatcgccaatggggccgatagcgctttgcaaaatgcgagcgattaccgctacatgtttaaaaaagatattgtttctattgacgattttttagggtataaaaacaatctgtttgtctttttggatcagtttgcggacagctctattaatattttggtgtattgcttttctaagacggtggtttgggaagagtggctagaagtcaaagaagacgtgatgctaaaaatcatggggattgtagaaaagcaccatttgagttttgctttcccatcacagagtttgtatgtggagagtttgccagaagttagcctgaaagaaggggctaaaatctaa

SEQ ID NO: 1382 - DNA (genomic), 654 bp, Helicobacter pylori; double-stranded, circular
  misc_feature (B) LOCATION 1...654
  hypothetical: NO
  anti-sense: NO
atggcattagattgggattttatgttgcactccatccctgcgttttttaaggggttaaaactcacgctttatatttccttttttgggattttgctctctcttttggtggggtttttgtgcgcgatcgttttgtattttaaaacgcgttttctctctcctgttgtctatatctatggcgaaatcgccaggaacacgcccctactcatccagcttttctttttgtattacgggttgaatgaaatcggtttgagcgctttagagtgtgcgattttagcgttagggtttttgggtggggggtatatgagtcaaagttttttgcttgggtttaagagcttggcttccattcaaagagaaagcgctttgagtttagggtttagccctttgaaaatgatgtattatattattctgcctcaaagcttaagcgtttccatgccttccataggggcgaatgtgatttttttactcaaagaaacttcggtggtgggcgcgatagccctaaccgatattatgtttgtggcgaaagatttgattggcatttattacaaaacgactgaaagcctgttgatgttaagcctcacttatttgatcgctttgctccctttgagcgctttgtttgtgatcttagagcgttcttttaaaaagaaagtggcttaa

SEQ ID NO: 1383 - DNA (genomic), 690 bp, Helicobacter pylori; double-stranded, circular
  misc_feature (B) LOCATION 1...690
  hypothetical: NO
  anti-sense: NO
tgtggtgcgttaagcgccatcaattttaaggtaagcgttatggcattagattgggattttatgttgcactccatccctgcgttttttaaggggttaaaactcacgctttatatttccttttttgggattttgctctctcttttggtggggtttttgtgcgcgatcgttttgtattttaaaacgcgttttctctctcctgttgtctatatctatggcgaaatcgccaggaacacgcccctactcatccagcttttctttttgtattacgggttgaatgaaatcggtttgagcgctttagagtgtgcgattttagcgttagggtttttgggtggggggtatatgagtcaaagttttttgcttgggtttaagagcttggcttccattcaaagagaaagcgctttgagtttagggtttagccctttgaaaatgatgtattatattattccgcctcaaagcttaagcgtttccatgccttccataggggcgaatgtgatttttttactcaaagaaacttcggtggtgggcgcgatagccctaaccgatattatgtttgtggcgaaagatttgattggcatttattacaaaacgactgaaagcctgttgatgttaagcctcacttatttgatcgctgtgctccctttgagcgctttgtttgtgatcttagagcgttcttttaaaaagaaagtggct

SEQ ID NO: 1384 - DNA (genomic), 426 bp, Helicobacter pylori; double-stranded, circular
  misc_feature (B) LOCATION 1...426
  hypothetical: NO
  anti-sense: NO
atgctagaaatagacaaccaaaccccgctagaatcagactttttattattagaaaaaatcgcagatgttttagcctccactcaaatcattgagcttgttttagtgagcgatgaaaccatgcgagaaatcaaccgggatttaagggactgcgattacgccactgatgttttgagcttccctttagaagcgattcctcatacccctttagggagcgtggtcattaatgcgccattagcccaagaaaacgccctgaaattagggcatagcttagaagatgagatcgctcttttattcattcatggggtgttgcacttgctgggctatgaccatgaaaaagataagggcgaacaacgccaaaaagagggcgaactcattaaggcttttgacttgcctttgagtttgattgaacggacacaagagtgttaa

SEQ ID NO: 1385 - DNA (genomic), 453 bp, Helicobacter pylori; double-stranded, circular
  misc_feature (B) LOCATION 1...453
  hypothetical: NO
  anti-sense: NO
ggcttttttaaacttctttttatatctttaatgctagaaatagacaaccaaaccccgctagaatcagactttttattattagaaaaaatcgcagatgttttagcctccactcaaatcattgagcttgttttagtgagcgatgaaaccatgcgagaaatcaaccgggatttaagggactgcgattacgccactgatgttttgagcttccctttagaagcgattcctcatacccctttagggagcgtggtcattaatgcgccattagcccaagaaaacgccctgaaattagggcatagcttagaagatgagatcgctcttttattcattcatggggtgttgcacttgctgggctatgaccatgaaaaagataagggcgaacaacgccaaaaagagggcgaactcattaaggcttttgacttgcctttgagtttgattgaacggacacaagagtgt

SEQ ID NO: 1386 - DNA (genomic), 837 bp, Helicobacter pylori; double-stranded, circular
  misc_feature (B) LOCATION 1...837
  hypothetical: NO
  anti-sense: NO
gaaaagttttataaacccggtaaaaggattgataaagattataaaaagcaagtcgtaaagcataaagggcatatcccttttaaagacagctttaaagaagaaactttagagaatttcactaaccttttaaaagagcaccgcatcacgccaagctataaaaccgatattgagagcgtgaaaaaagaaggcgaattgttcaaaatcaccaccacttctaacacaacctatcatgctaaatttgtggtggttgcgatcgggaaaatgggccagccaaaccgccctactacttataaaatccctgtcgcgctctctaaacaagtggtttttagcatcaacgattgtaaggaaaatgaaaaaacccttgtgatcggcggaggcaactcagcggtggaatacgccattgctttgtgcaaaaccacccctaccactctcaattaccgcaaaaaagaattcagccgcatcaatgaagacaacgctaaaaacttgcaagaagtcctagacaataacacgcttaaaagcaagcttggagtggatattgaaagcctagaagaagataacactcaaattaaggtgaatttcaccgataacacgagcgagagttttgatcgcttgctgtatgcgatcggaggctctacccctttagagttttttaaacgctgttctttagaattagatcctagcaccaatatccctgtagtgaaagaaaatttagagagcaacaatatccctaatctattcatcgtgggcgatattttattcaaatcaggggcgagcatcgctaccgcactaaatcatggctatgatgttgctatagaaatcgctaaaaggttacaatct

SEQ ID NO: 1387 - DNA (genomic), 975 bp, Helicobacter pylori; double-stranded, circular
  misc_feature (B) LOCATION 1...975
  hypothetical: NO
  anti-sense: NO
atggaccaagaaattttagatgtattgatagtgggtgcagggcctgggggcattgccacggtcgtagaatgcgaaatagccggcgttaaaaaagtgcttttatgcgaaaaaaccgaaagccattcaggcatgctggaaaagttttataaagccggtaaaaggattgataaagattataaaaagcaagtcgtagagcttaaagggcatatcccttttaaagacagctttaaagaagaaactttagagaatttcactaaccttttaaaagagcaccgcatcacgccaagctataaaaccgatattgagagcgtgaaaaaagaaggcgaattgttcaaaatcaccaccacttctaacacaacctatcatgctaaatttgtggtggttgcgatcgggaaaatgggccagccaaaccgccctactacttataaaatccctgtcgcgctctctaaacaagtggtttttagcatcaacgattgtaaggaaaatgaaaaaacccttgtgatcggcggaggcaactcagcggtggaatacgccattgctttgtgcaaaaccacccctaccactctcaattaccgcaaaaaagaattcagccgcatcaatgaagacaacgctaaaaacttgcaagaagtcctagacaataacacgcttaaaagcaagcttggagtggatattgaaagcctagaagaagataacactcaaattaaggtgaatttcaccgataacacgagcgagagttttgatcgcttgctgtatgcgatcggaggctctacccctttagagttttttaaacgctgttctttagaattagatcctagcaccaatatccctgtagtgaaagaaaatttagagagcaacaatatccctaatctattcatcgtgggcgatattttattcaaatcaggggcgagcatcgctaccgcactaaatcatggctatgatgttgctatagaaatcgctaaaaggttacaatcttaa

SEQ ID NO: 1388 - DNA (genomic), 228 bp, Helicobacter pylori; double-stranded, circular
  misc_feature (B) LOCATION 1...228
  hypothetical: NO
  anti-sense: NO
atgctgcataaggctaaggtgggcatcgtgtttcaggcgcttttagggattttttgcgtgtttttattgttgttttacttgagcgcgtttttaatggtggcttttaaagacactaaacgcatgtttataagcgttttaatagggagcgtggtgttcctttggagcgatctattggtctttgtagggtttaaaaatatcagctttgttttggatattggttatgaaatc

SEQ ID NO: 1389 - DNA (genomic), 531 bp, Helicobacter pylori; double-stranded, circular
  misc_feature (B) LOCATION 1...531
  hypothetical: NO
  anti-sense: NO
atgactgcaatgatgcgttattttcacatctatgcgaccacttttttcttccctttggcgcttctttttgcggttagtgggctttcattgctctttaaagcgcgccaagacactggcgctaagatcaaagaatgggttttagaaaaatccttaaaaaaagaagaacgattggactttttaaaaggctttataaaagaaaaccatatcgctatgcctaaaaagatagagcctagagagtataggggagcgttagtcattggcacgcctttgtatgaaatcaaccttgaaactaaaggcactcaaacgaaaatcaagaccattgaaaggggctttttaggcgcgctcatcatgctgcataaggctaaggtgggcatcgtgtttcaggcgcttttagggattttttgcgtgtttttattgttgttttacttgagcgcgtttttaatggtggcttttaaagacactaaacgcatgtttataagcgttttaatagggagcgtggtgttctttggagcgatctattggtctttgtag

SEQ ID NO: 1390 - DNA (genomic), 552 bp, Helicobacter pylori; double-stranded, circular
  misc_feature (B) LOCATION 1...552
  hypothetical: NO
  anti-sense: NO
attcgtgagccacaggttgcaataatgactgcaatgatgcgttattttcacatctatgcgaccacttttttcttccctttggcgcttctttttgcggttagtgggctttcattgctctttaaagcgcgccaagacactggcgctaagatcaaagaatgggttttagaaaaatccttaaaaaaagaagaacgattggactttttaaaaggctttataaaagaaaaccatatcgctatgcctaaaaagatagagcctagagagtataggggagcgttagtcattggcacgcctttgtatgaaatcaaccttgaaactaaaggcactcaaacgaaaatcaagaccattgaaaggggctttttaggcgcgctcatcatgctgcataaggctaaggtgggcatcgtgtttcaggcgcttttagggattttttgcgtgtttttattgttgttttacttgagcgcgtttttaatggtggcttttaaagacactaaacgcatgtttataagcgttttaatagggagcgtggtgttctttggagcgatctattggtctttg

SEQ ID NO: 1391 - DNA (genomic), 318 bp, Helicobacter pylori; double-stranded, circular
  misc_feature (B) LOCATION 1...318
  hypothetical: NO
  anti-sense: NO
aaccaacgctttcagcgtggggataaggatttgagggccaaaattgatgtgggtgatcgcaacgatgaaatctcgcaagtgggccgtgggatcaatttgtttgtggaaaacgcccgcttgattatggaagagattaaagggatttccaccctcaataaaacttcaatggataaattagtccaaatcacgcaagaaacccaaaagagcatgaaaaattcctcaaccaccctaaattctgtaaaaaacaaaaccactgatatagcgagcatgatgaatgcttccatagaacagtctccaagggttaaggaagcgtttgat

SEQ ID NO: 1392 - DNA (genomic), 486 bp, Helicobacter pylori; double-stranded, circular
  misc_feature (B) LOCATION 1...486
  hypothetical: NO
  anti-sense: NO
cgatattccgatcagacgaatctattagccctaaatgctgctattgaagccgcaagggccggcgagcatggtagaggctttgcggtggtggctgatgaagttaggaatttagctgggcgcactcaaaagtctttagccgaaatcaattccactatcatggtgattgtccaagaaatcaatgatgtgagttcgcaaatgaatctcaattcgcaaaaaatggagcgcttgagcgatatgagtaaaagcgtgcaagaaacttacgaaaaaatgagttctaatttaagctcagtcgttttagacagcaatcaaagcatggacgattacgctaaatccggacaccaaattgaagctatggtaagcgattttgcagaagtggaaaaagtggcttctaagactttggctgattcttcagatattttaaacatcgctacgcatgtgagtggaacgaccatgaatttagacaaacaagtgaatttgtttaaaact

SEQ ID NO: 1393 - DNA (genomic), 594 bp, Helicobacter pylori; double-stranded, circular
  misc_feature (B) LOCATION 1...594
  hypothetical: NO
  anti-sense: NO
gagataaatgatgtttgcttcagtatttgcttcgcagggactcgtattatgtttgtcgtgctagccgctcttttaggtttaggggggctttttattggttttgtaaaggttatgcaaaaagatgtgttagtgcaactcatggagcatttagaaaccgggcaatacaaaaagcgtgaaaaaacgctcgcttacatgacgaagcttcttgaacagggcattcataagtattacaaaaattctgacaatgctactgcaagaaaaatggcgttggattatttcaaacgcatcaacgacgataagggcatgatttatatggtggtggtggataaaaacggggtggtattatttgatccagtcaatcctaaaaccgtgggccaatcagggcttagtttgcaaagcgttgatggggtgtattatgttagggggtatttggaggcggctaaaaaaggggggggctacacttattataaaatgcccaaatacgatgggggcgtgccggagaaaaaattcgcctactcgcattatgatgaggtgtctcaaatggtgatcgcggcgacttcctattacactgacgttaacaccgaaaacagcgat

SEQ ID NO: 1394 - DNA (genomic), 1695 bp, Helicobacter pylori; double-stranded, circular
  misc_feature (B) LOCATION 1...1695
  hypothetical: NO
  anti-sense: NO
atgtttgcttcagtatttgcttcgctagggactcgtattatgtttgtcgtgctagccgctcttttaggtttaggggggctttttattggttttgtaaaggttatgcaaaaagatgtgttagtgcaactcatggagcatttagaaaccgggcaatacaaaaagcgtgaaaaaacgctcgcttacatgacgaagcttcttgaacagggcattcataagtattacaaaaattctgacaatgctactgcaagaaaaatggcgttggattatttcaaacgcatcaacgacgataagggcatgatttatatggtggtggtggataaaaacggggtggtattatttgatccagtcaatcctaaaaccgtgggccaatcagggcttagtttgcaaagcgttgatggggtgtattatgttagggggtatttggaggcggctaaaaaaggggggggctacacttattataaaatgcccaaatacgatgggggcgtgccggagaaaaaattcgcctactcgcattatgatgaggtgtctcaaatggtgatcgcagcgacttcctattacactgacattaacaccgaaaatcaagcgattaaagaaggcgtgaataaggtttttaatgaaaacaccacaaaattattcctttggatactgacagcgacgatagcgttagtggttttgacgctcatatacgccaaattaaggatcgtgaaacgcattgatgaactggtccttaaaatcaacgctttcagccgtggggataaggatttgagggccaaaattgatgtgggtgatcgcaacgatgaaatctcgcaagtgggccgtgggatcaatttgtttgtggaaaacgcccgcttgattatggaagagattaaagggatttccaccctcaataaaacttcaatggataaattagtccaaatcacgcaagaaacccaaaagagcatgaaaaattcctcaaccaccctaaattctgtaaaaaataaagccactgatatagcgagcatgatgaatgcttccatagagcagtctcaagggttaaggaagcgtttgattgaaacgcaagggctggtcaaagagagtaaggatgcgattggggatttattttctcaaatcacagagagcgcgcacactgaagaggagctctctagcaaagtggagcagctaagccgtaacgctgatgatgtcaaatccattttggatattattaacgatattgccgatcagacgaatctattagccctaaatgctgctattgaagccgcaagggccggcgagcatggtagaggctttgcggtggtggctgatgaagttaggaatttagctgggcgcactcaaaagtctttagccgaaatcaattccactatcatggtgattgtccaagaaatcaatgatgtgagttcgcaaatgaatctcaattcgcaaaaaatggagcgcttgagcgatatgagtaaaagcgtgcaagaaacttacgaaaaaatgagttctaatttaagctcagtcgttttagacagcaatcaaagcatggacgattacgctaaatccggacaccaaattgaagctatggtaagcgattttgcagaagtggaaaaagtggcttctaagactttggctgattcttcagatattttaaacatcactacgcatgtgagtggaacgaccatgaatttagacaaacaagtgaatttgtttaaaacttaa

SEQ ID NO: 1395 - DNA (genomic), 1695 bp, Helicobacter pylori; double-stranded, circular
  misc_feature (B) LOCATION 1...1695
  hypothetical: NO
  anti-sense: NO
atgtttgcttcagtatttgcttcgctagggactcgtattatgtttgtcgtgctagccgctcttttaggtttaggggggctttttattggttttgtaaaggttatgcaaaaagatgtgttagtgcaactcatggagcatttagaaaccgggcaatacaaaaagcgtgaaaaaacgctcgcttacatgacgaagcttcttgaacagggcattcataagtattacaaaaattctgacaatgctactgcaagaaaaatggcgttggattatttcaaacgcatcaacgacgataagggcatgatttatatggtggtggtggataaaaacggggtggtattatttgatccagtcaatcctaaaaccgtgggccaatcagggcttagtttgcaaagcgttgatggggtgtattatgttagggggtatttggaggcggctaaaaaaggggggggctacacttattataaaatgcccaaatacgatgggggcgtgccggagaaaaaattcgcctactcgcattatgatgaggtgtctcaaatggtgatcgcagcgacttcctattacactgacattaacaccgaaaatcaagcgattaaagaaggcgtgaataaggtttttaatgaaaacaccacaaaattattcctttggatactgacagcgacgatagcgttagtggttttgacgctcatatacgccaaattaaggatcgtgaaacgcattgatgaactggtccttaaaaycaacgctttcagccgtggggataaggatttgagggccaaaattgatgtgggtgatcgcaacgatgaaatctcgcaagtgggccgtgggatcaatttgtttgtggaaaacgcccgcttgattatggaagagattaaagggatttccaccctcaataaaacttcaatggataaattagtccaaatcacgcaagaaacccaaaagagcatgaaaaattcctcaaccaccctaaattctgtaaaaaataaagccactgatatagcgagcatgatgaatgcttccatagagcagtctcaagggttaaggaagcgtttgattgaaacgcaagggctggtcaaagagagtaaggatgcgattggggatttattttctcaaatcacagagagcgcgcacactgaagaggagctctctagcaaagtggagcagctaagccgtaacgctgatgatgtcaaatccattttggatattattaacgatattgccgatcagacgaatctattagccctaaatgctgctattgaagccgcaagggccggcgagcatggtagaggctttgcggtggtggctgatgaagttaggaatttagctgggcgcactcaaaagtctttagccgaaatcaattccactatcatggtgattgtccaagaaatcaatgatgtgagttcgcaaatgaatctcaattcgcaaaaaatggagcgcttgagcgatatgagtaaaagcgtgcaagaaacttacgaaaaaatgagttctaatttaagctcagtcgttttagacagcaatcaaagcatggacgattacgctaaatccggacaccaaattgaagctatggtaagcgattttgcagaagtggaaaaagtggcttctaagactttggctgattcttcagatattttaaacatcactacgcatgtgagtggaacgaccatgaatttagacaaacaagtgaatttgtttaaaacttaa

SEQ ID NO: 1396 - DNA (genomic), 702 bp, Helicobacter pylori; double-stranded, circular
  misc_feature (B) LOCATION 1...702
  hypothetical: NO
  anti-sense: NO
atcgttttagtagcgatagccttactgataagtggttgcgcgagctataagatcacgcctgaacatgttacttcctataataatgggattcaagtgatgacttccacgcaagtgagatctaaagtccagttagaaatcgcccaaagcaaattgaaaggcttgaatgaatcccccttagtgctgtatgtggcagcacaagttttagagggaaaacctgtagtgtttagtcgtaaagccatttcggtgtctatcaatcaaacgaatttaccggtcttaagcctgagacaggtgatgaagtctagttttgattttgaaggcattttacaaagctttaatatcagcgtgccgaccgcccctattgataatatcaatatgagtaccccgcccatgttttattatgggcaagggagttttttagcttataacggcatgatgtatgggggaatgggcatgtatgggcctggctttggcatgatgatgatggatgatgtagaagagcaagaagtcatgcaagaaagccgccaagctttaaagatcctagcgatcaattaccttaagaaaaacacccttaatgttgaaaataaggctaaaggagggtttgtggtagtggataccaaaaaccttaaaaccccgggcgtggtggtggttaaagtctttttagaagatgaaatccacacctttaaaattgatatttctaagatg

SEQ ID NO: 1397 - DNA (genomic), 714 bp, Helicobacter pylori; double-stranded, circular
  misc_feature (B) LOCATION 1...714
  hypothetical: NO
  anti-sense: NO
atgagaaaaatcgttttagtagcgatagccttactgataagtggttgcgcgagctataagatcacgcctgaacatgttacttcctataataatgggattcaagtgatgacttccacgcaagcgagatctaaagtccagttagaaatcgcccaaagcaaattgaaaggcttgaatgaatcccccttagtgctgtatgtggcagcacaagttttagagggaaaacctgtagtgtttagtcgtaaagccatttcggtgtctatcaatcaaacgaatttaccggtcttaagcctgagacaggtgatgaagtctagttttgattttgaaggcattttacaaagctttaatatcagcgtgccgaccgcccctattgataatatcaatatgagtaccccgcccatgttttattatgggcaagggagttttttagcttataacggcatgatgtatgggggaatgggcatgtatgggcctggctttggcatgatgatgatggatgatgtagaagagcaagaagtcatgcaagaaagccgccaagctttaaagatcctagcgatcaattaccttaagaaaaacacccttaatgttgaaaataaggctaaaggagggtttgtggtagtggataccaaaaaccttaaaaccccgggcgtggtggtggttaaagtctttttagaagatgaaatccacacctttaaaattgatatttctaagatgtaa

SEQ ID NO: 1398 - DNA (genomic), 714 bp, Helicobacter pylori; double-stranded, circular
  misc_feature (B) LOCATION 1...714
  hypothetical: NO
  anti-sense: NO
atgagaaaaatcgttttagtagcgatagccttactgataagtggttgcgcgagctataagatcacgcctgaacatgttacttcctataataatgggattcaagtgatgacttccacgcaagcgagatctaaagtccagttagaaatcgcccaaagcaaattgaaaggcttgaatgaatcccccttagtgctgtatgtggcagcacaagttttagagggaaaacctgtagtgtttagtcgtaaagccatttcggtgtctatcaatcaaacgaatttaccggtcttaagcctgagacaggtgatgaagtctagttttgattttgaaggcattttacaaagctttaatatcagcgtgccgaccgcccctattgataatatcaatatgatcaccccgcccatgttttattatgggcaagggagttttttagcttataacggcatgatgtatgggggaatgggcatgtatgggcctggctttggcatgatgatgatggatgatgtagaagagcaagaagtcatgcaagaaagccgccaagctttaaagatcctagcgatcaattaccttaagaaaaacacccttaatgttgaaaataaggctaaaggagggtttgtggtagtggataccaaaaaccttaaaaccccgggcgtggtggtggttaaagtctttttagaagatgaaatccacacctttaaaattgatatttctaagatgtaa

SEQ ID NO: 1399 - DNA (genomic), 252 bp, Helicobacter pylori; double-stranded, circular
  misc_feature (B) LOCATION 1...252
  hypothetical: NO
  anti-sense: NO
aagggggtgtttatgtttttattaaggcatttgacttcagcgtgcgtgtttttagcgtctaaatgtttgccggactcctttgtcttggtcgctcttttatcgtttgtcgtgttcgttcttgtttattgtttgacagggcaagacgcttcgtctgtcatttctagttgggggaatggtgcttggacgcttttaggtttttctatgcaaatggctcttattttggtattggggcaggctctagctagcgcaaat

SEQ ID NO: 1400 - DNA (genomic), 837 bp, Helicobacter pylori; double-stranded, circular
  misc_feature (B) LOCATION 1...837
  hypothetical: NO
  anti-sense: NO
ttgaaaagctatccctatcagtcagcgatttttcttctatcattgatcattatagggatcattcttatagggttaccctttttaatggcaatgatccaccctaaaaaagaagaaatcgttgaaattgatcaagcttttaaaggcgaatacaaagaaacagaactcattagccaccaacaagataaaacgatcgcgcattttttggaaaacagcgctttgctttcttatcttttggtttttttgggttttgggtatcttggtatttatttttttaaagggggagggattagtttaaacattgtcaatacgattttcctttttttagggattttgctccataaaacccctttagcttatgtgaaagcgatcaatcattccgctaggagcgtggctgggattttactccaattccctttttacgctgggattatggggatgatggcaagccatagcgtgggggggcattctttagcgcaaatgctctctttagccttcacgcacatcgctaatgaaaaaactttcgcgctcatgacttttttgagcgcggggattgtcaatatttttattccatcaggcggagggcaatgggcgattcaagctcctatcatgctccctgctgggcaaagcttgggggtggatccgggcgtgatttctatggctatcgcttggggagacgcttggacgaacatgatacagccttttttggctttgcccgcattagccattacgggtttgggcgctaaggatattatgggctattgcgttttgactttaatttttgtaggcttagtggtgtgcggggctgttttattttttggtgtgagttcttcttatgcc

SEQ ID NO: 1401 - DNA (genomic), 1365 bp, Helicobacter pylori; double-stranded, circular
  misc_feature (B) LOCATION 1...1365
  hypothetical: NO
  anti-sense: NO
atgtttttattaaggcatttgacttcagcgtgcgtgtttttagcgtctaaatgtttgccggactcctttgtcttggtcgctcttttatcgtttgtcgtgttcgttcttgtttattgtttgacagggcaagacgcttcgtctgtcatttctagttgggggaatggtgcttggacgcttttaggtttttctatgcaaatggctcttattttggtattgggtcaggctctagctagcgctaaattagtccaaaaacttttaaaatacttggcgtctttgcctaaggggtattacaccgctttatggttggttacttttttatcgttaatcgctaattggatcaactggggttttggcttggtgattagcgcgatttttgcaaaagagatcgccaaaaatgttaagggggtggattataggttgctcattgctagcgcttattcgggttttgtgatctggcatgggggtttatcaggctctatccctttaagcgttgccacccaaaatgaaaatctatccaaaataagcgctggggtgattgaaaaagctatccctatcagtcagacgattttttcttcttataatttgatcattatagggatcattcttatagggttaccctttttaatggcaatgatccaccctaaaaaagaagaaatcgttgaaattgattcaaagcttttaaaagacgaatacaaagaaacagaactcattagccaccaacaagataaaacgatcgcgcattttttggaaaacagcgctttgctttcttatcttttggtttttttgggttttgggtatcttggtatttatttttttaaagggggagggattagtttaaacattgtcaatacgattttcctttttttagggattttgctccataaaacccctttagcttatgtgaaagcgatcaatcattccgctaggagcgtggctgggattttactccaattccctttttacgctgggattatggggatgatggcaagccatagcgtgggggggcattctttagcgcaaatgctctctttagccttcacgcacatcgctaatgaaaaaactttcgcgctcatgacttttttgagcgcggggattgtcaatatttttattccatcaggcggagggcaatgggcgattcaagctcctatcatgctccctgctgggcaaagcttgggggtggatccgggcgtgatttctatggctatcgcttggggagacgcttggacgaacatgatacagcctttttgggctttgcccgcattagccattgcgggtttgggcgctaaggatattatgggctattgcgttttgactttaatttttgtaggcttagtggtgtgcggggtgttttattttttggtgtga

SEQ ID NO: 1402 - DNA (genomic), 1371 bp, Helicobacter pylori; double-stranded, circular
  misc_feature (B) LOCATION 1...1371
  hypothetical: NO
  anti-sense: NO
gtgtttatgtttttattaaggcatttgacttcagcgtgcgtgtttttagcgtctaaatgtttgccggactcctttgtcttggtcgctcttttatcgtttgtcgtgttcgttcttgtttattgtttgacagggcaagacgcttcgtctgtcatttctagttgggggaatggtgcttggacgcttttaggtttttctatgcaaatggctcttattttggtattgggtcaggctctagctagcgctaaattagtccaaaaacttttaaaatacttggcgtctttgcctaaggggtattacaccgctttatggttggttacttttttatcgttaatcgctaattggatcaactggggttttggcttggtgattagcgcgatttttgcaaaagagatcgccaaaaatgttaagggggtggattataggttgctcattgctagcgcttattcgggttttgtgatctggcatgggggtttatcaggctctatccctttaagcgttgccacccaaaatgaaaatctatccaaaataagcgctggggtgattgaaaaagctatccctatcagtcagacgattttttcttcttataatttgatcattatagggatcattcttatagggttaccctttttaatggcaatgatccaccctaaaaaagaagaaatcgttgaaattgattcaaagcttttaaaagacgaatacaaagaaacagaactcattagccaccaacaagataaaacgatcgcgcattttttggaaaacagcgctttgctttcttatcttttggtttttttgggttttgggtatcttggtatttatttttttaaagggggagggattagtttaaacattgtcaatacgattttcctttttttagggattttgctccataaaacccctttagcttatgtgaaagcgatcaatcattccgctaggagcgtggctgggattttactccaattccctttttacgctgggattatggggatgatggcaagccatagcgtgggggggcattctttagcgcaaatgctctctttagccttcacgcacatcgctaatgaaaaaactttcgcgctcatgacttttttgagcgcggggattgtcaatatttttattccatcaggcggagggcaatgggcgattcaagctcctatcatgctccctgctgggcaaagcttgggggtggatccgggcgtgatttctatggctatcgcttggggagacgcttggacgaacatgatacagcctttttgggctttgcccgcattagccattgcgggtttgggcgctaaggatattatgggctattgcgttttgactttaatttttgtaggcttagtggtgtgcggggtgttttattttttggtgtga

SEQ ID NO: 1403 - DNA (genomic), 294 bp, Helicobacter pylori; double-stranded, circular
  misc_feature (B) LOCATION 1...294
  hypothetical: NO
  anti-sense: NO
gcccaaagcaacccagaagatgagagcttagctatttataatatctcacaagacgctttatcgcactggcaatcggatgtgagtaaggtttatccacagttggtcacttacgtgtattctggcacggcgatgctcaatcgggtcgtccaaagacgcggaatggaagtgggcctgatttgcaataagggttttgagccaatgcattctatgggcagagcgttgcaatcctacttggggtatgcgctagaagaaagattgcatatcaacacgcacaagtatgatgatccactggtt

SEQ ID NO: 1404 - DNA (genomic), 513 bp, Helicobacter pylori; double-stranded, circular
  misc_feature (B) LOCATION 1...513
  hypothetical: NO
  anti-sense: NO
aaaggattagaggtgttactaaaagaaaccgatgtcaaggggcaagtggttatcccagtgcgccaagaagaggtaaaaacggctgttaaagagcttttagaagcaggcgcaaaagccattgtgatttgcttgttgcaatctcataaaaacgctgaaagcgagcggatcgttagagacatagcgttaaaagaaattgaaaaattgggtaaaaatattcctgtgttcgcttctgtggattactaccctcaaagaaaagaaagccacagaatgaacaccactattttagaagcttatgcggctgagccaagcaggcaaacgctctctaaagtcagcaaccgcttcaaagagcatggcgctaaattcgatcttcgtgtgatgacaacgcatggaggcaccattagctggaaagctaaagagctcgctaggactattgtgagcggccctattggaggcgtgattggatctaaattgctaggcgaaacgctgggttatgacaatattgcatgcagcgat

SEQ ID NO: 1405 - DNA (genomic), 1674 bp, Helicobacter pylori; double-stranded, circular
  misc_feature (B) LOCATION 1...1674
  hypothetical: NO
  anti-sense: NO
atgaaagacgcaagagttcaggtgatgggtattgatgccggtggcaccatgacggacacattttttgtgaaagaaaatggcagtttcgtcgtcggtaaagcccaaagcaacccagaagatgagagcttagctatttataatagctcacaagacgctttatcgcactggcaatcggatgtgagtaaggtttatccagagttggtcacttacgtgtattctggcacggcgatgctcaatcgggtcgtccaaagacgcggaatggaagtgggcctgatttgcaataagggttttgagcaaatgcattctatgggcagagcgttgcaatcctacttggggtatgcgctagaagaaagattgcatatcaacacgcacaagtatgatgatccactgattcctttaaaaaggattagaggcgttacagaaagaaccgatgtcaaggggcaagtggttatcccagtgcgccaagaagaggtaaaaacggctgttaaagagcttttagaagcaggcgcaaaagccattgtgatttgcttgttgcaatctcataaaaacgctgaaagcgagcggatcgttagagacatagcgttaaaagaaattgaaaaattgggtaaaaatattcctgtgttcgcttctgtggattactaccctcaaagaaaagaaagccacagaatgaacaccactattttagaagcttatgcggctgagccaagcaggcaaacgctctctaaagtcagcaaccgcttcaaagagcatggcgctaaattcgatcttcgtgtgatggcaacgcatggaggcaccattagctggaaagctaaagagctcgctaggactattgtgagcggccctattggaggcgtgattggatctaaattgctaggcgaaacgctgggttatgacaatattgcatgcagcgatattggcggcacgagctttgatatggcgcttatcgttaagagcaatttcaatatcgcttctgaccctgatatggcgcgtcttgtcttatctctaccgcttgtggctatggattctgttggtgcgggtgctgggagttttgtgcgcattgatccgcacagccgatcggtcaaactagggcctgacagtgcggggtatagagttggcacttgttggaaagacagcggtttagacacggtttcagtaaccgattgccacattgttttaggctatttgaatccggataatttcttaggaggcctaatcaaattagatgtggatagggctaaaaaacacattaaagagcaaatcgctgatccgctaggcattagcgtagaagatgcggctgcgggtgtgattgaattgcttgatttggagcttaaagaatacttgcgatccaatattagcgctaaagggtatagcccatctgattttgcgtgcttttcgtatggtggcgcggggcctgctcacacttatggctatacagaaggcttagggtttaaggatgtggtagtgcctgcatgggcggctgggtttagtgctcttggttgcgcttgcgctgattttgaatacagatacgacaagagcgttgatatagctattccgcagtattcttcagacgagtccaaaatagaggcatgcaagatcattcaagacgcatgggatgaattgactctcaaagtgaccgaagagattaagatcaatggattctctgaaaagatgtga

SEQ ID NO: 1406 - DNA (genomic), 663 bp, Helicobacter pylori; double-stranded, circular
  misc_feature (B) LOCATION 1...663
  hypothetical: NO
  anti-sense: NO
atggaaggcgttttaaatttcctaaccaatatcaatgtgattttcacccttttgggctatttgattggggggattccttttggctatgcgttaatgaaaatcttttatggcatggatattactaaaatcggatcggggggtattggcgcgacgaatgtcttacgcgctttacaaagtaagggcgtgagtaacgccaagcaaatggccttattagtcttaatcttggatctattcaaaggcatgtttgcggtgtttttaagcaaattgtttgggttagattatagtttgcaatggatggtcgctatcgctagtattttagggcattgctattcgccttttttgaatttcaatggaggcaagggcgtttctacgatcatgggctctgtggtgttgctcatccctattgaaagcctgatcggcttgacggtgtggttttttgtgggtaaggtgcttaaaatctcttcactcgctagcattctaggggtaggcacagcgactgttcttatcttttttgtgccttatatgcatatcccagatagcgtcaatatccttaaagaagtcggcacgcaaacgccgatggtgcttatttttattttcacccttatcaagcatgcaggcaatattttcaatttattgaccggcaaagaaaagaaagtcttatga

SEQ ID NO: 1407 - DNA (genomic), 663 bp, Helicobacter pylori; double-stranded, circular
  misc_feature (B) LOCATION 1...663
  hypothetical: NO
  anti-sense: NO
ttttcaccccctttgggctatttgattggggggattccttttggctatgcgttaatgaaaatcttttatggcatggatattactaaaatcggatcggggggtattggcgcgacgaatgtcttacgcgctttacaaagtaagggcgtgagtaacgccaagcaaatggccttattagtcttaatcttggatctattcaaaggcatgtttgcggtgtttttaagcaaattgtttgggttagattatagtttgcaatggatggtcgctatcgctagtattttagggcattgctattcgccttttttgaatttcaatggaggcaagggcgtttctacgatcatgggctctgtggtgttgctcatccctattgaaagcctgatcggcttgacggtgtggttttttgtgggtaaggtgcttaaaatctcttcactcgctagcattctaggggtaggcacagcgactgttcttatcttttttgtgccttatatgcatatcccagatagcgtcaatatccttaaagagatcagcacgcaaaccccaatggtgcttatttttagtttcacccttatcaagcatgcggccataattcaatttatttaccggcaaaaaaagagattctatgagactaaacaagcccccatttccataattggttttgagacgatt

SEQ ID NO: 1408 - DNA (genomic), 438 bp, Helicobacter pylori; double-stranded, circular
  misc_feature (B) LOCATION 1...438
  hypothetical: NO
  anti-sense: NO
atggatgcgatttatccttatgtgttagttgttcatttgttgtgcgccattatttttattggctacttgttttttgatatggtaattttccccaatgtgaagaaaatgtttggcgaagagtttgccaataaagcgaatacaggaatcgctcaaagagcgatcaaaatcatgcctttgtgcgttttagggcttgttttaacagggggcatgatgcttagtcaatacatggggggcgataaaggctggtgtgaaaccccttttcaaaagatactcatgcttaaagtgatcttagcgttaagcatttttcttttggtgcttttttctttatcttgtaaatttttgggcaagaaaaaccctattggtaaatacactcatcacattgctctagcttttggctttttaatcgctattttggccaagacgatgtggtttgtttaa

SEQ ID NO: 1409 - DNA (genomic), 435 bp, Helicobacter pylori; double-stranded, circular
  misc_feature (B) LOCATION 1...435
  hypothetical: NO
  anti-sense: NO
atggatgcgatttatccttatgtgttagttgttcatttgttgtgcgccattatttttattggctacttgttttttgatatggtaattttccccaatgtgaagaaaatgtttggcgaagagtttgccaataaagcgaatacaggaatcgctcaaagagcgatcaaaatcatgcctttgtgcgttttagggcttgttttaacagggggcatgatgcttagtcaatacatggggggcgataaaggctggtgtgaaaccccttttcaaaagatactcatgcttaaagtgatcttagcgttaagcatttttcttttggtgcttttttctttatcttgtaaatttttgggcaagaaaaaccctattggtaaatacactcatcacattgctctagcttttggctttttaatcgctattttggccaagacgatgtggtttgtt

SEQ ID NO: 1410 - DNA (genomic), 738 bp, Helicobacter pylori; double-stranded, circular
  misc_feature (B) LOCATION 1...738
  hypothetical: NO
  anti-sense: NO
atgaatttttaccaaaagatatacacgcataaagtcgttttttcttcattgttttttttgttgtttttattcaacgtggaaactttgttgttttcgcatttcagcgatgatttttcccaattgttttttttgtttgaaaaccatgtttatgatttcattatcaaattagattacttggggctgataggcgtttcttcaatttatttgcttgcacttattctaaagcctttcaccctcacgcgccaaaaatgcgcttgcatagggatattatgcctttctttttacgcttggaattttcctattaaaaattcttcaatagcgctttatgttttctattttgcgctgttagggactttattgtggcgttttttaggggctagcatgaagcaatctttcttgccctctatgaacatttgcgtcgtgtgggtttttgcttcttctttacagagctttagatttttaagcgtgtctgattgcgtggatttttcgctttttatactcgctctttttttattgatactggttttaatctatcacaaacgcctttttgggctatatgaatacgctaacacgcttattttgatcgtggggctttgtgtggtcgtgctgtgttctagcatgttcattcaaactaaagaatactatggcatgcggttgggtttttattttttgggcttgttagggtggcttttagaatacatccataacactttaaggcgtttggagcataagatttaa

SEQ ID NO: 1411 - DNA (genomic), 735 bp, Helicobacter pylori; double-stranded, circular
  misc_feature (B) LOCATION 1...735
  hypothetical: NO
  anti-sense: NO
atgaatttttaccaaaagatatacacgcataaagtcgttttttcttcattgttttttttgttgtttttattcaacgtggaaactttgttgttttcgcatttcagcgatgatttttcccaattgttttttttgtttgaaaaccatgtttatgatttcattatcaaattagattacttggggctgataggcgtttcttcaatttatttgcttgcacttattctaaagcctttcaccctcacgcgccaaaaatgcgcttgcatagggatattatgcctttctttttacgcttggaattttcctattaaaaattcttcaatagcgctttatgttttctattttgcgctgttagggactttattgtggcgttttttaggggctagcatgaagcaatctttcttgccctctatgaacatttgcgtcgtgtgggtttttgcttcttctttacagagctttagatttttaagcgtgtctgattgcgtggatttttcgctttttatactcgctctttttttattgatactggttttaatctatcacaaacgcctttttgggctatatgaatacgctaacacgcttattttgatcgtggggctttgtgtggtcgtgctgtgttctagcatgttcattcaaactaaagaatactatggcatgcggttgggtttttattttttgggcttgttagggtggcttttagaatacatccataacactttaaggcgtttggagcataagatt

SEQ ID NO: 1412 - DNA (genomic), 228 bp, Helicobacter pylori; double-stranded, circular
  misc_feature (B) LOCATION 1...228
  hypothetical: NO
  anti-sense: NO
atgcgcaaaattaggattcagtatagaatctacgattttactcatcggcatagcccagccttaggcgatgcaggctcaccggctagcgatagcaccatggggcctacttgcgggcttaatgcagacaaccaacacaatcatatctatgacacatgcgtgccgacttttttagtctataacctccctttgattgtttttggggtggttggagcgttactattaggctaa

SEQ ID NO: 1413 - DNA (genomic), 252 bp, Helicobacter pylori; double-stranded, circular
  misc_feature (B) LOCATION 1...252
  hypothetical: NO
  anti-sense: NO
tatcatcgctgtgttttatgtccctttatgcgcaaaattaggattcagtatagaatctacgattttactcatcggcatagcccagccttaggcgatgcaggctcaccggctagcgatagcaccatggggcctacttgcgggcttaatgcagacaaccaacacaatcatatctatgacacatgcgtgccgacttttttagtctataacctccctttgattgtttttggggtggttggagcgttactattaggc

SEQ ID NO: 1414 - DNA (genomic), 249 bp, Helicobacter pylori; double-stranded, circular
  misc_feature (B) LOCATION 1...249
  hypothetical: NO
  anti-sense: NO
catcgctgtgttttatgtccctttatgcgcaaaattaggattcagtatagaatctacgattttactcatcggcatagcccagccttaggcgatgcaggctcaccggctagcgatagcaccatggggcctacttgcgggcttaatgcagacaaccaacacaatcatatctatgacacatgcgtgccgacttttttagtctataacctccctttgattgtttttggggtggttggagcgttactattaggc

SEQ ID NO: 1415 - DNA (genomic), 1314 bp, Helicobacter pylori; double-stranded, circular
  misc_feature (B) LOCATION 1...1314
  hypothetical: NO
  anti-sense: NO
atgctagaaaatagctctgtatggagcaatcctgcctttgtagccatcatttgcatgtgcgttcttagccttttaaggctcaatgtcatgctttctatgattagcgcgactctcatagcagggcttatgggagggcttgggatcacagagagttttaacatgatgatagacggcatgaaaggcaatttaaacatcgccttaagctacatccttttaggggctttagcggtagcgatcgctaaaagcaacctcattaaagtcgctctgaataaattaataggcttaatggattacaagcgatccactttttgctttttgatcgctttcatcgcatgtttttcgcagaatttagtgccggtgcatatcgcttttatccctattttaatcccccctcttttgcatttgatgaaccggctagaattggatagaagagcggtcgcttgcgctttaacctttggcttgcaagccccctacttggtgcttcctgtagggtttggcttgatttttcaaaccaccattttagagcaattaaaagccaatggcgttagcaccaccatagcgcaaatcacaggagtgatgtggatagcaggattagcgatggttgttgggctatttttagcggtattaacgctatacaaaaaacccagacactaccaagaaaaatcttttaatatagaagattacgcctcgcttcaattaaactaccatgactatttgacttttatagggattgtcgtggcgtttgtgatccaattagccaccgattcgatgcccttagccgcttttttagcgttagcgatcatcttactaggccgtggcattaagtttaaagaaacagactctttaatggacgatagcgtaaaaatgatggcgtttatcgcttttgtgatgttagtggctagcgggtttggggaagtgttgcaaaaagtgcatgcgatagatggcttagtgaatgcgatcacaagcataatccaagggaagcttttaggggcttttttgatgcttgttgtagggctttttatcactatggggatagggacttcttttggcactatccctatcatcgctgtgttttatgtccctttatgcgcaaaattaggattcagtatagaatctacgattttactcatcggcatagccgcagccttaggcgatgcaggctcaccggctagcgatagcaccatggggcctacttgcgggcttaatgcagacaaccaacacaatcatatctatgacacatgcgtgccgacttttttagtctataacctccctttgattgtttttggggtggttggagcgttactattaggctaa

SEQ ID NO: 1416 - DNA (genomic), 165 bp, Helicobacter pylori; double-stranded, circular
  misc_feature (B) LOCATION 1...165
  hypothetical: NO
  anti-sense: NO
tttgtttgggccgtcctgtttgcttcttattttttgattgagccttttttaaattggatgcaattacaagatccttcacgccaattgacgcatgattatttagaagtcttagttatcgcgctaccgagtattttctcaagaaatgttttagtttcagagctcgtt

SEQ ID NO: 1417 - DNA (genomic), 306 bp, Helicobacter pylori; double-stranded, circular
  misc_feature (B) LOCATION 1...306
  hypothetical: NO
  anti-sense: NO
gtggttttaacagggcaaaatttaggggcgaacaagccaaagatcgccacagaatacgcgcatttgattttaaaaatttctatgggtttaatgggggttttaggggttattttaatcttattcgctaaagaatttgcgagccttttttctcaagatggagaagttttggaagtggcacgctcttatttgatcgctgtgggtctctctcaagcccccttaattgggtattttgtgttagatggagtttttaggggggctggcatttctaaagtctcactatacattaacaccttaagcttatgcggg

SEQ ID NO: 1418 - DNA (genomic), 303 bp, Helicobacter pylori; double-stranded, circular
  misc_feature (B) LOCATION 1...303
  hypothetical: NO
  anti-sense: NO
gttttaacagggcaaaatttaggggcgaacaagccaaagatcgccacagaatacgcgcatttgattttaaaaatttctatgggtttaatgggggttttaggggttattttaatcttattcgctaaagaatttgcgagccttttttctcaagatggagaagttttggaagtggcacgctcttatttgatcgctgtgggtctctctcaagcccccttaattgggtattttgtgttagatggagtttttaggggggctggcatttctaaagtctcactatacattaacaccttaagcttatgcggg

SEQ ID NO: 1419 - DNA (genomic), 366 bp, Helicobacter pylori; double-stranded, circular
  misc_feature (B) LOCATION 1...366
  hypothetical: NO
  anti-sense: NO
cctccctttgattgtttttggggtggttggagcgttactattaggctaatctatcaagttaagaaaattttttctttagccttaccctctggggtcaatgcctttttagatgtgctagtggtcgcgctctcggttttttttgtgggtaagatttcgcaccatcacattgtggctttaggggtgggcttgcaatttttgatgcttttttatggcatcaatacgattttatacaccggcactaacgccattctttcaaggctcgtgggagctagggattttgctcaaatcaatcacgctttttctagtattttcataggggcgtttgtgatttgtttgggccgtcctgtttgcttcttattttttgat

SEQ ID NO: 1420 - DNA (genomic), 1254 bp, Helicobacter pylori; double-stranded, circular
  misc_feature (B) LOCATION 1...1254
  hypothetical: NO
  anti-sense: NO
gtgctagtggtcgcgctctcggttttttttgtgggtaagatttcgcaccatcacattgtggctttaggggtgggcttgcaatttttgatgcttttttatggcatcaatacgattttatacaccggcactaacgccattctttcaaggctcgtgggagctagggattttgctcaaatcaatcacgctttttctagtattttcataggggcgtttgtgatttgtttgggcgtgctgtttgcttcttattttttgattgagccttttttaaattggatgcaattacaagatccttcacgccaattgacgcaagattatttagaagtcttagttatcgcgctaccgagtatttttttaaaaaatgttttagtttcagcgctcgctagtttttcagacaccctaaccccctttattgtcaaaatcatcatggtcatcgcatgcattttcttgaatcaagctttgatttttggggattttggttttaaggaaatggggatcgtaggatctgctttagcgaatgtggtcgtctcttattgggaattactcgcgcttagtctttggatacaaatcaaaaaaatccctttaaaattcaaaataacctttcatttttcttttttaaaaaccatgtttaaagtgggttggccggccgggtttgagcgcttattgagcttattttctttaatactcttgtctaaatttgtagcgagctatggggataaggtgttagcgggcatgcaaataggcatcagggtggaaaccttttcgttcatgcccggatttgggtttatgatcgcagcgatggttttaacagggcaaaatttaggggcgaacaagccaaagatcgccacagaatacgcgcatttgattttaaaaatttctatgggtttaatgggggttttaggggttattttaatcttattcgctaaagaatttgcgagccttttttctcaagatggagaagttttggaagtggcgcgctcttatttgatcgctgtgggtctctctcaagcccccttaattgggtattttgtgttagatggagtttttaggggggctggcatttctaaagtctcactatacattaacaccttaagcttatgggggttaaggatcatgcctatttacttgcttttaatctatcattttaaggtggaatttatttttgtagtgatcgcattagaaacttttttgcgatcattcatctactataaggttttttctaaaggcatatggaaaaggtgcgggaaaaaggcttaa

SEQ ID NO: 1421 - DNA (genomic), 174 bp, Helicobacter pylori; double-stranded, circular
  misc_feature (B) LOCATION 1...174
  hypothetical: NO
  anti-sense: NO
agaggagaaatgatgaaagattttttagaagattacaaaaaaagcgttttagaaagaaaaagtgagggtatcccgccactccctttaaacgctaaacaagtggaagctgtcgttgagattttgatgaaagatcccacaaacgccgctttcgcaaagaattactcattcacagag

SEQ ID NO: 1422 - DNA (genomic), 273 bp, Helicobacter pylori; double-stranded, circular
  misc_feature (B) LOCATION 1...273
  hypothetical: NO
  anti-sense: NO
ccacacccgtttccctttaggcatcagtttccggcagggagcgggctagtcgcttttgcagcggttacaggcacgatgcccttgaacatgccagaatcggtgttagtgcgttttaaaggggaaatgaatcctgggatcaccttaagggatttagtgaatgcgatcccttattatgcgattaaaaaagggttactcacggtggagaaaaagggcaaaatcaatgtctttaacgggcgtattttagagattgaaggcttgcctgatattaaaatg

SEQ ID NO: 1423 - DNA (genomic), 444 bp, Helicobacter pylori; double-stranded, circular
  misc_feature (B) LOCATION 1...444
  hypothetical: NO
  anti-sense: NO
gattttgatgaaagatcccacaaacgccgctttcgcaaagaattactcattcacagagtaagccctggggttgatgagggggcgaaagtcaaagcggaatttttagcccaattgtctcaaaaaaaactagaatgtccgcacattagcgctttagaagcgaccactcttttaggcacgatgcttggggggtataatgtagagcctttgattgtgggcttagaaagtcaagacaaaaacatcgctaaagagagcgcgaaagctttaaaaaccacccttttagtctatggatcgtttgataaaatcgccgcaatgagtaaaactaacgctttggctaaagaagtgctagagtcttgggcgaacgccgaatggtttttgaataaagagcctttgaatgaatgcattgaagcgtgcgtgtttaagattgatgggcgaaaccaataccga

SEQ ID NO: 1424 - DNA (genomic), 804 bp, Helicobacter pylori; double-stranded, circular
  misc_feature (B) LOCATION 1...804
  hypothetical: NO
  anti-sense: NO
aatctaatttatcggagctcacaaaggagcgcagccgcttgcgtggtgcgtttgaataaagagccgatgattgaatacttgaaatccaatatcaagctcattgatgagatgattgcaagcggttatgaagacaaagagactttgaaaaaacgcagagatgcgatgcaagcttgggtggataagccggtattgttagagccagatagtaacgcccaatacgccgctgtcattgaaattgatgtggcagaaatcacggagcctattttggcatgccctaatgaccctgatgacgtcgctactttgagcgaagttttagcggatacgaccggcaaaagaccccacgctattgatgaagtgtttattggctcttgcatgacgaatattgggcatttcagagcctttggtgaaatcgttaaaaacgcccctcccagtcaagcacgcctttgggtagtgccacccagtaaaatggacgaacaagagcttattaatgagggctattatgcgatttttggggctgccggggcaaggactgaagtaccaggctgtagcttgtgcatgggcaatcaagcgagggttagggataatgcggtcgttttttctacttccacacggaattttgataatcgtatgggtagaggggctaaagtgtatttgggcagtgcggagcttggggcggcgtgcgctttactagggaggatccccactaaagaagaatacatgaatttagtgagtgaaaagctagagagccaaaaagacaagatctatcgctacatgaactttaacttaatggagaatttcaggctc

SEQ ID NO: 1425 - DNA (genomic), 801 bp, Helicobacter pylori; double-stranded, circular
  misc_feature (B) LOCATION 1...801
  hypothetical: NO
  anti-sense: NO
ctaatttatcggagctcacaaaggagcgcagccgcttgcgtggtgcgtttgaataaagagccgatgattgaatacttgaaatccaatatcaagctcattgatgagatgattgcaagcggttatgaagacaaagagactttgaaaaaacgcagagatgcgatgcaagcttgggtggataagccggtattgttagagccagatagtaacgcccaatacgccgctgtcattgaaattgatgtggcagaaatcacggagcctattttggcatgccctaatgaccctgatgacgtcgctactttgagcgaagttttagcggatacgaccggcaaaagaccccacgctattgatgaagtgtttattggctcttgcatgacgaatattgggcatttcagagcctttggtgaaatcgttaaaaacgcccctcccagtcaagcacgcctttgggtagtgccacccagtaaaatggacgaacaagagcttattaatgagggctattatgcgatttttggggctgccggggcaaggactgaagtaccaggctgtagcttgtgcatgggcaatcaagcgagggttagggataatgcggtcgttttttctacttccacacggaattttgataatcgtatgggtagaggggctaaagtgtatttgggcagtgcggagcttggggcggcgtgcgctttactagggaggatccccactaaagaagaatacatgaatttagtgagtgaaaagctagagagccaaaaagacaagatctatcgctacatgaactttaacttaatggagaatttcaggctc

SEQ ID NO: 1426 - DNA (genomic), 1017 bp, Helicobacter pylori; double-stranded, circular
  misc_feature (B) LOCATION 1...1017
  hypothetical: NO
  anti-sense: NO
atgaatgcattgaagcgtgcgtgtttaagattgatgggcgaaaccaataccgatgatttaagcccagcgagcgacgctttcacacggagcgatattcctttacacgccaaagccatgctaaaaaaccggattgaaaattacgaacaacgcattgaagccattaaaactaaaggcgttcctgtagcgtatgtgggcgatgtggttggcacaggaagctctagaaaaagcgcgactaactctatcatgtggcattttggtaaggacattccttttgtgcctaataaaaggagtggaggcattgtgattgggggggtgatcgctccgattttctttgcgacttgtgaagatagcggggcgttacccattgtggctgatgttaaggatttgaaagagggcgatatcattaaaatctacccttataaaggcgaaatcacgctgaacgataaggtggttagcacctttaagctagagcctgaaactttattagatgaagtcagggcttctgggcgtatccccttaatcattggtaggggtttgaccaataaagcgcgtaaatttttagggctaggcgaatcggaagcgttcaaaaaaccatccgctcctaaaagcgacgctaaaggctacactttagcccaaaaaattgtaggccatgcttgtggggtaaaagggatcttacctggtgcttattgtgagccaaaggttaccaccgtgggcagtcaagacaccacaggggcgatgaccagagatgaggttaaagaattagcgagtttgaaatttgatgcgccttttgtgttgcagagtttttgccataccgctgcttacccaaaacctagtgatgtgagtttgcatgcaaccttgcctggctttatcactcaaagagggggcgtggcgttgcatccgggcgatggcgtgatccatacatggcttaatcgcatgggattgcctgacactttaggcacagggggggatagccacacccgtttccctttaggcatcagtttccggcagggagcgggc

SEQ ID NO: 1427 - DNA (genomic), 1743 bp, Helicobacter pylori; double-stranded, circular
  misc_feature (B) LOCATION 1...1743
  hypothetical: NO
  anti-sense: NO
atgaaagattttttagaagattacaaaaaaagcgttttagaaagaaaaagtgagggtatcccgccactccctttaaacgctaaacaagtggaagctgtcgttgagattttgatgaaagatcccacaaacgccgctttcgctaaagaattactcattcacagagtaagccctggggttgatgagggggcgaaagtcaaagcggaatttttagcccaattgtctcaaaaaaaactagaatgtccgcacattagcgctttagaagcgaccactcttttaggcacgatgcttggggggtataatgtagagcctttgattgtgggcttagaaagtcaagacaaaaacatcgctaaagagagcgcgaaagctttaaaaaccacccttttagtctatggatcgtttgataaaatcgccgcaatgagtaaaactaacgctttggctaaagaagtgctagagtcttgggcgaacgccgaatggtttttgaataaagagcctttgaatgaatgcattgaagcgtgcgtgtttaagattgatggcgaaaccaataccgatgatttaagcccagcgagcgacgctttcacacggagcgatattcctttacacgccaaagccatgctaaaaaaccggattgaaaattacgaacaacgcattgaagccattaaaactaaaggcgttcctgtagcgtatgtgggcgatgtggttggcacaggaagctctagaaaaagcgcgactaactctatcatgtggcattttggtaaggacattccttttgtgcctaataaaaggagtggaggcattgtgattgggggggtgatcgctccgattttctttgcgacttgtgaagatagcggggcgttacccattgtggctgatgttaaggatttgaaagagggcgatatcattaaaatctacccttataaaggcgaaatcacgctgaacgataaggtggttagcacctttaagctagagcctgaaactttattagatgaagtcagggcttctgggcgtatccccttaatcattggtaggggtttgaccaataaagcgcgtaaatttttagggctaggcgaatcggaagcgttcaaaaaaccatccgctcctaaaagcgacgctaaaggctacactttagcccaaaaaattgtaggccatgcttgtggggtaaaagggatcttacctggtgcttattgtgagccaaaggttaccaccgtgggcagtcaagacaccacaggggcgatgaccagagatgaggttaaagaattagcgagtttgaaatttgatgcgccttttgtgttgcagagtttttgccataccgctgcttacccaaaacctagtgatgtgagtttgcatgcaaccttgcctggctttatcactcaaagagggggcgtggcgttgcatccgggcgatggcgtgatccatacatggcttaatcgcatgggattgcctgacactttaggcacagggggggatagccacacccgtttccctttaggcatcagtttcccggcagggagcgggctagtcgcttttgcagcggttacaggcacgatgcccttgaacatgccagaatcggtgttagtgcgttttaaaggggaaatgaatcctgggatcaccttaagggatttagtgaatgcgatcccttattatgcgattaaaaaagggttactcacggtggagaaaaagggcaaaatcaatgtctttaacgggcgtattttagagattgaaggcttgcctgatattaaaatgtag

SEQ ID NO: 1428 - DNA (genomic), 2562 bp, Helicobacter pylori; double-stranded, circular
  misc_feature (B) LOCATION 1...2562
  hypothetical: NO
  anti-sense: NO
atgatgaaagattttttagaagattacaaaaaaagcgttttagaaagaaaaagtgagggtatcccgccactccctttaaacgctaaacaagtggaagctgtcgttgagattttgatgaaagatcccacaaacgccgctttcgctaaagaattactcattcacagagtaagccctggggttgatgagggggcgaaagtcaaagcggaatttttagcccaattgtctcaaaaaaaactagaatgtccgcacattagcgctttagaagcgaccactcttttaggcacgatgcttggggggtataatgtagagcctttgattgtgggcttagaaagtcaagacaaaaacatcgctaaagagagcgcgaaagctttaaaaaccacccttttagtctatggatcgtttgataaaatcgccgcaatgagtaaaactaacgctttggctaaagaagtgctagagtcttgggcgaacgccgaatggtttttgaataaagagcctttgaatgaatgcattgaagcgtgcgtgtttaagattgatggcgaaaccaataccgatgatttaagcccagcgagcgacgctttcacacggagcgatattcctttacacgccaaagccatgctaaaaaaccggattgaaaattacgaacaacgcattgaagccattaaaactaaaggcgttcctgtagcgtatgtgggcgatgtggttggcacaggaagctctagaaaaagcgcgactaactctatcatgtggcattttggtaaggacattccttttgtgcctaataaaaggagtggaggcattgtgattgggggggtgatcgctccgattttctttgcgacttgtgaagatagcggggcgttacccattgtggctgatgttaaggatttgaaagagggcgatatcattaaaatctacccttataaaggcgaaatcacgctgaacgataaggtggttagcacctttaagctagagcctgaaactttattagatgaagtcagggcttctgggcgtatccccttaatcattggtaggggtttgaccaataaagcgcgtaaatttttagggctaggcgaatcggaagcgttcaaaaaaccatccgctcctaaaagcgacgctaaaggctacactttagcccaaaaaattgtaggccatgcttgtggggtaaaagggatcttacctggtgcttattgtgagccaaaggttaccaccgtgggcagtcaagacaccacaggggcgatgaccagagatgaggttaaagaattagcgagtttgaaatttgatgcgccttttgtgttgcagagtttttgccataccgctgcttacccaaaacctagtgatgtgagtttgcatgcaaccttgcctggctttatcactcaaagagggggcgtggcgttgcatccgggcgatggcgtgatccatacatggcttaatcgcatgggattgcctgacactttaggcacagggggggatagccacacccgtttccctttaggcatcagtttcccggcagggagcgggctagtcgcttttgcagcggttacaggcacgatgcccttgaacatgccagaatcggtgttagtgcgttttaaaggggaaatgaatcctgggatcaccttaagggatttagtgaatgcgatcccttattatgcgattaaaaaagggttactcacggtggagaaaaagggcaaaatcaatgtctttaacgggcgtattttagagattgaaggcttgcctgatattaaaatggagcaggcttttgaattaagcgatgcgagcgcagaaaggagcgcagccgcttgcgtggtgcgtttgaataaagagccgatgattgaatacttgaaatccaatatcaagctcattgatgagatgattgcaagcggttatgaagacaaagagactttgaaaaaacgcagagatgcgatgcaagcttgggtggataagccggtattgttagagccagatagtaacgcccaatacgccgctgtcattgaaattgatgtggcagaaatcacggagcctattttggcatgccctaatgaccctgatgacgtcgctactttgagcgaagttttagcggatacgaccggcaaaagaccccacgctattgatgaagtgtttattggctcttgcatgacgaatattgggcatttcagagcctttggtgaaatcgttaaaaacgcccctcccagtcaagcacgcctttgggtagtgccacccagtaaaatggacgaacaagagcttattaatgagggctattatgcgatttttggggctgccggggcaaggactgaagtaccaggctgtagcttgtgcatgggcaatcaagcgagggttagggataatgcggtcgttttttctacttccacacggaattttgataatcgtatgggtagaggggctaaagtgtatttgggcagtgcggagcttggggcggcgtgcgctttactagggaggatccccactaaagaagaatacatgaatttagtgagtgaaaagctagagagccaaaaagacaagatctatcgctacatgaactttaacttaatggagaatttcaggctctag

SEQ ID NO: 1429 - DNA (genomic), 2562 bp, Helicobacter pylori; double-stranded, circular; identical to SEQ ID NO: 1428
  misc_feature (B) LOCATION 1...2562
  hypothetical: NO
  anti-sense: NO

SEQ ID NO: 1430 - DNA (genomic), 498 bp, Helicobacter pylori; double-stranded, circular
  misc_feature (B) LOCATION 1...498
  hypothetical: NO
  anti-sense: NO
ttgatgaataaaccatttttaatcttactcatagccctaattgcctttagcggctgtaacatgagaaaatacttcaaacccgctaaacaccaaattaaaggcgaagcgtatttccctaaccatttgcaagaaagcatcgtttcgtctaatcgttatggagccattttgaaaaatggagcggttataggcgataaaggtttaacgcagctaagaattggtaagaatttcaattatgaaagcagttttttaaatgagagtcaagggtttttcatccttgcacaagattgtttgaacaagattgataaaaaaacaagcaaaagcagggcggctaagactgaagaaacggaattgaaattaaagggcgttgaagcggaagtccaagataaagtctgtcatcaagtggaattgattagcaataaccctaacgccagccaacaatctatcgttattcctttggagacttttgccttggcgcgagcgttaaagggaatcttttag

SEQ ID NO: 1431 - DNA (genomic), 525 bp, Helicobacter pylori; double-stranded, circular
  misc_feature (B) LOCATION 1...525
  hypothetical: NO
  anti-sense: NO
agaaagaaaccattcaaggaacgcattgatttgatgaataaaccatttttaatcttactcatagccctaattgcctttagcggctgtaacatgagaaaatacttcaaacccgctaaacaccaaattaaaggcgaagcgtatttccctaaccatttgcaagaaagcatcgtttcgtctaatcgttatggagccattttgaaaaatggagcggttataggcgataaaggtttaacgcagctaagaattggtaagaatttcaattatgaaagcagttttttaaatgagagtcaagggtttttcatccttgcacaagattgtttgaacaagattgataaaaaaacaagcaaaagcagggcggctaagactgaagaaacggaattgaaattaaagggcgttgaagcggaagtccaagataaagtctgtcatcaagtggaattgattagcaataaccctaacgccagccaacaatctatcgttattcctttggagacttttgccttggcgcgagcgttaaagggaatcttt

SEQ ID NO: 1432 - DNA (genomic), 1128 bp, Helicobacter pylori; double-stranded, circular
  misc_feature (B) LOCATION 1...1128
  hypothetical: NO
  anti-sense: NO
gtggtgttagcggacaattcagcgaatttatacgacatcacttctcaaaaattgctttttagtgagaaaggttccccaagcaccacgatcaattctttaatggcgatgcctatttttatggatacggtcgtggtgttccctatgctagatgggcgcttgttagtcgtggattatgtgcatggaaaccctacgcctattagaaacattgttatcagcagcgataagttttttaacaatatcacctaccttatcgtagatggcaataacatgatcgcttctacagggaaaaggatactctcagtggtgagcggtcaagagttcaattacgatggggatattgtggatttgctttatgataaggggactttatacgtgctcacgctagacgggcagattttgcaaatggataagagtttgagggaattaaacagcgtgaaactgccctttgcttcgctcaacacgattgtattgaataacaataaattgtattctttagaaaaacgtgggtatgtgatagaggtggatttaaatgattttgattcgtataatgtctataaaacaccaactataggcagttttaagtttttttcatccaatcgtttggataaaggggtgttttatgacaaaaatcgggtgtattatgaccgctattatttagattataatgattttaagccaaaactttacccccatgctgctgaattcaaaacatctcaaaaaggcgaaaaagggaacgctcctatttatttgcaagaaaggcataaagctaaagaaaacaaacagcctttagaagaaaacaaagttaagccaagaaatagcgggtttgaagaagaagaggttaaaaccagaaggcctgagcctactaaggatcagaataacgctatccaacaaggcgaaacaaaaaacaatgaaagtaaaaacactcctatttcaaaagagaacgccgctaaaaaagaagcgccaaaaccaagctctaaagaggaaaaacgccgcttgaaagaagaaaagaaaaaagccaaagccgaacaaagagcgagggaatttgaacaaagagcgagagagcatcaagaaagagatgaaaaagagcttgaagaaagaagaaaagctttagaaatgaataagaagtaa

SEQ ID NO: 1433 - DNA (genomic), 1200 bp, Helicobacter pylori; double-stranded, circular
  misc_feature (B) LOCATION 1...1200
  hypothetical: NO
  anti-sense: NO
cgccagccaacaatctatcgttattcctttggagacttttgccttggcgcgagcgttaaagggaatcttttagcggtggtgttagcggacaattcagcgaatttatacgacatcacttctcaaaaattgctttttagtgagaaaggttccccaagcaccacgatcaattctttaatggcgatgcctatttttatggatacggtcgtggtgttccctatgctagatgggcgcttgttagtcgtggattatgtgcatggaaaccctacgcctattagaaacattgttatcagcagcgataagttttttaacaatatcacctaccttatcgtagatggcaataacatgatcgcttctacagggaaaaggatactctcagtggtgagcggtcaagagttcaattacgatggggatattgtggatttgctttatgataaggggactttatacgtgctcacgctagacgggcagattttgcaaatggataagagtttgagggaattaaacagcgtgaaactgccctttgcttcgctcaacacgattgtattgaataacaataaattgtattctttagaaaaacgtgggtatgtgatagaggtggatttaaatgattttgattcgtataatgtctataaaccaccaactataggcagttttaagtttttttcatccaatcgtttggataaaggggtgttttatgacaaaaatcgggtgtattatgaccgctattatttagattataatgattttaagccaaaactttacccccatgctgctgaattcaaaacatctcaaaaaggcgaaaaagggaacgctcctatttatttgcaagaaaggcataaagctaaagaaaacaaacagcctttagaagaaaacaaagttaagccaagaaatagcgggtttgaagaagaagaggttaaaaccagaaggcctgagcctactaaggatcagaataacgctatccaacaaggcgaaacaaaaaacaatgaaagtaaaaacactcctatttcaaaagagaacgccgctaaaaaagaagcgccaaaaccaagctctaaagaggaaaaacgccgcttgaaagaagaaaagaaaaaagccaaagccgaacaaagagcgagggaatttgaacaaagagcgagagagcatcaagaaagagatgaaaaagagcttgaagaaagaagaaaagctttagaaatgaataagaag

SEQ ID NO: 1434 - DNA (genomic), 1629 bp, Helicobacter pylori; double-stranded, circular
  misc_feature (B) LOCATION 1...1629
  hypothetical: NO
  anti-sense: NO
ttgatgaataaaccatttttaatcttactcatagccctaattgcctttagcggctgtaacatgagaaaatacttcaaacccgctaaacaccaaattaaaggcgaagcgtatttccctaaccatttgcaagaaagcatcgtttcgtctaatcgttatggagccattttgaaaaatggagcggttataggcgataaaggtttaacgcagctaagaattggtaagaatttcaattatgaaagcagttttttaaatgagagtcaagggtttttcatccttgcacaagattgtttgaacaagattgataaaaaaacaagcaaaagcagggcggctaagactgaagaaacggaattgaaattaaagggcgttgaagcggaagtccaagataaagtctgtcatcaagtggaattgattagcaataaccctaacgccagccaacaatctatcgttattcctttggagacttttgccttgagcgcgagcgttaaagggaatcttttagcggtggtgttagcggacaattcagcgaatttatacgacatcacttctcaaaaattgctttttagtgagaaaggttccccaagcaccacgatcaattctttaatggcgatgcctatttttatggatacggtcgtggtgttccctatgctagatgggcgcttgttagtcgtggattatgtgcatggaaaccctacgcctattagaaacattgttatcagcagcgataagttttttaacaatatcacctaccttatcgtagatggcaataacatgatcgcttctacagggaaaaggatactctcagtggtgagcggtcaagagttcaattacgatggggatattgtggatttgctttatgataaggggactttatacgtgctcacgctagacgggcagattttgcaaatggataagagtttgagggaattaaacagcgtgaaactgccctttgcttcgctcaacacgattgtattgaataacaataaattgtattctttagaaaaacgtgggtatgtgatagaggtggatttaaatgattttgattcgtataatgtctataaaacaccaactataggcagttttaagtttttttcatccaatcgtttggataaaggggtgttttatgacaaaaatcgggtgtattatgaccgctattatttagattataatgattttaagccaaaactttacccccatgctgctgaattcaaaacatctcaaaaaggcgaaaaagggaacgctcctatttatttgcaagaaaggcataaagctaaagaaaacaaacagcctttagaagaaaacaaagttaagccaagaaatagcgggtttgaagaagaagaggttaaaaccagaaggcctgagcctactaaggatcagaataacgctatccaacaaggcgaaacaaaaaacaatgaaagtaaaaacactcctatttcaaaagagaacgccgctaaaaaagaagcgccaaaaccaagctctaaagaggaaaaacgccgcttgaaagaagaaaagaaaaaagccaaagccgaacaaagagcgagggaatttgaacaaagagcgagagaacatcaagaaagagatgaaaaagagcttgaagaaagaagaaaagctttagaaatgaataagaagtag

SEQ ID NO: 1435 - DNA (genomic), 1188 bp, Helicobacter pylori; double-stranded, circular
  misc_feature (B) LOCATION 1...1188
  hypothetical: NO
  anti-sense: NO
tgcttcgttcaaattttatggttaggtttttccatgtttaattatgaagagctgtttcaaacttataaaacccctttttatctctatgattttgacaagatcaaacaggcttttttgaattataaagaagcgtttaaggggcgtaaatctttgatttgctacgctttaaaggcgaattctaatttgagtatactctctttattggcaaatttagggagtggggcagattgcgtttccataggcgagatacaaagggctttaaaagccgggatcaagccttataaaatcgtgtttagcggggtgggtaagagcgcatttgaaatagagcaagccctaaaactcaacattttatttttgaatgtggaaagttttatggaattaaaaacgattgaaacaatcgctcaatctttagggataaaggctaggatttccattcgaatcaaccctaacattgacgctaaaacgcacccctatatttctaccggtttgaaagaaaataagttcggcgtggaagaaaaagaagctttagaaatgtttctttgggctaaaaaaagcgcgtttttagagcctgttagcgtgcattttcatatcggatcgcaactcttagatttagatccgattacagaagcgagccaaaaggtggctaaaatcgctaaatctttgatcgctttagggattgatttgcgcttttttgatgtgggcggaggcattggcgtgagttatgaaaatgaagaaacgattaagctttatgattacgcgcaagggattttaaattcgcttcaaggcttggatttgaccattatttgtgagccgggccgatcgatcgtggctgagagtggggaattgatcacgcaggttttgtatgaaaaaaaggctcaaaacaagcgctttgtaatcgtagatgcaggcatgaatgattttttacgccccagtttgtatcatgctaagcatgccataagggtcataacgccttgtggggggcgtgagatctcgccttgcgatgtggtagggcctgtgtgtgagagcagcgacacttttttaaaagacgccaatttgccagaattagagccaggcgataaattagccatagaaaaggttggggcttatggctctagcatggcccagtcaatacaattcgcgccccaaactcttagaattagccctagaagatcacaaaatcagagtgat

SEQ ID NO: 1436 - DNA (genomic), 1218 bp, Helicobacter pylori; double-stranded, circular
  misc_feature (B) LOCATION 1...1218
  hypothetical: NO
  anti-sense: NO
atgtttaattatgaagagctgtttcaaacttataaaacccctttttatctctatgattttgacaagatcaaacaggcttttttgaattataaagaagcgtttaaggggcgtaaatctttgatttgctacgctttaaaggcgaattctaatttgagtatactctctttattggcaaatttagggagtggggcagattgcgtttccataggcgagatacaaagggctttaaaagccgggatcaagccttataaaatcgtgtttagcggggtgggtaagagcgcatttgaaatagagcaagccctaaaactcaacattttatttttgaatgtggaaagttttatggaattaaaaacgattgaaacaatcgctcaatctttagggataaaggctaggatttccattcgaatcaaccctaacattgacgctaaaacgcacccctatatttctaccggtttgaaagaaaataagttcggcgtggaagaaaaagaagctttagaaatgtttctttgggctaaaaaaagcgcgtttttagagcctgttagcgtgcattttcatatcggatcgcaactcttagatttagatccgattacagaagcgagccaaaaggtggctaaaatcgctaaatctttgatcgctttagggattgatttgcgcttttttgatgtgggcggaggcattggcgtgagttatgaaaatgaagaaacgattaagctttatgattacgcgcaagggattttaaattcgcttcaaggcttggatttgaccattatttgtgagccgggccgatcgatcgtggctgagagtggggaattgatcacgcaggttttgtatgaaaaaaaggctcaaaacaagcgctttgtaatcgtagatgcaggcatgaatgattttttacgccccagtttgtatcatgctaagcatgccataagggtcataacgccttgtggggggcgtgagatctcgccttgcgatgtggtagggcctgtgtgtgagagcagcgacacttttttaaaagacgccaatttgccagaattagagccaggcgataaattagccatagaaaaggttggggcttatggctctagcatggccagtcaatacaattcgcgccccaaactcttagaattagccctagaagatcacaaaatcagagtgattagaaaaagagaggctttagaagatttgtggcgtttggaaatagaaggcttagaaggggtttga

SEQ ID NO: 1437 - DNA (genomic), 588 bp, Helicobacter pylori; double-stranded, circular
  misc_feature (B) LOCATION 1...588
  hypothetical: NO
  anti-sense: NO
aaatcaaagagtatgaaattaaggagagggaaaatcatgccgttttctaaatttttagaaaacctcaccgctccctttaaacgcatcaaaaaccgctcgcttgttttggcgttagggtttttgatccttactttttgcttgttgctttttttaatcttaagcgatgtttctaggctcatatccagtaaggattttctttatgtgatccagtctcaccctaaacaaactctaattgaagatgaaaattatttttatgctaacaagggtctttataaaaccaacaaagaagcctttttaagggtttataaaatcccagagagcatgcccatagaaaaacgagaaagtttaagcaaggtttctaaaatctttttagcgttgctttttttcatttctagcatgctttttgggatcttttggcgtttgcccaaacgattggacactaaaatgagtttagagagcgcgcacaaaaacgaattagaaaatgcattccaacgatacgatgcgctaggggtgcgttttgaagacattgcaggggtgaatgaagtcaaagaagaattactagaagtgatagattatttaaaaaaaccc

SEQ ID NO: 1438 - DNA (genomic), 915 bp, Helicobacter pylori; double-stranded, circular
  misc_feature (B) LOCATION 1...915
  hypothetical: NO
  anti-sense: NO
attttcatgcaggctaaaaaacatgcccctctattattttcattgatgaaatggacgctttgggtaaggctagggggaggccataggagcgatgaaagagaggccacgctcaaccagcttttaaccgaaatggacgggtttttacaaaacgatgaggtggtggtgataggagcgactaaccaaatggaagtgatggatgaagcgctattaaggagcaagcgttttgatcggcgcattttcatttctttaccggatttactagaaaggcagagcattttagaaaagctgttagaaaacaaaaaacacgcgctagattatcttaagatcgctaaaatttgcgtgggttttagcggggcgatgttggcgactttgatcaatgaaagcgctttaaacgccctcaaacaccaacgaaaagaaatcactcatggcgatattttggaagtgaaagacaagatcgcttacggtaagaaaaagccccaaaccttagatgaaaaccaaaaggaattagtcgctttgtatcaaagcgcgaaagccttaagcgcgtattggctagaaattgaatttgataaagcgtctttattgggggaatttatcgcttttaatgaaaataaaatccatagcgagagcgagataaaaaattacattaaagtgtatttgagcgggacgattattttagagttgctttataaggagcgttatagtctgtctaaacaagatttgcaaaaagcgaaatttttgaatgaatttatggctagcgagcttcttttagcccctacaaaagagtctttaagcgttctttatgaagagcaactggagtttttaaaaccgcaaattgcggcttgtaagcggttgagcgctctactattggagcaagaatgtttagagcatgcaaacttctatgatttgttgaacggg

SEQ ID NO: 1439 - DNA (genomic), 972 bp, Helicobacter pylori; double-stranded, circular
  misc_feature (B) LOCATION 1...972
  hypothetical: NO
  anti-sense: NO
atgccgttttctaaatttttagaaaacctcaccgctccctttaaacgcatcaaaaaccgctcgcttgttttggcgttagggtttttgatccttactttttgcttgttgctttttttaatcttaagcgatgtttctaggctcatatccagtaaggattttctttatgtgatccagtctcaccctaaacaaactctaattgaagatgaaaattatttttatgctaacaagggtctttataaaaccaacaaagaagcctttttaagggtttataaaatcccagagagcatgcccatagaaaaacgagaaagtttaagcaaggtttctaaaatctttttagcgttgctttttttcatttctagcatgctttttgggatcttttggcgtttgcccaaacgattggacactaaaatgagtttagagagcgcgcacaaaaacgaattagaaaatgcattccaacgatacgatgcgctaggggtgcgttttgaagacattgcaggggtgaatgaagtcaaagaagaattactagaagtgatagattatttaaaaaaccctaaaaaataccaggatttagggattttcctccctaaaggcgttttattattggggcctcctggagtgggtaaaaccatgatcgctaaagctttggcgagtgaagccagagtgccgtttttttatgaaagcgggagcgcgttttctcaaatttatgtaggggctggggctaaaaaagtgcatgaacttttcatgcacgctaaaaaacatgccccctctattattttcattgatgaaattgacgctttgggtaaggctaggggatggcatacgagcgatgaaagagaggccacgctcaaccagcttttaaccgaaatggacgggtttttgcaaaacgatgaggtggtggtgataggagcgactaaccaaatggaagtgatggatgaagcgctattaaggagcaagcgttttgatcggcgcatt

SEQ ID NO: 1440 - DNA (genomic), 1653 bp, Helicobacter pylori; double-stranded, circular
  misc_feature (B) LOCATION 1...1653
  hypothetical: NO
  anti-sense: NO
atgccgttttctaaatttttagaaaacctcaccgctccctttaaacgcatcaaaaaccgctcgcttgttttggcgttagggtttttgatccttactttttgcttgttgctttttttaatcttaagcgatgtttctaggctcatatccagtaaggattttctttatgtgatccagtctcaccctaaacaaactctaattgaagatgaaaattatttttatgctaacaagggtctttataaaaccaacaaagaagcctttttaagggtttataaaatcccagagagcatgcccatagaaaaacgagaaagtttaagcaaggtttctaaaatctttttagcgttgctttttttcatttctagcatgctttttgggatcttttggcgtttgcccaaacgattggacactaaaatgagtttagagagcgcgcacaaaaacgaattagaaaatgcattccaacgatacgatgcgctaggggtgcgttttgaagacattgcaggggtgaatgaagtcaaagaagaattactagaagtgatagattatttaaaaaaccctaaaaaataccaggatttagggattttcctccctaaaggcgttttattagtggggcctcctggagtgggtaaaaccatgatcgctaaagctttggcgagtgaagccagagtgccgtttttttatgaaagcgggagcgcgttttctcaaatttatgtaggggctggggctaaaaaagtgcatgaacttttcatgcacgctaaaaaacatgccccctctattattttcattgatgaaattgacgctttgggtaaggctaggggagggcataggagcgatgaaagagaggccacgctcaaccagcttttaaccgaaatggacgggtttttgcaaaacgatgaggtggtggtgataggagcgactaaccaaatggaagtgatggatgaagcgctattaaggagcaagcgttttgatcggcgcattttcatttctttaccggatttactagaaaggcagagcattttagaaaagctgttagaaaacaaaaaacacgcgctagattatcttaagatcgctaaaatttgcgtgggttttagcggggcgatgttggcgactttgatcaatgaaagcgctttaaacgccctcaaacaccaacgaaaagaaatcactcatggcgatattttggaagtgaaagacaagatcgcttacggtaagaaaaagccccaaaccttagatgaaaaccaaaaggaattagtcgctttgtatcaaagcgcgaaagccttaagcgcgtattggctagaaattgaatttgataaagcgtctttattgggggaatttatcgcttttaatgaaaataaaatccatagcgagagcgagataaaaaattacattaaagtgtatttgagcgggacgattattttagagttgctttataaggagcgttatagtctgtctaaacaagatttgcaaaaagcgaaatttttgaatgaatttatggctagcgagcttcttttagcccctacaaaagagtctttaagcgttctttatgaagagcaactggagtttttaaaaccgcaaattgcggcttgtaagcggttgagcgctctactattggagcaagaatgtttagagcatgcaaacttctatgatttgttgaacgggtga

SEQ ID NO: 1441 - DNA (genomic), 1011 bp, Helicobacter pylori; double-stranded, circular
  misc_feature (B) LOCATION 1...1011
  hypothetical: NO
  anti-sense: NO
ttgaaaatagcgattgtcaggctttcagcgctcggggatattatcgtgagtgcggtgtttttagcggctattaaagagcgtttcactgacgctcaaatagaatggttcgtggatgaaagatttagcgcgattttagagcattccccctatattgataaattacaccccatccctttaaaaagcgcgcttacaacctttaaccctttgaagattttcaaactttttaaaaatttaagggcttatgaatacgatataatcattgacatgcaaggcttgatcaaatccgccctcatcactcaaatgttgaaagcccctaaaaaagtcggctttgattacgcttcggctagagagggtttgagcgcgtttttttactcgcaaaaagtctctatcgcttatgatgagcctattttaaagcgcaattccacgctcctttctcaagccctaaacttgccagaaaaagaaatttcacagggtttaagctctagggctaaagcgttttcttaccagccttctccaaaaatcaatgcgttaaatttgaatgggaataaaccaaaaatcctttttgttttagaaacttctaaaatcaataaaacttaccccacagagcgttttaaagaattagcgttaatgttagaaaattttcaaatttgcttgttatggcatgctaatgaaaagaaagctattacgctttatcacgctttaaaataccagcgcgatgtgttattgctccctaaactcactttaaacgaggttaaggcgttgctttttaaaatggatgtgattattgggggcgatacgggtatcacgcatttagcatgggcgttgcaaaaacctagcatcaccctttatggcaacacgcctatggagcgttttaaattagaaagcccgatcaatgtttcgctcaccggtaattcaaacgccaactatcataaaaaggatttttctatccaaaacatagatcctaaaaaaatcaaagaatgcgttttaaacgttttaaaggaaaaagaatga

SEQ ID NO: 1442 - DNA (genomic), 1035 bp, Helicobacter pylori; double-stranded, circular
  misc_feature (B) LOCATION 1...1035
  hypothetical: NO
  anti-sense: NO
gcccattccttggacgatagagtttgcttgaaaatagcgattgtcaggctttcagcgctcggggatattatcgtgagtgcggtgttttttacgggccttaaaaagcgtttcactgacgctcaaatagaatggttcgtggatgaaagatttagcgcgattttagagcattccccctatattgataaattacaccccatccctttaaaaagcgcgcttacaacctttaaccctttgaagattttcaaactttttaaaaatttaagggcttatgaatacgatataatcattgacatgcaaggcttgatcaaatccgccctcatcactcaaatgttgaaagcccctaaaaaagtcggctttgattacgcttcggctagagagggtttgagcgcgtttttttactcgcaaaaagtctctatcgcttatgatgagcctattttaaagcgcaattccacgctcctttctcaagccctaaacttgccagaaaaagaaatttcacagggtttaagctctagggctaaagcgttttcttaccagccttctccaaaaatcaatgcgttaaatttgaatgggaataaaccaaaaatcctttttgttttagaaacttctaaaatcaataaaacttaccccacagagcgttttaaagaattagcgttaatgttagaaaattttcaaatttgcttgttatggcatgctaatgaaaagaaagctattacgctttatcacgctttaaaataccagcgcgatgtgttattgctccctaaactcactttaaacgaggttaaggcgttgctttttaaaatggatgtgattattgggggcgatacgggtatcacgcatttagcatgggcgttgcaaaaacctagcatcaccctttatggcaacacgcctatggagcgttttaaattagaaagcccgatcaatgtttcgctcaccggtaattcaaacgccaactatcataaaaaggatttttctatccaaaacatagatcctaaaaaaatcaaagaatgcgttttaaacgttttaaaggaaaaagaa

SEQ ID NO: 1443 - DNA (genomic), 435 bp, Helicobacter pylori; double-stranded, circular
  misc_feature (B) LOCATION 1...435
  hypothetical: NO
  anti-sense: NO
gaatgtcgttattgtgagcttgttagtgaatgcgaggcagacttgttacgcgctttctatgctggatcgattcaaaaacaccaaatggcgtttgccctatttagcgcatgcgccacggatgaaacctttgctctattgaatttatacgcccctaaaaagggggttaatgaaaccgatttcatgtttagcatttccttactcaaccactcttattggatttttggctcgttagtgggttcgttagtgggttcgcatttttcttttgacactcaaggcatggaatttgtgatgacagcgatttttatcgtgctgttcatggagcaatacaaacgaaacacaaaccacaaaaacgcatggcttgggatcgctattgcggtcgtttgtttggcgctctttgggactgaatactttttgctcatcactttggttttaatg

SEQ ID NO: 1444 - DNA (genomic), 432 bp, Helicobacter pylori; double-stranded, circular
  misc_feature (B) LOCATION 1...432
  hypothetical: NO
  anti-sense: NO
tgtcgttattgtgagcttgttagtgaatgcgaggcagacttgttacgcgctttctatgctggatcgattcaaaaacaccaaatggcgtttgccctatttagcgcatgcgccacggatgaaacctttgctctattgaatttatacgcccctaaaaagggggttaatgaaaccgatttcatgtttagcatttccttactcaaccactcttattggatttttggctcgttagtgggttcgttagtgggttcgcatttttcttttgacactcaaggcatggaatttgtgatgacagcgatttttatcgtgctgttcatggagcaatacaaacgaaacacaaaccacaaaaacgcatggcttgggatcgctattgcggtcgtttgtttggcgctctttgggactgaatactttttgctcatcactttggttttaatg

SEQ ID NO: 1445 - DNA (genomic), 690 bp, Helicobacter pylori; double-stranded, circular
  misc_feature (B) LOCATION 1...690
  hypothetical: NO
  anti-sense: NO
ttgatgcatgattttctaaaagcttttaaagacgctttccctcataccatttctatctttttagggtatttgcttatgggaatgacttttggaatgcttttagcccagcaagggtatgattataaagtcgctttgttcatgtcgttattcatttatgctggggcgattcaattcgtggcgatcacgcttttaagcgcgcaagcgagtttgatgaatgtcgttattgtgagcttgttagtgaatgcgaggcagacttgttacgcgctttctatgctggatcgattcaaaaacaccaaatggcgtttgccctatttagcgcatgcgctcacggatgaaacctttgctctattgaatttatacgcccctaaaaagggggttaatgaaaccgatttcatgtttagcatttccttactcaaccactcttattggatttttggctcgttagtgggttcgttagtgggttcgcatttttcttttgacactcaaggcatggaatttgtgatgacagcgatttttatcgtgctgttcatggagcaatacaaacgaaacacaaaccacaaaaacgcatggcttgggatcgctattgcggtcgtttgtttggcgctctttgggactgaatactttttgctcatcgctttggttttaatggtgcttgccctcattttgtttagaaagcagttagaatgttaa

SEQ ID NO: 1446 - DNA (genomic), 249 bp, Helicobacter pylori; double-stranded, circular
  misc_feature (B) LOCATION 1...249
  hypothetical: NO
  anti-sense: NO
attgcctttgattttcccctatatccaaagccatcatcaagaagttttaaggttaaaagtatgattttttttacccttattaatgcgatagcggtgattctaagctcgctcattccgatttatatgtgggtggtgatcatttattcgcttatcagtttcgtgcagcctaaccccaataaccctatcatgcaaatcctcgctcgctgggagccggagttttattttttacgctctagattcaagctgagt

SEQ ID NO: 1447 - DNA (genomic), 294 bp, Helicobacter pylori; double-stranded, circular
  misc_feature (B) LOCATION 1...294
  hypothetical: NO
  anti-sense: NO
atgattttttctacccttattaatgcgatagcggtgattttaagctcgctcattacgatttatatgtgggtggtgatcatttattcgcttatcagtttcgtgcagcctaaccccaataaccctatcatgcaaatcctcgctcgcttgtgtgagccggtgttttattttttacgctctagattcaagctggtgtttaacgggttggatttcgctcctttagtggtggtcattgtgctgaaatttttagatttaaccctcatccaatggctttttgcgctcgccaaaagcctctaa

SEQ ID NO: 1448 - DNA (genomic), 426 bp, Helicobacter pylori; double-stranded, circular
  misc_feature (B) LOCATION 1...426
  hypothetical: NO
  anti-sense: NO
agaaaaaaagcaagcgttagaaaaccctttaaaagggctgtatctctctttacgttaaaggcctttatcaccgatatttttatgatttatacccccatgctttatataatgacttatgcgattttagggagcgcgaaggattttagggaaaaccagagcgcgatttttttatgcctgcttttttacgccctaacgcacagcttttttatcgcttttaaatcccaaagccctggcatgcgttacgctcggtttaaattagtcaaaaataatggcgaaaaagtggacttttttttagcgttgtggcggtttgttttgtgggtgttgagcatggggttacttgtagggtttgttgcgccttttatttttaagttttttttgcatgacaaattcagcagcactcatattgaaatcatcaaggaggaaata

SEQ ID NO: 1449 - DNA (genomic), 459 bp, Helicobacter pylori; double-stranded, circular
  misc_feature (B) LOCATION 1...459
  hypothetical: NO
  anti-sense: NO
gtggcaactaaaaaaaccaaaaaaaataaagaaaaaaagcaagcgttagaaaaccctttaaaagggctgtatctctctttacgcttaaaggcctttatcaccgatatttttatgatttatacccccatgctttatataatgacttatgcgattttagggagcgcgaaggattttagggaaaaccagagcgcgatttttttatgcctgcttttttacgccctaacgcacagcttttttatcgcttttaaatcccaaagccctggcatgcgttacgctcggtttaaattagtcaaaaataatggcgaaaaagtggacttttttttagcgttgtggcggtttgttttgtgggtgttgagcatggggttacttgtagggtttgttgcgccttttatttttaagttttttttgcatgacaaattcagcagcactcatattgaaatcatcaaggaggaaatatga

SEQ ID NO: 1450 - DNA (genomic), 450 bp, Helicobacter pylori; double-stranded, circular
  misc_feature (B) LOCATION 1...450
  hypothetical: NO
  anti-sense: NO
ttgcttttgagcatgcgccaagagatagatttaaaaactttcgcccccttagcgttaatcggcttacccttgttcattaaaagcgttttaaatagccttagggtgcgtttgaaggaatttagggggcagtattatttgtgcgtttttagtctgtatcttttaatgctcactgaaacgctctttttatgggggagtaagatttctggcgctaatgaaaaattattaaaccggcatttcttagctaaagaagtcgctacagccttgcaattaaggggtatccatcaaatccgcactaacgataagcaactcgctttaaggctccaattctatggcattaaagaaggggggaggttaaggctcattaacactaagatttctaaaaaacgccctgatattacaatcatctacgctgacaaaattctacaatcctatagtttggtgcgccattaa

SEQ ID NO: 1451 - DNA (genomic), 495 bp, Helicobacter pylori; double-stranded, circular
  misc_feature (B) LOCATION 1...495
  hypothetical: NO
  anti-sense: NO
aaagccatcgttactagcctttatggcgcgagcggctggcttttccctttgcttttgagcatgcgccaagagatagatttaaaaactttcgcccccttagcgttaatcggcttacccttgttcattaaaagcgttttaaatagccttagggtgcgtttgaaggaatttagggggcagtattatttgtgcgtttttagtctgtatcttttaatgctcactgaaacgctctttttatgggggagtaagatttctggcgctaatgaaaaattattaaaccggcatttcttagctaaagaagtcgctacagccttgcaattaaggggtatccatcaaatccgcactaacgataagcaactcgctttaaggctccaattctatggcattaaagaaggggggaggttaaggctcattaacactaagatttctaaaaaacgccctgatattacaatcatctacgctgacaaaattctacaatcctatagtttggtgcgccat

SEQ ID NO: 1452 - DNA (genomic), 807 bp, Helicobacter pylori; double-stranded, circular
  misc_feature (B) LOCATION 1...807
  hypothetical: NO
  anti-sense: NO
atgcaactaagccccttacaaagcgcgctgttatatttccgttactttatttatccggaaaaaaaaacaaggagctttgatttaagcgatttaatttttattgtcatggtttttttagtcctagctttggggctgttgatgagcgaagaaatttctatcagctacaatgaagcgaaagactttttttatagcgatgcgtggtttgtcaaaatcgctcaaaaaagcgtagccattttaggccaaaacgatttggctttaagattgccttttttgatcgctcacgtcatcaacatgtttttattctacctcatagggcgaaagattttaaaaaagcctaaagacgctctttatgtggtattgacttacgctttattgcctggggtgaatctctttgcgattttactggctaaaagcgtgctggtgttaagccttgggcttttgattagctatttgtatattaaaacccaaaaaatcccttatttaacccttagcgcttgcgcgtttttagacggtgcgttcatcccgcttttactaggggtttttgcctacgctttaagaaaacgctattttaagagcgcgatctttgctttggtggttttaattgtgaataccgctctttttagtggggattttaataaaggcttgcctagcgggtattttatagacacttgcttagaactcatgcttttgtattcgcccttattgttcctctactacccttatacgctctataaagcccttttggataaaaagccatcgttactagcctttatggcgcgagcggctggcttttccctttgcttttga

SEQ ID NO: 1453 - DNA (genomic), 807 bp, Helicobacter pylori; double-stranded, circular
  misc_feature (B) LOCATION 1...807
  hypothetical: NO
  anti-sense: NO
gtcatgcaactaagccccttacaaagcgcgctgttatatttccgttactttatttatccggaaaaaaaaacaaggagctttgatttaagcgatttaatttttattgtcatggtttttttagtcctagctttggggctgttgatgagcgaagaaatttctatcagctacaatgaagcgaaagactttttttatagcgatgcgtggtttgtcaaaatcgctcaaaaaagcgtagccattttaggccaaaacgatttggctttaagattgccttttttgatcgctcacgtcatcaacatgtttttattctacctcatagggcgaaagattttaaaaaagcctaaagacgctctttatgtggtattgacttacgctttattgcctggggtgaatctctttgcgattttactggctaaaagcgtgctggtgttaagccttgggcttttgattagctatttgtatattaaaacccaaaaaatcccttatttaacccttagcgcttgcgcgtttttagacggtgcgttcatcccgcttttactaggggtttttgcctacgctttaagaaaacgctattttaagagcgcgatctttgctttggtggttttaattgtgaataccgctctttttagtggggattttaataaaggcttgcctagcgggtattttatagacacttgcttagaactcatgcttttgtattcgcccttattgttcctctactacccttatacgctctataaagcccttttggataaaaagccatcgttactagcctttatggcgcgagcggctggcttttccctttgcttt

SEQ ID NO: 1454 - DNA (genomic), 1248 bp, Helicobacter pylori; double-stranded, circular
  misc_feature (B) LOCATION 1...1248
  hypothetical: NO
  anti-sense: NO
atgcaactaagccccttacaaagcgcgctgttatatttccgttactttatttatccggaaaaaaaaacaaggagctttgatttaagcgatttaatttttattgtcatggtttttttagtcctagctttggggctgttgatgagcgaagaaatttctatcagctacaatgaagcgaaagactttttttatagcgatgcgtggtttgtcaaaatcgctcaaaaaagcgtagccattttaggccaaaacgatttggctttaagattgccttttttgatcgctcacgtcatcaacatgtttttattctacctcatagggcgaaagattttaaaaaagcctaaagacgctctttatgtggtattgacttacgctttattgcctggggtgaatctctttgcgattttactggctaaaagcgtgctggtgttaagccttgggcttttgattagctatttgtatattaaaacccaaaaaatcccttatttaacccttagcgcttgcgcgtttttagacggtgcgttcatcccgcttttactaggggtttttgcctacgctttaagaaaacgctattttaagagcgcgatctttgctttggtggttttaattgtgaataccgctctttttagtggggattttaataaaggcttgcctagcgggtattttatagacacttgcttagaactcatgcttttgtattcgcccttattgttcctctactacccttatacgctctataaagcccttttggataaaaagccatcgttactagcctttatgagcgcgagcggctggcttttccctttgcttttgagcatgcgccaagagatagatttaaaaactttcgcccccttagcgttaatcggcttacccttgttcattaaaagcgttttaaatagccttagggtgcgtttgaaggaatttagggggcagtattatttgtgcgtttttagtctgtatcttttaatgctcactgaaacgctctttttatgggggagtaagatttctggcgctaatgaaaaattattaaaccggcatttcttagctaaagaagtcgctacagccttgcaattaaggggtatccatcaaatccgcactaacgataagcaactcgctttaaggctccaattctatggcattaaagaaggggggaggttaaggctcattaacactaagatttctaaaaaacgccctgatattacaatcatctacgctgacaaaattctacaatcctatagtttggtgcgccattaa

SEQ ID NO: 1455 - DNA (genomic), 345 bp, Helicobacter pylori; double-stranded, circular
  misc_feature (B) LOCATION 1...345
  hypothetical: NO
  anti-sense: NO
gtggggctttttatcgttttgtttttaattataatgaagcaccaaacctccccctatgctttcacgcataatcaagcccttgtcactcaaacccccccctatttcacgcaactcactatccctaaaccaaatgacgctttaagcgcgcatgcgagctctttaatcagcttgcctaacgacaatcttttgagcgcttattttagcggcactaaagaaggggcaagggatgtgaaaatcagcgcgaatctttttgacagcaagactaatcgctggagcgaagccttcattcttttaaccaaagaagagctttctcatcattcgcatgaatacatcaaaaaaattagg

SEQ ID NO: 1456 - DNA (genomic), 1119 bp, Helicobacter pylori; double-stranded, circular
  misc_feature (B) LOCATION 1...1119
  hypothetical: NO
  anti-sense: NO
ttggaaccttcaagaaatcgcctaaaacatgccgccttttttgtggggctttttatcgttttgtttttaattataatgaagcaccaaacctccccctatgctttcacgcataatcaagcccttgtcactcaaacccccccctatttcacgcaactcactatccctaaaccaaatgacgctttaagcgcgcatgcgagctctttaatcagcttgcctaacgacaatcttttgagcgcttattttagcggcactaaagaaggggcaagggatgtgaaaatcagcgcgaatctttttgacagcaagactaatcgctggagcgaagccttcattcttttaaccaaagaagagctttctcatcattcgcatgaatacatcaaaaaattaggtaaccccttgctttttttgcatgataataaaattttgttgtttgtcgtaggggtgagcatgggcgggtgggccacttctaaaatctatcaatttgaaagcgctttagagccgattcattttaagtttgcgcgaaaactctctttaagcccttttttaaatttgagccatttagtaaggaataagcctttaaacaccactgatggcgggtttatgctaccactctatcacgaattagccacccaataccccttgttgttgaaatttgaccaacaaaataacccaagagagcttttaaggcctaataccttaaaccaccagctccaaccaagcttaaccccctttaaagactgcgctgtcatggcgtttagaaaccattcttttaaagatagcctcatgctagaaacctgtaaaacccccactgattggcaaaaacccatttctacaaatcttaaaaacttagatgattctttaaatttactcaatttaaatggaatattgtatttgatccacaaccctagcgatttatcactgcgtcgtaaagaactttggctttctaaattagaaaactccaactcgtttaaaaccttaaaagttttggataaagcgaatgaagtgagttacccaagctatagccttaatccgcattttatagatattgtctatacttacaaccgctctcatatcaaacacatccgtttcaatatggcttatttaaattcccttctcaagtga

SEQ ID NO: 1457 - DNA (genomic), 1152 bp, Helicobacter pylori; double-stranded, circular
  misc_feature (B) LOCATION 1...1152
  hypothetical: NO
  anti-sense: NO
aaaaatcgctatcttaagagggggcgaaacgctatcttggaaccttcaagaaatcgcctaaaacatgccgccttttttgtggggctttttatcgttttgtttttaattataatgaagcaccaaacctccccctatgctttcacgcataatcaagcccttgtcactcaaacccccccctatttcacgcaactcactatccctaaaccaaatgacgctttaagcgcgcatgcgagctctttaatcagcttgcctaacgacaatcttttgagcgcttattttagcggcactaaagaaggggcaagggatgtgaaaatcagcgcgaatctttttgacagcaagactaatcgctggagcgaagccttcattcttttaaccaaagaagagctttctcatcattcgcatgaatacatcaaaaaattaggtaaccccttgctttttttgcatgataataaaattttgttgtttgtcgtaggggtgagcatgggcgggtgggccacttctaaaatctatcaatttgaaagcgctttagagccgattcattttaagtttgcgcgaaaactctctttaagcccttttttaaatttgagccatttagtaaggaataagcctttaaacaccactgatggcgggtttatgctaccactctatcacgaattagccacccaataccccttgttgttgaaatttgaccaacaaaataacccaagagagcttttaaggcctaataccttaaaccaccagctccaaccaagcttaaccccctttaaagactgcgctgtcatggcgtttagaaaccattcttttaaagatagcctcatgctagaaacctgtaaaacccccactgattggcaaaaacccatttctacaaatcttaaaaacttagatgattctttaaatttactcaatttaaatggaatattgtatttgatccacaaccctagcgatttatcactgcgtcgtaaagaactttggctttctaaattagaaaactccaactcgtttaaaaccttaaaagttttggataaagcgaatgaagtgagttacccaagctatagccttaatccgcattttatagatattgtctatacttacaaccgctctcatatcaaacacatccgtttcaatatggcttatttaaattcccttctcaag

SEQ ID NO: 1458 - DNA (genomic), 165 bp, Helicobacter pylori; double-stranded, circular
  misc_feature (B) LOCATION 1...165
  hypothetical: NO
  anti-sense: NO
atggagtttttaggactgattttaagtctagccgctattttgatagcgtttaaaaagcctgaaaaagaaaattgggcgtttgggattttgattgtggtgtggttggtggagcttattatttttatagcccatagctctagcgttttgcctaacatgaatctataa

SEQ ID NO: 1459 - DNA (genomic), 204 bp, Helicobacter pylori; double-stranded, circular
  misc_feature (B) LOCATION 1...204
  hypothetical: NO
  anti-sense: NO
tttgtttttgagtataatcctacgaaaattttaaggaacggcatggagtttttaggactgattttaagtctagccgctattttgatagcgtttaaaaagcctgaaaaagaaaattgggcgtttgggattttgattgtggtgtggttggtggagcttattatttttatagcccatagctctagcgttttgcctaacatgaatcta

SEQ ID NO: 1460 - DNA (genomic), 765 bp, Helicobacter pylori; double-stranded, circular
  misc_feature (B) LOCATION 1...765
  hypothetical: NO
  anti-sense: NO
gtgatgcttgggtttcttagcgttaggggtgagtctatccctttagtggatgtgaaaaggtggttgcattataacgccaatgatccgagtcgtgatttaaaagaatgcagcgttaaagatgatcataatctggtgatcgtgtgccatttttctaaccattccatcgctctaaaggttttaaaaattgaaaggattattcataaaaattggactgagattagcgccggggacaaacaaggcattaatgaagagggtaagcttagcgctatcacccgttttgatgaacaacgagtggtgcagatcttagatgtggaaaaaatgataagcgatgttttccctagcttgaaggatttagacgatttgactttgcgttgcatagaagccattcaaagccaaaaactcattttaatcgctgaagattctttaagcgctcttaaaaccctagaaaagatcgttcaaactttagaattgcgttatttagcctttccaaatgggagggaattgttggattatttgtatgaaaaagaacattaccaacaggtcggcgtggtcattacggatttagaaatgcctgttatttcagggtttgaagtgctaaaaaccattaaagctgatagcagaactgagcatcttcctgtgattatcaattcgtccatgagcagcgattctaaccgccagttagcccaatctttagaagcggatggttttgtggtaaaatctaacattcttgaaatccatgaaatgcttaaaaaaacgctttcataa

SEQ ID NO: 1461 - DNA (genomic), 888 bp, Helicobacter pylori; double-stranded, circular
  misc_feature (B) LOCATION 1...888
  hypothetical: NO
  anti-sense: NO
gtggtaagagacattgacaaaacgacttcgttgcacttgaacaacgaagcacaatttctatgctttagattagatgcagaaaaagacgcccagctttatggcatgaatatttttaagatccgagaaattatccattatgacggggaggtcacagagattcttggagggagcgatggcgtgatgcttgggtttcttagcgttaggggtgagtctatccctttagtggatgtgaaaaggtggttgcattataacgccaatgatccgagtcgtgatttaaaagaatgcagcgttaaagatgatcataatctggtgatcgtgtgccatttttctaaccattccatcgctctaaaggttttaaaaattgaaaggattattcataaaaattggactgagattagcgccggggacaaacaaggcattaatgaagagggtaagcttagcgctatcacccgttttgatgaacaacgagtggtgcagatcttagatgtggaaaaaatgataagcgatgttttccctagcttgaaggatttagacgatttgactttgcgttgcatagaagccattcaaagccaaaaactcattttaatcgctgaagattctttaagcgctcttaaaaccctagaaaagatcgttcaaactttagaattgcgttatttagcctttccaaatgggagggaattgttggattatttgtatgaaaaagaacattaccaacaggtcggcgtggtcattacggatttagaaatgcctgttatttcagggtttgaagtgctaaaaaccattaaagctgatagcagaactgagcatcttcctgtgattatcaattcgtccatgagcagcgattctaaccgccagttagcccaatctttagaagcggatggtttgggg

SEQ ID NO: 1462 - DNA (genomic), 699 bp, Helicobacter pylori; double-stranded, circular
  misc_feature (B) LOCATION 1...699
  hypothetical: NO
  anti-sense: NO
gtgcaattttttgatttctctttagaaagtgttattaccaccttaatgaaaatcctagcccttttgatcgctatcatagggcatgagatcatgcatggcttgagcgcgtttttatttggggataggagcgctaaagacgccaagcgtttgagtttaaaccctatcaggcatttagacatgatgggttcggtgcttttaccggctctattactcatttttcaagccccctttttgtttgggtgggccaagcccgtgcctgtggatatgcgctacattgtctctcaaaaaggctctttggcatgcgtagtggtgagtttagccggggtgatttataatttcactttggccgttctgctcgctttcatcacgcattggagcttccaaagactagggatcaacgctttaagcatcaatgaattgaatctttatcagctcgcgttagtaacctttcttattcaaggcattctctataatcttgtcttgggcgttttcaatagcctccctatcccccccttagacggctccaaagcgttaggctttttagcgttgcattttaaaagcgcgtttttattggaatggttttctaaaatggaacgctacggcttgttgattgtattaatattcttatttatcccccctttatcggagttttttatccatgcacccacaagatttttattttccttactcctttcttaa

SEQ ID NO: 1463 - DNA (genomic), 726 bp, Helicobacter pylori; double-stranded, circular
  misc_feature (B) LOCATION 1...726
  hypothetical: NO
  anti-sense: NO
aaaagaaaaagcaacgcattaaggttttttgtgcaattttttgatttctctttagaaagtgttattaccaccttaatgaaaatcctagcccttttgatcgctatcatagggcatgagatcatgcatggcttgagcgcgtttttatttggggataggagcgctaaagacgccaagcgtttgagtttaaaccctatcaggcatttagacatgatgggttcggtgcttttaccggctctattactcatttttcaagccccctttttgtttgggtgggccaagcccgtgcctgtggatatgcgctacattgtctctcaaaaaggctctttggcatgcgtagtggtgagtttagccggggtgatttataatttcactttggccgttctgctcgctttcatcacgcattggagcttccaaagactagggatcaacgctttaagcatcaatgaattgaatctttatcagctcgcgttagtaacctttcttattcaaggcattctctataatcttgtcttgggcgttttcaatagcctccctatcccccccttagacggctccaaagcgttaggctttttagcgttgcattttaaaagcgcgtttttattggaatggttttctaaaatggaacgctacggcttgttgattgtattaatattcttatttatcccccctttatcggagttttttatccatgcacccacaagatttttattttccttactcctttct

SEQ ID NO: 1464 - DNA (genomic), 2037 bp, Helicobacter pylori; double-stranded, circular
  misc_feature (B) LOCATION 1...2037
  hypothetical: NO
  anti-sense: NO
atgaaacccttatctaatgcccttttttcgctctttttaaaaggtttttatttcacctttttcatgagcttgttgtttgtgttcaatcgtatcggctttatcctttatactggctattataagcatgctttaaaaaaccctgtttttgatgaaatcatcaaaaccctactcaatggggcaagatacgataatcgtgtggtctcaagcctagcgattctttttattctcatcggattattagggttattggcccctaaacaccaaaccagaatacttaatattatggcgtgtttttctatcgctattatcctgtttttaaacattgcgaacattgtttattatggcatttatgggaatgtgtttgatgaaaatttattggaatttttgcatgaagacacgctcacgattttaaaaatgagtggggaataccctattttttctagtttttcactctttttaatccttagcgttttaatctcttttatctatttcaaactccaaaacgccctttttaaacccaaaaatgtgtatcaaaccgcccgcaccaaaccccttaaaactttcattttatttgcgcttttttccctcacgcaaatgttttacattaacgcgcaattgagctttgtgggcgcgtctttagatctcagcatagagccagccaaagatccctttttaatgaaaatcacccccggggcgtttcgtaacctttatcttttagcgcgcaattacagacaaagccataaccttaaattcagcgattttgctaaagaaacgcctttagaagtagcgaaaaattatttccatcttaaagaaaacccccaaaacaacctctatgagttgctaactcagacaagccacaacaattctattcaaaccattcaacatgttttttatatcgtttcagagtctttgagttcatggcattttgataaaaaatttgattccatagggctaacgagcgctttacaagatttggttaaaaaagagcatgcctacatgctttctgcttttattgaaagcgccccacgaaccgttaaaagcctggatgtccaaatcacaggcttgccttatatcaatgataataatttagtcaattcaggagtgattctccctagctttcctatggcgattggcaatatcacaaaaactctgggttataaaaacaacttttattatggaggcagcgggatttggaataaactcactagtttcaccaaaaaacaaggttttcacgccatttattttaacaatcatctcttagaatttgccaaaaacaagccctaccctaagcccatagaaagcaactggggagtgcatgataatattttatttgactatattttagaaaacaccaacccccatgaaaaaactttcagcatggtcatgactttaagcaaccacgcgatcaaaaacgtgaatctcaaagcctttggcgtgcctttagaaaaaatccaacaatttgtggaaaaaacacccaaatcagaaaatctaccggacgctaattctttagggcatatttactggtatgacaaagtggtggttgatttcatcaaaaaagccagccaaaaattccctaactcgctttttatcatcacaggagatcattttgacaggagctatgaatacgctaaaaacgatttatataccattaaatccgtgccgcttattttatatgcccctactttaaagcctaaaaaaatcagtcaggtcggctcgcatttagacatcgcccctacgattattgaattagtcgcccctaaaggctttcaatttgtgagttttggaaagcctttattttctaacaacacaacaaaccccccaagccaccccaattacgcactaggctatgaagcgatcgctaccaaagattacttttataacccgagtttagggttaaggtatttgaatgaaagccctaaagagccagaggataaacaaaacgacaaaatagaagcttccaagttttaccagcaattagaatccttaaaggctctcagttattacttgctctatcatggggctaatcttaaagattga

SEQ ID NO: 1465 - DNA (genomic), 2055 bp, Helicobacter pylori; double-stranded, circular
  misc_feature (B) LOCATION 1...2055
  hypothetical: NO
  anti-sense: NO
aaaaaggttatagtaacgcttatgaaacccttatctaatgcccttttttcgctctttttaaaaggtttttatttcacctttttcatgagcttgttgtttgtgttcaatcgtatcggctttatcctttatactggctattataagcatgctttaaaaaaccctgtttttgatgaaatcatcaaaaccctactcaatggggcaagatacgataatcgtgtggtctcaagcctagcgattctttttattctcatcggattattagggttattggcccctaaacaccaaaccagaatacttaatattatggcgtgtttttctatcgctattatcctgtttttaaacattgcgaacattgtttattatggcatttatgggaatgtgtttgatgaaaatttattggaatttttgcatgaagacacgctcacgattttaaaaatgagtggggaataccctattttttctagtttttcactctttttaatccttagcgttttaatctcttttatctatttcaaactccaaaacgccctttttaaacccaaaaatgtgtatcaaaccgcccgcaccaaaccccttaaaactttcattttatttgcgcttttttccctcacgcaaatgttttacattaacgcgcaattgagctttgtgggcgcgtctttagatctcagcatagagccagccaaagatccctttttaatgaaaatcacccccggggcgtttcgtaacctttatcttttagcgcgcaattacagacaaagccataaccttaaattcagcgattttgctaaagaaacgcctttagaagtagcgaaaaattatttccatcttaaagaaaacccccaaaacaacctctatgagttgctaactcagacaagccacaacaattctattcaaaccattcaacatgttttttatatcgtttcagagtctttgagttcatggcattttgataaaaaatttgattccatagggctaacgagcgctttacaagatttggttaaaaaagagcatgcctacatgctttctgcttttattgaaagcgccccacgaaccgttaaaagcctggatgtccaaatcacaggcttgccttatatcaatgataataatttagtcaattcaggagtgattctccctagctttcctatggcgattggcaatatcacaaaaactctgggttataaaaacaacttttattatggaggcagcgggatttggaataaactcactagtttcaccaaaaaacaaggttttcacgccatttattttaacaatcatctcttagaatttgccaaaaacaagccctaccctaagcccatagaaagcaactggggagtgcatgataatattttatttgactatattttagaaaacaccaacccccatgaaaaaactttcagcatggtcatgactttaagcaaccacgcgatcaaaaacgtgaatctcaaagcctttggcgtgcctttagaaaaaatccaacaatttgtggaaaaaacacccaaatcagaaaatctaccggacgctaattctttagggcatatttactggtatgacaaagtggtggttgatttcatcaaaaaagccagccaaaaattccctaactcgctttttatcatcacaggagatcattttgacaggagctatgaatacgctaaaaacgatttatataccattaaatccgtgccgcttattttatatgcccctactttaaagcctaaaaaaatcagtcaggtcggctcgcatttagacatcgcccctacgattattgaattagtcgcccctaaaggctttcaatttgtgagttttggaaagcctttattttctaacaacacaacaaaccccccaagccaccccaattacgcactaggctatgaagcgatcgctaccaaagattacttttataacccgagtttagggttaaggtatttgaatgaaagccctaaagagccagaggataaacaaaacgacaaaatagaagcttccaagttttaccagcaattagaatccttaaaggctctcagttattacttgctctatcatggggctaatcttaaagat

SEQ ID NO: 1466 - DNA (genomic), 402 bp, Helicobacter pylori; double-stranded, circular
  misc_feature (B) LOCATION 1...402
  hypothetical: NO
  anti-sense: NO
gggggatacatgaataaagaaacccgattttataatcttttttctttggcggttttagggattttgatctttcctgtgggtttggcgaatttttattttggctatgttttgaaagattcgccttgtattttttgctgggcgcaacgcatcaacatgattttaataggggcggtggcgcttttggtggtgcgttttgggtttaaacctaaatacattgctttgctgttgcttatggctagtagcgggctgtatgagagcttttatcataccggaagccatgctttagaagatgtggggcagggcttcgcgctcgctattttaggcttgcacacgcagttttgggcgctttttgtcttttttagcgtggctggcgcttttagcggttttgctcttttttgcccc

SEQ ID NO: 1467 - DNA (genomic), 597 bp, Helicobacter pylori; double-stranded, circular
  misc_feature (B) LOCATION 1...597
  hypothetical: NO
  anti-sense: NO
gcttgcacacgcagttttgggcgctttttgtcttttttagcgtggctggcgcttttagcggttttgctcttttttgcccctaatgcccaaccttttaaagatcgtttgttaaacacgctccaaaaaagcgctttttatgttttctttatagtggtgggttctaacgccgtgcaagcgtttgtttctaccgggcctttcccttacatagggcaaagcgatccagtgcggttttcgtggaatttgaaagaatcggtctggtctatggagaattgggatcatttgaaattcccaagaagcgttttaggcagaagagatgtgggcgagcctttgaaattgagcgctttgcctaaagataatgattatgaacattcgcctctagaaatcgctaaaattttgaagattgggaaaaaagaagagcttcccttaaaattgaatggagcgatcacggatttgaatttcaatgaagacaaggcgatccttactacagaaaaccaagggctttatcttgtgggtaacgatttgaaaaccattcatagctacatggtgttggatagctattacagcgcgacggtgggggcttttcgtgggggcggattt

SEQ ID NO: 1468 - DNA (genomic), 636 bp, Helicobacter pylori; double-stranded, circular
  misc_feature (B) LOCATION 1...636
  hypothetical: NO
  anti-sense: NO
aaaccattcatagctacatggtgttggatagctattacagcgcgacggtgggggcttttcgtgggggcggattttaacgacgatgaacacattgtgatcatgggcaataataaaacaagtgtagaaatcactcctaacaaaaacgccaacgcgcttaaaaacttcccttattttttagaaggggctgactcttttgatgaagtggaacgcagccgcttaaaaacttctagggcgaaaaactactatattagcgctgcaagaagagggactaaattcacttatttaattaccgctcctaacaagcactataaggatttgatgattatctccatgctcaatagcgataaacaggtgcatggggagtttttactggaattaggcaatgccaaacttaaagaaaaaaggggattgggcgagttagtcattagcgctttggttttaaaggataataagctttatgcgttcagtaaggaatttaacacgcttttagtcatagaccccacaaaagaagagatccttgaagtttatggcttgccaaaagagattaaaaatatcagcgctggggggtttaaaaacgatgagcttgtccttgtgagctatgagaataataaaaatattctctacacccttaatttt

SEQ ID NO: 1469 - DNA (genomic), 1473 bp, Helicobacter pylori; double-stranded, circular
  misc_feature (B) LOCATION 1...1473
  hypothetical: NO
  anti-sense: NO
atgaataaagaaacccgattttataatcttttttctttggcggttttagggattttgatctttcctgtgggtttggcgaatttttattttggctatgttttgaaagattcgccttgtattttttgctgggcgcaacgcatcaacatgattttaataggggcggtggcgcttttggtggtgcgttttgggtttaaacctaaatacattgctttgctgttgcttatggctagtagcgggctgtatgagagcttttatcataccggaagccatgctttagaagatgtggggcagggcttcgcgctcgctattttaggcttgcacacgcagttttgggcgctttttgtcttttttagcgtggtggcgcttttagcggttttgctcttttttgcccctaatgcccaaccttttaaagatcgtttgttaaacacgctccaaaaaagcgctttttatgttttctttatagtggtgggttctaacgccgtgcaagcgtttgtttctaccgggcctttcccttacatagggcaaagcgatccagtgcggttttcgtggaatttgaaagaatcggtctggtctatggagaattgggatcatttgaaattcccaagaagcgttttaggcagaagagatgtgggcgagcctttgaaattgagcgctttgcctaaagataatgattatgaacattcgcctctagaaatcgctaaaattttgaagattgggaaaaaagaagagcttcccttaaaattgaatggagcgatcacggatttgaatttcaatgaagacaaggcgatccttactacagaaaaccaagggctttatcttgtgggtaacgatttgaaaaccattcatagctacatggtgttggatagctattacagcgcgacggtgggggctttcgtgggggcggattttaacgaagatgaaaacattgtgatcatgggcaataataaaacaagtgtagaaatcactcctaacaaaaacgccaacgcgcttaaaaacttcccttattttttagaaggggctgactcttttgatgaagtggaacgcagccgcttaaaaacttctagggcgaaaaactactatattagcgctgcaagaagagggactaaattcacttatttaattaccgctcctaacaagcactataaggatttgatgattatctccatgctcaatagcgataaacaggtgcatggggagtttttactggaattaggcaatgccaaacttaaagaaaaaaggggattgggcgagttagtcattagcgctttggttttaaaggataataagctttatgcgttcagtaaggaatttaacacgcttttagtcatagaccccacaaaagaagagatccttgaagtttatggcttgccaaaagagattaaaaatatcagcgctggggggtttaaaaacgatgagcttgtccttgtgagctatgagaataataaaaatattctctacacccttaatttttaa

SEQ ID NO: 1470 - DNA (genomic), 1122 bp, Helicobacter pylori; double-stranded, circular
  misc_feature (B) LOCATION 1...1122
  hypothetical: NO
  anti-sense: NO
atgttttctaaatccttagaagccttgcaccatgttaaacgctaccgcaagagagagttgtttgaccctttattaaaggattacgcttctaacgattatttgggtttgagcgttaaaaaagatttgcttcaaaacgcttttgataagctccaatcctttgattgccactcccccaaggcttccatgctagtcaatggctaccaccctttgcatgcagaattagaagaacgattagcggatttgttggagtttgaaagtgctcttttagtggggagtggttttttgggcaatctggctttaatagacacccttttagtcaaaaacgctctcttattcatggacgcacactaccatgcgagcgggatctttagcactaagattaagcctaatcaagtgatctttttctcgcacaatgatattaaagatttgaaacaaaaactctttaacgctcctaaaaataagctcaaattcatagccattgagggggtttattctatggatgcgagtatcgccccttatgatttttatgaaatcattcaagagactcctaacgcttttttaatcgtggatgaagcccatagttttgggactatcggcgagaatttattgggttttttagaatatcatcgcatcaaagaaaaagacaaaatcattaagctcagcactttttctaaagcccttgcgagctatggggcgtgtgttttagcccctttacaagtcatagagtttttaactaatcgcgctaaaagcgtgatttataccaccgctttaagcctgttagacaccgctttgactttggcccatttagaatactttatcgcgcaaaaacaagaattaaaaaatgagcttagcaaacaccaacagattatttttgaaactttaggcgttagaacgcctacaggattttttaccctagagtttgaaaacaatcccgctcttttaaacgcccaatattttttgaaagaaaaggggtttttagtgggggctatccgcccccctacggtttctaaaccccttttacgagtttctttgtccctcaaaaacagcttagaagacactaaagagcttgcgaacgcccttttagattattctaaaatacaatcttcttttaagagtggttaa

SEQ ID NO: 1471 - DNA (genomic), 1128 bp, Helicobacter pylori; double-stranded, circular
  misc_feature (B) LOCATION 1...1128
  hypothetical: NO
  anti-sense: NO
agtgttttgatgttttctaaatccttagaagccttgcaccatgttaaacgctaccgcaagagagagttgtttgaccctttattaaaggattacgcttctaacgattatttgggtttgagcgttaaaaaagatttgcttcaaaacgcttttgataagctccaatcctttgattgccactcccccaaggcttccatgctagtcaatggctaccaccctttgcatgcagaattagaagaacgattagcggatttgttggagtttgaaagtgctcttttagtggggagtggttttttgggcaatctggctttaatagacacccttttagtcaaaaacgctctcttattcatggacgcacactaccatgcgagcgggatctttagcactaagattaagcctaatcaagtgatctttttctcgcacaatgatattaaagatttgaaacaaaaactctttaacgctcctaaaaataagctcaaattcatagccattgagggggtttattctatggatgcgagtatcgccccttatgatttttatgaaatcattcaagagactcctaacgcttttttaatcgtggatgaagcccatagttttgggactatcggcgagaatttattgggttttttagaatatcatcgcatcaaagaaaaagacaaaatcattaagctcagcactttttctaaagcccttgcgagctatggggcgtgtgttttagcccctttacaagtcatagagtttttaactaatcgcgctaaaagcgtgatttataccaccgctttaagcctgttagacaccgctttgactttggcccatttagaatactttatcgcgcaaaaacaagaattaaaaaatgagcttagcaaacaccaacagattatttttgaaactttaggcgttagaacgcctacaggattttttaccctagagtttgaaaacaatcccgctcttttaaacgcccaatattttttgaaagaaaaggggtttttagtgggggctatccgcccccctacggtttctaaaccccttttacgagtttctttgtccctcaaaaacagcttagaagacactaaagagcttgcgaacgcccttttagattattctaaaatacaatcttcttttaagagtggt

SEQ ID NO: 1472 - DNA (genomic), 549 bp, Helicobacter pylori; double-stranded, circular
  misc_feature (B) LOCATION 1...549
  hypothetical: NO
  anti-sense: NO
tatttcagccgcttgcacggttttatttatttgttatcggtggctaaggcttatgttgagagcgggatgtatgaacatgtgctgcttgtgggcgcagaaaaaacgagtagcgtgttggattttcaggatagggtgacttgtattttattcggcgatggggctggtgcgtgcgtgataggcaggaccaagcgtttaaaagaaagcgttttagacgtgcagatttcagcgaatgggaatttttctaattatctttatacgccaaggactctaaaacccacgccctttaacgctaaagaagaagctttagagccttttttgcgcatgaaaggcaatgaagtgtttaaactagcggtaaaaacgcttttaaaagatgtggaaacgatcttagaaaaaaacgctctcaaacctgaagatgtgcgtttgttcatcccgcatcaagctaactttaggatcattcaagcggtgcgggagcatttggattttaaagatgagcaagtggttttaaccgtgcataaatacggcaacacttcagcagccagtatccctaca

SEQ ID NO: 1473 - DNA (genomic), 546 bp, Helicobacter pylori; double-stranded, circular
  misc_feature (B) LOCATION 1...546
  hypothetical: NO
  anti-sense: NO
tatttcagccgcttgcacggttttatttatttgttatcggtggctaaggcttatgttgagagcgggatgtatgaacatgtgctgcttgtgggcgcagaaaaaacgagtagcgtgttggattttcaggatagggtgacttgtattttattcggcgatggggctggtgcgtgcgtgataggcaggaccaagcgtttaaaagaaagcgttttagacgtgcagatttcagcgaatgggaatttttctaattatctttatacgccaaggactctaaaacccacgccctttaacgctaaagaagaagctttagagccttttttgcgcatgaaaggcaatgaagtgtttaaactagcggtaaaaacgcttttaaaagatgtggaaacgatcttagaaaaaaacgctctcaaacctgaagatgtgcgtttgttcatcccgcatcaagctaactttaggatcattcaagcggtgcgggagcatttggattttaaagatgagcaagtggttttaaccgtgcataaatacggcaacacttcagcagccagtatccct

SEQ ID NO: 1474 - DNA (genomic), 876 bp, Helicobacter pylori; double-stranded, circular
  misc_feature (B) LOCATION 1...876
  hypothetical: NO
  anti-sense: NO
atggaattttacgcctctcttaaatccattgcgatgcatgttccaagcgagcgtgtgaaaaatgcagagttccagcaatttttggataccagcgatgaatggatagaaaaaaggaccggtatcaaagagcgccgtttcgctaacgatgaagaaaaaagcagcgatttaggggtaatagcggctaagcaggccatagagagagcgcatttgactccacaagacattgatttagtggttgtggccactttaagccctgattttttagccatgccttcaaccgcttgcgtgctgagcgcgaaattaggcattgaaaacaagccggcgtttgatatttcagccgcttgcacgggttttatttatttgttatcggtggctaaggcttatgttgagagcgggatgtatgaaaatgtgctgattgtgggggcagaaaaaacgagtagcgtgttggattttaaggatagggggacttgtattttatttggcgatggggctggggcgtgcgtgataggcaggaccaagcgtttaaaagaaagcgttttagacgtgcagatttcagcgaatgggaatttttctaattatctttatacgccaaggactctaaaacccacgccctttaacgctaaagaagaagctttagagccttttttgcgcatgaaaggcaatgaagtgtttaaactagcggtaaaaacgcttttaaaagatgtggaaacgatcttagaaaaaaacgctctcaaacctgaagatgtgcgtttgttcatcccgcatcaagctaactttaggatcattcaagcggtgcgggagcatttggattttaaagatgagcaagtggttttaaccgtgcataaatacggcaacacttcagcagccagtatccct

SEQ ID NO: 1475 - DNA (genomic), 159 bp, Helicobacter pylori; double-stranded, circular
  misc_feature (B) LOCATION 1...159
  hypothetical: NO
  anti-sense: NO
acgctccttttgaatttaaacaccattttagccaagcatttaaacgctcctgtggtggctgttgcgcaaacgagtttggatcacttgaaagccatgcactctcatatcctcaaaaaagaagcccctttcgctatagggttatttgtgggcgaaacgcct

SEQ ID NO: 1476 - DNA (genomic), 174 bp, Helicobacter pylori; double-stranded, circular
  misc_feature (B) LOCATION 1...174
  hypothetical: NO
  anti-sense: NO
ggttatttgtgggcgaaacgccttgaaaaaccacattttttaagcgcgtctctttgcaagcaacaatgcgaattagaagcgagcgcgattgaaaatttgttgcaaacaaaaagcgagattattacccctttagcctttcaaaggagcttggaaaaaaaggctaaaaagccagat

SEQ ID NO: 1477 - DNA (genomic), 384 bp, Helicobacter pylori; double-stranded, circular
  misc_feature (B) LOCATION 1...384
  hypothetical: NO
  anti-sense: NO
caagtgttcgtttttggggattgcgccattattcctaaccctagccctaaagaattagccgagatcgctaccacttccgcgcaaaccgccaagcaattcaatatcgcgcctaaagtggccctgctttcttatgcgacaggaaattccgctcaaggcgaaatgatagacaaaatcaacgaagccctaacaatcgtgcaaaaattagatccgcaattagaaattgatggccctttacaatttgacgcttccatagataaaggcgtagcgaagaaaaaaatgcctaacagccaagtggccgggcaagctagcgtttttatcttcccggatttaaacgccgggaacatcgcttataaagcggtgcaacggagcgctaagccgtgcgga

SEQ ID NO: 1478 - DNA (genomic), 381 bp, Helicobacter pylori; double-stranded, circular
  misc_feature (B) LOCATION 1...381
  hypothetical: NO
  anti-sense: NO
gtgttcgtttttggggattgcgccattattcctaaccctagccctaaagaattagccgagatcgctaccacttccgcgcaaaccgccaagcaattcaatatcgcgcctaaagtggccctgctttcttatgcgacaggaaattccgctcaaggcgaaatgatagacaaaatcaacgaagccctaacaatcgtgcaaaaattagatccgcaattagaaattgatggccctttacaatttgacgcttccatagataaaggcgtagcgaagaaaaaaatgcctaacagccaagtggccgggcaagctagcgtttttatcttcccggatttaaacgccgggaacatcgcttataaagcggtgcaacggagcgctaagccgtgcgga

SEQ ID NO: 1479 - DNA (genomic), 1560 bp, Helicobacter pylori; double-stranded, circular
  misc_feature (B) LOCATION 1...1560
  hypothetical: NO
  anti-sense: NO
atgcaaagtttatggatttatccagaggatactgaagttttaggggctgcttgtaagagccttttaaaagcgttgaagcctcgttatcaaaaaatcgccctgttttcgcccattagtggggggtgtgagggctttggggagtgtgagagcctaagctctttagaggttcatagtgccatagacaaacaaaaggctttagagcttgtgagcaccgctcaagaagagttactatttgaaacgattctcaaacgctatgatgaattacaatccacgcatgattttgtcattaatttagggtatgcgccgaagtttttcttaaacgctcttttagatttaaacaccattttagccaagcatttaaacgctcctgtggtggctgttgcgcaaacgagtttggatcacttgaaagccatgcactctcatatcctcaaaaaagaagcccctttcgctatagggttatttgtgggcgaaacgcttgaaaaaccacattttttaagcgcgtctctttgcaagcaacaatgcgaattagaagcgagcgcgattgaaaatttgttgcaaacaaaaagcgagattattacccctttagcctttcaaaggagcttggaaaaaaaggctaaaaagcagattaaaaaagtcgttttacctgagagcgaagatgaaaggattttaaaagccgcacatcgtttgaatttaatgggcgcggtgggattgattttattgggcgataaagaagccattaactcccaagcgaaaaatttgaacttgaatttggaaaatgtagaaatcattaatcccaacacctcgcattatagagaagaattcgctaaaagcttgtatgaattgcgaaaatcaaagggcttgagtgagcaagaagctgagcgattagcgttggataaaacttattttgcgaccatgctcgtgcatttaggctatgcgcatgccatggtttctggggtcaatcacaccacggctgagaccattagacccgctttacaaatcattaaaactaagcccggcgtgagcctggtttcaagcgtgtttttaatgtgtttggacactcaagtgttcgtttttggggattgcgccattattcctaaccctagccctaaagaattagccgagatcgctaccacttccgcgcaaaccgccaagcaattcaatatcgcgcctaaagtggccctgctttcttatgcgacaggaaattccgctcaaggcgaaatgatagacaaaatcaacgaagccctaacaatcgtgcaaaaattagatccgcaattagaaattgatggccctttacaatttgacgcttccatagataaaggcgtagcgaagaaaaaaatgcctaacagccaagtggccgggcaagctagcgtttttatcttcccggatttaaacgccgggaacatcgcttataaagcggtgcaacggagcgctaaagccgtggcgatagggcctatcttacaaggcttgaacaagcccattaacgatttgagtaggggcgctttagtggaagatattgttaacaccgttttgattagcgccattcaagcgcaagattattga

SEQ ID NO: 1480 - DNA (genomic), 411 bp, Helicobacter pylori; double-stranded, circular
  misc_feature (B) LOCATION 1...411
  hypothetical: NO
  anti-sense: NO
atgtggagttttattcaaaaaatttttaaggctttagtgattgcgcctttagattttatcacgaagtatttcaaatcgtttgtgctgttattgattgtactagtcttttttagcgctaaagaaagcgcgccaagcgaaccgcccaatctcgctaaactctatttaaatggggcgatttttagcaccgaggattttgacaaagaagtggataaaatcctaaaaacccctagcattaagggcgttttacttttgattgattctcctggtggggctgtgtcagcgagcgtggaattgagcgaaaaaatcgctgatttgaagcaaaaaatgcccgttttagcgtatgctaaggggggttatggcgagcgggagctattatgcgggcatgcaagcgagcgaagtttatgcctctaa

SEQ ID NO: 1481 - DNA (genomic), 453 bp, Helicobacter pylori; double-stranded, circular
  misc_feature (B) LOCATION 1...453
  hypothetical: NO
  anti-sense: NO
tccttaaaacatttaaagtataatacactcttatggtcaaatattaagtttaggaaaagctgcatgtggagttttattcaaaaaatttttaaggctttagtgattgcgcctttagattttatcacgaagtatttcaaatcgtttgtgctgttattgattgtactagtcttttttagcgctaaagaaagcgcgccaagcgaaccgcccaatctcgctaaactctatttaaatggggcgatttttagcaccgaggattttgacaaagaagtggataaaatcctaaaaacccctagcattaagggcgttttacttttgattgattctcctggtggggctgtgtcagcgagcgtggaattgagcgaaaaaatcgctgatttgaagcaaaaaatgcccgttttagcgtatgctaaggggggttatggcgagcgggagctattatgctggcatgctagc

SEQ ID NO: 1482 - DNA (genomic), 774 bp, Helicobacter pylori; double-stranded, circular
  misc_feature (B) LOCATION 1...774
  hypothetical: NO
  anti-sense: NO
agcgagcgcgctttagaaagcgttaagcaattccaagaacctaacgatttggaagcgattgtcaagctcattttaaaaagccaagaaaaggggggtaagcttgtgatagtgggcgtgggtaagagcgctttagtggcgcaaaaaatcgttgcttccatgctaagcaccggtaacaggagcgcgtttttacaccccacagaagccatgcatggggatttgggcatggtggaaaaaaacgatgtgattttaatgattagctatgggggcgagtctttggaactattgaatctggtgagccatttaaaacgcttaagccataaaatcatcactttcactaaaagccccactagctcgctctctaaactcggcgattattatttaagcttgaaaatcaaaaaagaagcctgcccgatcaacaccgctccaacgacttccaccaccctaaccttagcgttaggcgatgttttaatggcatgcttgatgcgagcgaaaaattttagccaagaagattttgcctcctttcatccgggcgggcttttaggcaaaaaactttttgtcaaggttaaagacttattacaaaccacgaacctccccctaatcgcccctagcacaagttttaaagacgcgctcatagaaatgagtgaaaaacgcctaggcagcgcgattttagtcaatgataacaacgagcttgtgggggtgttgagcgatggcgatgtccgtagggcgctattaaaagggcttagcttggagagcgaggtgaagcatttgccactt

SEQ ID NO: 1483 - DNA (genomic), 990 bp, Helicobacter pylori; double-stranded, circular
  misc_feature (B) LOCATION 1...990
  hypothetical: NO
  anti-sense: NO
atgcccattctttttgattgtaacgctaccgctatacaagtcttaagagatgaagcgagcgcgcttttagaaagcgttaagcaattccaagaacctaacgatttggaagcgattgtcaagctcattttaaaaagccaagaaaaggggggtaagcttgtgatagtgggcgtgggtaagagcgctttagtggcgcaaaaaatcgttgcttccatgctaagcaccggtaacaggagcgcgtttttacaccccacagaagccatgcatggggatttgggcatggtggaaaaaaacgatgtgattttaatgattagctatgggggcgagtctttggaactattgaatctggtgagccatttaaaacgcttaagccataaaatcatcactttcactaaaagccccactagctcgctctctaaactcggcgattattatttaagcttgaaaatcaaaaaagaagcctgcccgatcaacaccgctccaacgacttccaccaccctaaccttagcgttaggcgatgttttaatggcatgcttgatgcgagcgaaaaattttagccaagaagattttgcctcctttcatccgggcgggcttttaggcaaaaaactttttgtcaaggttaaagacttattacaaaccacgaacctccccctaatcgcccctagcacaagttttaaagacgcgctcatagaaatgagtgaaaaacgcctaggcagcgcgattttagtcaatgataacaacgagcttgtgggggtgttgagcgatggcgatgtccgtagggcgctattaaaagggcttagcttggagagcgaggtgaagcattttgccactttaaagcctaaaagctttaagaatttagacgcccttcttttagaagcgttagaatttttagagcgccataagatccagcttttggtgtgcgtagatgatcgcaataaggttttaggagtcttgcacttgcaccaacttttagaattagggcttaaagcatga

SEQ ID NO: 1484 - DNA (genomic), 606 bp, Helicobacter pylori; double-stranded, circular
  misc_feature (B) LOCATION 1...606
  hypothetical: NO
  anti-sense: NO
ggcaagaaatttgctagcatgcttaaagcttctaaagggtttgcgaatgcgctcaatcatgaatccaaagatttaaaaacttgcgtggataacttgactaaaaccgcccacaagcaagaaagaagcctgaaaaacaccacccaatccttagaagaaatcactaatattattacgatgattgattctaaaagccaagagatgatctctcaaggcgaagacataatgagcgtggtggatatgaatagagacatcgctgatcaaacgaatctattagccctaaacgccgctattgaagccgcacgagccggcgagcatggcagaggctttgcggtggtggctgatgaagtgagaaagctcgctgaaaggacgcaaaaatccctcagcgaaattgaagccaatatcaatattttagttcaaagcattgccgataacgctgagtctatcaaaatgcaaaataagggcgtagaaaatatccacaactccattaacgctttgcaacaagatgtgcaggataatttgactatcgctaaccattctttacaagtcagcacaaaaattgatgggatttcccaagacattttagaagatgtgagcaagaagaaattt

SEQ ID NO: 1485 - DNA (genomic), 648 bp, Helicobacter pylori; double-stranded, circular
  misc_feature (B) LOCATION 1...648
  hypothetical: NO
  anti-sense: NO
ccatacagccctttgatttttttgaagaaaaagggaataacggccaatcattggcgttgggcaattgggaaatatgtcaataaatctttagtctttaaagaagcgacaaacaccaaattcattattatcaccactttgattttaggcgtgttggtgttagcctttttagtctttatcatcatttctaatctcataaccaaacgcatcagtagggtcaataacaccctaaatgattttttcaacttgcttaataaccccaaaaataaccatgccataagcctaacgcccccaagcgcttatgatgaaatcgggcagatgcaagcttctatcaatgaaaacattcttaaaacccaagaaagcattcaagccgataacaaagccattcaaaacagcattgaagtaacaaattatgtggaaaatggggatttcacgcaagaaatcgcatgcgtgcctaaaaataaagatttgcaagctttaagaaatacgattaatagcattatccagtattttcgcaatcaaattggtgccgatattgaatccctaaataacgccctagagcattataaaaacctggatttcacccaccacatccaaaatcctaaagccaacatggaaaaagcgctcaacactttagggcaagaaatttgc

SEQ ID NO: 1486 - DNA (genomic), 897 bp, Helicobacter pylori; double-stranded, circular
  misc_feature (B) LOCATION 1...897
  hypothetical: NO
  anti-sense: NO
tcgttctctatcaatagttttaaaaaggcaaagggaatgaaatctacaagaattggttctaaaattgtcatgatggtgtgtgcggttgttattgtcattagcgctgttatgggcgttattatcagctacaaggttgaaagcgtgttgcaaagccaagccacagaattgctgcaaaaaaaagctcagttagtcagttttaaaattcaaggcattatgaagcgcatttttatgggcgctaacacccttgaaaggtttttaagcgatgaaaatggcgctattaatgacaccctaaaaagacgcatgctctctgagtttttgttagcaaaccctcatgtgttattggttagcgcgatttatacgaataataatgaacgaatgatcactgcaatgaacatggattcaaaaatcgcctaccctaataccgcactcaatgaaaacatgaccaaccaaatccattcgctcaaaagtataacccgttcagatccctattataaagaggttaatggcgataaaatctatggcatggacattaccctccccctaatgggcaagaatcaaaatgttataggcgcgctgaatttctttttaaacattgacgctttttatactgatgtggtaggcaagaaaaagagcaacacctttttaatggggaaagacggcaggattttaatcaaccctaatcgtgagattcaagataagattttaagcgctatcaatccggataaaagagtcgctaaagctgtggagtattacaatcaaaacgaagcgggcactttgagctaccattcattgagcgggaatacagaaacctttttagccatacagccctttgatttttttgaagaaaaagggaataacggccaatcattggcgttgggcaattgggaaatatgtcaa

SEQ ID NO: 1487 - DNA (genomic), 2022 bp, Helicobacter pylori; double-stranded, circular
  misc_feature (B) LOCATION 1...2022
  hypothetical: NO
  anti-sense: NO
atgaaatctacaagaattggttctaaaattgtcatgatggtgtgtgcggttgttattgtcattagcgctgttatgggcgttattatcagctacaaggttgaaagcgtgttgcaaagccaagccacagaattgctgcaaaaaaaagctcagttagtcagttttaaaattcaaggcattatgaagcgcatttttatgggcgctaacacccttgaaaggtttttaagcgatgaaaatggcgctattaatgacaccctaaaaagacgcatgctctctgagtttttgttagcaaaccctcatgtgttattggttagcgcgatttatacgaataataatgaacgaatgatcactgcaatgaacatggattcaaaaatcgcctaccctaataccgcactcaatgaaaacatgaccaaccaaatccattcgctcaaaagtataacccgttcagatccctattataaagaggttaatggcgataaaatctatggcatggacattaccctccccctaatgggcaagaatcaaaatgttataggcgcgctgaatttctttttaaacattgacgctttttatactgatgtggtaggcaagaaaaagagcaacacctttttaatggggaaagacggcaggattttaatcaaccctaatcgtgagattcaagataagattttaagcgctatcaatccggataaaagagtcgctaaagctgtggagtattacaatcaaaacgaagcgggcactttgagctaccattcattgagcgggaatacagaaacctttttagccatacagccctttgatttttttgaagaaaaagggaataacggcaatcattggcgttgggcaattgggaaatatgtcaataaatctttagtctttaaagaagcgacaaacaccaaattcattattatcaccactttgattttaggcgtgttggtgttagcctttttagtctttatcatcatttctaatctcataaccaaacgcatcagtagggtcaataacaccctaaatgattttttcaacttgcttaataaccccaaaaataaccatgccataagcctaacgcccccaagcgcttatgatgaaatcgggcagatgcaagcttctatcaatgaaaacattcttaaaacccaagaaagcattcaagccgataacaaagccattcaaaacagcattgaagtaacaaattatgtggaaaatggggatttcacgcaagaaatcgcatgcgtgcctaaaaataaagatttgcaagctttaagaaatacgattaatagcattatccagtattttcgcaatcaaattggtgccgatattgaatccctaaataacgccctagagcattataaaaacctggatttcacccaccacatccaaaatcctaaagccaacatggaaaaagcgctcaacactttagggcaagaaatttctagcatgcttaaagcttctttagggtttgcgaatgcgctcaatcatgaatccaaagatttaaaaacttgcgtggataacttgactaaaaccgcccacaagcaagaaagaagcctgaaaaacaccacccaatccttagaagaaatcactaatattattacgatgattgattctaaaagccaagagatgatctctcaaggcgaagacattaaaagcgtggtggatatgattagagacatcgctgatcaaacgaatctattagccctaaacgccgctattgaagccgcacgagccggcgagcatggcagaggctttgcggtggtggctgatgaagtgagaaagctcgctgaaaggacgcaaaaatccctcagcgaaattgaagccaatatcaatattttagttcaaagcattgccgataacgctgagtctatcaaaatgcaaaataagggcgtagaaaatatccacaactccattaacgctttgcaacaagatgtgcaggataatttgactatcgctaaccattctttacaagtcagcacaaaaattgatgggatttcccaagacattttagaagatgtgagcaagaagaaattttaa

SEQ ID NO: 1488 - DNA (genomic), 216 bp, Helicobacter pylori; double-stranded, circular
  misc_feature (B) LOCATION 1...216
  hypothetical: NO
  anti-sense: NO
agtgtggcatggtgttgccctggggtttctcatgttttagaccggtttgtgcatgggggcgtggtggattatgtgtattatcattatgggtttgattttgctatttttaatttcgctgatgtgatgatagatgtaggcgtgggcgttttattgttaagacaattcttttttaagcaaaaacaaaacaaaattaagggcataattaccctttttaaa

SEQ ID NO: 1489 - DNA (genomic), 315 bp, Helicobacter pylori; double-stranded, circular
  misc_feature (B) LOCATION 1...315
  hypothetical: NO
  anti-sense: NO
agggcagttgtgctaaacaccacccaaaaaagcctattggttttcatgggggtttttttccttatctttggcgtgaatcaagcgattaaacacgctattttagaggggtttcactatgaaagtttggttatagatattgttttagtgttcaataaaggcgtggcgttttccttactcagttttttagaggggggtttgaaatacttgcaaatccttttaattttagggctttttatctttttaatgcgccaaaaggagctttttaaaagccatgcgatagagtttggcatggtgtttggcgctggggtttctaat

SEQ ID NO: 1490 - DNA (genomic), 492 bp, Helicobacter pylori; double-stranded, circular
  misc_feature (B) LOCATION 1...492
  hypothetical: NO
  anti-sense: NO
gtgctaaacaccacccaaaaaagcctattggttttcatgggggtttttttccttatctttggcgtggatcaagcgattaaacacgctattttagaggggtttcactatgaaagtttggttatagatattgttttagtgttcaataaaggcgtggcgttttccttactcagttttttagaggggggtttgaaatacttgcaaatccttttaattttagggctttttatctttttaatgcgccaaaaggagctttttaaaagccatgcgatagagtttggcatggtgtttggcgctggggtttctaatgttttagaccggtttgtgcatgggggcgtggtggattatgtgtattatcattatgggtttgattttgctatttttaatttcgctgatgtgatgatagatgtaggcgtgggcgttttattgttaagacaattcttttttaagcaaaaacaaaacaaaattaagggcataattaccctttttaaataa

SEQ ID NO: 1491 - DNA (genomic), 291 bp, Helicobacter pylori; double-stranded, circular
  misc_feature (B) LOCATION 1...291
  hypothetical: NO
  anti-sense: NO
tctaagagagaatgtattttaatgaagacagagaaacaaaaatttttagagatgcgtaaagatggggctaactctgtgctgattttaagaggggattgggattttagaacgagcgtgtttcgtttagatgagttgaaaaaaaatttattagatcatcaagggtctttaaaaatggatttttcagggtgtcaaaaaatagattttgtttttggcatgtttttatttgatttagttaaggagcgttctttaaacattgaattgtgtaacgtgagcgagaataacgcttgcgct

SEQ ID NO: 1492 - DNA (genomic), 462 bp, Helicobacter pylori; double-stranded, circular
  misc_feature (B) LOCATION 1...462
  hypothetical: NO
  anti-sense: NO
gcgagaataacgcttgcgcttgaaagtgggttaaagactgggcttgaaaaagaagacgatttggaatctaaaaaagcgggcaaaaaatacgaactcatgatcactaaattgggtaagagtcttgtagagacttacaacacctttttaaacgcgttcaatttttgcggcatgattttattttacttcattaaaagcgttttcaaccccaaacgcttttgcatcattcctttgctctatcatattaatgaatccgggtttaaggttttgccggtgagtattttaacggtgtttatcgtggggtttgccgttgctttacaaggggctttacaactacaagacttgggcgcgcctttgatgtcggtggaaatgacggccaaactcgctttaagagagatcggccctttcattttaacccttgtggtggccgggaggagcgcgagcagttttaccgcccaaattggg

SEQ ID NO: 1493 - DNA (genomic), 1134 bp, Helicobacter pylori; double-stranded, circular
  misc_feature (B) LOCATION 1...1134
  hypothetical: NO
  anti-sense: NO
atgaagacagagaaacaaaaatttttagagatgcgtaaagatggggctaactctgtgctgattttaagaggggattgggattttagaacgagcgtgtttcgtttagatgagttgaaaaaaaatttattagatcatcaagggtctttaaaaatggatttttcagggtgtcaaaaaatagattttgtttttggcatgtttttatttgatttagttaaggagcgttctttaaacattgaattgtgtaacgtgagcgagaataacgcttgcgctttgaaagtggttaaagactggcttgaaaaagaagacgatttggaatctaaaaaagcgggcaaaaaatacgaactcatgatcactaaattgggtaagagtcttgtagagacttacaacacctttttaaacgcgttcaatttttgcggcatgattttattttacttcattaaaagcgttttcaaccccaaacgcttttgcatcattcctttgctctatcatattaatgaatccgggtttaaggttttgccggtgagtattttaacggtgtttatcgtggggtttgccgttgctttacaaggggctttacaactacaagacttgggcgcgcctttgatgtcggtggaaatgacggccaaactcgctttaagagagatcggccctttcattttaacccttgtggtggccgggaggagcgcgagcagttttaccgcccaaattggggtgatgaagatcactgaagaattggatgcgatgaaaaccatgggctttaacccttttgaatttttagtgttgcctagggtgttagccttagtgattgttttgcctttattggtgtttatcgctgatgcgttcgccattcttgggggtatgtttgcgattaaataccaattggatctaggctttccaagctatatagacagactgcatgacacagtgggttggaatcattttttggtagggattgtcaaagcccctttttgggggtttgcgattgcgatggtggggtgcatgcgcgggtttgaagtcaagggggataccgagagcattgggcgcttgaccactattagcgtcgtgaatgcgttattttggatcattttcttagacgctattttttctattctcttttctaagttgaacatataa

SEQ ID NO: 1494 - DNA (genomic), 783 bp, Helicobacter pylori; double-stranded, circular
  misc_feature (B) LOCATION 1...783
  hypothetical: NO
  anti-sense: NO
atgcaaaaagattaccaaaaactcatcgtttatttatgcgattttttagaaaaagaagttcaaaaaaaaggctttaaaaaagtcgtttacgggctgagcggggggctagatagcgcggtcgttggagtgctgtgccaaaaggtttttaaagaaaacgcccatgcccttttaatgccctcttcagtctctatgccagaaagtagaacagacgctttgaatttgtgcgaaaaattttctatcccttatacagaatattctatcgctccctatgataaaatctttggctctcactttaaagacgcaagccttactaggaaggggaatttttgcgcaaggttacgcatggcttttttatacgactattctttaaaaagcgattctttagtcattggcacgagcaataaaagcgaaaggatgctaggctatggcactttatttggggatttggcgtgcgcgattaacccgattggggaattatttaaaaccgaagtttatgaactcgcttattatttaaatatccctaaaaagattttaaacaagccccctagcgcggatttatttgtagggcaaagcgatgaaaaagatttaggctatccttatagcgtgatcgatcctttattaaaagatattgaagcgttattccaaacaaagcccatccatttagaaacgctcattcaattaggctatgctgaaattttagtgaaaaacatcataagccgtatccaaaaaaacgcttttaaattggaattacccactatcgccaaacgatttaaccctgaatga

SEQ ID NO: 1495 - DNA (genomic), 783 bp, Helicobacter pylori; double-stranded, circular
  misc_feature (B) LOCATION 1...783
  hypothetical: NO
  anti-sense: NO
ggcatgcaaaaagattaccaaaaactcatcgtttatttatgcgattttttagaaaaagaagttcaaaaaaaaggctttaaaaaagtcgtttacgggctgagcggggggctagatagcgcggtcgttggagtgctgtgccaaaaggtttttaaagaaaacgcccatgcccttttaatgccctcttcagtctctatgccagaaagtagaacagacgctttgaatttgtgcgaaaaattttctatcccttatacagaatattctatcgctccctatgataaaatctttggctctcactttaaagacgcaagccttactaggaaggggaatttttgcgcaaggttacgcatggcttttttatacgactattctttaaaaagcgattctttagtcattggcacgagcaataaaagcgaaaggatgctaggctatggcactttatttggggatttggcgtgcgcgattaacccgattggggaattatttaaaaccgaagtttatgaactcgcttattatttaaatatccctaaaaagattttaaacaagccccctagcgcggatttatttgtagggcaaagcgatgaaaaagatttaggctatccttatagcgtgatcgatcctttattaaaagatattgaagcgttattccaaacaaagcccatccatttagaaacgctcattcaattaggctatgctgaaattttagtgaaaaacatcataagccgtatccaaaaaaacgcttttaaattggaattacccactatcgccaaacgatttaaccctgaa

SEQ ID NO: 1496 - DNA (genomic), 663 bp, Helicobacter pylori; double-stranded, circular
  misc_feature (B) LOCATION 1...663
  hypothetical: NO
  anti-sense: NO
atggctgaaaattctttcaaaaatgtttccatacaacccaaaccatttttcttattaccagttaaaaccctgtttcttttagggggcgtttttagcgcgttttttatccttattgctggcttggttttttttgattacgctaattcaatggataacgccatttttaacttgatgcgttcaaattcttctaaccctattttagatcaaacgctccaacgcattgtttttttaggctcttctcaattcgtgttgcctttgagcttgttggtgggggtgtttttaagcctttatcgtaaaaatttagcacttggggtgtggtttgtgttaagcgtggttatatttgaagcccttttggaatctttaaaacaccttttggcacactccattcaatggctttcgcacagcgctaatttccctagcactattgcgctctctttagcccttttttatggcttgcttatcttattgataccccatttcatcgcgcatcaaatatttcaaaacattctttcttatagtttatttggtttgattcttttaataggcttagcgctgattgttttaggggtgtcttttagcagtgttttaggaggggtttgtttaggagcgttaggggcttgtttttccatagggatttatttgagcgtgttccaaaagatctaa

SEQ ID NO: 1497 - DNA (genomic), 660 bp, Helicobacter pylori; double-stranded, circular
  misc_feature (B) LOCATION 1...660
  hypothetical: NO
  anti-sense: NO
tgctggagattctttccaaaatgtttccaaaacaaccccaaaccatttttcttattaccagttaaaaccctgtttcttttagggggcgtttttagcgcgttttttatccttattgctggcttggttttttttgattacgctaattcaatggataacgccatttttaacttgatgcgttcaaattcttctaaccctattttagatcaaacgctccaacgcattgtttttttaggctcttctcaattcgtgttgcctttgagcttgttggtgggggtgtttttaagcctttatcgtaaaaatttagcacttggggtgtggtttgtgttaagcgtggttatatttgaagcccttttggaatctttaaaacaccttttggcacactccattcaatggctttcgcacagcgctaatttccctagcactattgcgctctctttagcccttttttatggcttgcttatcttattgataccccatttcatcgcgcatcaaatatttcaaaacattctttcttatagtttatttggtttgattcttttaataggcttagcgctgattgttttaggggtgtcttttagcagtgttttaggaggggtttgtttaggagcgttaggggcttgtttttccatagggatttatttgagcgtgttccaaaagatc

SEQ ID NO: 1498 - DNA (genomic), 231 bp, Helicobacter pylori; double-stranded, circular
  misc_feature (B) LOCATION 1...231
  hypothetical: NO
  anti-sense: NO
attagagggcatgctggatttagaaagcgtaaagaagtgcttcatatccaatttgacaaagaatgcgagcaggtaacgcttggggggtatgttttcagcttgttagagcgcatgcctatagagggggatacaatcgtttcgcatgggtatgcttttgaagtcttaagcgtggatggggccaggataaaacgcttgaaagcggttaaacaagatcagggagaaaatgaagca

SEQ ID NO: 1499 - DNA (genomic), 357 bp, Helicobacter pylori; double-stranded, circular
  misc_feature (B) LOCATION 1...357
  hypothetical: NO
  anti-sense: NO
attcgctttagagatgagtccaagctaagcacttatttgagcgccacgcagttaggcatcaccctttcttcattggctttaggttgggtgggtgagcccgctatcgcaaaattgttagccgcgttgtttgagtctatggatttgagagaaaatcctatttttatccattcaatgagcgtggtcatagcgtttttgagcatcacttttttgcatgtcgtgttgggcgagattgtgccaaagtctttagcgatcgctaaatctgaaaaagccaccctttttgccgcgcgccctttgcatgtgttttgggtggtgttttatccggtggtgcgtttgtttgatgtgatcgctctttttttt

SEQ ID NO: 1500 - DNA (genomic), 630 bp, Helicobacter pylori; double-stranded, circular
  misc_feature (B) LOCATION 1...630
  hypothetical: NO
  anti-sense: NO
agcgctgagggcatgcattctgaagaagagttaaaaatcattgtgggcgagagtttgagagagggcattattgattcggtggagggggaaatcattaaaaacgcagtgaatttttctgacacgagcgctaaagaaatcatgaccccacgaaaagacatggtgtgtttggacgaagaaaacagctatgaagaaaatatagacattgttttaaaaagccacttcacgcgctacccttattgtaaaggctctaaagacaacattatcggcatggtgcatattagggacttgctctctcgctctattttcacccccaaaatgcatgatttcaagcagatcgttaggaaaatgatcatcgtccctgagagcgcttctatttctcaaatccttattaaaatgaaaaaagaacaaatccataccgctttggtgattgatgaatacggcggcacggccgggttgctcactatggaagatattattgaagaaatcatgggagagattagcgatgaatacgacttgaaacaagagggcgtgaacaaacttgaagaaggcgtgtttgaattagagggcatgctggatttagaaagcgtaaagaagtgcttcatatccaatttgacaaagaatgcgagcagg

SEQ ID NO: 1501 - DNA (genomic), 1350 bp, Helicobacter pylori; double-stranded, circular
  misc_feature (B) LOCATION 1...1350
  hypothetical: NO
  anti-sense: NO
atggggaggaatcaaggagcttatttggatccgtctgaatcaattttgatgttgatggttgcttttttactggtgttgttgaacgctttttttgtgctttcagagtttgcccttgtgaaagtgcgcaaaacccgcttagaagagctggttaaaatcggtaattccaacgctaaactcgctttagagatgagtcaaagactagacacttatttgagcgccacgcagttaggcatcaccctttcttcattggctttaggttgggtgggtgagcccgctatcgcaaaattgttagccgcgttgtttgagtctatggatttgagagaaaatcctatttttatccattcaatgagcgtggtcatagcgtttttgagcatcacttttttgcatgtcgtgttgggcgagattgtgccaaagtctttagcgatcgctaaatctgaaaaagccaccctttttgccgcgcgccctttgcatgtgttttgggtggtgttttatccggtggtgcgtttgtttgatgtgatcgctcatttttttttgaaaaagatgggcgtcaatcctaaagagcatgagggcatgcattctgaagaagagttaaaaatcattgtgggcgagagtttgagagagggcattattgattcggtggagggggaaatcattaaaaacgcagtggatttttctgacacgagcgctaaagaaatcatgaccccacgaaaagacatggtgtgtttggacgaagaaaacagctatgaagaaaatatagacattgttttaaaaagccacttcacgcgctacccttattgtaaaggctctaaagacaacattatcggcatggtgcatattagggacttgctctctcgctctattttcacccccaaaatgcatgatttcaagcagatcgttaggaaaatgatcatcgtccctgagagcgcttctatttctcaaatccttattaaaatgaaaaaagaacaaatccataccgctttggtgattgatgaatacggcggcacggccgggttgctcactatggaagatattattgaagaaatcatgggagagattagcgatgaatacgacttgaaacaagagggcgtgaacaaacttgaagaaggcgtgtttgaattagagggcatgctggatttagaaagcgtagaagaagtgcttcatatccaatttgacaaagaatgcgagcaggtaacgcttggggggtatgttttcagcttgttagagcgcatgcctatagagggggatacaatcgtttcgcatgggtatgcttttgaagtcttaagcgtggatggggccaggataaaacgcttgaaagcggttaaacaagatcagggagaaaatgaagcatga

SEQ ID NO: 1502 - DNA (genomic), 636 bp, Helicobacter pylori; double-stranded, circular
  misc_feature (B) LOCATION 1...636
  hypothetical: NO
  anti-sense: NO
atgagtaaagagcttattttaaagcgcattaaagaagccagagccaaacatgccattcagggagcgaaccctatttatagaaatatcattaaagtggaatttgaagacctggtggaagaatacaagcatttccaggtgttgaataaagccgaactcattgaaagcgctaaagaaaatttagagcaagccattttaaaggctttagaaaattttcaaagtaaaaaagtcttacactctacggatttaaatttgaattttgaagcgtttaaggatttcactttacagccctatgacaaagaaattgaagcgatgcgtgaagaattgtttgagattgataccgctttattgcacggggtttgtgggatttcaagcttgggcatgattggggcggtttcttcgcatgcaagcccacggttgctttcgctcatcacccttaattgcatcattttattgaaaaaagaatccattgtgcgcaacttgagtgaaggcgtgcaagctttaaaaaatcaaggccaaaacggcgcattacccacaaacatgctccttattggcgggcctagccggacagctgacattgaattaaaaaccgtttttggggtgcatgggcctcaaaaagtcgctgtcattctctattaa

SEQ ID NO: 1503 - DNA (genomic), 636 bp, Helicobacter pylori; double-stranded, circular
  misc_feature (B) LOCATION 1...636
  hypothetical: NO
  anti-sense: NO
tttatgagtaaagagcttattttaaagcgcattaaagaagccagagccaaacatgccattcagggagcgaaccctatttatagaaatatcattaaagtggaatttgaagacctggtggaagaatacaagcatttccaggtgttgaataaagccgaactcattgaaagcgctaaagaaaatttagagcaagccattttaaaggctttagaaaattttcaaagtaaaaaagtcttacactctacggatttaaatttgaattttgaagcgtttaaggatttcactttacagccctatgacaaagaaattgaagcgatgcgtgaagaattgtttgagattgataccgctttattgcacggggtttgtgggatttcaagcttgggcatgattggggcggtttcttcgcatgcaagcccgcggttgctttcgctcatcacccttaattgcatcattttattgaaaaaagaatccattgtgcgcaacttgagtgaaggcgtgcaagctttaaaaaatcaaggccaaaacggcgcattacccacaaacatgctccttattggcgggcctagccggacagctgacattgaattaaaaaccgtttttggggtgcatgggcctcaaaaagtcgctgtcattctctat

SEQ ID NO: 1504 - DNA (genomic), 141 bp, Helicobacter pylori; double-stranded, circular
  misc_feature (B) LOCATION 1...141
  hypothetical: NO
  anti-sense: NO
tatcctgaagtattaaaaatcttagaaaaattggattcaaaaattagcgatgaaaaaatgcaggatttgaattatcaggtggaagcgttgaaaaaaagcccccaaatcgtagctaaagattttttagaaagcatagggtta

SEQ ID NO: 1505 - DNA (genomic), 306 bp, Helicobacter pylori; double-stranded, circular
  misc_feature (B) LOCATION 1...306
  hypothetical: NO
  anti-sense: NO
catttcatcatcgttgcgctttccagtcttatcgtgctggtgtttggggttttgatcggggtttttgtgttttataactcaaaggctagggcgtttttgctccctgtggtgaatttcctctacaccatcccatcgctggcgttattcgcgttattcattcctgtgattggggtgtataaaagctattacttctcatattttttcaaatattctatgactttctctaaaaattttggattgtctttaaatctgccaagtcctgtgttacaactatcacaaatccactctctgccccaacctgtgtcg

SEQ ID NO: 1506 - DNA (genomic), 510 bp, Helicobacter pylori; double-stranded, circular
  misc_feature (B) LOCATION 1...510
  hypothetical: NO
  anti-sense: NO
acccaattaagaaaaacctttttatatcaaataagtttggttataatgccaaacatgggcgtttttaaacaattgatcaaaaaattgtatgaatggttgctccattctatagatatggttatccaacattgggttgccatggcgttaaaaataagcgtggtaaaatatgtgataaaagaatttcatgatcgcttcatttactttatagacttgctcgcgcagcagtttatcatcgttgcgctttctagtcttatcgtgctggtgtttggggttttgatcggggtttttgtgttttataactcaaaggctagggcgtttttgctccctgtggtgaatttcctctacaccatcccatcgctggcgttattcgcgttattcattcctgtgattggggtggggttaaaaaacgcgcttttggtgttggtcttatacggcttgttacccattgtccatagcacttataacgctttaaaagaggcgcgagaagaggtattaaagccgctattgggc

SEQ ID NO: 1507 - DNA (genomic), 1017 bp, Helicobacter pylori; double-stranded, circular
  misc_feature (B) LOCATION 1...1017
  hypothetical: NO
  anti-sense: NO
ccccaaagagttgtttttagggtgcgattcttgctcgctatcccccaaattttagtgggcttaaggattgcggtggtgatgctagtagcgatggctggaatcggggcactcattggggctgggggtttggggcaggcgatttttagagggctaaacacgcaaaataccacgattttagtggcgggcagctttattattgctctttttagcgttttagcggatcaatttgtgagcgtgtttcagcatgaaaacgccttgcaacgcctattttctcaaaacgccacccaaaaacaaaaaagaagagtttatgttaatttagcggtgtttctttttttattgctagcgagcgctttatggctcattcctagaagtgccatagaagaaaagcccttagtcgtggcgacaaaacctagcagcgagcagtatattttgggcgaaattttaagccttttgttagaaaaacaccatatccctatcaagcgagcgtttggcattggtggggggacgatgaatatccatccggcattgattaggggcgattttgatttgtatgtggaatataccggcaccgcttgggtgaacacgctcaaaaaccctttgactcaaaaagtggattttgaaacgattaaaaagcgttatgagaaggaatttaatcttttgtgggtgggacttttgggctttaataacacctattctttagcgatttctaaagaagacgctcaaaaatacgcaattgaaactttcagcgatttagcctttcatagcccgaattttgattttggagcggagtttgatttttttgaaagagaggacgcttttaagggcttaatcaaagcttatcgctttcattttagaagtttgcatgaaatggatattaatttgcgttataaaagttttgaatcccataagatcaacgctttagacgtcttcactacagacgctcaaatcaaagagctggatttaaaggtgctgaaggacgataaagggttttttcctaattatcaggccggtattgtt

SEQ ID NO: 1508 - DNA (genomic), 1662 bp, Helicobacter pylori; double-stranded, circular
  misc_feature (B) LOCATION 1...1662
  hypothetical: NO
  anti-sense: NO
atgccaaacatgggcgtttttaaacaattgatcaaagaattgtatgaatggttgctccattctgtagatatggttatccaacatttggttgccatggcgttaaaaataagcgtggtaaaatatttgataaaagaatttcatgatcgcttcatttactttatagacttgctcgcgcagcattttatcatcgttgcgctttctagtcttatcgtgctggtgtttggggttttgatcggggtttttgtgttttataactcaaaggctagggcgtttttgctccctgtggtgaatttcctctacaccatcccatcgctggcgttattcgcgttattcattcctgtgattggggtggggttaaaaaacgcgcttttggtgttggtcttatacggcttgttacccattgtccatagcacttataacgctttaaaagaggcgcgagaagaggtgattaaagccgctattgggctagggtgtaaccccaaagagttgttttttagggtgcgattcttgctcgctatcccccaaattttagtgggcttaaggattgcggtggtgatgctagtagcgatggctgggatcggggcactcattggggctgggggtttggggcaggcgatttttagagggctaaacacgcaaaataccacgcttttagtggcgggcagctttattattgctctttttagcgttttagcggatcaatttgtgagcgtgtttcagcatgaaaacgccttgcaacgcctattttctcaaaacgccacccaaaaacaaaaaagaagagtttatgttaatttagcggtgtttctttttttattgctagcgagcgctttatggctcattcctagaagtgccatagaagaaaagcccttagtcgtggcgacaaaacctagcagcgagcagtatattttgggcgaaattttaagccttttgttagaaaaacaccatatccctatcaagcgagcgtttggcattggtggggggacgatgaatatccatccggcattgattaggggcgattttgatttgtatgtggaatataccggcaccgcttgggtgaacacgctcaaaaaccctttgactcaaaaagtggattttgaaacgattaaaaagcgttatgagaaggaatttaatcttttgtgggtgggacttttgggctttaataacacctattctttagcgatttctaaagaagacgctcaaaaatacgcaattgaaactttcagcgatttagcctttcatagcccgaattttgattttggagcggagtttgatttttttgaaagagaggacgcttttaagggcttaatcaaagcttatcgctttcattttagaagtttgcatgaaatggatattaatttgcgttataaaagttttgaatcccataagatcaacgctttagacgtcttcactacagacgctcaaatcaaagagctggatttaaaggtgctgaaggacgataaagggtttttccctaattatcaggccggtattgttataagaaaagaaactataaaaaagtatcctgaagtattaaaaatcttagaaaaattggattcaaaaattagcgatgaaaaaatgcaggatttgaattatcaggtggaagcgttgaaaaaaagcccccaaatcgtagctaaagattttttagaaagcatagggttataa

SEQ ID NO: 1509 - DNA (genomic), 1671 bp, Helicobacter pylori; double-stranded, circular
  misc_feature (B) LOCATION 1...1671
  hypothetical: NO
  anti-sense: NO
ttggttataatgccaaacatgggcgtttttaaacaattgatcaaaaaattgtatgaatggttgctccattctatagatatggttatccaacatttggttgccatggcgttaaaaataagcgtggtaaaatatttgataaaagaatttcatgatcgcttcatttactttatagacttgctcgcgcagcattttatcatcgttgcgctttctagtcttatcgtgctggtgtttggggttttgatcggggtttttgtgttttataactcaaaggctagggcgtttttgctccctgtggtgaatttcctctacaccatcccatcgctggcgttattcgcgttattcattcctgtgattggggtggggttaaaaaacgcgcttttggtgttggtcttatacggcttgttacccattgtccatagcacttataacgctttaaaagaggcgcgagaagaggtgattaaagccgctattgggctagggtgtaaccccaaagagttgttttttagggtgcgattcttgctcgctatcccccaaattttagtgggcttaaggattgcggtggtgatgctagtagcgatggctgggatcggggcactcattggggctgggggtttggggcaggcgatttttagagggctaaacacgcaaaataccacgcttttagtggcgggcagctttattattgctctttttagcgttttagcggatcaatttgtgagcgtgtttcagcatgaaaacgccttgcaacgcctattttctcaaaacgccacccaaaaacaaaaaagaagagtttatgttaatttagcggtgtttctttttttattgctagcgagcgctttatggctcattcctagaagtgccatagaagaaaagcccttagtcgtggcgacaaaacctagcagcgagcagtatattttgggcgaaattttaagccttttgttagaaaaacaccatatccctatcaagcgagcgtttggcattggtggggggacgatgaatatccatccggcattgattaggggcgattttgatttgtatgtggaatataccggcaccgcttgggtgaacacgctcaaaaaccctttgactcaaaaagtggattttgaaacgattaaaaagcgttatgagaaggaatttaatcttttgtgggtgggacttttgggctttaataacacctattctttagcgatttctaaagaagacgctcaaaaatacgcaattgaaactttcagcgatttagcctttcatagcccgaattttgattttggagcggagtttgatttttttgaaagagaggacgcttttaagggcttaatcaaagcttatcgctttcattttagaagtttgcatgaaatggatattaatttgcgttataaaagttttgaatcccataagatcaacgctttagacgtcttcactacagacgctcaaatcaaagagctggatttaaaggtgctgaaggacgataaagggtttttccctaattatcaggccggtattgttataagaaaagaaactataaaaaagtatcctgaagtattaaaaatcttagaaaaattggattcaaaaattagcgatgaaaaaatgcaggatttgaattatcaggtggaagcgttgaaaaaaagcccccaaatcgtagctaaagattttttagaaagcatagggttataa

SEQ ID NO: 1510 - DNA (genomic), 555 bp, Helicobacter pylori; double-stranded, circular
  misc_feature (B) LOCATION 1...555
  hypothetical: NO
  anti-sense: NO
tcaaacctaaatcaaagtttaaggggtggcattttgtttaaaagaatggttttaatcgctcttttaggggtgttttcaagcgtttcattaagcgctaagagtcttttaagagatgatgggattttagtctctgatttaaagggcatgaaatcagaattatctgatgctcctgcttgggtttttgaagaccctaaagttccctacgaagaaatgggcgtggcgtatatccctgttaataacaaatatttagggattgagcaagcgaccttaaacgctaaattgagcctgatcgtggtttttcatgaaatcatgttgaagtataaaaaacgcttcatggagcaattccatgagtctgagcaaacagctacgaatatcagctacgctatctataactacctagcgactaagattcgagtgtccgacacttacacgaatttaaaatctgaggtggctgtggtgaaaatcaagctagagggttgccagattgagcaaatcaaaaggtatttaaaagcgagcgttgaaaaccttaacgataacgaaattgcctacatcggc

SEQ ID NO: 1511 - DNA (genomic), 567 bp, Helicobacter pylori; double-stranded, circular
  misc_feature (B) LOCATION 1...567
  hypothetical: NO
  anti-sense: NO
ttgtttaaaagaatggttttaatcgctcttttaggggtgttttcaagcgtttcattaagcgctaagagtcttttaagagatgatgggattttagtctctgatttaaagggcatgaaatcagaattatctgatgctcctgcttgggtttttgaagaccctaaagttccctacgaagaaatgggcgtggcgtatatccctgttaataacaaatatttagggattgagcaagcgaccttaaacgctaaattgagcctgatcgtggtttttcatgaaatcatgttgaagtataaaaaacgcttcatggagcaattccatgagtctgagcaaacagctacgaatatcagctacgctatctataactacctagcgactaagattcgagtgtccgacacttacacgaatttaaaatctgaggtggctgtggtgaaaatcaagctagagggttgccagattgagcaaatcaaaaggtatttaaaagcgagcgttgaaaaccttaacgataacgaaattgcctacatcgctaaagtcgctcaaaaagaattcggtagcgtttgcacattaaggtag

SEQ ID NO: 1512 - DNA (genomic), 189 bp, Helicobacter pylori; double-stranded, circular
  misc_feature (B) LOCATION 1...189
  hypothetical: NO
  anti-sense: NO
cgctggcgatatagcggggtggttggtcctaatggggggagtaaggctaatcctgtaggcacgatttatattggcgcgcaaagattaggatctcaagctttcattgatcgttgtttttttgaaggggacagagagagtattcaaaataaaagcgtagagcatgccctaaacatgctcgctagaatgcta

SEQ ID NO: 1513 - DNA (genomic), 495 bp, Helicobacter pylori; double-stranded, circular
  misc_feature (B) LOCATION 1...495
  hypothetical: NO
  anti-sense: NO
ggttttgaaaggttaaaaatgaaatttaaatttttgaatatggataatgagagcggttttattttgattgaaaaagaattggagcgactgaacgttaccgctcaagtcaaagaagatggcattgaattaaaaggcaaaaacacagaacaagcgagaatttatcttcaaacgctttttaattctaacattgtggaattagacgataacaaaaaaagcgcaaacgctgtaatagagcgcttgaaatctttaggtttaaaaatggcggtggctgaaagctgctctggggggttattatcgcatgcattcacttccattagcggggcttcagcggtttttatgggaggtgttgtgtgttatagtgaagaggttaagcgcgaattgttgaaagtcaatgccacgactttaaaagtctttggggtttatagcgaagaatgcgtgaaagaaatgctatcaggcgtgtttttaaattttaaagtggatctagcgctggcgata

SEQ ID NO: 1514 - DNA (genomic), 657 bp, Helicobacter pylori; double-stranded, circular
  misc_feature (B) LOCATION 1...657
  hypothetical: NO
  anti-sense: NO
atgaaatttaaatttttgaatatggataatgagagcggttttattttgattgaaaaagaattggagcgactgaacgttaccgctcaagtcaaagaagatggcattgaattaaaaggcaaaaacacagaacaagcgagaatttatcttcaaacgctttttaattctaacattgtggaattagacgataacaaaaaaagcgcaaacgctgtaatagagcgcttgaaatctttaggtttaaaaatggcggtggctgaaagctgctctggggggttattatcgcatgcattcacttccattagcggggcttcagcggtttttatgggaggtgttgtgtgttatagtgaagaggttaagcgcgaattgttgaaagtcaatgccacgactttaaaagtctttggggtttatagcgaagaatgcgtgaaagaaatgctatcaggcgtgtttttaaattttaaagtggatctagcgctggcgattagcggggtggctggccctaatggggggagtaaggctaatcctgtaggcacgatttatattggcgcgcaaagattaggatctcaagctttcattgatcgttgtttttttgaaggggacagagagagtattcaaaataaaagcgtagagcatgccctaaacatgctcgctagaatgctataa

SEQ ID NO: 1515 - DNA (genomic), 363 bp, Helicobacter pylori; double-stranded, circular
  misc_feature (B) LOCATION 1...363
  hypothetical: NO
  anti-sense: NO
cgattgtggggctgcgggagcattcatttaatccatgatgaaaccaccaaagctaaaaccccttacattgcaaactggatacaatttttagagcctattaaagaagaattaaaaaaccacccgcaattcagcaaccatttcgccaagcgttcatggcttacagagcgtttgaatgcgcgcttgcaactcaacaacctcttaagctatgatttcattcaagaaagagtaataaataacgaattaaaaatttttggttggcactatatcataaaaacatgcaggatttataattataattttgaaagccatttttttgagccgattgaagaaaccattaaacaaaggataagtcatgaaaacttc

SEQ ID NO: 1516 - DNA (genomic), 666 bp, Helicobacter pylori; double-stranded, circular
  misc_feature (B) LOCATION 1...666
  hypothetical: NO
  anti-sense: NO
gtggaagcgtttttaggagcgttagaatttcaagagaatgaatatgaagagtttaaagagctttatgagagcttaaaaaccaagcaaaagccccacactttgttcatttcttgcgtggattcacgagtcgtgcctaatttaatcacaggcacccaaccgggcgaattgtatgtgatccgcaacatgggcaatgtgatcccccctaaaacaagctataaagaatccctttctaccattgcgagcgttgaatacgctatcgcgcatgtgggcgttcaaaacttaatcatttgcgggcatagcgattgtggggcttgcgggagcattcatttaatccatgatgaaaccaccaaagctaaaaccccttacattgcaaactggatacaatttttagagcctattaaagaagaattaaaaaaccacccgcaattcagcaaccatttcgccaagcgttcatggcttacagagcgtttgaatgcgcgcttgcaactcaacaacctcttaagctatgatttcattcaagaaagagtaataaataacgaattaaaaatttttggttggcactatatcatagaaacaggcaggatttataattataattttgaaagccatttttttgagccgattgaagaaaccattaaacaaaggataagtcatgaaaacttctaa

SEQ ID NO: 1517 - DNA (genomic), 666 bp, Helicobacter pylori; double-stranded, circular; identical to SEQ ID NO: 1516
  misc_feature (B) LOCATION 1...666
  hypothetical: NO
  anti-sense: NO

SEQ ID NO: 1518 - DNA (genomic), 687 bp, Helicobacter pylori; double-stranded, circular
  misc_feature (B) LOCATION 1...687
  hypothetical: NO
  anti-sense: NO
atgagatttaagggttcaagagtggaagcgtttttaggagcgttagaatttcaagagaatgaatatgaagagtttaaagagctttatgagagcttaaaaaccaagcaaaagccccacactttgttcatttcttgcgtggattcacgagtcgtgcctaatttaatcacaggcacccaaccgggcgaattgtatgtgatccgcaacatgggcaatgtgatcccccctaaaacaagctataaagaatccctttctaccattgcgagcgttgaatacgctatcgcgcatgtgggcgttcaaaacttaatcatttgcgggcatagcgattgtggggcttgcgggagcattcatttaatccatgatgaaaccaccaaagctaaaaccccttacattgcaaactggatacaatttttagagcctattaaagaagaattaaaaaaccacccgcaattcagcaaccatttcgccaagcgttcatggcttacagagcgtttgaatgcgcgcttgcaactcaacaacctcttaagctatgatttcattcaagaaagagtaataaataacgaattaaaaatttttggttggcactatatcatagaaacaggcaggatttataattataattttgaaagccatttttttgagccgattgaagaaaccattaaacaaaggataagtcatgaaaacttctaa

SEQ ID NO: 1519 - DNA (genomic), 276 bp, Helicobacter pylori; double-stranded, circular
  misc_feature (B) LOCATION 1...276
  hypothetical: NO
  anti-sense: NO
tttccatttgcccaaatcaagccttttaatgcttgtaagcgcgatgataggcttagaaaaaaccaaagaaatctacaaaatagccatagaaaagaagtatcgtttttattcttatggcgatgggatgctgattttatgaaccccttattgcaagattatgcgcgcatccttttagaatggaatcaaacgcacaacttgagcggcgcgagaaatttaagcgaattagaaccccagattcacagacgctctaaagcccttagaatttgtcaaagattt

SEQ ID NO: 1520 - DNA (genomic), 387 bp, Helicobacter pylori; double-stranded, circular
  misc_feature (B) LOCATION 1...387
  hypothetical: NO
  anti-sense: NO
ttggatattgggagcggggcgggacttcctgctatccctttagcccttgaaaaacctgaagcgcaattcattcttttagagccaagggtaaaaagagcggcttttttaaactaccttaaaagcgttttgcctttaaacaacattgaaatcattaaaaagcgtttagaagattatcaaaatcttttacaagtggatttaatcacttctagagcggtcgctagctcttcttttttgatagaaaaaagccaacgcttcctaaaagataaggggtattttttattctataaaggcgagcagttaaagaatgaaatcgcttataaaaccactgaatgctttatgcatcaaaagcgcgtttatttttacaaatcaaaggaaagtttatgttaa

SEQ ID NO: 1521 - DNA (genomic), 444 bp, Helicobacter pylori; double-stranded, circular
  misc_feature (B) LOCATION 1...444
  hypothetical: NO
  anti-sense: NO
aaccccagattcacagacgctctaaagcccttagaatttgtcaaagattttaaaagctgcttggatattgggagcggggcgggacttcctgctatccctttagcccttgaaaaacctgaagcgcaattcattcttttagagccaagggtaaaaagagcggcttttttaaactaccttaaaagcgttttgcctttaaacaacattgaaatcattaaaaagcgtttagaagattatcaaaatcttttacaagtggatttaatcacttctagagcggtcgctagctcttcttttttgatagaaaaaagccaacgcttcctaaaagataaggggtattttttattctataaaggcgagcagttaaagaatgaaatcgcttataaaaccactgaatgctttatgcatcaaaagcgcgtttatttttacaaatcaaaggaaagtttatgt

SEQ ID NO: 1522 - DNA (genomic), 537 bp, Helicobacter pylori; double-stranded, circular
  misc_feature (B) LOCATION 1...537
  hypothetical: NO
  anti-sense: NO
atgaaccccttattgcaagattatgcgcgcatccttttagaatggaatcaaacgcacaacttgagcggcgcgagaaatttaagcgaattagaaccccagatcacagacgctctaaagcccttagaatttgtcaaagattttaaaagctgcttggatattgggagcggggcgggacttcctgctatccctttagcccttgaaaaacctgaagcgcaattcattcttttagagccaagggtaaaaagagcggcttttttaaactaccttaaaagcgttttgcctttaaacaacattgaaatcattaaaaagcgtttagaagattatcaaaatcttttacaagtggatttaatcacttctagagcggtcgctagctcttcttttttgatagaaaaaagccaacgcttcctaaaagataaggggtattttttattctataaaggcgagcagttaaagaatgaaatcgcttataaaaccactgaatgctttatgcatcaaaagcgcgtttatttttacaaatcaaaggaaagtttatgttaa

SEQ ID NO: 1523 - DNA (genomic), 462 bp, Helicobacter pylori; double-stranded, circular
  misc_feature (B) LOCATION 1...462
  hypothetical: NO
  anti-sense: NO
gtgggggttttgttrgcgttgtttttcttttatgcgaaaaataaccttttggaaaacacccaaatacgcatgcaatacaccgctgatgcgatcgctaaaagccttttagaattaaataatgcctcttctttagagcctttaaaaatcttagaagaacgattcaaaaacaccccctttgttttgttggacgcagacaacagagtcaagttttctaatatcggggtgtttgtggcctcttttaaaaatgacgccttaatcaaaaccccttattttgcgcttaaaaaacagggcttttacctcacagacagcgccccaactaaccgcttaggggtttctaaaatcattattgcagaagaagaaattcaaaaaatctttatccccctttataaaatgataggctatgtgtttttgggcgcgagtttgtttgtcgcgctaatagccatgtggctttataaaatccca

SEQ ID NO: 1524 - DNA (genomic), 525 bp, Helicobacter pylori; double-stranded, circular
  misc_feature (B) LOCATION 1...525
  hypothetical: NO
  anti-sense: NO
atgccccattctttaaaaaagcgttttttaatcgtttataccctttctaccttgcttttagtgggggttttgttagcgttgtttttcttttatgcgaaaaataaccttttggaaaacacccaaatacgcatgcaatacaccgctgatgcgatcgctaaaagccttttagaattaaataatgcctcttctttagagcctttaaaaatcttagaagaacgattcaaaaacaccccctttgttttgttggacgcagacaacagagtcaagttttctaatatcggggtgtttgtggcctcttttaaaaatgacgccttaatcaaaaccccttattttgcgcttaaaaaacagggcttttacctcacagacagcgccccaactaaccgcttaggggtttctaaaatcattattgcagaagaagaaattcaaaaaatctttatccccctttataaaatgataggctatgtgtttttgggcgcgagtttgtttgtcgcgctaatagccatgtggctttataaaatcccataa

SEQ ID NO: 1525 - DNA (genomic), 564 bp, Helicobacter pylori; double-stranded, circular
  misc_feature (B) LOCATION 1...564
  hypothetical: NO
  anti-sense: NO
aaagccgtgttgttcaacccactaccaacaaaaaggtccgtcatgccccattctttaaaaaagcgttttttaatcgtttataccctttctaccttgcttttagtgggggttttgttagcgttgtttttcttttatgcgaaaaataaccttttggaaaacacccaaatacgcatgcaatacaccgctgatgcgatcgctaaaagccttttagaattaaataatgcctcttctttagagcctttaaaaatcttagaagaacgattcaaaaacaccccctttgttttgttggacgcagacaacagagtcaagttttctaatatcggggtgtttgtggcctcttttaaaaatgacgccttaatcaaaaccccttattttgcgcttaaaaaacagggcttttacctcacagacagcgccccaactaaccgcttaggggtttctaaaatcattattgcagaagaagaaattcaaaaaatctttatccccctttataaaatgataggctatgtgtttttgggcgcgagtttgtttgtcgcgctaatagccatgtggctttataaaatccca

SEQ ID NO: 1526 - DNA (genomic), 438 bp, Helicobacter pylori; double-stranded, circular
  misc_feature (B) LOCATION 1...438
  hypothetical: NO
  anti-sense: NO
atgccatacgccttaagaaaaagatttttcaaacgccttttattgttttttttaattgtttgtatgataaatttgcatgccaaaagctatctgttttctcctttgcccccagcgcaccagcaaatcattaagacagagccttgctctttggagtgcttgaaagacttgatgctgcaaaatcaaatcttttcttttgtatcccaatacgatgataacaaccaagatgagagccttaaaacttattacaaggacatcttaaacaaactcaaccccgtattcatcgcttctcaaactccagctaaagaaagctatgagcctaagattgaattagcgattttactgcctaaaaaggtggtgggccgttatgcgattttagtgatgaacacccttttagcgtattttgaacaccagaaacaacgatttcaatatccaagtctt

SEQ ID NO: 1527 - DNA (genomic), 1290 bp, Helicobacter pylori; double-stranded, circular
  misc_feature (B) LOCATION 1...1290
  hypothetical: NO
  anti-sense: NO
atgccatacgccttaagaaaaagatttttcaaacgccttttattgttttttttaattgtttgtatgataaatttgcatgccaaaagctatctgttttctcctttgcccccagcgcaccagcaaatcattaagacagagccttgctctttggagtgcttgaaagacttgatgctgcaaaatcaaatcttttcttttgtatcccaatacgatgataacaaccaagatgagagccttaaaacttattacaaggacatcttaaacaaactcaaccccgtattcatcgcttctcaaactccagctaaagaaagctatgagcctaagattgaattagcgattttactgcctaaaaaggtggtgggccgttatgcgattttagtgatgaacacccttttagcgtatttgaacaccagaaacaacgatttcaatatccaagtctttgacagcgatgaagaaagccctgaaaaattagaagaaacctataaagaaattgaaaaagaaaaattcccttttatcatcgctttattgactaaagagggcgtggaaaatttgctccaaaatacgactatcaatacccctacttatgtgcctacggtgaataaaacgcaattagaaaatcataccgagctttctttaagcgagcgcttgtattttggggggattgattataaagagcaattaggcatgctcgcaactttcattagccctaattcgcccgtgattgaatacgatgatgatggcctgataggtgaacgcttgaggcaaatcacggagtctttaaacgttgaagtcaaacaccaagaaaacatttcttacaaacaagcgaccagtttttctaaaaattttagaaaacatgatgcgttttttaaaaattctaccttaattttgaacacccctaccactaaaagcggtctgatcctttctcaaatagggcttttagagtataagcctcttaaaatcctttccacacaaatcaatttcaacccctctttactcttgctcacccagcctaaagacaggaaaaatttattcattgtcaatgccttgcaaaacagcgatgaaacgctgatagaatacgcttccttattagagagcgatttaaggcatgattgggtgaattattccagcgcgatagggctagagatgtttttaaacacgctagatccgcattttaaaaagtcttttcaagagagtttggaagacaatcaagtccgttaccacaatcaaatttatcaggctttagggtattcttttgagccgataaaaaacgaaagcgaaacaaaaaaagaataa

SEQ ID NO: 1528 - DNA (genomic), 1290 bp, Helicobacter pylori; double-stranded, circular
  misc_feature (B) LOCATION 1...1290
  hypothetical: NO
  anti-sense: NO
aaaatgccatacgccttaagaaaaagatttttcaaacgccttttattgttttttttaattgtttgtatgataaatttgcatgccaaaagctatctgttttctcctttgcccccagcgcaccagcaaatcattaagacagagccttgctctttggagtgcttgaaagacttgatgctgcaaaatcaaatcttttcttttgtatcccaatacgatgataacaaccaagatgagagccttaaaacttattacaaggacatcttaaacaaactcaaccccgtattcatcgcttctcaaactccagctaaagaaagctatgagcctaagattgaattagcgattttactgcctaaaaaggtggtgggccgttatgcgattttagtgatgaacacccttttagcgtatttgaacaccagaaacaacgatttcaatatccaagtctttgacagcgatgaagaaagccctgaaaaattagaagaaacctataaagaaattgaaaaagaaaaattcccttttatcatcgctttattgactaaagagggcgtggaaaatttgctccaaaatacgactatcaatacccctacttatgtgcctacggtgaataaaacgcaattagaaaatcataccgagctttctttaagcgagcgcttgtattttggggggattgattataaagagcaattaggcatgctcgcaactttcattagccctaattcgcccgtgattgaatacgatgatgatggcctgataggtgaacgcttgaggcaaatcacggagtctttaaacgttgaagtcaaacaccaagaaaacatttcttacaaacaagcgaccagtttttctaaaaattttagaaaacatgatgcgttttttaaaaattctaccttaattttgaacacccctaccactaaaagcggtctgatcctttctcaaatagggcttttagagtataagcctcttaaaatcctttccacacaaatcaatttcaacccctctttactcttgctcacccagcctaaagacaggaaaaatttattcattgtcaatgccttgcaaaacagcgatgaaacgctgatagaatacgcttccttattagagagcgatttaaggcatgattgggtgaattattccagcgcgatagggctagagatgtttttaaacacgctagatccgcattttaaaaagtcttttcaagagagtttggaagacaatcaagtccgttaccacaatcaaatttatcaggctttagggtattcttttgagccgataaaaaacgaaagcgaaacaaaaaaagaa

SEQ ID NO: 1529 - DNA (genomic), 366 bp, Helicobacter pylori; double-stranded, circular
  misc_feature (B) LOCATION 1...366
  hypothetical: NO
  anti-sense: NO
agaagaagcctttattatgtgtttataaaatcgtatgccattttagcggaagcgacagcccgttttgcgggcgattatgcgacagagaatttaacaagccgtatcgctttgccttgctcagattatgtgggtcgtgtgataggcaaagacgggaaaaacattgaagcgtttaaaaagattagtggggtggatatagaatttagcgaagacagtagcgaattgtgcttgtccagtttcaatatttatcggcgtgaagtggcgagcgagacgattaaaattttaatagaagacggccgtatccagcctaacaggattgaagaggtttatcctaaaattcacccgcaacatggaaaaagaattgctttc

SEQ ID NO: 1530 - DNA (genomic), 600 bp, Helicobacter pylori; double-stranded, circular
  misc_feature (B) LOCATION 1...600
  hypothetical: NO
  anti-sense: NO
agaataataaaaggaaacattatgagcagcgggttaatttacatttcattagaagtcttggtagcgtgtttgatcaccgctctaatcatgtattatgtgatgaaaaagatctattacgctagagggcaagccattttaaaaggcgcttcagccaaagctaaattaatggaatttcaagcgaaatctttcgtggaagctgaagaaatgcgcatgaaaagccaagaatgcaagttgcaacagcaatatgaaaataagaatttgcaactccaaacccattttgataaaaaagaagcgcatttgaagcatttagaagcgcagcacaaagaatttgtaagagatgaaaaacgctatttggaaaaggaaaaaaaagagcttgaaaaagaacgccaaattttagaacaagagagggaaaattttaaaaaacagcgcgccatttgtaaagaagctcaagccaaagcgctagatgcgatgctcaattacatggcttataccaaagatgaaattaaaagcatgatcttagagcaattagaacaggaactagaagcgcaaaagagcgccttgatcaggcgttatgaagaagaagcctttattatgtgttta

SEQ ID NO: 1531 - DNA (genomic), 750 bp, Helicobacter pylori; double-stranded, circular
  misc_feature (B) LOCATION 1...750
  hypothetical: NO
  anti-sense: NO
aagacggccgtatccagcctaacaggattgaagaggtttatcctaaaattcacccgcaacatggaaaaagaattgctttctgaaggagagagcgtggtgctagaattagagcttggaactatggaagatgagcttaaaattttaataggcaaaatgcgttatcgctttagttttgggcaaaacgctttacagcattctaaagagatcgctcttttatccggcttgattgcagaacagcttgggggggataaaaaactcgccagaagagccggtattttgcatgatattggtaaagcgctcactcaagagcttgggagagaccatgtgaatttaggggttgaggtgtgcaagcgccataaagaagacccggttgtgatcaatgcgatttatgcccaccatgggcatgaagaaatcatgagcgtggagtgcgcgagcgtgtgcgcggctgatgcgctttctgcagggcgtccgggcgctaggagaaagagcgatgaagaatacgctaaacgcatgcaagctttagaagagatcgcgttagaatttgatggggtggaaaaggcgtatgcgatggagagcgggcgagaactaagagtgattgtcaaatccaaccaagtcagggacaatcaagtgcctattattgctagaaagatcgctaaaaggatagaagagagcactcagtatgtgggcgaagtgggcgtgcaagtggtgcgagaaaatcgtttcaaaacgaccgctacgctaagcaatgat

SEQ ID NO: 1532 - DNA (genomic), 1590 bp, Helicobacter pylori; double-stranded, circular
  misc_feature (B) LOCATION 1...1590
  hypothetical: NO
  anti-sense: NO
atgagcagcgggttaatttacatttcattagaagtcttggtagcgtgtttgatcaccgctctaatcatgtattatgtgatgaaaaagatctattacgctagagggcaagccattttaaaaggcgcttcagccaaagctaaattaatggaatttcaagcgaaatctttcgtggaagctgaagaaatgcgcatgaaaagccaagaatgcaagttgcaacagcaatatgaaaataagaatttgcaactccaaacccattttgataaaaaagaagcgcatttgaagcatttagaagcgcagcacaaagaatttgtaagagatgaaaaacgctatttggaaaaggaaaaaaaagagcttgaaaaagaacgccaaattttagaacaagagagggaaaattttaaaaaacagcgcgccatttgtaaagaagctcaagccaaagcgctagatgcgatgctcaattacatggcttataccaaagatgaaattaaaagcatgatcttagagcaactagaagaggaactagaagcgcaaaaaagcgccttgatcaggcgttatgaaaaagaagccaaagaagagggtaagaaaaaatcgtatgccattttagcggaagcgacagcccgttttgcgggcgattatgcgacagagaatttaacaagccgtatcgctttgccttgctcagattatgtgggtcgtgtgataggcaaagacgggaaaaacattgaagcgtttaaaaagattagtggggtggatatagaatttagcgaagacagtagcgaattgtgcttgtccagtttcaatatttatcggcgtgaagtggcgagcgagacgattaaaattttaatagaagacggccgtatccagcctaacaggattgaagaggtttatcatagagtcgcgcgcaacatggaaaaagaattgctttctgaaggagagagcgtggtgctagaattagagcttggaactatggaagatgagcttaaaattttaataggcaaaatgcgttatcgctttagttttgggcaaaacgctttacagcattctaaagaagtcgctcttttagccggcttgattgcagaacagcttgggggggataaaaaactcgccagaagagccggtattttgcatgatattggtaaagcgctcactcaagagcttgggagagaccatgtgaatttaggggttgaggtgtgcaagcgccataaagaagacccggttgtgatcaatgcgatttatgcccaccatgggcatgaagaaatcatgagcgtggagtgcgcgagcgtgtgcgcggctgatgcgctttctgcagggcgtccgggcgctaggagaaagagcgatgaagaatacgctaaacgcatgcaagctttagaagagatcgcgttagaatttgatggggtggaaaaggcgtatgcgatggagagcgggcgagaactaagagtgattgtcaaatccaaccaagtcagggacaatcaagtgcctattattgctagaaagatcgctaaaaggatagaagagagcactcagtatgtgggcgaagtgggcgtgcaagtggtgcgagaaaatcgtttcaaaacgaccgctacgctcaagcaatga

SEQ ID NO: 1533 - DNA (genomic), 345 bp, Helicobacter pylori; double-stranded, circular
  misc_feature (B) LOCATION 1...345
  hypothetical: NO
  anti-sense: NO
atggcaaccattcaaccattcaaccattcaaccattcaaccattcaaccattcaaccattcaaccattcaatcattcaatcattcaatcattcaatcattcaaccattcaagcaacgctaccttatttttataactatttatctttttacaaaaacctatttaaaaatcccctattttttattattcccccttttattaacccttttattaacccttttattaacccttttattaacccttttattaacccttttattaacccttttattaacccttttattaacccttttattaacccttttattaacccttttattaacccttttattaaccctttcatataa

SEQ ID NO: 1534 - DNA (genomic), 372 bp, Helicobacter pylori; double-stranded, circular
  misc_feature (B) LOCATION 1...372
  hypothetical: NO
  anti-sense: NO
gaatggcaaccattcaaccattcaaccattcaaccattcaaccattcaaccattcaaccattcaatcattcaatcattcaatcattcaatcattcaatcattcaatcattcaatcattcaaccattcaagcaacgctaccttatttttataactatttatctttttacaaaaacctatttaaaaatcccctattttttattattcccccttttattaacccttttattaacccttttattaacccttttattaacccttttattaacccttttattaacccttttattaacccttttattaacccttttattaacccttttattaacccttttattaacccttttattaacccttttattaaccctttcata

SEQ ID NO: 1535 - DNA (genomic), 414 bp, Helicobacter pylori; double-stranded, circular
  misc_feature (B) LOCATION 1...414
  hypothetical: NO
  anti-sense: NO
atcaaacgcatcattaaatcaaacgcatcattaaatcaattaaataccactagatacaataccccaagtcatctttttttcaaaaaaggggtaggaatggcaaccattcaaccattcaaccattcaaccattcaaccattcaaccattcaaccattcaaccattcaatcattcaatcattcaatcattcaatcattcaaccattcaagcaacgctaccttatttttataactatttatctttttacaaaaacctatttaaaaatcccctattttttattattcccccttttattaacccttttattaacccttttattaacccttttattaacccttttattaacccttttattaacccttttattaacccttttattaacccttttattaacccttttattaaccctttcata

SEQ ID NO: 1536 - DNA (genomic), 432 bp, Helicobacter pylori; double-stranded, circular
  misc_feature (B) LOCATION 1...432
  hypothetical: NO
  anti-sense: NO
atacaataccccaagtcatctttttttcaaaaaaggggtaggaatggcaaccattcaaccattcaaccattcaaccattcaaccattcaaccattcaaccattcaatcattcaatcattcaatcattcaatcattcaatcattcaatcattcaatcattcaatcattcaatcattcaaccattcaagcaacgctaccttatttttataactatttatctttttacaaaaacctatttaaaaatcccctattttttattattcccccttttattaacccttttattaacccttttattaacccttttattaacccttttattaacccttttattaacccttttattaacccttttattaacccttttattaacccttttattaacccttttattaacccttttattaacccttttattaaccctttcatataa

SEQ ID NO: 1537 - DNA (genomic), 525 bp, Helicobacter pylori; double-stranded, circular
  misc_feature (B) LOCATION 1...525
  hypothetical: NO
  anti-sense: NO
atcaaacgcatcattaaatcaaacgcatcattaaatcaattaaataccactagatacaataccccaagtcatctttttttcaaaaaaggggtaggaatggcaaccattcaaccattcaaccattcaaccattcaaccattcaaccattcaaccattcaaccattcaatcattcaatcattcaatcattcaatcattcaaccattcaagcaacgctaccttatttttataactatttatctttttacaaaaacctatttaaaaatcccctattttttattattcccccttttattaacccttttattaacccttttattaacccttttattaacccttttattaacccttttattaacccttttattaacccttttattaacccttttattaacccttttattaacccttttattaacccttttattaacccttttattaacccttttattaacccttttattaacccttttatttccccttcattaacccacgctacaacattttcaaaccatttgattccataa

SEQ ID NO: 1538 - DNA (genomic), 384 bp, Helicobacter pylori; double-stranded, circular
  misc_feature (B) LOCATION 1...384
  hypothetical: NO
  anti-sense: NO
atgcgtcagtattctcaatcagctcttaacactaaccatggggcgtgggggattctctttgatgtgagctctgcactagcgctagatgatcatgcccttttgcaaagtagcgctaatcggtggcaggagtgggtgtttaaagccatagatgagaacggggttattgctagcgcgatcactaggagcgatacgagcgattatcatggcggccctacaaagggcattaaggggatagcttataccaattttgcgcttcttgcgataactatatcaggcgaattgctttttgagaacgggtatgatttgtggggtagtggagccgggcaaaggctctctgtggcgtataacaaagccgcaacatggattctaaaccctgaaactttc

SEQ ID NO: 1539 - DNA (genomic), 384 bp, Helicobacter pylori; double-stranded, circular
  misc_feature (B) LOCATION 1...384
  hypothetical: NO
  anti-sense: NO
cggatgcgtcagtattctcaatcagctcttaacactaaccatggggcgtgggggattctctttgatgtgagctctgcactagcgctagatgatcatgcccttttgcaaagtagcgctaatcggtggcaggagtgggtgtttaaagccatagatgagaacggggttattgctagcgcgatcactaggagcgatacgagcgattatcatggcggccctacaaagggcattaaggggatagcttataccaattttgcgcttcttgcgataactatatcaggcgaattgctttttgagaacgggtatgatttgtggggtagtggagccgggcaaaggctctctgtggcgtataacaaagccgcaacatggattctaaaccctgaaact

SEQ ID NO: 1540 - DNA (genomic), 528 bp, Helicobacter pylori; double-stranded, circular
  misc_feature (B) LOCATION 1...528
  hypothetical: NO
  anti-sense: NO
atgaaaagatttgttttattcttgttattcatatgtgtttgcgtttgcgttcaagcttacgctgagcaagattacttttttagggattttaaatctatagatttgccccaaaaactccaccttgataaaaagctctcccaaacaatacagccatgcgcgcaacttaacgcatcaaaacactacactgctactggggttagagagcctgatgcctgcaccaagagttttaaaaaatccgctatggtttcctatgatttagcgctaggctatttagtgagccaaaacaaaccatacggcttaaaagctatagagattttaaacgcttgggctaatgagcttcaaagcgtggatacttatcaaagcgaggacaatatcaatttttacatgccttatatgaacatggcttattggtttgtcaaaaaagaatttcctagcccagaatatgaagatttcattagcggatgcgtcagtattctcaatcagctcttaacactaaccatggggcgtgggggattctctttgatgtga

SEQ ID NO: 1541 - DNA (genomic), 996 bp, Helicobacter pylori; double-stranded, circular
  misc_feature (B) LOCATION 1...996
  hypothetical: NO
  anti-sense: NO
atgaaaagatttgttttattcttgttattcatatgtgtttgcgtttgcgttcaagcttacgctgagcaagattacttttttagggattttaaatctatagatttgccccaaaaactccaccttgataaaaagctctcccaaacaatacagccatgcgcgcaacttaacgcatcaaaacactacactgctactggggttagagagcctgatgcctgcaccaagagttttaaaaaatccgctatggtttcctatgatttagcgctaggctatttagtgagccaaaacaaaccatacggcttaaaagctatagagattttaaacgcttgggctaatgagcttcaaagcgtggatacttatcaaagcgaggacaatatcaatttttacatgccttatatgaacatggcttattggtttgtcaaaaaagaatttcctagcccagaatatgaagatttcattaggcggatgcgtcagtattctcaatcagctcttaacactaaccatggggcgtgggggattctctttgatgtgagctctgcactagcgctagatgatcatgcccttttgcaaagtagcgctaatcggtggcaggagtgggtgtttaaagccatagatgagaacggggttattgctagcgcgatcactaggagcgatacgagcgattatcatggcggccctacaaagggcattaaggggatagcttataccaattttgcgcttcttgcgataactatatcaggcgaattgctttttgagaacgggtatgatttgtggggtagtggagccgggcaaaggctctctgtggcgtataacaaagccgcaacatggattctaaaccctgaaactttcccctattttcagcctaacctcattggggtgcataacaacgcctatttcattattttagccaaacattattctagccctagcgcggatgagcttttagagcaaggcgatttgcatgaagatggcttcaggctgaaactccgatcgccatga

SEQ ID NO: 1542 - DNA (genomic), 219 bp, Helicobacter pylori; double-stranded, circular
  misc_feature (B) LOCATION 1...219
  hypothetical: NO
  anti-sense: NO
aaaaaatttggtttaggggtgtatttgcttcttttaggtattttgggcggctctttgatcattctaggagcgatagtcgcgcccattgttttcaaagcttcaagcattttacctgaattgaatctgactccctttgagagtgggaaactcataggcgcaaatctttgtgcgtttcaattatgttttaggcgcgatcggttttgtggtgttactttatga

SEQ ID NO: 1543 - DNA (genomic), 315 bp, Helicobacter pylori; double-stranded, circular
  misc_feature (B) LOCATION 1...315
  hypothetical: NO
  anti-sense: NO
gcgcaaatctttgtgcgtttcaattatgttttaggcgcgatcggttttgtggtgttactttatgaaatcatttcgtttatctactataaaagatcgttagtgtatttgatccttggcgtggcgataggggcgttgtgtttgctctttgttttttattacacgccttatattttaaacgctcaaaaggtgggtgaagttgcgcttcaaagtgctgaatttgcccgctcgcacgctcaaagcgaatggctgtttaaggaattgtttgtgctggtgtgtgctttgtttttttggcgtttgtttgggaaaaatgcgctt

SEQ ID NO: 1544 - DNA (genomic), 474 bp, Helicobacter pylori; double-stranded, circular
  misc_feature (B) LOCATION 1...474
  hypothetical: NO
  anti-sense: NO
atgaaaaaatttggtttaggggtgtatttgcttcttttaggtattttgggcggctctttgatcattctaggagcgatagtcgcgcccattgttttcaaagcttcaagcattttacctgaattgaatctgactccctttgagagtgggaaactcatggcgcaaatctttgtgcgtttcaattatgttttaggcgcgatcggttttgtggtgttactttatgaaatcatttcgtttatctactataaaagatcgttagtgtatttgatccttggcgtggcgataggggcgttgtgtttgctctttgttttttattacacgccttatattttaaacgctcaaaaggtgggtgaagttgcgcttcaaagtgctgaatttgcccgctcgcacgctcaaagcgaatggctgtttaaggaattgtttgtgctggtgtgtgctttgtttttttggcgtttgtttgggaaaaatgcgctttag

SEQ ID NO: 1545 - DNA (genomic), 258 bp, Helicobacter pylori; double-stranded, circular
  misc_feature (B) LOCATION 1...258
  hypothetical: NO
  anti-sense: NO
ttataccagaacgacaagggttttaaaacagaactgcgcattttgagcgtgtttatcgtggaatttttggtgaatattctagggtttatgttggctcatatgcttcatttctggtttttaaggtgcgttaaagctttagcgtggctcatgaaaacttttgataggcgccgttattttgacgctaaggccaatttggattttgtgtttggagattctaaaagcgaagaagagaaaaaaaggatcattaaaaaaggggta

SEQ ID NO: 1546 - DNA (genomic), 798 bp, Helicobacter pylori; double-stranded, circular
  misc_feature (B) LOCATION 1...798
  hypothetical: NO
  anti-sense: NO
aaacttttgataggcgccgttattttgacgctaaggccaatttggattttgtgtttggagattctaaaagcgaagaagagaaaaaaaggatcattaaaaaaggggtatgaaaattttgctttcattattttagaaaccattagagtgatctttatccctaaagatgaatacgacgctcgtttcacgctcatcaatgaagaaaacgtgtggaagtccttaaacaaggaaggccaagcgatcactttgtgcatgcattttggctattgggaagcggtaggcacgactttggcgcaatattatgaaaattatggtagggggtgtttggggcgtttgactaaattcgctcccatcaatcacatgatcatgagtaggcgagaggcgtttggggtgcgttttgtcaataaaataggggcgatgaaagaactcattaaaatgtataatcaaggcaatggcctggtggggattttagtggatcaaaatgtcgtgcctaaagacggggtggtggtgaaatttttcaataaagacgctacgaccaccacgatcgcttctattttgtcgcgccgttacaatatagacattcagccggtattcattgattttaacgatgattattcgcattacacagcgacttattacccaagtatccgctctcaaatcactgataacgcgcaaaacgatattttagaatgcacgcaagcccaagcgagtttgtgcgaagaggtgattagaaaccacccggaaagttatttttggttccacaggcgttttaaaagcacccaccctgagatttatcaaaga

SEQ ID NO: 1547 - DNA (genomic), 987 bp, Helicobacter pylori; double-stranded, circular
  misc_feature (B) LOCATION 1...987
  hypothetical: NO
  anti-sense: NO
atgacttataaagaacgactcatacacgaaaaaatattaaaccaaaacgacaagggttttaaaacagaactgcgcattttgagcgtttttatcgtggaatttttggtgaatattctagggtttatgttggctaaaatgcctcatttttggtttttaaggtgcgttaaagctttagcgtggctcatgaaaacttttgataggcgccgttattttgacgctaaggccaatttggattttgtgtttggggattctaaaagcgaagaagaaaaaaaaaggatcattaaaaaggggtatgaaaattttgctttcattattttagaaaccattagagtgatctttatccctaaagatgaatacgacgctcgtttcacgctcatcaatgaagaaaacgtgtggaagtccttaaacaaggaaggccaagcgatcactttgtgcatgcattttggctattgggaagcggtaggcacgactttggcgcaatattatgaaaattatggtagggggtgtttggggcgtttgactaaattcgctcccatcaatcacatgatcatgagtaggcgagaggcgtttggggtgcgttttgtcaataaaataggggcgatgaaagaactcattaaaatgtataatcaaggcaatggcctggtggggattttagtggatcaaaatgtcgtgcctaaagacggggtggtggtgaaatttttcaataaagacgctacgaccaccacgatcgcttctattttgtcgcgccgttacaatatagacattcagccggtattcattgattttaacgatgattattcgcattacacagcgacttattacccaagtatccgctctcaaatcactgataacgcgcaaaacgatattttagaatgcacgcaagcccaagcgagtttgtgcgaagaggtgattagaaaccacccggaaagttatttttggttccacaggcgttttaaaagcacccaccctgagatttatcaaagatag

SEQ ID NO: 1548 - DNA (genomic), 174 bp, Helicobacter pylori; double-stranded, circular
  misc_feature (B) LOCATION 1...174
  hypothetical: NO
  anti-sense: NO
aaacgctttggggtgggggggacgatcagagccttgagtaaggtgctgatgaaacgctttgattaccctatagattctttgcatggctatgaaatagatgcgcataaaaatttagcgttcattgaaaaaatcgtcatgctcaaagaagacaaattacgactttttaggggtgaa

SEQ ID NO: 1549 - DNA (genomic), 213 bp, Helicobacter pylori; double-stranded, circular
  misc_feature (B) LOCATION 1...213
  hypothetical: NO
  anti-sense: NO
atgcggtcggatgttgaagttttatcgcctttgcataaaatagatgaaaaataccttttccatttaaagattgcgggggaattggcgagcatgggtaagattttaagtgtatatttagcccacaagcacagcgcgtatttcattttaaacgctttgagttacggctttagccaccaggatagggcgatcatttgcttattgggcgcaatttag

SEQ ID NO: 1550 - DNA (genomic), 213 bp, Helicobacter pylori; double-stranded, circular
  misc_feature (B) LOCATION 1...213
  hypothetical: NO
  anti-sense: NO
atgagtgcgatgatgccaagccttttgaccttgcagtggctgagttttatcctttctttagccgaaaatttgtgcctgacagacagccatcatttaaaatacacgctagaaaaaaacaagcttgtgatccattctaatgatgcgctttacttggctaaagaaatgctccccaaactcattaagcccattcctttgacgatagagtttgcttga

SEQ ID NO: 1551 - DNA (genomic), 237 bp, Helicobacter pylori; double-stranded, circular
  misc_feature (B) LOCATION 1...237
  hypothetical: NO
  anti-sense: NO
aaagcactgccacaaggtcgaaacagaatgcggtcggatgttgaagttttatcgcctttgcataaaatagatgaaaaataccttttccatttaaagattgcgggggaattggcgagcatgggtaagattttaagtgtatatttagcccacaagcacagcgcgtatttcattttaaacgctttgagttacggctttagccaccaggatagggcgatcatttgcttattgggcgcaatt

SEQ ID NO: 1552 - DNA (genomic), 303 bp, Helicobacter pylori; double-stranded, circular
  misc_feature (B) LOCATION 1...303
  hypothetical: NO
  anti-sense: NO
gttacggctttagccaccaggatagggcgatcatttgcttattgggcgcaatttagccataaaaaaatccttaaagactacgttatcgcccacatgagtgcgatgatgccaagccttttgaccttgcagtggctgagttttatcctttctttagccgaaaatttgtgcctgacagacagccatcatttaaaatacacgctagaaaaaaacaagcttgtgatccattctaatgatgcgctttacttggctaaagaaatgctccccaaactcattaagcccattccttggacgatagagtttgct

SEQ ID NO: 1553 - DNA (genomic), 321 bp, Helicobacter pylori; double-stranded, circular
  misc_feature (B) LOCATION 1...321
  hypothetical: NO
  anti-sense: NO
aaaaggcttgcggtttgcaaatcaaaatcattgatgggcaaaaagaagcgctctatggtgggatcgcgtgcgcgaatttgctgcataaaaattcagggcatcacgatagacattggggggggtagcaccgagtgcgcgttgattgagaaaggtaagattaaggacttaatctcgcttgatgtcgggacgattcgcattaaagaaatgtttctagacaaagacttagatgtcaaattggctaaagcctttatccaaaaagaggtctctaaactgccttttaagcataaaaacgctttggggtgggggggacgatcagagcct

SEQ ID NO: 1554 - DNA (genomic), 333 bp, Helicobacter pylori; double-stranded, circular
  misc_feature (B) LOCATION 1...333
  hypothetical: NO
  anti-sense: NO
ttgatcaatttattgccccaccattaccataaattcccccccaatatcaacccctctctcatctctctaaaagatcgctttttaccccatgaaaagcacagccaaaaggtcaaaaaagaatgcgtcaacttgtttgaagttttatcgcctttgcataaaatagatgaaaaataccttttccatttaaagattgcgggggaattggcgagcatgggtaagattttaagtgtatatttagcccacaagcacagcgcgtatttcattttaaacgctttgagttacggctttagccaccaggatagggcgatcatttgcttattgggcgcaatttag

SEQ ID NO: 1555 - DNA (genomic), 423 bp, Helicobacter pylori; double-stranded, circular
  misc_feature (B) LOCATION 1...423
  hypothetical: NO
  anti-sense: NO
atggctaaaatcacaaccgtgattgacataggctctaattcagtgcgtttggctgtctttaaaaagacgagccagtttgggttttacttgctttttgagactaagtccaaggttaggatttcagagggctgttatgcgtttaaaggggttttacaagaaatccccatgcaacgagccgttaaagccttgagcgaatttaaagaaatcgccctcaaatacaaaagcaaaaaaatcctgtgcgtggcgacctcagcggtgcgcgatgcccctaatcggttagagtttgtagcgagggtgaaaaaggcttgcggtttgcaaatcaaaatcattgatgggcaaaaagaagcgctctatggtgggatcgcgtgcgcgaatttgctgcataaaaattcagggcatcacgatagacattggagggggtag

SEQ ID NO: 1556 - DNA (genomic), 429 bp, Helicobacter pylori; double-stranded, circular
  misc_feature (B) LOCATION 1...429
  hypothetical: NO
  anti-sense: NO
aggctagcaatggctaaaatcacaaccgtgattgacataggctctaattcagtgcgtttggctgtctttaaaaagacgagccagtttgggttttacttgctttttgagactaagtccaaggttaggatttcagagggctgttatgcgtttaaaggggttttacaagaaatccccatgcaacgagccgttaaagccttgagcgaatttaaagaaatcgccctcaaatacaaaagcaaaaaaatcctgtgcgtggcgacctcagcggtgcgcgatgcccctaatcggttagagtttgtagcgagggtgaaaaaggcttgcggtttgcaaatcaaaatcattgatgggcaaaaagaagcgctctatggtgggatcgcgtgcgcgaatttgctgcataaaaattcagggcatcacgatagacattgggggggg

SEQ ID NO: 1557 - DNA (genomic), 771 bp, Helicobacter pylori; double-stranded, circular
  misc_feature (B) LOCATION 1...771
  hypothetical: NO
  anti-sense: NO
ttgatgggcaaaaagaagcgctctatggtgggatcgcgtgcgcgaatttgctgcataaaaattcagggcatcacgatagacattggagggggtagcaccgagtgcgcgttgattgagaaaggtaagattaaggacttaatctcgcttgatgtcgggacgattcgcattaaagaaatgtttctagacaaagacttagatgtcaaattggctaaagcctttatccaaaaagaggtctctaaactgccttttaagcataaaaacgcctttggggtgggggggacgatcagagccttgagtaaggtgctgatgaaacgctttgattaccctatagattctttgcatggctatgaaatagatgcgcataaaaatttagcgttcattgaaaaaatcgtcatgctcaaagaagacaaattacggcttttaggggtgaatgaagagcgtttggatagcattaggagcggggcgttgattttatcagtcgtgttagagcatttgaaaacttccttgatgatcactagcggggtaggggtgagagagggcgtgtttttgagcgatttattgcgccaccattaccataaattcccccccaatatcaacccctctctcatctctctaaaagatcgctttttaccccatgaaaagcacagccaaaaggtcaaaaaagaatgcgtgaaattgtttgaagttttatcgcctttgcataaaatagatgaaaaataccttttccatttaaagattgcgggggaattggcgagcatgggtaagatttaa

SEQ ID NO: 1558 - DNA (genomic), 1455 bp, Helicobacter pylori; double-stranded, circular
  misc_feature (B) LOCATION 1...1455
  hypothetical: NO
  anti-sense: NO
atggctaaaatcacaaccgtgattgacataggctctaattcagtgcgtttggctgtctttaaaaagacgagccagtttgggttttacttgctttttgagactaagtccaaggttaggatttcagagggctgttatgcgtttaaaggggttttacaagaaatccccatgcaacgagccgttaaagccttgagcgaatttaaagaaatcgccctcaaatacaaaagcaaaaaaatcctgtgcgtggcgacctcagcggtgcgcgatgcccctaatcggttagagtttgtagcgagggtgaaaaaggcttgcggtttgcaaatcaaaatcattgatgggcaaaaagaagcgctctatggtgggatcgcgtgcgcgaatttgctgcataaaaattcagggatcacgatagacattggagggggtagcaccgagtgcgcgttgattgagaaaggtaagattaaggacttaatctcgcttgatgtcgggacgattcgcattaaagaaatgtttctagacaaagacttagatgtcaaattggctaaagcctttatccaaaaagaggtctctaaactgccttttaagcataaaaacgcctttggggtgggggggacgatcagagccttgagtaaggtgctgatgaaacgctttgattaccctatagattctttgcatggctatgaaatagatgcgcataaaaatttagcgttcattgaaaaaatcgtcatgctcaaagaagacaaattacggcttttaggggtgaatgaagagcgtttggatagcattaggagcggggcgttgattttatcagtcgtgttagagcatttgaaaacttccttgatgatcactagcggggtaggggtgagagagggcgtgtttttgagcgatttattgcgccaccattaccataaattcccccccaatatcaacccctctctcatctctctaaaagatcgctttttaccccatgaaaagcacagccaaaaggtcaaaaaagaatgcgtgaaattgtttgaagttttatcgcctttgcataaaatagatgaaaaataccttttccatttaaagattgcgggggaattggcgagcatgggtaagattttaagtgtatatttagcccacaagcacagcgcgtatttcattttaaacgctttgagttacggctttagccaccaggatagggcgatcatttgcttattggcgcaatttagccataaaaaaatccctaaagacaacgctatcgcccacatgagtgcgatgatgccaagccttttgaccttgcagtggctgagttttatcctttctttagccgaaaatttgtgcctgacagacagccatcatttaaaatacacgctagaaaaaaacaagcttgtgatccattctaatgatgcgctttacttggctaaagaaatgctccccaaactcattaagcccattcctttgacgatagagtttgcttga

SEQ ID NO: 1559 - DNA (genomic), 675 bp, Helicobacter pylori; double-stranded, circular
  misc_feature (B) LOCATION 1...675
  hypothetical: NO
  anti-sense: NO
atgattagattaaaaggtttgaataaaactttaaaaacaagcttattagctggggttttactaggtgctactgctcccttaatggcaaagcctttattaagcgatgaagacttattgaaacgagtaaaactacacaatatcaaagaagatacgctgactagctgtaatgctaaggtggacggctctcaatacttgaatagtggttggaatttatctaaagaatttccgcaagaatatagagaaaagatttttgaatgcgtagaagaagaaaaacataaacaagcccttaatttaatcaataaagaagacactaaagataaagaagaacttgcaaaaaaaatcaaagaaattaaagaaaaagctaaagttttaaggcaaaaatttatggcttttgaaatgaaagaacactctaaagaattcccaaataaaaagcaacttcaaaccatgcttgagaacgcttttgataatggagctgaaagttttattgatgattggcacgaacgctttgggggtataagtagagagaatacttataaagcacttggcattaaagaatatagtgatgaaggaaagatattgcctttggcgaaagaagttatattagacaatataaaaaagattttgaagaaagcacttatgatactagacaacccttatctgctatggctagtatga

SEQ ID NO: 1560 - DNA (genomic), 1014 bp, Helicobacter pylori; double-stranded, circular
  misc_feature (B) LOCATION 1...1014
  hypothetical: NO
  anti-sense: NO
atgattagattaaaaggtttgaataaaactttaaaaacaagcttattagctggggttttactaggtgctactgctcccttaatggcaaagcctttattaagcgatgaagacttattgaaacgagtaaaactacacaatatcaaagaagatacgctgactagctgtaatgctaaggtggacggctctcaatacttgaatagtggttggaatttatctaaagaatttccgcaagaatatagagaaaagatttttgaatgcgtagaagaagaaaaacataaacaagcccttaatttaatcaataaagaagacactgaagataaagaagaacttgcaaaaaaaatcaaagaaattaaagaaaaagctaaagttttaaggcaaaaatttatggcttttgaaatgaaagaacactctaaagaattcccaaataaaaagcaacttcaaaccatgcttgagaacgcttttgataatggagctgaaagttttattgatgattggcacgaacgctttgggggtataagtagagagaatacttataaagcacttggcattaaagaatatagtgatgaaggaaagatattagcctttggcgaaagaagttatattagacaatataaaaaagattttgaagaaagcacttatgatactagacaaaccttatctgctatggctaatatgagtggcgaaaacgattataaaattacttggttaaaacccaaatatcagctccatagttcaaataatattaaacccttaatgtcaaacacagagttgttaaatatgatagagctaaccaatatcaaaaaagaatatgttatgggctgtaatatggaaatagatggttctaaatatcccattcataaagattggggattttttggtaaggcaaaagtcccagaaacttggagaaataagatttgggaatgtattaagaataaagtaaagtcctatgacaacactaccgctgaaataggaatagtttggaaaaaaaatacttattctatctctcatcactaa

SEQ ID NO: 1561 - DNA (genomic), 1053 bp, Helicobacter pylori; double-stranded, circular
  misc_feature (B) LOCATION 1...1053
  hypothetical: NO
  anti-sense: NO
atgataagtgagattattaagtttcaattaaaaggaataaaaatgattagattaaaaggtttgaataaaactttaaaaacaagcttattagctggggttttactaggtgctactgctcccttaatggcaaagcctttattaagcgatgaagacttattgaaacgagtaaaactacacaatatcaaagaagatacgctgactagctgtaatgctaaggtggacggctctcaatacttgaatagtggttggaatttatctaaagaatttccgcaagaatatagagaaaagatttttgaatgcgtagaagaagaaaaacataaacaagcccttaatttaatcaataaagaagacactgaagataaagaagaacttgcaaaaaaaatcaaagaaattaaagaaaaagctaaagttttaaggcaaaaatttatggcttttgaaatgaaagaacactctaaagaattcccaaataaaaagcaacttcaaaccatgcttgagaacgcttttgataatggagctgaaagttttattgatgattggcacgaacgctttgggggtataagtagagagaatacttataaagcacttggcattaaagaatatagtgatgaaggaaagatattagcctttggcgaaagaagttatattagacaatataaaaaagattttgaagaaagcacttatgatactagacaaaccttatctgctatggctaatatgagtggcgaaaacgattataaaattacttggttaaaacccaaatatcagctccatagttcaaataatattaaacccttaatgtcaaacacagagttgttaaatatgatagagctaaccaatatcaaaaaagaatatgttatgggctgtaatatggaaatagatggttctaaatatcccattcataaagattggggattttttggtaaggcaaaagtcccagaaacttggagaaataagatttgggaatgtattaagaataaagtaaagtcctatgacaacactaccgctgaaataggaatagtttggaaaaaaaatacttattctatctctcatcac

SEQ ID NO: 1562 - DNA (genomic), 1119 bp, Helicobacter pylori; double-stranded, circular
  misc_feature (B) LOCATION 1...1119
  hypothetical: NO
  anti-sense: NO
cttaatactgataaaataactaaatacttgattattattgatatatttttaaaactttatgttataatgataagtgagattattaagtttcaattaaaaggaataaaaatgattagattaaaaggtttgaataaaactttaaaaacaagcttattagctggggttttactaggtgctactgctcccttaatggcaaagcctttattaagcgatgaagacttattgaaacgagtaaaactacacaatatcaaagaagatacgctgactagctgtaatgctaaggtggacggctctcaatacttgaatagtggttggaatttatctaaagaatttccgcaagaatatagagaaaagatttttgaatgcgtagaagaagaaaaacataaacaagcccttaatttaatcaataaagaagacactaaagataaagaagaacttgcaaaaaaaatcaaagaaattaaagaaaaagctaaagttttaaggcaaaaatttatggcttttgaaatgaaagaacactctaaagaattcccaaataaaaagcaacttcaaaccatgcttgagaacgcttttgataatggagctgaaagttttattgatgattggcacgaacgctttgggggtataagtagagagaatacttataaagcacttggcattaaagaatatagtgatgaaggaaagatattagcctttggcgaaagaagttatattagacaatataaaaaagattttgaagaaagcacttatgatactagacaaaccttatctgctatggctaatatgagtggcgaaaacgattataaaattacttggttaaaacccaaatatcagctccatagttcaaataatattaaacccttaatgtcaaacacagagttgttaaatatgatagagctaaccaatatcaaaaaagaatatgttatgggctgtaatatggaaatagatggttctaaatatcccattcataaagattggggattttttggtaaggcaaaagtcccagaaacttggagaaataagatttgggaatgtattaagaataaagtaaagtcctatgacaacactaccgctgaaataggaatagtttggaaaaaaaatacttattctatctctcatcac

SEQ ID NO: 1563 - DNA (genomic), 663 bp, Helicobacter pylori; double-stranded, circular
  misc_feature (B) LOCATION 1...663
  hypothetical: NO
  anti-sense: NO
agccttgatcgcttcttttggagccaagtagttttgaaccaagttgaattactctctccagctggtaatttaaaaaaacttaaaatcgctctcaactatggggctgatgcggtttatgggggagtgagccatttttctttacgcaatcgtgcaggcaaggaattcactctagagacctttaaagaagggattgactacgcccatgcgttggataaaaaagtctatgcgaccatcaatggtttccctttcaattcacagctcaaacttttagaagagcacctttataaaatggcagagctagagccagacgcttttattatcgctgcgcctggtgtcatcaagctcgcttcaaaaatcgccccgcatattcctgtccatttatccacgcaagcgaatgttttaaacacgctagatgcgcaagtgttttatgatttaggggttaaacgcattgtgtgcgctagggaattgagcctgaatgatgcggttgagattaaaaaagccttacccgatttagaattagaaatctttgtgcatgggagcatgtgctttgccttttcagggcgttgcttgatttcggctttacaaaaggggcgcgtgcctaataaagggagttgcgcgaatgattgccggtttgattatgaatattatgttgaaaaaccccga

SEQ ID NO: 1564 - DNA (genomic), 669 bp, Helicobacter pylori; double-stranded, circular
  misc_feature (B) LOCATION 1...669
  hypothetical: NO
  anti-sense: NO
ttgaaccaagttgaattactctctccagctggtaatttaaaaaaacttaaaatcgctctcaactatggggctgatgcggtttatgggggagtgagccatttttctttacgcaatcgtgcaggcaaggaattcactctagagacctttaaagaagggattgactacgcccatgcgttggataaaaaagtctatgcgaccatcaatggtttccctttcaattcacagctcaaacttttagaagagcacctttataaaatggcagagctagagccagacgcttttattatcgctgcgcctggtgtcatcaagctcgcttcaaaaatcgccccgcatattcctgtccatttatccacgcaagcgaatgttttaaacacgctagatgcgcaagtgttttatgatttaggggttaaacgcattgtgtgcgctagggaattgagcctgaatgatgcggttgagattaaaaaagccttacccgatttagaattagaaatctttgtgcatgggagcatgtgctttgccttttcagggcgttgcttgatttcggctttacaaaaggggcgcgtgcctaatagagggagttgcgcgaatgattgccggtttgattatgaatattatgtgaaaaaccccgataacggcgtgatgatgaggttggttgaagaagcggcgtag

SEQ ID NO: 1565 - DNA (genomic), 573 bp, Helicobacter pylori; double-stranded, circular
  misc_feature (B) LOCATION 1...573
  hypothetical: NO
  anti-sense: NO
ttgaatctctctggtcatatcgctgaaattttaagttccaacgccattagtgcgcttaagattgaagggcgcaccaagtccagttactacgctgcgcaaaccacgcgcatctatcgtttagcggttgatgatttttaccataacaccttaaagccgagtttttatgctagcgaattgaacacgcttaaaaacaggggttttacggacggctatttgatgcgaaggccttttgaaagattggatactcaaaaccaccaaacagccattagcgaaggggattttcaagtcaatggcgaaataaccgaagacgggcgtttttttgcatgcaaattcaccacgaccactaacaccgcttatgaaatcatcgctcccaaaaatgcggctatcacgcccatagttaatgacattggcaagatttatacctttgaaaaacgctcttatttagtgctttataaaatccttttagaaaataacaccgagttagaaactatccatagcgggaatgtgaatttagtgcgactgcccgcacccttaccggcttttagttttttacgcacccaagtcagagtctaa

SEQ ID NO: 1566 - DNA (genomic), 573 bp, Helicobacter pylori; double-stranded, circular; identical to SEQ ID NO: 1565
  misc_feature (B) LOCATION 1...573
  hypothetical: NO
  anti-sense: NO

SEQ ID NO: 1567 - DNA (genomic), 729 bp, Helicobacter pylori; double-stranded, circular
  misc_feature (B) LOCATION 1...729
  hypothetical: NO
  anti-sense: NO
tttcggctttacaaaaggggcgcgtgcctaataaagggagttgcgcgaatgattgccggtttgattatgaatattatgttgaaaaaccccgataacggcgtgatcatgaagttggttgacaaaaaaggcgtaggcacgcatatttttaacgctaaagatttgaatctctctggtcatatcgctgaaattttaagttccaacgccattagtgcgcttaagattgaagggcgcaccaagtccagttactacgctgcgcaaaccacgcgcatctatcgtttagcggttgatgatttttaccataacaccttaaagccgagtttttatgctagcgaattgaacacgcttaaaaacaggggttttacggacggctatttgatgcgaaggccttttgaaagattggatactcaaaaccaccaaacagccattagcgaaggggattttcaagtcaatggcgaaataaccgaagacgggcgtttttttgcatgcaaattcaccacgaccactaacaccgcttatgaaatcatcgctcccaaaaatgcggctatcacgcccatagttaatgacattggcaagatttatacctttgaaaaacgctcttatttagtgctttataaaatccttttagaaaataacaccgagttagaaactatccatagcgggaatgtgaatttagtgcgactgcccgcacccttaccggcttttagttttttacgcacccaagtcagagtc

SEQ ID NO: 1568 - DNA (genomic), 1239 bp, Helicobacter pylori; double-stranded, circular
  misc_feature (B) LOCATION 1...1239
  hypothetical: NO
  anti-sense: NO
atggaatcagtaaaaacagtaaaaacaaataaagttggcaaaaacacagagacagctaacacagaggcaagtaaagagactcattttaaacaagcgagtgccattacaaatacgctccgatcaattggtgggatttttacaaaaattgcaaagaaagttagagaacttgtgaaaaaacatcccaagaaaagcagtgtggcattagtagtattgacccatattgcgtgcaagagggcaaaagaattggacgataaagtccaagataaatccaaacaagctgaaaaagaaaatcaaatcaattggtggaaatattcaggattaacaatagcggcaagtttattattagccgcttgtagcactggtgatattgataaacaaatagaactagaacaagaaaaaaaggaagcaaataagagtgggataaagttagaacaagaaagacagaaaacagaacaagaaagacagaagacaaataagagtgagatagagttagaacaagaaagacaaaaaacaaacaagagtgggatagaactcgctaatagtcaaataaaagcagaacaagaaagacaaaagacagaacaagaaaaacaaaaagcaaataagagtgagatagagttagaacagcaaaaacaaaagacaattaatacacaaagagatttgattaaagaacagaaagatttcattaaagaaacagaacaaaattgccaagaaaaacatggccaattgtttattaaaaaagcaagaattaagaccggtattactactggtattgccatagaaatagaagctgaatgcaaaacccctaaacctgcaaaaaccaatcaaacccctatccagccaaaacacctcccaaactctaaacaaccccgctctcaaagaggatcaaaagcgcaagagcttatcgcttatttgcaaaaagagctagaatctctgccctattcgcaaaaagctatcgctaaacaagtggatttttataaaccaagttctatcgcttatttagaactagaccctagagattttaaggttacagaagaatggcaaaaagaaaatttaaaaatacgctctaaagctcaagctaaaatgcttgaaatgagaaacccacaagcccaccttccaacctctcaaagccttttgttcgttcaaaaaatatttgctgatattaataaagaaatagaagcagttgctaatactgaaaagaaaacagaaaaagcgggttatggttatagtaaaaggatgtag

SEQ ID NO: 1569 - DNA (genomic), 1269 bp, Helicobacter pylori; double-stranded, circular
  misc_feature (B) LOCATION 1...1269
  hypothetical: NO
  anti-sense: NO
tgggtaagattgttttttgaaaaaaggttggtaatggaatcagtaaaaacagtaaaaacaaataaagttggcaaaaacacagagacagctaacacagaggcaagtaaagagactcattttaaacaagcgagtgccattacaaatacgctccgatcaattggtgggatttttacaaaaattgcaaagaaagttagagaacttgtgaaaaaacatcccaagaaaagcagtgtggcattagtagtattgacccatattgcgtgcaagagggcaaaagaattggacgataaagtccaagataaatccaaacaagctgaaaaagaaaatcaaatcaattggtggaaatattcaggattaacaatagcggcaagtttattattagccgcttgtagcactggtgatattgataaacaaatagaactagaacaagaaaaaaaggaagcaaataagagtgggatagagttagaacaagaaagacagaaaacagaacaagaaagacagaagacaaataagagtgagatagagttagaacaagaaagacaaaaaacaaacaagagtgggatagaactcgctaatagtcaaataaaagcagaacaagaaagacaaaagacagaacaagaaaaacaaaaagcaaataagagtgagatagagttagaacagcaaaaacaaaagacaattaatacacaaagagatttgattaaagaacagaaagatttcattaaagaaacagaacaaaattgccaagaaaaacatggccaattgtttattaaaaaagcaagaattaagaccggtattactactggtattgccatagaaatagaagctgaatgcaaaacccctaaacctgcaaaaaccaatcaaacccctatccagccaaaacacctcccaaactctaaacaaccccgctctcaaagaggatcaaaagcgcaagagcttatcgcttatttgcaaaaagagctagaatctctgccctattcgcaaaaagctatcgctaaacaagtggatttttataggccaagttctatcgcttatttagaactagaccctagagattttaaggttacagaagaatggcaaaaagaaaatttaaaaatacgctctaaagctcaagctaaaatgcttgaaatgagaaacccacaagcccaccttccaacctctcaaagccttttgttcgttcaaaaaatatttgctgatattaataaagaaatagaagcagttgctaatactgaaaagaaaacagaaaaagcgggttatggttatagtaaaaggatg

SEQ ID NO: 1570 - DNA (genomic), 381 bp, Helicobacter pylori; double-stranded, circular
  misc_feature (B) LOCATION 1...381
  hypothetical: NO
  anti-sense: NO
ttggtttcagaatactggttaaaattcttcacgcgctctttttctaaatcaaccatgctctttaaaaccctcttgcggtcttttttcacattccctgtggagctttcagaaaacataacattgggatcaactgtagtgttaatagtagcagaagccgtttctgctctcaacaaaaaagtcgtagccgctaaaaaaaataaaattcgcttcacaccaaactcctatatccataaccgcaacaaaaacagacgctattcttcattaagccctcttttaaaatcttcttctatttataaaaacccacctagaattcaagctattttgattatcttaaaatacagactttcaaagggtatttatcatttgggtatgatactataa

SEQ ID NO: 1571 - DNA (genomic), 489 bp, Helicobacter pylori; double-stranded, circular
  misc_feature (B) LOCATION 1...489
  hypothetical: NO
  anti-sense: NO
caaatcttttgctccacgcaatcttccaaactccccttaaagaaagctccaaaagcggataaatcgcccttactcatcttggtttcagaatactggttaaaattcttcacgcgctctttttctaaatcaaccatgctctttaaaaccctcttgcggtcttttttcacattccctgtggagctttcagaaaacataacattgggatcaactgtagtgttaatagtagcagaagccgtttctgctctcaacaaaaaagtcgtagccgctaaaaaaaataaaattcgcttcacaccaaactcctatatccataaccgcaacaaaaacagacgctattcttcattaagccctcttttaaaatcttcttctatttgtaaaaacccacctagaattcaagctattttgattatcttaaaatacagactttcaaagggttttaatcctgtggtggtgatacttaggatccaaaaaatgcggactctccaaaaactt

SEQ ID NO: 1572 - DNA (genomic), 261 bp, Helicobacter pylori; double-stranded, circular
  misc_feature (B) LOCATION 1...261
  hypothetical: NO
  anti-sense: NO
atgaatgcattgaaaaaattaagtttttgcgccttgttatccctaggcctcttcgctcaaacagtgcatgctcagcatttaaaggacacgattaactatcctgattggcttaaaatcaatctttttgataaaaagaacccgcccaatcaatatgtcggatcggcttcaatttctggtaaaaggaacgatttttattccaattacatcccctatgatgacaaattgccccctgaaagaacgctgaagaaatcgctcttttaa

SEQ ID NO: 1573 - DNA (genomic), 309 bp, Helicobacter pylori; double-stranded, circular
  misc_feature (B) LOCATION 1...309
  hypothetical: NO
  anti-sense: NO
atgaacgcttacagcactttagaaagcgctttactcactaaaatgtgcaatcgcattgttaaagcgcttcaagttaaaaataatgttatcagccatttattcgggtttgttgattttttaacgtctaaatccattttggctaaaaggttcgtggataccaccaaccatcgtgtgtatgtcatggtgcaattccctttcattcagcctgaagacttaatcgcttactttaaagccaaacgcatcgacctttctttagcgagcgctaccaatctcagcgccattttaaacagggcgttgttccacctctaa

SEQ ID NO: 1574 - DNA (genomic), 372 bp, Helicobacter pylori; double-stranded, circular
  misc_feature (B) LOCATION 1...372
  hypothetical: NO
  anti-sense: NO
aagaacgctgaagaaatcgctcttttaagggccagaatgaacgcttacagcactttagaaagcgctttactcactaaaatgtgcaatcgcattgttaaagcgcttcaagttaaaaataatgttatcagccatttattcgggtttgttgattttttaacgtctaaatccattttggctaaaaggttcgtggataccaccaaccatcgtgtgtatgtcatggtgcaattccctttcattcagcctgaagacttaatcgcttactttaaagccaaacgcatcgacctttctttagcgagcgctaccaatctcagcgccattttaaacacgggcgttgttccacctctaagagtttgggatttaagttgcggtttt

SEQ ID NO: 1575 - DNA (genomic), 579 bp, Helicobacter pylori; double-stranded, circular
  misc_feature (B) LOCATION 1...579
  hypothetical: NO
  anti-sense: NO
atgaatgcattgaaaaaattaagtttttgcgccttgttatccctaggcctcttcgctcaaacagtgcatgctcagcatttaaaggacacgattaactatcctgattggcttaaaatcaatctttttgataaaaagaacccgcccaatcaatatgtcggatcggcttcaatttctggtaaaaggaacgatttttattccaattacatcccctatgatgacaaattgccccctgaaaagaacgctgaagaaatcgctcttttaagggccagaatgaacgcttacagcactttagaaagcgctttactcactaaaatgtgcaatcgcattgttaaagcgcttcaagttaaaaataatgttatcagccatttattcgggtttgttgattttttaacgtctaaatccattttggctaaaaggttcgtggataccaccaaccatcgtgtgtatgtcatggtgcaattccctttcattcagcctgaagacttaatcgcttactttaaagccaaacgcatcgacctttctttagcgagcgctaccaatctcagcgccattttaaacaaggcgttgttccacctctaa

SEQ ID NO: 1576 - DNA (genomic), 954 bp, Helicobacter pylori; double-stranded, circular
  misc_feature (B) LOCATION 1...954
  hypothetical: NO
  anti-sense: NO
cagcagtatccctgtcggtcaagccttaatggcgtatttcaaccctacaatcatcaaaaaaggataaaaatggatagcgtaactctagcatgcgggaacggagggaaagaaacaaacgctttaattgagcgagtctttatgccctatttaaaagaatggattgttgcgtttgatgaagacgcccctaaatttgaagctagtggggaatattgcgtaagcacggatagttttgtcatcacgcccttaatttttaacggaggcgatataggcaagctttgcgtttgcgggagcgcgaatgatgtgagcgtgcaagggggcgaacctttgtatttgaatatgggttttattttagaagaaggcttagaaatccctcttttaaagcaaatcttacaatccatacaaaaagaattgtttaaagccaacctaaaactcctttccctagacactaaagtcgtgccaaaggggagcgtggataagctttttatcaacacaacttgcattggtaaaatcatcaagccagggatttcttcgcgccatttacaacaagggcaagccattatcctaagcgacacgatcgccaatcatggggcaagcctgtttgcgacgcgtcatgaaatcaaacttaaaaccaatttgcaaagcgattgccaactgctctatcccttattaaaacccctatttttaagcgatctcaaaattgatgctttaagagatgcgactaggggcgggttagcgagcgtattgaacgaatgggcgaatagctccagagtgaaaatcgtcatagaagaagaaaaaatccccttaaaagaagaaactaaagggatttgcgagattttagggctagaaccctacgcgctggctaatgagggggtgtttgtgttagcgctcaatcaaaaggacgccccaaaagccttagaaattttaaaaagtaatgagaaagcgaaaacgcttgcg

SEQ ID NO: 1577 - DNA (genomic), 999 bp, Helicobacter pylori; double-stranded, circular
  misc_feature (B) LOCATION 1...999
  hypothetical: NO
  anti-sense: NO
atggatagcgtaactctagcatgcgggaacggagggaaagaaacaaacgctttaattgagcgagtctttatgccctatttaaaagaatggattgttgcgtttgatgaagacgcccctaaatttgaagctagtggggaatattgcgtaagcacggatagttttgtcatcacgcccttaatttttaacggaggcgatataggcaagctttgcgtttgcgggagcgcgaatgatgtgagcgtgcaagggggcgaacctttgtatttgaatatgggttttattttagaagaaggcttagaaatccctcttttaaagcaaatcttacaatccatacaaaaagaattgtttaaagccaacctaaaactcctttccctagacactaaagtcgtgccaaaggggagcgtggataagctttttatcaacacaacttgcattggtaaaatcatcaagccagggatttcttcgcgccatttacaacaagggcaagccattatcctaagcgacacgatcgccaatcatggggcaagcctgtttgcgacgcgtcatgaaatcaaacttaaaaccaatttgcaaagcgattgccaactgctctatcccttattaaaacccctatttttaagcgatctcaaaattgatgctttaagagatgcgactaggggcgggttagcgagcgtattgaacgaatgggcgaatagctccagagtgaaaatcgtcatagaagaagaaaaaatccccttaaaagaagaaactaaagggatttgcgagattttagggctagaaccctacgcgctggctaatgagggggtgtttgtgttagcgctcaatcaaaaggacgccccaaaagccttagaaattttaaaaagtaatgagaaagcgaaaaacgcttgcgtgatcggcggggtgtttgaaaacccttatcctagcgtggttttaaagaacgcatggggttttgaaaggattttagagatgccagagggcgaattgctgcctaggatttgctaa

SEQ ID NO: 1578 - DNA (genomic), 627 bp, Helicobacter pylori; double-stranded, circular
  misc_feature (B) LOCATION 1...627
  hypothetical: NO
  anti-sense: NO
ttggtgagaaaagcgattgaatacgcgattgataacgacaagccaagcgtgacttttgtgcataagggcaacatcatgaaatataccgaaggggcgttcatgaaatggggctatgcgctcgctcaaaaagaatttaacgctcaagtcattgataaaggcccatggtgttctttgaaaaaccctaaaaccggtaaagaaatcatcattaaagacatgatcgctgacgcgtttttgcaacaaattctcttgcgccctagtgaatacagcgtcattgcgaccatgaatttgaacggggattatatctctgatgcgttagcggcgatggtggggggtattggtatcgctcctggggctaatctcaatgacacggtgggcatgtttgaagccacccatggcaccgctcctaaatacgccgggctggataaagtcaatccggggtctattattttgagcgcggaaatgatgttaaggcatatgggctgggtggaagcggctgatttgatcgtttctgctatggaaaaagcgattaagagcaagaaagtaacttatgatttcgctcgtttaatggatggggctaaagaagtgaaatgctctgaattcgctagcgtgatgattgaaaacatgtga

SEQ ID NO: 1579 - DNA (genomic), 270 bp, Helicobacter pylori; double-stranded, circular
  misc_feature (B) LOCATION 1...270
  hypothetical: NO
  anti-sense: NO
atggcttacaaccctaaaattttacaaaagcctaaagagggcgaagaaattacgattaaggacggcaaattgcatgtgccaaattaccccattatccctttcattgagggcgatggcattggatcggatattaccccagcgatgattaaagtcgtggatagcgcggttcaaaaagcgtataagggcgagaaaaaaatcgcatggtatgaagtgtttgtgggcgaaaaatgctatcaaaaattcaaagaccataaagagttaagccctgaa

SEQ ID NO: 1580 - DNA (genomic), 270 bp, Helicobacter pylori; double-stranded, circular
  misc_feature (B) LOCATION 1...270
  hypothetical: NO
  anti-sense: NO
acaatggcttacaaccctaaaattttacaaaagcctaaagagggcgaagaaattacgattaaagacggcaaattgcatgtgccaaattaccccattatccctttcattgagggcgatggcattggatcggatattaccccagcgatgattaaagtcgtggatagcgcggttcaaaaagcgtataagggcgagaaaaaaatcgcatggtatgaagtgtttgtgggcgaaaaatgctatcaaaaattcaaagaccataaagagttaagccct

SEQ ID NO: 1581 - DNA (genomic), 672 bp, Helicobacter pylori; double-stranded, circular
  misc_feature (B) LOCATION 1...672
  hypothetical: NO
  anti-sense: NO
atggcttacaaccctaaaattttacaaaagcctaaagagggcgaagaaattacgattaaagacggcaaattgcatgtgccaaattaccccattatccctttcattgagggcgatggcattggatcggatattaccccagcgatgattaaagtcgtggatagcgcggttcaaaaagcgtataagggcgagaaaaaaatcgcatggtatgaagtgtttgtgggcgaaaaatgctatcaaaaattcaaagaccataaagagttaagccctgaagagcaatggctcttaccggacactattgaagcgatcaaccactataaagtctctattaaagggcctttgaccacgcctattggtgaggggtttagatctttgaatgtggcgttacgccaaaaaatggatttgtatgtgtgcttgagaccggtaaggtggtatgggagtcctagcccggtgaaagaaccacaaaaagtggatatggtgatttttagagaaaattctgaagacatttatgcgggcattgaatggcaagaaggcagtgcggaagcgaaaaaactcatccattttttacaaaatgaactaaaggtagaaaaaatccgcttccctgaaagcagcggcgtagggataaaacccatcagcaaagaaggcacaggagaggttggtgagaaaagcgattga

SEQ ID NO: 1582 - DNA (genomic), 1146 bp, Helicobacter pylori; double-stranded, circular
  misc_feature (B) LOCATION 1...1146
  hypothetical: NO
  anti-sense: NO
atgaaagaaaaaatcgctttaatcaccggggttaccgggcaagacgggagctatctggctgaatacttgctgaatttgggttatgaagtgcatgggttaaaaaggcgctcttctagcatcaacacttctaggatcgatcatttgtatgaagatttgcacagcgaacacaaaaggcgttttttcttgcactatggggatatgaccgatagctctaacctcatccatttgatcgctaccactaagcccacagagatttataatttagccgcgcaaagccatgtgaaagtctcttttgaaaccccagaatacaccgctaacgctgatggtattggcacgctaaggattttagaggccatgcggattttgggcttagaaaagaaaacgcgcttttatcaagctagcacgagcgaattgtatggcgaagtcttagaaaccccacaaaatgaaaacaccccctttaacccacgaagcccctatgcggtcgctaaaatgtatgccttttacatcactaaaaattacagagaggcttataatttgtttgcggttaatggcatcctttttaaccatgagagcagggtaaggggcgaaacttttgtaacccgtaaaatcacacgagccgctagcgcgatagcgtataacttaacggattgcttgtatttagggaatttggacgctaaaagagactgggggcatgccaaagattatgtgaaaatgatgcatttgatgctccaagcacccaccccacaagattatgtaatcgctacagggaagaccacgagcgtgcgcgattttgtgaaaatgagctttgaatttatcggcattgatctagaatttcaaaatacagggattaaagaaatcggtttgattaaaagcgttgatgaaaaaagagcgaacgctttacaattaaacttaagccatttaaaaacgggcaaaatcgtggtgcgtatagacgagcactatttcaggcctactgaagtggatttgctcttaggcgatcccactggggctgagaaagagctgggctgggttagggaatacgatttaaaagagttggttaaggacatgttagaatacgatttaaaagaatgccagaaaaacctttacttgcaagatgggggctatactttaaggaatttttatgaatga

SEQ ID NO: 1583 - DNA (genomic), 1167 bp, Helicobacter pylori; double-stranded, circular
  misc_feature (B) LOCATION 1...1167
  hypothetical: NO
  anti-sense: NO
ataaaattcaataaaggaacaataatgaaagaaaaaatcgctttaatcaccggggttaccgggcaagacgggagctatctggctgaatacttgctgaatttgggttatgaagtgcatgggttaaaaaggcgctcttctagcatcaacacttctaggatcgatcatttgtatgaagatttgcacagcgaacacaaaaggcgttttttcttgcactatggggatatgaccgatagctctaacctcatccatttgatcgctaccactaagcccacagagatttataatttagccgcgcaaagccatgtgaaagtctcttttgaaaccccagaatacaccgctaacgctgatggtactggcacgctaaggattttagaggccatgcggattttgggcttagaaaagaaaacgcgcttttatcaagctagcacgagcgaattgtatggcgaagtcttagaaaccccacaaaatgaaaacaccccctttaacccacgaagcccctatgcggtcgctaaaatgtatgccttttacatcactaaaaattacagagaggcttataatttgtttgcggttaatggcatcctttttaaccatgagagcagggtaaggggcgaaacttttgtaacccgtaaaatcacacgagccgctagcgcgatagcgtataacttaacggattgcttgtatttagggaatttggacgctaaaagagactgggggcatgccaaagattatgtgaaaatgatgcatttgatgctccaagcacccaccccacaagattatgtaatcgctacagggaagaccacgagcgtgcgcgattttgtgaaaatgagctttgaatttatcggcattgatctagaatttcaaaatacagggattaaagaaatcggtttgattaaaagcgttgatgaaaaaagagcgaacgctttacaattaaacttaagccatttaaaaacgggcaaaatcgtggtgcgtatagacgagcactatttcaggcctactgaagtggatttgctcttaggcgatcccactggggctgagaaagagctgggctgggttagggaatacgatttaaaagagttggttaaggacatgttagaatacgatttaaaagaatgccagaaaaacctttacttgcaagatgggggctatactttaaggaatttttatgaa

SEQ ID NO: 1584 - DNA (genomic), 207 bp, Helicobacter pylori; double-stranded, circular
  misc_feature (B) LOCATION 1...207
  hypothetical: NO
  anti-sense: NO
aaaaaacgaaatgtttttaaaagaaatcatttaattttttggcttataattaggagttggatactatcaaaacttaaggaaatcacaatgtctgttactttaatcaataatgaaaataatgcacgctatgaatttgaaacgattgaatgcactcgtgggccaaaagcggtggatttttccaagctttttgaaacgaccgggtttttt

SEQ ID NO: 1585 - DNA (genomic), 978 bp, Helicobacter pylori; double-stranded, circular
  misc_feature (B) LOCATION 1...978
  hypothetical: NO
  anti-sense: NO
ttggaatttgaactggaattgcgccacagaagctttgtgcatgagagcttactcaacatgttttcagctttccgtagcaacgcccaccctatggcgaaactctctagcggggtgtctattttatctactctttattccacgcaccaaaacatgcacactgaagaagattaccagactatggccagaaggattgtcgctaaaatccccacgcttgcggctatttgctatcgtaatgaagtgggagcacccattatttatccggacatcgcgcgctcttatgtggaaaatatccttttcatgctgagaggttatccttatagccgattgaaacacaccactcaaggcgaagtgggaatcacgcccctagaagtggaagcctttgataaaatcctaaccttacacgccgatcatgggcaaaacgcctcttctaccacggtaaggaatgtcgctagcaccggcgtgcatccttatgccgccattagcgcgggtattagcgctttatgggggcatttgcatggcggagcgaatgaaaaagtccttttacaattagaagaaatcggcgatgtgaaaaacgtggataaatacatcgcgcgcgtaaaagaacaaaacgacaatttcaaactcatgggctttgggcatagggtgtataaaagctacgatccgcgcgcaaaaatcttaaaaggtctgaaagatgaactgcatcaaaaaggcgttaaaatggacgaacgcttgagcgaaatcgctgcgaaagtggaagaaatcgcgctaaaagacgagtatttcattgaaaggaatctctaccccaatgtggatttttactccggcaccattttaagggctttaaaaatcccggtgcgttttttcacgccggtgtttgtcattggcagaaccgtaggctggtgcgctcaacttttagagcatgtcaaaagcccgcaagccaggatcacgcgcccaagacaagtctatgtaggggattaa

SEQ ID NO: 1586 - DNA (genomic), 378 bp, Helicobacter pylori; double-stranded, circular
  misc_feature (B) LOCATION 1...378
  hypothetical: NO
  anti-sense: NO
agtttcaaaaaagcggagggtttaatttcaaaagtggcatgttttttttccaagcgggcgttttttttagacgaactaaaaaagcatgcccctactattttaaaggggtgcgaaagagcgtttgaacccttagaaaacacgcatttttttgaacaaaagatcgcgcgtttgagcgaaaagagcatgcaagatttagaagacatgagtattgatatagccttaatgcaacaaagccacaaaatcaaaatggtagaattgaacgccaaatggagcgatttagggaattttaacgctctttttgaagaagcggctaacggcactaaagaaaatgtcagcctgaatcaaacgcctatttttgccaaagagagcacaacaatt

SEQ ID NO: 1587 - DNA (genomic), 561 bp, Helicobacter pylori; double-stranded, circular
  misc_feature (B) LOCATION 1...561
  hypothetical: NO
  anti-sense: NO
agaaaatgtcagcctgaatcaaacgcctatttttgccaaagagagcacaacaatttagtgttttctcataaagtgagcgctcttttaggggttgaggatttagcgatcattgacactaaagacgctcttttagtcgctcatagacaagctaaggatttaaaagccctagtgagcgagatagaaacacacaaccaagaattattacaaacgcacactaaagtctatcgcccttgggggagctatgaagtcttgcatgagagcggttgttacaaggttaagattttagaagtcaaaccaaacgctaggctttctttgcaaaagcatttccacaggagcgaacactgggtggtgattagcgggatggcgagcgtggaattggatcaccaatcgtttgaattgcaagctaatgagtccacttatatccctaaaaacaccttacaccgcctagctaattatggcaaaatccctttgattatcatagaggtccaagtgggcgagtatgtcggcgaagacgatattgtaagggttgatgacgattttaacagacagaatcaaaacgcc

SEQ ID NO: 1588 - DNA (genomic), 675 bp, Helicobacter pylori; double-stranded, circular
  misc_feature (B) LOCATION 1...675
  hypothetical: NO
  anti-sense: NO
aaaacaaaagagagcctagcaagaaagcccatgaaaattaaaaatgtcttattgagtggggggagtggcaaacgcctatggcctttaagccgtagcctataccctaagcaatttttaaagctttttgatcataaaagcttgtttgagttgagttttaaaagaaacgcttccttagtagatgaaacgctcatcgtgtgcaatgaaaagcattattttttagctctagaagaaataaaaaacgaaatcaaaaacaagagcgtgggttttttattagaaagtttgagtaaaaacaccgctaacgccattgctttgagcgctttaatgagcgataaagaagatttgctcatcgttacgccaagcgatcatctgattaaagactttcaagcgtatgaaaatgcgataaaaaaagcgattaatttagctcaaaaaggctttttagtcacttttgggattagcattgaaaaacccaacacggagtttgggtatattgaaagccctaatggtttagatgtcaagcgattcattgaaaagccaagcctagaaaaagcgatagagtttcaaaaaagcggagggtttaatttcaaaagtggcatgttttttttccaagcgggcgttttttttagacgaactaaaaaagcatgcccctactattttaaaggggtgcgaaagagcgtt

SEQ ID NO: 1589 - DNA (genomic), 1413 bp, Helicobacter pylori; double-stranded, circular
  misc_feature (B) LOCATION 1...1413
  hypothetical: NO
  anti-sense: NO
atgaaaattaaaaatgtcttattgagtggggggagtggcaaacgcctatggcctttaagccgtagcctataccctaagcaatttttaaagctttttgatcataaaagcttgtttgagttgagttttaaaagaaacgcttccttagtagatgaaacgctcatcgtgtgcaatgaaaagcattattttttagctctagaagaaataaaaaacgaaatcaaaaacaagagcgtgggttttttattagaaagtttgagtaaaaacaccgctaacgccattgctttgagcgctttaatgagcgataaagaagatttgctcatcgttacgccaagcgatcatctgattaaagactttcaagcgtatgaaaatgcgataaaaaaagcgattaatttagctcaaaaaggctttttagtcacttttgggattagcattgaaaaacccaacacggagtttgggtatattgaaagccctaatggtttagatgtcaagcgattcattgaaaagccaagcctagaaaaagcgatagagtttcaaaaaagcggagggttttatttcaatagtggcatgtttgttttccaagcgggcgtttttttagacgaactaaaaaagcatgcccctactattttaaaggggtgcgaaagagcgtttgaatccttagaaaacacgcatttttttgaacaaaagatcgcgcgtttgagcgaaaagagcatgcaagatttagaagacatgagtattgatatagccttaatgcaacaaagccacaaaatcaaaatggtagaattgaacgccaaatggagcgatttagggaattttaacgctctttttgaagaagcggctaacggcactaaagaaaatgtcagcctgaatcaaacgcctatttttgccaaagagagcacaaataatttagtgttttctcataaagtgagcgctcttttaggggttgaggatttagcgatcattgacactaaagacgctcttttagtcgctcataaagacaaagctaaggatttaaaagccctagtgagcgagatagaaacacacaaccaagaattattacaaacgcacactaaagtctatcgcccttgggggagctatgaagtcttgcatgagagcggttgttacaaggttaagattttagaagtcaaaccaaacgctaggctttctttgcaaaagcatttccacaggagcgaacactgggtggtgattagcgggatggcgagcgtggaattggatcaccaatcgtttgaattgcaagctaatgagtccacttatatccctaaaaacaccttacaccgcctagctaattatggcaaaatccctttgattatcatagaggtccaagtgggcgagtatgtcggcgaagacgatattgtaagggttgatgacgattttaacagacagaatcaaaacgcctaa

SEQ ID NO: 1590 - DNA (genomic), 561 bp, Helicobacter pylori; double-stranded, circular
  misc_feature (B) LOCATION 1...561
  hypothetical: NO
  anti-sense: NO
atgtttcaaattagatggcatgcacgagctggacaaggcgctatcaccggcgctaagggactagctgatgtgatttcaaaaacaggcaaagaagtgcaagcgttcgcttcttatggttcagctaaaaggggagccgctatgatggcttataaccgcgttgatgatgagcctattttaaaccatgagcgcttcatgcaaccggattatgtgctagtgattgaccctggtttggttttcattgagaacattttcgctaatgaaaaagaagacacgacctatatcatcactagctaccttaacaaagaagaattgtttgaaaaaaaacctgaattaaaaacccgtaaggtgtttttggtggattgtttaaaaatctctatggaaaccttaaaacgccctatccctaacacgcccatgctaggggcgttgatgaaagtgtctggcatgcttgaaattgaggcttttaaagaagcttttaaaaaagttttaggcaaaaaactcacgcaagaagtcattgacgctaacatgctcgctatccaaagagcttatgaagaagttcaataa

SEQ ID NO: 1591 - DNA (genomic), 603 bp, Helicobacter pylori; double-stranded, circular
  misc_feature (B) LOCATION 1...603
  hypothetical: NO
  anti-sense: NO
tttaggctaaatttattttatacgatattggggagacatattaccatgtttcaaattagatggcatgcacgagctggacaaggcgctatcaccggcgctaagggactagctgatgtgatttcaaaaacaggcaaagaagtgcaagcgttcgcttcttatggttcagctaaaaggggagccgctatgatggcttataaccgcgttgatgatgagcctattttaaaccatgagcgcttcatgcaaccggattatgtgctagtgattgaccctggtttggttttcattgagaacattttcgctaatgaaaaagaagacacgacctatatcatcactagctaccttaacaaagaagaattgtttgaaaaaaaacctgaattaaaaacccgtaaggtgtttttggtggattgtttaaaaatctctatggaaaccttaaaacgccctatccctaacacgcccatgctaggggcgttgatgaaagtgtctggcatgcttgaaattgaggcttttaaagaagcttttaaaaaagttttaggcaaaaaactcacgcaagaagtcattgacgctaacatgctcgctatccaaagagcttatgaagaagttcaa

SEQ ID NO: 1592 - DNA (genomic), 372 bp, Helicobacter pylori; double-stranded, circular
  misc_feature (B) LOCATION 1...372
  hypothetical: NO
  anti-sense: NO
gtggtggtggttgagaatataaaagacgctgtgcctttagcgcaaagcctrataraggggggtattccaatcatagaagtaactttgcgatcaaactgtgctttagaggccatagagcttatcgctaagaatgtgccaaaaatgcgcgtgggtgctggcacgatactcaatctcactcaattagagcaggctcaaaataggggggcagagtttttgattagcccgggtcttacgataaagcttttagaacacgcaaagaaaaaagacatgcctttaatacctggggtttctagcagcagtgaagtcatgcaagctttagaattgggttataacgctttgaaatttttcccggcggagtattgcgggggccgt

SEQ ID NO: 1593 - DNA (genomic), 627 bp, Helicobacter pylori; double-stranded, circular
  misc_feature (B) LOCATION 1...627
  hypothetical: NO
  anti-sense: NO
atgcaagataaaataatagaaattttacaaatcagccccattgtccctgtggtggtggttgagaatataaaagacgctgtgcctttagcgcaaagcctgatagaggggggtattccaatcatagaagtaactttgcgatcaaactgtgctttagaggccatagagcttatcgctaagaatgtgccaaaaatgcgcgtgggtgctggcacgatactcaatctcactcaattagagcaggctcaaaataggggggcagagtttttgattagcccgggtcttacgataaagcttttagaacacgcaaagaaaaaagacatgcctttaatacctggggtttctagcagcagtgaagtcatgcaagctttagaattgggttataacgctttgaaatttttcccggcggagtattgcgggggcgttaaacttttaaacgcttttaacggcccttttaaaggggtgaaattttgccccactggggggattagcgcagataacatgcgttcttatttggctttagaaaacgttgtgtgcgtgggggggagctggcttacccctaaagatttaattcaaaacaaagagtgggataagatcacagaaatttgcaagagagcgttagctttaagataa

SEQ ID NO: 1594 - DNA (genomic), 642 bp, Helicobacter pylori; double-stranded, circular
  misc_feature (B) LOCATION 1...642
  hypothetical: NO
  anti-sense: NO
aaatataaaggagataaaatgcaagataaaataatagaaattttacaaatcagccccattgtccctgtggtggtggttgagaatataaaagacgctgtgcctttagcgcaaagcctgatagaggggggtattccaatcatagaagtaactttgcgatcaaactgtgctttagaggccatagagcttatcgctaagaatgtgccaaaaatgcgcgtgggtgctggcacgatactcaatctcactcaattagagcaggctcaaaataggggggcagagtttttgattagcccgggtcttacgataaagcttttagaacacgcaaagaaaaaagacatgcctttaatacctggggtttctagcagcagtgaagtcatgcaagctttagaattgggttataacgctttgaaatttttcccggcggagtattgcgggggcgttaaacttttaaacgcttttaacggcccttttaaaggggtgaaattttgccccactggggggattagcgcagataacatgcgttcttatttggctttagaaaacgttgtgtgcgtgggggggagctggcttacccctaaagatttaattcaaaacaaagagtgggataagatcacagaaatttgcaagagagcgttagctttaaga

SEQ ID NO: 1595 - DNA (genomic), 414 bp, Helicobacter pylori; double-stranded, circular
  misc_feature (B) LOCATION 1...414
  hypothetical: NO
  anti-sense: NO
ggaaaaaatatggcaaaaagtattgaattgcaagagatagaagtgtgggacggcaataccgctagctctaacgctttaagacaggctcaaattgatgtcatcgcagcctatcctatcaccccatcaacgcccattgtgcaaaattacggctcgtttaaggataatggctatgttgatagcgaattcgttttagtggaatctgagcatgccgccatgattgcatgcgtgggagctgccgctgctggtgggagggtcagcactgcgactagctctcaaggcttggcgttaatggtagaggttttataccaagcttctggcatgcatttgcctatcgtattgaatttggtcaatcgcgctttagcggcccctttaaacatccatggcgatcattctgatatgtatttaagcacggat

SEQ ID NO: 1596 - DNA (genomic), 513 bp, Helicobacter pylori; double-stranded, circular
  misc_feature (B) LOCATION 1...513
  hypothetical: NO
  anti-sense: NO
tatttaagcagggattctggctggatcagtttatgcacatgcaacccccaagaagcttacgatttcactttaatggcgtttagaatcgcagagcatcaaaaagtgcgcgtgcctactattgtcaatcaagatggctttttatgctcgcacaccgtgcagaatgtccgccctttgagcgatgcagtggcttatcaattcgtaggcgaataccaaaccaagcattcccttttggattttgataaaccggtaagctatgggccgcaagctgaagaagaatggcattatgagcataaagcccaactccaccatgctattatgagtgcgtcttctgtgattgaagaagtgttcaatgatttcgctaaactcacaggcaggcaataccatttgactaaaactttccagctagaagacgctgaaatcgctatctttgcgttaggcactacttatgaatcagcgatcgtagcggctaaagaaatgcgtaaaaaaggcattaggccggcgtggccactatcc

SEQ ID NO: 1597 - DNA (genomic), 522 bp, Helicobacter pylori; double-stranded, circular
  misc_feature (B) LOCATION 1...522
  hypothetical: NO
  anti-sense: NO
atgtatttaagcagggattctggctggatcagtttatgcacatgcaacccccaagaagcttacgatttcactttaatggcgtttagaatcgcagagcatcaaaaagtgcgcgtgcctactattgtcaatcaagatggctttttatgctcgcacaccgtgcagaatgtccgccctttgagcgatgcagtggcttatcaattcgtaggcgaataccaaaccaagcattcccttttggattttgataaaccggtaagctatgggccgcaagctgaagaagaatggcattatgagcataaagcccaactccaccatgctattatgagtgcgtcttctgtgattgaagaagtgttcaatgatttcgctaaactcacaggcaggcaataccatttgactaaaactttccagctagaagacgctgaaatcgctatctttgcgttaggcactacttatgaatcagcgatcgtagcggctaaagaaatgcgtaaaaaaggcattaggccggcgtggccactatccattcct

SEQ ID NO: 1598 - DNA (genomic), 930 bp, Helicobacter pylori; double-stranded, circular
  misc_feature (B) LOCATION 1...930
  hypothetical: NO
  anti-sense: NO
atggcaaaaagtattgaattgcaagagatagaagtgtgggacggcaataccgctagctctaacgctttaagacaggctcaaattgatgtcatcgcagcctatcctatcaccccatcaacgcccattgtgcaaaattacggctcgtttaaggataatggctatgttgatggcgaattcgttttagtggaatctgagcatgccgccatgagtgcatgcgtgggagctgccgctgctggtgggagggtcagcactgcgactagctctcaaggcttggcgttaatggtagaggttttataccaggcttctggcatgcgtttgcctatcgttttgaatttggtcaatcgcgctttagcggcccctttaaacatccatggcgatcattctgatatgtatttaagcagggattctggctggatcagtttatgcacatgcaacccccaagaagcttacgatttcactttaatggcgtttagaatcgcagagcatcaaaaagtgcgcgtgcctactattgtcaatcaagatggctttttatgctcgcacaccgtgcagaatgtccgccctttgagcgatgcagtggcttatcaattcgtaggcgaataccaaaccaagcattcccttttggattttgataaaccggtaagctatgggccgcaagctgaagaagaatggcattatgagcataaagcccaactccaccatgctattatgagtgcgtcttctgtgattgaagaagtgttcaatgatttcgctaaactcacaggcaggcaataccatttgactaaaactttccagctagaagacgctgaaatcgctatctttgcgttaggcactacttatgaatcagcgatcgtagcggctaaagaaatgcgtaaaaaaggcattaaggccggcgtggccactatccattccttacgcccttttcccttatga

SEQ ID NO: 1599 - DNA (genomic), 402 bp, Helicobacter pylori; double-stranded, circular
  misc_feature (B) LOCATION 1...402
  hypothetical: NO
  anti-sense: NO
atggcaagccatggggtcccttatgtggcgcaactctcgcctaacaaatggaaagacatgaataaaaagattaagaccgcgctagacactgaagggccttgctttatcaacgctcttagcccatgcacgactgaatggaaatttaattccaataagaccattgaattagcggatatggctgtggatagtttgatgttccccttgtttgaagtctttaatggcagggaattgaaaatcacttaccgcccaagaaatatcattcctgtaagggattatttaggggctcaaaagcgtttcaaacaccttttcaaaaaagaaaacgaacacattattgaagaattgcaaaaagatgtgaatgagcgttgggaatacttgcaacgcagagaagaagctaaagtataa

SEQ ID NO: 1600 - DNA (genomic), 474 bp, Helicobacter pylori; double-stranded, circular
  misc_feature (B) LOCATION 1...474
  hypothetical: NO
  anti-sense: NO
gttagcacctctaccacgccagcgggatcggttagctttggtaaaaaagaaaagaaaaaagacatcgtcaatatcatggcaagccatggggtcccttatgtggcgcaactctcgcctaacaaatggaaagacatgaataaaaagattaagaccgcgctagacactgaagggccttgctttatcaacgctcttagcccatgcacgactgaatggaaatttaattccaataagaccattgaattagcggatatggctgtggatagtttgatgttccccttgtttgaagtctttaatggcagggaattgaaaatcacttaccgcccaagaaatatcattcctgtaagggattatttaggggctcaaaagcgtttcaaacaccttttcaaaaaagaaaacgaacacattattgaagaattgcaaaaagatgtgaatgagcgttgggaatacttgcaacgcagagaagaagctaaagta

SEQ ID NO: 1601 - DNA (genomic), 471 bp, Helicobacter pylori; double-stranded, circular
  misc_feature (B) LOCATION 1...471
  hypothetical: NO
  anti-sense: NO
agcacctctaccacgccagcgggatcggttagctttggtaaaaaagaaaagaaaaaagacatcgtcaatatcatggcaagccatggggtcccttatgtggcgcaactctcgcctaacaaatggaaagacatgaataaaaagattaagaccgcgctagacactgaagggccttgctttatcaacgctcttagcccatgcacgactgaatggaaatttaattccaataagaccattgaattagcggatatggctgtggatagtttgatgttccccttgtttgaagtctttaatggcagggaattgaaaatcacttaccgcccaagaaatatcattcctgtaagggattatttaggggctcaaaagcgtttcaaacaccttttcaaaaaagaaaacgaacacattattgaagaattgcaaaaagatgtgaatgagcgttgggaatacttgcaacgcagagaagaagctaaagta

SEQ ID NO: 1602 - DNA (genomic), 945 bp, Helicobacter pylori; double-stranded, circular
  misc_feature (B) LOCATION 1...945
  hypothetical: NO
  anti-sense: NO
atggtaaaagaagtcaaaacactcaaaggttttagccaaagcgctgagaaatttcaaggctcgcacttgctttgtccaggttgtgggcatggcatcattgtgcgcgaagttttaaacgctgtagatgggcctattgttttaggcaattctaccggttgtttagaggtatgctcggctgtgtacccgcacacttcatgggatgtgccttggattcatatcggttttgaaaacggctctacggcgatttcaggggtggaagcgatgtataaggctttagtgaataagggtcgctatcaaggtcaaagaccgaaatttgtggcgtttggaggcgatggggccagttatgatattggttttcaattcatcagcggttgcatggaaagagggcatgacatgacttacatttgcttggataatgaaaactacgccaataccggcggtcaaagaagcggatctacgccattaggggctagcacctctaccacgccagcgggatcggttagctttggtaaaaaagaaaagaaaaaagacatcgtcaatatcatggcaagccatggggtcccttatgtggcgcaactctcgcctaacaaatggaaagacatgaataaaaagattaagaccgcgctagacactgaagggccttgctttatcaacgctcttagcccatgcacgactgaatggaaatttaattccaataagaccattgaattagcggatatggctgtggatagtttgatgttccccttgtttgaagtctttaatggcagggaattgaaaatcacttaccgcccaagaaatatcattcctgtaagggattatttaggggctcaaaagcgtttcaaacaccttttcaaaaaagaaaacgaacacattattgaagaattgcaaaaagatgtgaatgagcgttgggaatacttgcaacgcagagaagaagctaaagtataa

SEQ ID NO: 1603 - DNA (genomic), 954 bp, Helicobacter pylori; double-stranded, circular
  misc_feature (B) LOCATION 1...954
  hypothetical: NO
  anti-sense: NO
ttggggcaggatttgaaaaatcttaaggctctagcgattttagacaagagctctccagcgggcgctatgggagcgatgtttaatgaagtaacgagtgcggtgtatcaaacgcaagggactaaacaccccgtggtgtctaactacatttatggtttaggcgaaagggatatgacgatcgtgcatttatgcgagatttttgaagaaatcaatgaagacgctcttaaaggcacgctcacgcaccctacccaacaattcgtaggcttgcgtggccctaaaatgagcttttttaaaaaaggaaatatcatggtaaaagaagtcaaaacactcaaaggttttagccaaagcgctgagaaatttcaaggctcgcacttgctttgtccaggttgtgggcatggcatcattgtgcgcgaagttttaaacgctgtagatgggcctattgttttaggcaattctaccggttgtttagaggtatgctcggctgtgtacccgcacacttcatgggatgtgccttggattcatatcggttttgaaaacggctctacggcgatttcaggggtggaagcgatgtataaggctttagtgaataagggtcgctatcaaggtcaaagaccgaaatttgtggcgtttggaggcgatggggccagttatgatattggttttcaattcatcagcggttgcatggaaagagggcatgacatgacttacatttgcttggataatgaaaactacgccaataccggcggtcaaagaagcggatctacgccattaggggctaccacctctaccacgccagcgggatcggttagctttggtaaaaaagaaaagaaaaaagacatcgtcaatatcatggcaagccatggggtcccttatgtggcgcaactctcgcctaacaaatggaaagacatgaataaaaagattaagaccgcgctagacactgaagggccttgcttttat

SEQ ID NO: 1604 - DNA (genomic), 393 bp, Helicobacter pylori; double-stranded, circular
  misc_feature (B) LOCATION 1...393
  hypothetical: NO
  anti-sense: NO
atgaaagattggaatgaatttgaaatgggagcggtgctcttcccttttgaaaagaacgcacaaagcgaaatggaaaaacacaatgatgagcgccattataccgaacagagttacttcaccacttcagtggctcattggcgcgtggctaagcctgtgcataacaataatatttgcatcaattgctttaattgttgggtttattgcccagacgctgccattctttcaagagagggcaaattaaaaggcgtggattattctcattgtaaaggctgtggcgtgtgcgtggatgtctgccccactaaccctaaatcgctatggatgtttgaagaacaaattgagcctgccaccgctctcactcaatggccgcaaaaacaagaaaagaaaaaatcataa

SEQ ID NO: 1605 - DNA (genomic), 399 bp, Helicobacter pylori; double-stranded, circular
  misc_feature (B) LOCATION 1...399
  hypothetical: NO
  anti-sense: NO
ggattaaagatgaaagattggaatgaatttgaaatgggagcggtgctcttcccttttgaaaagaacgcacaaagcgaaatggaaaaacacaatgatgagcgccattataccgaacagagttacttcaccacttcagtggctcattggcgcgtggctaagcctgtgcataacaataatatttgcatcaattgctttaattgttgggtttattgcccagacgctgccattctttcaagagagggcaaattaaaaggcgtggattattctcattgtaaaggctgtggcgtgtgcgtggatgtctgccccactaaccctaaatcgctatggatgtttgaagaacaaattgagcctgccaccgctctcactcaatggccgcaaaaacaagaaaagaaaaaatca

SEQ ID NO: 1606 - DNA (genomic), 144 bp, Helicobacter pylori; double-stranded, circular
  misc_feature (B) LOCATION 1...144
  hypothetical: NO
  anti-sense: NO
acaaacgacagggcgatccaagcaagccttatcgctaataattctaaaatcttacaaaacacccctttcaaacccctttataacaacctagacaccattatcaaaagcgctctatcttgggaagaacaccttttgaaatttcaa

SEQ ID NO: 1607 - DNA (genomic), 192 bp, Helicobacter pylori; double-stranded, circular
  misc_feature (B) LOCATION 1...192
  hypothetical: NO
  anti-sense: NO
atgatttggctaacgcatttagcgagctatcacactcttttagaaaaaaataagagcgaaatctataatggcggctacaatcaaggccatagcgtgaaagaagtgatagaaaaggttaaagaaatctcaaataaggattttttagtggaaattttagacaaacgacagggcgatccaagcaagccttatcgc

SEQ ID NO: 1608 - DNA (genomic), 636 bp, Helicobacter pylori; double-stranded, circular
  misc_feature (B) LOCATION 1...636
  hypothetical: NO
  anti-sense: NO
ctattattttttcatttcaaaaggggttttatggcattattattcacaggggcgtgcgggtatataggctcgcataccgcaagggtgtttttagaaaaaaccaaagaaaacatcattattatagacgatctcagcaccggttttttagagcatatcaaagcgttagagcgttactaccctaatagggttgcgtttattcaagcgaatttgaatgaaacgcaaaaattagacgcttttttaaataagcaacagctaaaagatcccattgaagctgtcttgcattttggggctaaaatctcagtaaaagaatccatgcgcttgcctttagaatactacaccaacaacacgctcaacactttagggcttgtcaaactttgcttaaaacatgcaatcaagcgttttattttttcttctacggccgtggtttatggcgagtctggttcaagcttgagtgaagaaagccccttaaaccccattaatccttatggagcgtctaaaatgatgagcgaaaggattttgttagacgcttctaaagtggcggattttaaatgcgttatcttgcgctatttcaatgtggctggggcatgcatgcacaatgattataccaccccctacacttggggggcagcgcacgct

SEQ ID NO: 1609 - DNA (genomic), 1035 bp, Helicobacter pylori; double-stranded, circular
  misc_feature (B) LOCATION 1...1035
  hypothetical: NO
  anti-sense: NO
atggcattattattcacaggggcgtgcgggtatataggctcgcataccgcaagggtgtttttagaaaaaaccaaagaaaacatcattattatagacgatctcagcaccggttttttagagcatatcaaagcgttagagcgttactaccctaatagggttgcgtttattcaagcgaatttgaatgaaacgcaaaaattagacgcttttttaaataagcaacagctaaaagatcccattgaagctgtcttgcattttggggctaaaatctcagtagaagaatccatgcgcttgcctttagaatactacaccaacaacacgctcaacactttagggcttgtcaaactttgcttaaaacatgcaatcaagcgttttattttttcttctacggccgtggtttatggcgagtctggttcaagcttgagtgaagaaagccccttaaaccccattaatccttatggagcgtctaaaatgatgagcgaaaggattttgttagacgcttctaaagtggcggattttaaatgcgttatcttgcgctatttcaatgtggctggggcatgcatgcacaatgattataccaccccctacactttggggcagcgcacgcttaacgccacgcatttgatcaaaatcgcatgcgaatgcgcggtggggaaaaggaaaaaaatggggatttttggcactaactaccccacgagagacggcacttgcattagggattatatccatgtagatgatttggctaacggccatttagcgagctatcacactcttttagaaaaaaataagagcgaaatctataatggcggctacaatcaaggccatagcgtgaaagaagtgatagaaaaggttaaagaaatctcaaataaggattttttagtggaaattttagacaaacgacagggcgatccagcaagccttatcgctaataattctaaaatcttacaaaacacccctttcaaacccctttataacaacctagacaccattatcaaaagcgctctatcttgggaagaacaccttttgaaatttcaataa

SEQ ID NO: 1610 - DNA (genomic), 1035 bp, Helicobacter pylori; double-stranded, circular
  misc_feature (B) LOCATION 1...1035
  hypothetical: NO
  anti-sense: NO
atggcattattattcacaggggcgtgcgggtatataggctcgcataccgcaagggtgtttttagaaaaaaccaaagaaaacatcattattatagacgatctcagcaccggttttttagagcatatcaaagcgttagagcgttactaccctaatagggttgcgtttattcaagcgaatttgaatgaaacgcaaaaattagacgcttttttaaataagcaacagctaaaagatcccattgaagctgtcttgcattttggggctaaaatctcagtagaagaatccatgcgcttgcctttagaatactacaccaacaacacgctcaacactttagggcttgtcaaactttgcttaaaacatgcaatcaagcgttttattttttcttctacggccgtggtttatggcgagtctggttcaagcttgagtgaagaaagccccttaaaccccattaatccttatggagcgtctaaaatgatgagcgaaaggattttgttagacgcttctaaagtggcggattttaaatgcgttatcttgcgctatttcaatgtggctggggcatgcatgcacaatgattataccaccccctacactttggggcagcgcacgcttaacgccacgcatttgatcaaaatcgcatgcgaatgcgcggtggggaaaaggaaaaaaatggggatttttggcactaactaccccacgagagacggcacttgcattagggattatatccatgtagatgatttggctaacgcgcatttagcgagctatcacactcttttagaaaaaaataagagcgaaatctataatgtcggctacaatcaaggccatagcgtgaaagaagtgatagaaaaggttaaagaaatctcaaataaggattttttagtggaaattttagacaaacgacagggcgatccagcaagccttatcgctaataattctaaaatcttacaaaacacccctttcaaacccctttataacaacctagacaccattatcaaaagcgctctatcttgggaagaacaccttttgaaatttcaataa

SEQ ID NO: 1611 - DNA (genomic), 219 bp, Helicobacter pylori; double-stranded, circular
  misc_feature (B) LOCATION 1...219
  hypothetical: NO
  anti-sense: NO
atgcttataaacgctgtcatagaaaaagatgagaatgggtattttgcttttgtcccctttctaaaaggctgtgtatcacaagggaaaagttatgaagaagccctaagaaatattaaagaagccatagagctttatttgggagatttagaagccgatgagttagcttttctctctaagaaaaattctgtaatagcacccattgagatagcttttgcctga

SEQ ID NO: 1612 - DNA (genomic), 318 bp, Helicobacter pylori; double-stranded, circular
  misc_feature (B) LOCATION 1...318
  hypothetical: NO
  anti-sense: NO
aacgctttgaatgagaatgttaatgaaaatatttttgaagaagtaggggacacttgcgttaaatgcgctaaatgcgtgccaggttgcactatatatcgcattcataaggacgaggcgacttcgcctaggggctttttagatttgatgcgcttaaacgctcaaaacaagctccaattagacacgaatttaaaacaccttttagaaacttgttttttatgcaccgcttgcgtagaaacctgcccctttcatttgcccatagacactttaatagaaaaagccagggtaaaaaatcgctcaaaaatacggcatcgcttggta

SEQ ID NO: 1613 - DNA (genomic), 528 bp, Helicobacter pylori; double-stranded, circular
  misc_feature (B) LOCATION 1...528
  hypothetical: NO
  anti-sense: NO
gggctttttagatttgatgcgcttaaacgctcaaaacaagctccaattagacacgaatttaaaacaccttttagaaacttgttttttatgcaccgcttgcgtagaaacctgcccctttcatttgcccatagacactttaatagaaaaagccagggtaaaaaatcgctcaaaaatacggcatcgcttggtataaaaaatcctatattttcccttttaaaaaaccgcaaaaaaatggatagggtgttttcggtggcgcattttttagccccttgcgttttcaagcaagtaggtgataatttagagcctagggcggtgtttaaaggcttgttcaaacgcttcaaaaaaagcgctctgcttcccttaaatcaaaaaagttttttacaaaagcacacagaggttaagccttttagaaaaccccattcaaaaagtggcgatctttatagggtgcttgagcaattaccattaccagcaagtgggggaaagcttgttgtatattttggaaaaactcaatgttcaagcgatcatccc

SEQ ID NO: 1614 - DNA (genomic), 639 bp, Helicobacter pylori; double-stranded, circular
  misc_feature (B) LOCATION 1...639
  hypothetical: NO
  anti-sense: NO
atcaaaaaagttttttacaaaagcacacagaggttaagccttttagaaaaccccattcaaaaagtggcgatctttatagggtgcttgagcaattaccattaccagcaagtgggggaaagcttgttgtatattttggaaaaactcaatgttcaagcgatcatccctaaacaagaatgctgctcagcccctgcgtattttaccggcgataaagacaccacgctttttttagtgaaaaaaaacatagaatggtttgaaagctatttaaatgaagtggatgcgatcattgtgcctgaagccacatgtgctatcatgctcatcaacgattattacaaggtgtttttaggcgaaacagataaggatttgtatgtgaagcgcttggaaaaaatcacgcctaaaatctatttggcgagcgtgtttttagagaaacacacccctttaaaaagtcttttagaaaaaatccctaaaggtaaaaaagagactatcacctatcataacccttgccatgccaaaaaaaccctaaacgctcataaagaagggcgcagcttgctcaattcgcattatgaaattaaagaaatgcctggtacaattgttgtggttttggggggattacgatgcaaaccgaaaagacggagttttctt

SEQ ID NO: 1615 - DNA (genomic), 1122 bp, Helicobacter pylori; double-stranded, circular
  misc_feature (B) LOCATION 1...1122
  hypothetical: NO
  anti-sense: NO
atgaatgagaatgttaatgaaaatatttttgaagaagtaggggacacttgcgttaaatgcgctaaatgcgtgccaggttgcactatatatcgcattcataaagacgaggcgacttcgcctaggggctttttagatttgatgcgcttaaacgctcaaaacaagctccaattagacacgaatttaaaacaccttttagaaacttgttttttatgcaccgcttgcgtagaaacctgcccctttcatttgcccatagacactttaatagaaaaagccagggaaaaaatcgctcaaaaatacggcatcgcttggtataaaaaatcctatttttcccttttaaaaaaccgcaaaaaaatggatagggtgttttcggtggcgcattttttagccccttgcgttttcaagcaagtaggtgataatttagagcctagggcggtgtttaaaggcttgttcaaacgcttcaaaaaaagcgctctgcctcccttaaatcaaaaaagttttttacaaaagcacacagaggttaagcctttagaaaaccccattcaaaaagtggcgatctttatagggtgcttgagcaattaccattaccagcaagtgggggaaagcttgttgtatattttggaaaaactcaatgttcaagcgatcatccctaaacaagaatgctgctcagcccctgcgtattttaccggcgataaagacaccacgctttttttagtgaaaaaaaacatagaatggtttgaaagctatttaaatgaagtggatgcgatcattgtgcctgaagccacatgtgctagcatgctcatcaacgattattacaaggtgtttttaggcgaaacagataaggatttgtatgtgaagcgcttggaaaaaatcacgcctaaaatctatttggcgagcgtgtttttagagaaacacacccctttaaaaagtcttttagaaaaaatccctaaaggtaaaaaagagactatcacctatcataacccttgccatgccaaaaaaaccctaaacgctcataaagaagtgcgcagcttgctcaattcgcattatgaaattaaagaaatgccggacaattctgcggttttggggggattacgatgcaaaccgaaaagacggagttttctttaa

SEQ ID NO: 1616 - DNA (genomic), 210 bp, Helicobacter pylori; double-stranded, circular
  misc_feature (B) LOCATION 1...210
  hypothetical: NO
  anti-sense: NO
atgcaaaccgaaaagacggagttttctttaaaagtggggcttcttagggctaaagaaatcatggacaccaaagctagaattttgagcgcagaatgcggggcatgccacatgcagcttaacaacgctttaaagtctttagatgaccctaacaccccctctttttcacaccctttagaactcatcgctaaagctttaaaaagcactgaataa

SEQ ID NO: 1617 - DNA (genomic), 249 bp, Helicobacter pylori; double-stranded, circular
  misc_feature (B) LOCATION 1...249
  hypothetical: NO
  anti-sense: NO
agaaatgcctggtacaattgttgtggttttggggggattacgatgcaaaccgaaaagacggagttttctttaaaagtggggcttcttagggctaaagaaatcatggacaccaaagctagaattttgagcgcagaatgcggggcatgtcacatgcagcttaacaacgctttaaagtctttagatgaccctaacaccccctctttttcacaccctttagaactcatcgctaaagctttaaaaagcactgaa

SEQ ID NO: 1618 - DNA (genomic), 627 bp, Helicobacter pylori; double-stranded, circular
  misc_feature (B) LOCATION 1...627
  hypothetical: NO
  anti-sense: NO
caaggggttatgaaatctttaaggggttcaagccacccgcatgctctaaatttacccatgcaagcttttgatgcaagcgctaaagcctacttgaatttagcgcaaaaactgggttatttttccagtcaaatccataagggcgtgtgccaaaaaattgaactcagtctttgcggggagatcaaccaattcaaagacgcccttgtcgcttttacgctagtaggggtgttaaaacccgttgtaggggataaaatcaattacattaacgccccctttgtggccaaagaaagaggcattgagattaaggttagccttaaagaaagcgcctcaccttataaaaacatgctctctttaactttaaatgcggctaatggcgcaatcagcgtgagcggcacggtgtttgaagaagatattttaaaactcactgagatcgatgggtttcatattgatatagagccaaagggcaaaatgcttttattcaggaatacggatattccaggcgttattgggagcgtggggaatgcgttcgctaggcatggcactaatatcgctgattttcgtttggggcgcaacacgcaaaaagaagccctagcgctcatcattgtagatgaagaagtttctttgaagttt

SEQ ID NO: 1619 - DNA (genomic), 624 bp, Helicobacter pylori; double-stranded, circular
  misc_feature (B) LOCATION 1...624
  hypothetical: NO
  anti-sense: NO
ggggttatgaaatctttaaggggttcaagccacccgcatgctctaaatttacccatgcaagcttttgatgcaagcgctaaagcctacttgaatttagcgcaaaaactgggttatttttccagtcaaatccataagggcgtgtgccaaaaaattgaactcagtctttgcggggagatcaaccaattcaaagacgcccttgtcgcttttacgctagtaggggtgttaaaacccgttgtaggggataaaatcaattacattaacgccccctttgtggccaaagaaagaggcattgagattaaggttagccttaaagaaagcgcctcaccttataaaaacatgctctctttaactttaaatgcggctaatggcgcaatcagcgtgagcggcacggtgtttgaagaagatattttaaaactcactgagatcgatgggtttcatattgatatagagccaaagggcaaaatgcttttattcaggaatacggatattccaggcgttattgggagcgtggggaatgcgttcgctaggcatggcactaatatcgctgattttcgtttggggcgcaacacgcaaaaagaagccctagcgctcatcattgtagatgaagaagtttctttgaagttt

SEQ ID NO: 1620 - DNA (genomic), 663 bp, Helicobacter pylori; double-stranded, circular
  misc_feature (B) LOCATION 1...663
  hypothetical: NO
  anti-sense: NO
cacgagttgccggctgtggaattaacgatggcgcatttgatcaatgcggtgcgctcattcccttcgcgaacgataaatcaaacaccaaaggttatggaaagagaagactggtatggcacggaattgaaaaataaaaagctaggcatcattggttttgggaatattggctctagggtgggcattagggcaaaagcttttgaaatggaagttttagcctatgatccctatatcccttcttcaaaagccactgatttaggggtcatttacacgaaaaattttgaagacattttgcaatgcgacatgatcactatccacacccccaaaaataaagaaacgattaacatgataggcgctaaagagattgaacgcatgaaaaaaggggttattttaattaattgtgccagaggggggccttataatgaagacgccctttatgaagccttagaaaccaaaaaagtgcgttggcttggcattgatgtcttttctaaagagcctggcatccataacaagcttttagacttgcctaatgtgtatgcgaccccccatattggcgcgaacactttagaatccctacattatttttccatatatgtcgttcaaggggttatggaatctttttgggttcatgctaccccatgctctatttttttctttgctagcttc

SEQ ID NO: 1621 - DNA (genomic), 1137 bp, Helicobacter pylori; double-stranded, circular
  misc_feature (B) LOCATION 1...1137
  hypothetical: NO
  anti-sense: NO
ttgtttttgggaaaaattggctatagggtgggcgggggggccaaaagcttagggggggaaggagggggggaggggaagcggaggtgcgaaaggggagaagcagggggggggggggtgggggacgcggaaaattttgaagacattttgcaatgcgacatgatcactatccacacccccaaaaataaagaaacgattaacatgataggcgctaaagagattgaacgcatgaaaaaaggggttattttaattaattgtgctagaggggggctttataatgaagacgccctttatgaagccttagaaaccaaaaaagtgcgttggcttggcattgatgtcttttctaaagagcctggcatccataacaagcttttagacttgcctaatgtgtatgcgaccccccatattggcgcgaacactttagaatcccaagaagaaatttccaaacaagccgctcaaggggttatggaatctttaaggggttcaagccacccgcatgctctaaatttacccatgcaagcttttgatgcaagcgctaaagcctacttgaatttagcgcaaaaactgggttatttttccagtcaaatccataagggcgtgtgccaaaaaattgaactcagtctttgcggggagatcaaccaattcaaagacgcccttgtcgcttttacgctagtaggggtgttaaaacccgttgtaggggataaaatcaattacattaacgccccctttgtggccaaagaaagaggcattgagattaaggttagccttaaagaaagcgcctcaccttataaaaacatgctctctttaactttaaatgcggctaatggcgcaatcagcgtgagcggcacggtgtttgaagaagatattttaaaactcactgagatcgatgggtttcatattgatatagagccaaagggtaaaatgcttttattcaggaatacggatattccaggcgttattgggagcgtggggaatgcgttcgctaggcatggcattaatatcgctgattttcgtttggggcgcaacacgcaaaaagaagccctagcgctcatcattgtagatgaagaagtttctttggaagttttagaagagcttaaaaacattcctgcatgcttaagcgttcattatgtggttatttaa

SEQ ID NO: 1622 - DNA (genomic), 1575 bp, Helicobacter pylori; double-stranded, circular
  misc_feature (B) LOCATION 1...1575
  hypothetical: NO
  anti-sense: NO
atgtatcaagtagccatttgcgaccccatccatgctaaaggcattcaaattttagaagcccaaaaagacattgtcttgcatgattattccaaatgccctaaaaaggagcttttagaaaaactcatccccatggatgcgctcatcactcgcagcatgacccctatcacaagcgattttttaaagcccttaacccacttaaaatccattgtgagagcgggcgtgggagtggataatattgatttagaaagctgctctcaaaaaggcattgtcgtgatgaatatccctaccgctaacacgattgccgctgtggaattaacgatggcgcatttgatcaatgcggtgcgctcattcccttgcgcgaacgatcaaatcaaacaccaaaggttatggaaaagagaagactggtatggcacggaattgaaaaataaaaagctaggcatcattggttttgggaatattggctctagggtgggcattagggcaaaagcttttgaaatggaagttttagcctatgatccctatatcccttcttcaaaagccactgatttaggggtcatttacacgaaaaattttgaagacattttgcaatgcgacatgatcactatccacacccccaaaaataaagaaacgattaacatgataggcgctaaagagattgaacgcatgaaaaaaggggttattttaattaattgtgctagaggggggctttataatgaagacgccctttatgaagccttagaaaccaaaaaagtgcgttggcttggcattgatgtcttttctaaagagcctggcatccataacaagcttttagacttgcctaatgtgtatgcgaccccccatattggcgcgaacactttagaatcccaagaagaaatttccaaacaagccgctcaaggggttatggaatctttaaggggttcaagccacccgcatgctctaaatttacccatgcaagcttttgatgcaagcgctaaagcctacttgaatttagcgcaaaaactgggttatttttccagtcaaatccataagggcgtgtgccaaaaaattgaactcagtctttgcggggagatcaaccaattcaaagacgcccttgtcgcttttacgctagtaggggtgttaaaacccgttgtaggggataaaatcaattacattaacgccccctttgtggccaaagaaagaggcattgagattaaggttagccttaaagaaagcgcctcaccttataaaaacatgctctctttaactttaaatgcggctaatggcgcaatcagcgtgagcggcacggtgtttgaagaagatattttaaaactcactgagatcgatgggtttcatattgatatagagccaaagggtaaaatgcttttattcaggaatacggatattccaggcgttattgggagcgtggggaatgcgttcgctaggcatggcattaatatcgctgattttcgtttggggcgcaacacgcaaaaagaagccctagcgctcatcattgtagatgaagaagtttctttggaagttttagaagagcttaaaaacattcctgcatgcttaagcgttcattatgtggttatttaa

SEQ ID NO: 1623 - DNA (genomic), 387 bp, Helicobacter pylori; double-stranded, circular
  misc_feature (B) LOCATION 1...387
  hypothetical: NO
  anti-sense: NO
ttaaatgcgctagactacgcccacaagcattcgcacgaagcgggtgcgttaatatctttaaacacaaggattgagaacatgggaaaaattggtatcttttttgggacagacagcgggaacgctgaagctatcgctgaaaaaatcagcaaggctattggtaatgctgaagtgattgatgtggctaaagcttctaaagagcaatttaatggctttacaaaggttattttagtcgctccaacagccggtgcgggcgatttgcaaacagattgggaagactttttaggcacactagaagcgagcgactttgcgaataaaaccattgggcttgtaggcttgggcgatcaagacacttacagcgaaactttcgcggaaggcattttccacatt

SEQ ID NO: 1624 - DNA (genomic), 495 bp, Helicobacter pylori; double-stranded, circular
  misc_feature (B) LOCATION 1...495
  hypothetical: NO
  anti-sense: NO
atgggaaaaattggtatcttttttgggacagacagcgggaacgctgaagctatcgctgaaaaaatcagcaaggctattggtaatgctgaagtgattgatgtggctaaagcttctaaagagcaatttaatggctttacaaaggttattttagtcgctccaacagccggtgcgggcgatttgcaaacagattgggaagactttttaggcacactagaagcgagcgactttgcgaataaaaccattgggcttgtaggcttgggcgatcaagacacttacagcgaaactttcgcggaaggcattttccacatttatgaaaaagctaaagccggcaaagtggtaggacaaactcccactgatggttatcattttgaagcttctaaagcggtagaaggcggtaaattcgtgggtctagtgattgatgaagacaatcaagacgatttgacagatgaaagaattgcaaaatgggtagaacaagttaaaggttctttcgcttaa

SEQ ID NO: 1625 - DNA (genomic), 366 bp, Helicobacter pylori; double-stranded, circular
  misc_feature (B) LOCATION 1...366
  hypothetical: NO
  anti-sense: NO
ttgaatgaagatgtgaccgttcctagggcgagcttgccgagtttgttgcaagaagtcgccaaaatcagtcagaaatacggctttaaaatcccttgctttgggcayacgggcgatggcaatgtgcatgtgaatatcatgctagaagatcctaaaagggatttagaaaaaggccataaggctatggaagagatttttcaggccgctattagtttggaggggactttaagcggggagcatggtataggcttgtctaaagccaaattcatgcctttagcgtttaatcatagtgaaatggagctttttaggaacattaaaaaagcccttgatcctaataatattttaaacccttttaaaatggggctataa

SEQ ID NO: 1626 - DNA (genomic), 435 bp, Helicobacter pylori; double-stranded, circular
  misc_feature (B) LOCATION 1...435
  hypothetical: NO
  anti-sense: NO
caagaagagcaggatttatggttttcaaggcgtaacgcttctcaaagtattagcgtttatggtaaaaagaaattgaatgaagatgtgaccgttcctagggcgagcttgccgagtttgttgcaagaagtcgccaaaatcagtcagaaatacggctttaaaatccctcgctttgggcatacgggcgatggcaatgtgcatgtgaatatcatgctagaagatcctaaaagggatttagaaaaaggccataaggctatggaagagatttttcaggccgctattagtttggaggggactttaagcggggagcatggtataggcttgtctaaagccaaattcatgcctttagcgtttaatcatagtgaaatggagctttttaggaacattaaaaaagcccttgatcctggtaatgttttaaacccttttaaaatggggcta

SEQ ID NO: 1627 - DNA (genomic), 495 bp, Helicobacter pylori; double-stranded, circular
  misc_feature (B) LOCATION 1...495
  hypothetical: NO
  anti-sense: NO
gggggaatatcgttcgcaaatgccgatcccatgcgcgtggttaaatacggactcactaaagattatgtcacggctctacggtgtctcttagcgaatggcgaaatcataagggcaggcaaaaagacgatcaaagatgtcgccggctttaatatcgcagggctgatgaccgctagtgaggggtgtttgggcgtgatttctgaaatcactttaaagcttttagccaaaccgcccctaaaacaaagcgcgatgggggtttttaaccatattgaagacgccatgaacgccgtttataagacgatgagcagcggcgttacgcctgtggcgatggaatttttggataatttgagtattaaagcggttgaagagcgattttctaaaggcttacccaaagacgctggagcgatacttatcactcaagtggatggcgtggtgaaagaacagatcgcatggcaactcaatgaaatagaaaagcattttaaagccaatggttgcgtg

SEQ ID NO: 1628 - DNA (genomic), 498 bp, Helicobacter pylori; double-stranded, circular
  misc_feature (B) LOCATION 1...498
  hypothetical: NO
  anti-sense: NO
gggggaatatcgttcgcaaatgccgatcccatgcgcgtggttaaatacggactcactaaagattatgtcacggctctacggtgtctcttagcgaatggcgaaatcataagggcaggcaaaaagacgatcaaagatgtcgccggctttaatatcgcagggctgatgaccgctagtgaggggtgtttgggcgtgatttctgaaatcactttaaagcttttagccaaaccgcccctaaaacaaagcgcgatgggggtttttaaccatattgaagacgccatgaacgccgtttataagacgatgagcagcggcgttacgcctgtggcgatggaatttttggataatttgagtattaaagcggttgaagagcgattttctaaaggcttacccaaagacgctggagcgatacttatcactcaagtggatggcgtggtgaaagaacagatcgcatggcaactcaatgaaatagaaaagcattttaaagccaatggttgcgtgggt

SEQ ID NO: 1629 - DNA (genomic), 639 bp, Helicobacter pylori; double-stranded, circular
  misc_feature (B) LOCATION 1...639
  hypothetical: NO
  anti-sense: NO
gtggcgatggaatttttggataatttgagtattaaagcggttgaagagcgattttctaaaggcttacccaaagacgctggagcgatacttatcactcaagtggatggcgtggtgaaagaacagatcgcatggcaactcaatgaaatagaaaagcattttaaagccaatggttgcgtgggttttaagatcgctcaaaacgaacaagaagagcaggatttatggttttcaaggcgtaacgcttctcaaagtattagcgtttatggtaaaaagaaattgaatgaagatgtgaccgttcctagggcgagcttgccgagtttgttgcaagaagtcgccaaaatcagtcagaaatacggctttaaaatcccttgctttgggcatacgggcgatggcaatgtgcatgtgaatatcatgctagaagatcctaaaagggatttagaaaaaggccataaggctatggaagagatttttcaggccgctattagtttggaggggactttaagcggggagcatggtataggcttgtctaaagccaaattcatgcctttagcgtttaatcatagtgaaatggagctttttaggaacattaaaaaagcccttgatcctaataatattttaaacccttttaaaatggggctataa

SEQ ID NO: 1630 - DNA (genomic), 951 bp, Helicobacter pylori; double-stranded, circular
  misc_feature (B) LOCATION 1...951
  hypothetical: NO
  anti-sense: NO
atgtcgtccgcaaatgccggtggcatgcgcgcggctaaatacggcatcactaaagattatgtcatggctttaagggtggttttagcgaatggcgaaatcataagggcaggcaaaaagacgatcaaagatgtcgccggctttaatatcgcagggctgatgatcgctagtgaggggtgtttgggcgtgatttctgaaatcactttaaagcttttagccaaaccgcccctaaaacaaagcgcgatgggggtttttaaccatattgaagacgccatgaacgccgtttataagacgatgagcagcggcgttacgcctgtggcgatggaatttttggataatttgagtattaaagcggttgaagagcgattttctaaaggcttacccaaagacgctggagcgatacttatcactcaagtggatggcgtggtgaaagaacagatcgcatggcaactcaatgaaatagaaaagcattttaaagccaatggttgcgtgggttttaagatcgctcaaaacgaacaagaagagcaggatttatggttttcaaggcgtaacgcttctcaaagtattagcgtttatggtaaaaagaaattgaatgaagatgtgaccgttcctagggcgagcttgccgagtttgttgcaagaagtcgccaaaatcagtcagaaatacggctttaaaatcccttgctttgggcatacgggcgatggcaatgtgcatgtgaatatcatgctagaagatcctaaaagggatttagaaaaaggccataaggctatggaagagatttttcaggccgctattagtttggaggggactttaagcggggagcatggtataggcttgtctaaagccaaattcatgcctttagcgtttaatcatagtgaaatggagctttttaggaacattaaaaaagcccttgatcctaataatattttaaacccttttaaaatggggctataa

SEQ ID NO: 1631 - DNA (genomic), 354 bp, Helicobacter pylori; double-stranded, circular
  misc_feature (B) LOCATION 1...354
  hypothetical: NO
  anti-sense: NO
atgcatgaatactcggtcgtttcttctttaatcgctctttgcgaagagcatgcgaagaagaatcaagcccataagattgaaagagtcgtggtcggtattggcgaaagaagcgctatggataagagcttgtttgtgagcgcgtttgagacttttagagaagaatctttggtgtgtaaagacgctattttagacatcgtggatgaaaaggttgaattagaatgtaaggattgttcgcatgtttttaagcctaacgccctagattatggggtgtgtgagaaatgccacagcaagaatgtcattatcactcaaggcaatgaaatgcgtttgttgtctttagaaatgttagcggaataa

SEQ ID NO: 1632 - DNA (genomic), 366 bp, Helicobacter pylori; double-stranded, circular
  misc_feature (B) LOCATION 1...366
  hypothetical: NO
  anti-sense: NO
agattaaggtttagcatgcatgaatactcggtcgtttcttctttaatcgctctttgcgaagagcatgcgaagaagaatcaagcccataagattgaaagagtcgtggtcggtattggcgaaagaagcgctatggataagagcttgtttgtgagcgcgtttgagacttttagagaagaatctttggtgtgtaaagacgctattttagacatcgtggatgaaaaggttgaattagaatgtaaggattgttcgcatgtttttaagcctaacgccctagattatggggtgtgtgagaaatgccacagcaagaatgtcattatcactcaaggcaatgaaatgcgtttgttgtctttagaaatgttagcggaa

SEQ ID NO: 1633 - DNA (genomic), 126 bp, Helicobacter pylori; double-stranded, circular
  misc_feature (B) LOCATION 1...126
  hypothetical: NO
  anti-sense: NO
atggttaataaagatgtgaaacaaaccactgcttttggcgctcccgtttgggatgacaacaatgtgattacggccggccctagaggtcctgttttattacaaagtacttggtttttggaaagttag

SEQ ID NO: 1634 - DNA (genomic), 186 bp, Helicobacter pylori; double-stranded, circular
  misc_feature (B) LOCATION 1...186
  hypothetical: NO
  anti-sense: NO
tcaccacaagtaattggcctagtgtcggattacgaagatttaagatcaaataaaggaaaaaagatggttaataaagatgtgaaacaaaccactgcttttggcgctcccgtttgggatgacaacaatgtgattacggccggccctagaggtcctgttttattacaaagtacttggtttttggaaagt

SEQ ID NO: 1635 - DNA (genomic), 324 bp, Helicobacter pylori; double-stranded, circular
  misc_feature (B) LOCATION 1...324
  hypothetical: NO
  anti-sense: NO
actaaagacatcactaaatacactaaagcgaaaattttctctaaagtgggcaaaaaaaccgaatgctttttcagattttccactgtggctggtgaaaaaggcagcgcggatgcggtaagagacccaagaggttttgcgatgaagtattacactgaagaaggtaactgggatttagtgggaacaacacgcctgttttctttatccgtgatgcgatcaaattccctgatttcatccacactcaaaaacgagatcctcaaaccaatttgcctaaccctgacatggtatgggatttttggagtaatgttcctgaaagcttgtatcaag

SEQ ID NO: 1636 - DNA (genomic), 474 bp, Helicobacter pylori; double-stranded, circular
  misc_feature (B) LOCATION 1...474
  hypothetical: NO
  anti-sense: NO
ctgggatttagtgggaacaacacgcctgttttctttatccgtgatgcgatcaaattccctgatttcatccacactcaaaaacgagatcctcaaaccaatttgcctaaccctgacatggtatgggatttttggagtaatgttcctgaaagcttgtatcaagtaacatgggttatgagcgatagaggtatccctaaatctttccgccacatggatggttttggtagccacactttcagtcttatcaacgctaaaggcgaacgcttttgggtgaaattccactttgaaaccatgcaaggcgttaagcacttgactaatgaagaagccgcagaagttaggaaatatgatccggattcaaaccaaagggatttattcgatgcgatcgctggaggggagttcccaaaatgggaaattggcatccaagtgaggccagaagaggacgttaaaaagtatcgattccatccgtttgaagtgaat

SEQ ID NO: 1637 - DNA (genomic), 618 bp, Helicobacter pylori; double-stranded, circular
  misc_feature (B) LOCATION 1...618
  hypothetical: NO
  anti-sense: NO
tcaaaaatcctgaaaactatttcgcagaagtggaacaagcggcattcactccggctaatgtcgttccctggaattggctatagccctgataggatgttgcaagggcgcttgttctcttatggagacacacaccgctaccgcttaggggttaattatcctcagataccggttaacaggccaagatgcccattccactcttctagcagagatggttacatgcaaaacgggtactacggctctttacaaaactatacgcctagctcattgcctggctataaagaagataagagcgctagggatcctaagttcaacttggctcatattgaaaaagagtttgaagtgtggaattgggattacagagctgaagatagcgattactacacccaaccaggtgattactaccgctcattgccagctgatgaaaaagaaaggttgtatgacactattggagggtctttagctcatgttacccataaggaaattgtggataaacaattggagcatttcaagaaagctgaccccaaatacgctgagggagttaaaaaagctcttgaaaaacaccaaaaaatgatgaaagacatgcatgcaaaagacatgcatcacatgaaaaagaaaaag

SEQ ID NO: 1638 - DNA (genomic), 1269 bp, Helicobacter pylori; double-stranded, circular
  misc_feature (B) LOCATION 1...1269
  hypothetical: NO
  anti-sense: NO
gtgggcaaaaaaaccgaatgctttttcagattttccactgtggctggtgaaaaaggcagcgcggatgcggtaagagacccaagaggttttgcgatgaagtattacactgaagaaggtaactgggatttagtagggaacaacacgcctgttttctttatccgtgatgcgatcaaattccctgatttcatccacactcaaaaacgagatcctcaaaccaatttgcctaaccctgacatggtatgggatttttggagtaatgttcctgaaagcttgtatcaagtaacatgggttatgagcgatagaggtatccctaaatctttccgccacatggatggttttggtagccacactttcagtcttatcaacgctaaaggcgaacgcttttgggtgaaattccactttgaaaccatgcaaggcgttaagcacttgactaatgaagaagccgcagaagttaggaaatatgatccggattcaaaccaaagggatttattcgatgcgatcgctggaggggatttcccaaaatggaaaatgagcattcaagtgatgccagaagaggacgctaaaaagtatcgattccatccgtttgatgtgactaaaatctggtatctccaagattatccgttaatggaagtgggcattgtggagttgaataaaaatcctgaaaactatttcgcagaagtggaacaagcggcattcactccggctaatgtcgttcctggaattggctatagccctgataggatgttgcaagggcgcttgttctcttatggagacacacaccgctaccgcttaggggttaattatcctcagataccggttaacaggccaagatgcccattccactcttctagcagagatggttacatgcaaaacgggtactacggctctttacaaaactatacgcctagctcattgcctggctataaagaagataagagcgctagggatcctaagttcaacttggctcatattgaaaaagagtttgaagtgtggaattgggattacagagctgaagatagcgattactacacccaaccaggtgattactaccgctcattgccagctgatgaaaaagaaaggttgtatgacactattggagggtctttagctcatgttacccataaggaaattgtggataaacaattggagcatttcaagaaagctgaccccaaatacgctgagggagttaaaaaagctcttgaaaaacaccaaaaaatgatgaaagacatgcatgcaaaagacatgcatcacatgaaaaagaaaaagtaa

SEQ ID NO: 1639 - DNA (genomic), 1518 bp, Helicobacter pylori; double-stranded, circular
  misc_feature (B) LOCATION 1...1518
  hypothetical: NO
  anti-sense: NO
atggttaataaagatgtgaaacaaaccactgcttttggcgctcccgtttgggatgacaacaatgtgattacggccggccctagaggtcctgttttattacaaagtacttggtttttggaaaagttagcggcgtttgacagagaaagaatccctgaaagggtagtgcatgctaaaggaagcggggcttatggcacttttaccgtgactaaagacatcactaaatacactaaagcgaaaattttctctaaagtgggcaaaaaaaccgaatgctttttcagattttccactgtggctggtgaaaaaggcagcgcggatgcggtaagagacccaagaggttttgcgatgaagtattacactgaagaaggtaactgggatttagtagggaacaacacgcctgttttctttatccgtgatgcgatcaaattccctgatttcatccacactcaaaaacgagatcctcaaaccaatttgcctaaccctgacatggtatgggatttttggagtaatgttcctgaaagcttgtatcaagtaacatgggttatgagcgatagaggtatccctaaatctttccgccacatggatggttttggtagccacactttcagtcttatcaacgctaaaggcgaacgcttttgggtgaaattccactttgaaaccatgcaaggcgttaagcacttgactaatgaagaagccgcagaagttaggaaatatgatccggattcaaaccaaagggatttattcgatgcgatcgctggaggggatttcccaaaatggaaaatgagcattcaagtgatgccagaagaggacgctaaaaagtatcgattccatccgtttgatgtgactaaaatctggtatctccaagattatccgttaatggaagtgggcattgtggagttgaataaaaatcctgaaaactatttcgcagaagtggaacaagcggcattcactccggctaatgtcgttcctggaattggctatagccctgataggatgttgcaagggcgcttgttctcttatggagacacacaccgctaccgcttaggggttaattatcctcagataccggttaacaggccaagatgcccattccactcttctagcagagatggttacatgcaaaacgggtactacggctctttacaaaactatacgcctagctcattgcctggctataaagaagataagagcgctagggatcctaagttcaacttggctcatattgaaaaagagtttgaagtgtggaattgggattacagagctgaagatagcgattactacacccaaccaggtgattactaccgctcattgccagctgatgaaaaagaaaggttgtatgacactattggagggtctttagctcatgttacccataaggaaattgtggataaacaattggagcatttcaagaaagctgaccccaaatacgctgagggagttaaaaaagctcttgaaaaacaccaaaaaatgatgaaagacatgcatgcaaaagacatgcatcacatgaaaaagaaaaagtaa

SEQ ID NO: 1640 - DNA (genomic), 1020 bp, Helicobacter pylori; double-stranded, circular
  misc_feature (B) LOCATION 1...1020
  hypothetical: NO
  anti-sense: NO
atgagacatggagatattagtagcagccccgatactgtgggcgtagcggtagttaattataagatgcctagactccacactaagaatgaggtgttggaaaattgtcgcaatatcgctaaggtgattggtggggtcaaacagggtttgcctgggttggatctgattattttccctgaatacagcacgcatgggatcatgtatgacagacaagaaatgtttgacaccgctgcgagcgttcctggggaagaaaccgcaatccttgctgaggcttgtaagaaaaacaaggtttggggagtgttctctttgacaggggaaaaacatgagcaggctaaaaagaatccctataacactttgattcttgtcaatgataagggcgagatcgtgcaaaaataccgcaaaatcttgccttggtgtcctattgaatgttggtatcctggggataaaacctatgtggttgatgggcctaagggcttgaaagtttctttgattatctgcgatgatgggaactaccctgaaatttggcgcgattgcgcgatgcgtggggcagaactcattgtgcgctgtcaaggttacatgtatccggctaaggagcaacaaattgcgatagtgaaagctatggcgtgggccaatcaatgttatgtagcggtagcgaatgcgaccggttttgatggggtgtattcatattttgggcattccagcattattggttttgatgggcatactttgggcgaatgcggggaagaagaaaatggtcttcaatacgctcaactttccgtgcaacaaatccgtgatgcgagaaaatacgaccaaagccaaaaccaactcttcaaactcttgcacagaggttatagtggggtttttgctagtggcgatggggataagggtgtggcggaatgcccttttgagttctataaaacttgggttaatgaccccaaaaaagctcaagaaaatgtagaaaaattcactcgcccaagcgtgggcgtggccgcttgtcctgtaggcgatttgcccacgaaataa

SEQ ID NO: 1641 - DNA (genomic), 1050 bp, Helicobacter pylori; double-stranded, circular
  misc_feature (B) LOCATION 1...1050
  hypothetical: NO
  anti-sense: NO
gaactctcatcaaaaaaaaataaggaacataacatgagacatggagatattagtagcagccccgatactgtgggcgtagcggtagttaattataagatgcctagactccacactaagaatgaggtgttggaaaattgtcgcaatatcgctaaggtgattggtggggtcaaacagggtttgcctgggttggatctgattattttccctgaatacagcacgcatgggatcatgtatgacagacaagaaatgtttgacaccgctgcgagcgttcctggggaagaaaccgcaatccttgctgaggcttgtaagaaaaacaaggtttggggagtgttctctttgacaggggaaaaacatgagcaggctaaaaagaatccctataacactttgattcttgtcaatgataagggcgagatcgtgcaaaaataccgcaggatcttgccttggtgtcctattgaatgttggtatcctggggataaaacctatgtggttgatgggcctaagggcttgaaagtttctttgattatctgcgatgatgggaactaccctgaaatttggcgcgattgcgcgatgcgtggggcagaactcattgtgcgctgtcaaggttacatgtatccggctaaggagcaacaaattgcgatagtgaaagctatggcgtgggccaatcaatgttatgtagcggtagcgaatgcgaccggttttgatggggtgtattcatattttgggcattccagcattattggttttgatgggcatattgtgggcgaatgcggggaagaagaaaatggtcttcaatacgctcaactttccgtgcaacaaatccgtgatgcgagaaaatacgaccaaagccaaaaccaactcttcaaactcttgcacagaggttatagtggggtttttgctagtggcgatggggataagggtgtggcggaatgcccttttgagttctataaaacttgggttaatgaccccaaaaaagctcaagaaaatgtagaaaaattcactcgcccaagcgtgggcgtggccgcttgtcctgtaggcgatttgcccacgaaa

SEQ ID NO: 1642 - DNA (genomic), 255 bp, Helicobacter pylori; double-stranded, circular
  misc_feature (B) LOCATION 1...255
  hypothetical: NO
  anti-sense: NO
atgtcattattagtgaatgatgaatgcattgcgtgcgatgcttgcagagaagaatgccctagtgaggcgattgaagagggtgatcccatttacagtattgatccagatcgatgcacggagtgttacgggtatgatgatgatgagcctcgttgcgtgagcgtatgccctgtagatgcgattttaccggatcctaacaacgcagagagcaaagaggaattgaaatacaaatacgaaatcttaaaagagcaagactaa

SEQ ID NO: 1643 - DNA (genomic), 255 bp, Helicobacter pylori; double-stranded, circular
  misc_feature (B) LOCATION 1...255
  hypothetical: NO
  anti-sense: NO
aaggagttagtcatctcattattagtgaatgatgaatgcattgcgtgcgatgcttgcagagaagaatgccctagtgaggcgattgaagagggtgatcccatttacagtattgatccagatcgatgcacggagtgttacgggtatgatgatgatgagcctcgttgcgtgagcgtatgccctgtagatgcgattttaccggagtctaacaacgcagagagcaaagaggaattgaaatacaaatacgaaatcttaaaa

SEQ ID NO: 1644 - DNA (genomic), 162 bp, Helicobacter pylori; double-stranded, circular
  misc_feature (B) LOCATION 1...162
  hypothetical: NO
  anti-sense: NO
atggcttgcggcgggccgcgctgtggtttgggcgagcttaatatccctgaaaacgagccgggcagttctattatgcccggtaaagtcaatcccacgcaagtcgaagcgatgacaatggtagccgtgcaagtgatggggaatgataccgctattggcattgcg

SEQ ID NO: 1645 - DNA (genomic), 189 bp, Helicobacter pylori; double-stranded, circular
  misc_feature (B) LOCATION 1...189
  hypothetical: NO
  anti-sense: NO
acaacaaattttagagagtttggagcatttaagggaattgccataggcgggagcctcgtaggcacagggctaaacgctcataaggaattgagcgaaaaagtggctgaagaattgagccagtttagcggcgtgaaattcatctctgcacccaataaattccacgcgctcactagccatgacgctatcgct

SEQ ID NO: 1646 - DNA (genomic), 705 bp, Helicobacter pylori; double-stranded, circular
  misc_feature (B) LOCATION 1...705
  hypothetical: NO
  anti-sense: NO
ggttttaaaatcaaatttcaaaggattagcatgcaatttagaattgaacatgacacgatgggcgaaatcaaagtagatgacagccaatattggggggctcaaacgcaacgcagtcttgaaaactttaagatcggcactgaaaaaatgcctaaagaactcattggcgcgttcgccaaactcaaaaggagtttagcggttgtcaatcacaagttagggaaattaagcctggaaaaatcgcaagccattatcaaagcgtgcgattgcattttaaaaggcgagttgtgcggcgaattccccctagcgatatggcaaacagggagcgggactcaaacgaacatgaacctcaatgaagtcattgccaataaggctaccgaaattttagggggtaattttagggagaaaaaactcatccaccctaacgatgatgtgaacatgtctcaaagctccaacgacactttccctaccgcaatgcacgttgtgagcgtgctagaaatcacgcataaactgctgcctagtttagagaatctgttaaaaacctttaaagaaaaaagccaacaatttaaagagattgtcaaaatcgggcgcacgcatttacaagacgctacgcctttaactttggggcaagaatttagcgggtatgcgagcatgctagagcattctaaacaacaaattttagagagtttggagcatttaagggaattgcca

SEQ ID NO: 1647 - DNA (genomic), 1053 bp, Helicobacter pylori; double-stranded, circular
  misc_feature (B) LOCATION 1...1053
  hypothetical: NO
  anti-sense: NO
atgcaatttagaattgaacatgacacgatgggcgaaatcaaagtagatgacagccaatattggggggctcaaacgcaacgcagtcttgaaaactttaagatcggcactgaaaaaatgcctaaagaactcattggcgcgttcgccaaactcaaaaggagtttagcggttgtcaatcacaagttagggaaattaagcctggaaaaatcgcaagccattatcaaagcgtgcgattgcattttaaaaggcgagttgtgcggcgaattccccctagcgatatggcaaacagggagcgggactcaaacgaacatgaacctcaatgaagtcattgccaataaggctaccgaaattttagggggtaattttagggagaaaaaactcatccaccctaacgatgatgtgaacatgtctcaaagctccaacgacactttccctaccgcaatgcacgttgtgagcgtgctagaaatcacgcataaactgctgcctagtttagagaatctgttaaaaacctttaaagaaaaaagccaacaatttaaagagattgtcaaaatcgggcgcacgcatttacaagacgctacgcctttaactttggggcaagaatttagcgggtatgcgagcatgctagagcattctaaacaacaaattttagagagtttggagcatttaagggaattagccataggcgggactgccgtaggcacagggctaaacgctcataaggaattgagcgaaaaagtggctgaagaattgagccagtttagcggcgtgaaattcatctctgcacccaataaattccacgcgctcactagccatgacgctatcgcttatgcgcatggggcttttaaggctttagcggcgaatttaatgaaaatcgctaacgatattagatggcttgcgagcgggccgcgctgtggtttgggcgagcttaatatccctgaaaacgagccgggcagttctattatgcccggtaaagtcaatcccacgcaatgcgaagcgatgacaatggtagccgtgcaagtgatggggaatgataccgctattggcattgcgaccaat

SEQ ID NO: 1648 - DNA (genomic), 204 bp, Helicobacter pylori; double-stranded, circular
  misc_feature (B) LOCATION 1...204
  hypothetical: NO
  anti-sense: NO
acgcatgaaagaggatttaaaacctatggcatgggggggctttctagtttagaaggagcgagccattttgtcatttatcttgcgcgaaaaggcgttacctatgacagcgattacgttaaaaaagtgatgcatgaggttaagaaaagggattatgacacccattcaaggttcgctcaaatcatcaaaatttccaagagaacgata

SEQ ID NO: 1649 - DNA (genomic), 237 bp, Helicobacter pylori; double-stranded, circular
  misc_feature (B) LOCATION 1...237
  hypothetical: NO
  anti-sense: NO
aaaaaggagaacattaaaatggacagagaacaaattattgctttacagcaccaacgattcgctacgaaaaaatacgatccgaatcgccgtatttctgaaaaagattgggaagttttggttgaagtggggaggttagccccttcttcaatcgggcttgaaccatggaaaatgcttttattgaaaaatgaacgcatgaaagaggatttaaaacctatggcatgggggggctttctagtt

SEQ ID NO: 1650 - DNA (genomic), 270 bp, Helicobacter pylori; double-stranded, circular
  misc_feature (B) LOCATION 1...270
  hypothetical: NO
  anti-sense: NO
ctcaatagcgaacatcccttgtttgattgggctagcaagcagacttatatccaaatggcgaacatgatgatggcagcggccatgttagggattgattcttgcccgattgaagggtatgatcaagaaaaagtggcggcttatttagaggaaaaaggctatctaaacacggcagaatttggcgtgtcggtaatggctagttttggttatcgtaaccaagagattacccctaaaacccgctggaagacagaagttatttatgaagtgattgaa

SEQ ID NO: 1651 - DNA (genomic), 654 bp, Helicobacter pylori; double-stranded, circular
  misc_feature (B) LOCATION 1...654
  hypothetical: NO
  anti-sense: NO
atggacagagaacaaattattgctttacagcaccaacgattcgctacgaaaaaatacgatccgaatcgccgtatttctgaaaaagattgggaagttttggttgaagtggggaggttagccccttcttcaatcgggcttgaaccatggaaaatgcttttattgaaaaatgaacgcatgaaagaggatttaaaacctatggcatggggggggctttctagtttagaaggagcgagccattttgtcatttatcttgcgcgaaaaggcgttacctatgacagcgattacgttaaaaaagtgatgcatgaggttaagaaaagggattatgacacccattcaaggttcgctcaaatcatcaaaaatttccaagagaacgatataaaactcaatagcgaacgatccttgtttgattgggctagcaagcagacttatatccaaatggcgaacatgatgatggcagcggccatgttagggattgattcttgcccgattgaagggtatgatcaagaaaaagtggaggcttatttagaggaaaaaggctatctaaacacggcagaatttggcgtgtcggtaatggctagttttggttatcgtaaccaagagatcacccctaaaacccgctggaagacagaagttatttatgaagtgattgaataa

SEQ ID NO: 1652 - DNA (genomic), 717 bp, Helicobacter pylori; double-stranded, circular
  misc_feature (B) LOCATION 1...717
  hypothetical: NO
  anti-sense: NO
cttcccatgagattcaagtttggcgatgcgtttgaatgcttaatagaacaatatttaaaagagcatagcttttcacctttatctaaaaaaattccttattacaataaggataaagaaaaaagggaatctttagaattggatcagttcgctaaaaaagataacacaatttattttatggaacaaaaaatgcgagacgaccatgacagcgccaaaaagagagggcaaatagacaactttgaaaggaaattagaggctttaatccatcgttatggcgaaaacattcaaggctatttttattttatagatgagggtttgaataaaaatcaaaattattataaagaagaattgcaaaaattatccgctgattatggcgtgcctttgagtttgcgctatggtaaggggttgtttgaatctcttaatatcccgcaagtttgggatgaggttttaacccatttagcgcgatggcgtgaaaccttacccgatttacccagtttgaattttgatgaaaatcctttagaaagctttagagaaatcaaagatttagcgccaagcgtttataggaagcttttggataatgatgaaattttcaatcttgtgttaattttattcccagaacaaaaagttttaaaaatgttagtagagcattttagacaacagaataaaacgatctatcagcaattagcgtcaaagttagtgcaaaagttattgtctttgcga

SEQ ID NO: 1653 - DNA (genomic), 873 bp, Helicobacter pylori; double-stranded, circular
  misc_feature (B) LOCATION 1...873
  hypothetical: NO
  anti-sense: NO
atggactatcaaacctttaacgagatttttaatcgttttgtttttggaacatctaaagcaaaattacttgaaaatattgccgaaaatcctgaacgctatttggggatttttagacccactaagcctaaaacaaaattattacaaaatttattgacttcccatgagattaagtttggcgatgcgtttgaatgcttaatagaacaatatttaaaagagcatagcttttcacctttatctaaaaaaattccttattacaataaggataaagaaaaaagggaatctttagaattggatcagttcgctaaaaaagataacacatattattttatggaacaaaaaatgcgagacgaccatgacagcgccaaaaagagagggcaaatagacaactttgaaaggaaattagaggctttaatccatcgttatggcgaaaacattcaaggctatttttattttatagatgagggtttgaataaaaatcaaaattattataaagaagaattgcaaaaattatccgctgattatggcgtgcctttgagtttgcgctatggtaaggggttgtttgaatctcttaatatcccgcaagtttgggatgaggttttaacccatttagcgcgatggcgtgaaaccttacccgatttacccagtttgaattttgatgaaaatcctttagaaagctttagagaaatcaaagatttagcgccaagcgtttataggaagcttttggataatgatgaaattttcaatcttgtgttaattttattcccagaacaaaaagttttaaaaatgttagtagagcattttagacaacagaataaaacgatctatcagcaattagcgtcaaagttagtgcaaaagttattgtctttgcgatag

SEQ ID NO: 1654 - DNA (genomic), 177 bp, Helicobacter pylori; double-stranded, circular
  misc_feature (B) LOCATION 1...177
  hypothetical: NO
  anti-sense: NO
aagctcattgatttggcccaccctttggataaacgacgctccagagcggccgcaagcaacattatccccaccaccactaaagccgccctagccttgcataaagtgttacccaatctcaaaaataaaatgcatgggcatagcgtgagagtgcctagccttgatgtgtccatgatagat

SEQ ID NO: 1655 - DNA (genomic), 237 bp, Helicobacter pylori; double-stranded, circular
  misc_feature (B) LOCATION 1...237
  hypothetical: NO
  anti-sense: NO
cctgtacagactgaggcgcaaaatgtgtcattatccgctctctttatcggcgaatacgatgaaaaacaataccccactttggtgtatggggtcaatcattttctctaccaaaaccaagccattgtttctaacgcctcttgcacgactaacgctattgcgcccatttgcgcgattttagataaagcttttagcattaaagagggcatgctaacgaccattcatagctacacgagcgat

SEQ ID NO: 1656 - DNA (genomic), 234 bp, Helicobacter pylori; double-stranded, circular
  misc_feature (B) LOCATION 1...234
  hypothetical: NO
  anti-sense: NO
gtacagactgaggcgcaaaatgtgtcattatccgctctctttatcggcgaatacgatgaaaaacaataccccactttggtgtatggggtcaatcattttctctaccaaaaccaagccattgtttctaacgcctcttgcacgactaacgctattgcgcccatttgcgcgattttagataaagcttttagcattaaagagggcatgctaacgaccattcatagctacacgagcgat

SEQ ID NO: 1657 - DNA (genomic), 336 bp, Helicobacter pylori; double-stranded, circular
  misc_feature (B) LOCATION 1...336
  hypothetical: NO
  anti-sense: NO
acgatgaaaatttttatcaatggatttggccgcattgggagatgcgttttaagagcgattttagagcgcaatgatacaaaccctcaactagaagtgataggcatcaatgaccctgccaattgggaaattctcgcttatcttttagagcatgacagcacgcatggattgctcaataaggaggtgcgttactctaatggtaagcttattatcggctcgttagaaatccctgtttttaatagcatcaaagacttgaaaggcgtgggtgtcatcatagagtgttcagggaagtttttagagcctaaaacgctagaaaattaccttttgcttggggctaaa

SEQ ID NO: 1658 - DNA (genomic), 333 bp, Helicobacter pylori; double-stranded, circular
  misc_feature (B) LOCATION 1...333
  hypothetical: NO
  anti-sense: NO
atgaaaatttttatcaatggatttggccgcattgggagatgcgttttaagagcgattttagagcgcaatgatacaaaccctcaactagaagtgataggcatcaatgaccctgccaattgggaaattctcgcttatcttttagagcatgacagcacgcatggattgctcaataaggaggtgcgttactctaatggtaagcttattatcggctcgttagaaatccctgtttttaatagcatcaaagacttgaaaggcgtgggtgtcatcatagagtgttcagggaagtttttagagcctaaaacgctagaaaattaccttttgcttggggctaaa

SEQ ID NO: 1659 - DNA (genomic), 393 bp, Helicobacter pylori; double-stranded, circular
  misc_feature (B) LOCATION 1...393
  hypothetical: NO
  anti-sense: NO
ttggtgtatggggtcaatcattttctctatcaaaaccaagccattgtttctaacgcctcttgcacgactaacgctattgcgcccatttgcgcgattttagataaagcttttagcattaaagagggcatgctaacgaccattcatagctacacgagcgatcaaaagctcattgatttggcccaccctttggataaacgacgctccagagcggccgcaagcaacattatccccaccaccactaaagccgccctagccttgcataaagtgttacccaatctcaaaaataaaatgcatgggcatagcgtgagagtgcctagccttgatgtgtccatgatagatttgagtttgtttttagaaaaaaaggctctcaaagatccgatcatgatttattga

SEQ ID NO: 1660 - DNA (genomic), 783 bp, Helicobacter pylori; double-stranded, circular
  misc_feature (B) LOCATION 1...783
  hypothetical: NO
  anti-sense: NO
atgaaaatttttatcaatggatttggccgcattgggagatgcgttttaagagcgattttagagcgcaatgatacaaaccctcaactagaagtgataggcatcaatgaccctgccaattgggaaattctcgcttatcttttagagcatgacagcacgcatggattgctcaataaggaggtgcgttactctaatggtaagcttattatcggctcgttagaaatccctgtttttaatagcatcaaagacttgaaaggcgtgggtgtcatcatagagtgttcagggaagtttttagagcctaaaacgctagaaaattaccttttgcttggggctaaaaaggtgttgttatccgctccctttatgggcgaatacgatgaaaaacaataccccactttggtgtatggggtcaatcattttctctatcaaaaccaagccattgtttctaacgcctcttgcacgactaacgctattgcgcccatttgcgcgattttagataaagcttttagcattaaagagggcatgctaacgaccattcatagctacacgagcgatcaaaagctcattgatttggcccaccctttggataaacgacgctccagagcggccgcaagcaacattatccccaccaccactaaagccgccctagccttgcataaagtgttacccaatctcaaaaataaaatgcatgggcatagcgtgagagtgcctagccttgatgtgtccatgatagatttgagtttgtttttagaaaaaaaggctctcaaagatccgatcatgatttattga

SEQ ID NO: 1661 - DNA (genomic), 999 bp, Helicobacter pylori; double-stranded, circular
  misc_feature (B) LOCATION 1...999
  hypothetical: NO
  anti-sense: NO
atgaaaatttttatcaatggatttggccgcattgggagatgcgttttaagagcgattttagagcgcaatgatacaaaccctcaactagaagtgataggcatcaatgaccctgccaattgggaaattctcgcttatcttttagagcatgacagcacgcatggattgctcaataaggaggtgcgttactctaatggtaagcttattatcggctcgttagaaatccctgtttttaatagcatcaaagacttgaaaggcgtgggtgtcatcatagagtgttcagggaagtttttagagcctaaaacgctagaaaattaccttttgcttggggctaaaaaggtgttgttatccgctccctttatgggcgaatacgatgaaaaacaataccccactttggtgtatggggtcaatcattttctctatcaaaaccaagccattgtttctaacgcctcttgcacgactaacgctattgcgcccatttgcgcgattttagataaagcttttagcattaaagagggcatgctaacgaccattcatagctacacgagcgatcaaaagctcattgatttggcccaccctttggataaacgacgctccagagcggccgcaagcaacattatccccaccaccactaaagccgccctagccttgcataaagtgttacccaatctcaaaaataaaatgcatgggcatagcgtgagagtgcctagccttgatgtgtccatgatagatttgagtttgtttttagaaaaaaaggctctcaaagatccgatcaatgatttattgattacagcttccaaagggactttaaaaggcgtgttggagatagatttgaaagaaagggtgagttctgatttcatttctaaccctaatagcgtcatcatcgcacctgatttgactttcacgctagagaatatggtcaaaatcatggggtggtatgataacgaatgggggtattctaatcgtttggtggatatggcgcaattcatgtatcattattaa

SEQ ID NO: 1662 - DNA (genomic), 480 bp, Helicobacter pylori; double-stranded, circular
  misc_feature (B) LOCATION 1...480
  hypothetical: NO
  anti-sense: NO
atgcaacaagcaccagttattctaagcactttggataaattattgaattgggggcgttctaattcgctctggcccttaacttatggcttggcgtgttgtgcgattgagatgatggcgacagggggttcaaggtttgattttgacagatttggcacgatttttagggcgagtcctaggcaatctgatgtgatgatcatcgctggcacgctcactaaaaagcatgccgaattcatgcgcaggctctatgatcaaatgcctgagcctaaatgggtgatttctatggggagttgcgctaacacgggcgggatgtttaacacttatgcgaccgttcaaggagcggacagggttgttcctgtggatatttacttgcccggttgcgcgccacgcccagaaactttacaatacgctcttatggttttgcaagataagatcagacgctctaaagcgatcaaacaagacgctcctaaaaggttagtgtga

SEQ ID NO: 1663 - DNA (genomic), 399 bp, Helicobacter pylori; double-stranded, circular
  misc_feature (B) LOCATION 1...399
  hypothetical: NO
  anti-sense: NO
ttgagttttttataccgatcggctaattggagcgagagggaagcgtatgacatgcttggcattgtgtttgacaaacacccctatttgaaacgccttatcatgccgcatgattgggtaggccaccctttattgcgttcttacccgctcaaaggcgatgaattcgcccagtggtatgaagtggataaaatttttggcaaagaatatcgagaagtggtgggcaaagagcagagagacagtgcgagagtggatgaaaaagacacttttaattttgcaaaaatcggctatgagcagggcaagggcgaagaattaaaagaaacagaagaaaagcatgcgtttaagaaaatcccttttgtcaaagatttgcacaaaatcgcccccactatcttaaaaaagaggctg

SEQ ID NO: 1664 - DNA (genomic), 396 bp, Helicobacter pylori; double-stranded, circular
  misc_feature (B) LOCATION 1...396
  hypothetical: NO
  anti-sense: NO
agttttttataccgatcggctaattggagcgagagggaagcgtatgacatgcttggcattgtgtttgacaaacacccctatttgaaacgccttatcatgccgcatgattgggtaggccaccctttattgcgttcttacccgctcaaaggcgatgaattcgcccagtggtatgaagtggataaaatttttggcaaagaatatcgagaagtggtgggcaaagagcagagagacagtgcgagagtggatgaaaaagacacttttaattttgcaaaaatcggctatgagcagggcaagggcgaagaattaaaagaaacagaagaaaagcatgcgtttaagaaaatcccttttgtcaaagatttgcacaaaatcgcccccactatcttaaaaaagaggctg

SEQ ID NO: 1665 - DNA (genomic), 801 bp, Helicobacter pylori; double-stranded, circular
  misc_feature (B) LOCATION 1...801
  hypothetical: NO
  anti-sense: NO
gtgatggtaagaaaacaatccccctatgaagatgtgcaaaaacaatcgcgccagcatgacccttataaaatcatagaacccacccctaaaaaatatttagagggtagcgcttatgaggtcatttacaaccacctttcttacaagcatgaggttttagacaaatacatagagactaacacggctgtgttttggatcaaaaaagacgatattttttctgtcgctacgattttaaagcatttgggttatgagtgtttgagcgaaatgagcgcgatagatttgtgcgctaaaaaagggcattttgaattgttttatcaattcgtgggttttagcgatagctgtaagaaccgccgtagggtgcgcgtgaaatgcgttttgttgcctaatgagagcgtggattctttgagttttttataccgatcggctaattggagcgagagggaagcgtatgacatgcttggcattgtgtttgacaaacacccctatttgaaacgccttatcatgccgcatgattgggtaggccaccctttattgcgttcttacccgctcaaaggcgatgaattcgcccagtggtatgaagtggataaaatttttggcaaagaatatcgagaagtggtgggcaaagagcagagagacagtgcgagagtggatgaaaaagacacttttaattttgcaaaaatcggctatgagcagggcaagggcgaagaattaaaagaaacagaagaaaagcatgcgtttaagaaaatcccttttgtcaaagatttgcacaaaatcgcccccactatcttaaaaaagaggctgtaa

SEQ ID NO: 1666 - DNA (genomic), 183 bp, Helicobacter pylori; double-stranded, circular
  misc_feature (B) LOCATION 1...183
  hypothetical: NO
  anti-sense: NO
gacaacatttacaacctaggccatagagggtatgtggctaaaccgggcggagaacatgacgcaggcttaacctacatcaaagacttagcggccggcaaatacaaattgccttgggaagatcacatgaaaatcaaagacggctctatttatggctaccctaccaccggtgggcgttttgggaaa

SEQ ID NO: 1667 - DNA (genomic), 858 bp, Helicobacter pylori; double-stranded, circular
  misc_feature (B) LOCATION 1...858
  hypothetical: NO
  anti-sense: NO
ttattattgttattgcgacaaaactttttagaaggagttattatgggaagtatcggtagtatgggcaaacctattgaagggtttttagtggcagccattcagtttcctgtgccaattgtcaatagccgtaaggacattgatcacaacattgaaagcattatcagaaccttgcatgcgactaaagcggggtatccgggagtggagcttatcattttccctgagtatagcacgcaaggtttgaataccgctaagtggcttagcgaagagtttttattagacgttccgcgtaaagagacagagctatacgctaaggcgtgtaaacaggcgaaagtttatggtgttttgtcaatcatggaacgcaatcctgattctaacgaaaacccctacaacaccgccattatcattgatccgcaaggtaaaatcattctaaaataccgcaagctattcccatggaatcccattgagccatggtatcctggggatttaggaatgcctgtgtgcgaggggcctggcggatcaaaattagccgtgtgcatttgtcatgacggcatgattccagaactcgctagagaagcggcctataaagggtgcaatgtgtatatccgcatttcaggctatagcactcaagtcaatgatcaatggattttgaccaaccgctccaacgcatggcacaatttgatgtataccgtgagcgtgaatttagccggctatgacaatgtcttttactacttcggcgagaggcaaatctgtaactttgacggcacgactctcgttcaagggcaccgcaacccttgggagattgtaaccggggagatctatcctaaaatggcaaacaacgcccgcttaagctggggatta

SEQ ID NO: 1668 - DNA (genomic), 1005 bp, Helicobacter pylori; double-stranded, circular
  misc_feature (B) LOCATION 1...1005
  hypothetical: NO
  anti-sense: NO
atgggaagtatcggtagtatgggcaaacctattgaagggtttttagtggcagccattcagtttcctgtgccaattgtcaatagccgtaaggacattgatcacaacattgaaagcattatcagaaccttgcatgcgactaaagcggggtatccgggagtggagcttatcattttccctgagtatagcacgcaaggtttgaataccgctaagtggcttagcgaagagtttttattagacgtcccgggtaaagagacagagctatacgctaaggcgtgtaaagaggcgaaagtttatggtgttttgtcaatcatggaacgcaatcctgattctaacgaaaacccctacaacaccgccattatcattgatccgcaaggtaaaatcattctaaaataccgcaagctattcccatggaatcccattgagccatggtatcctggggatttaggaatgcctgtgtgcgaggggcctggcggatcaaaattagccgtgtgcatttgtcatgacggcatgattccagaactcgctagagaagcggcctataaagggtgcaatgtgtatatccgcatttcaggctatagcactcaagtcaatgatcaatggattttgaccaaccgctccaacgcatggcacaatttgatgtataccgtgagcgtgaatttagccggctatgacaatgtcttttactacttcggcgaagggcaaatctgtaactttgacggcacgactctcgttcaagggcaccgcaacccttgggagattgtaaccggggaaatctatcctaaaatggcagacaacgcccgcttaagctggggattagaaaacaacatttacaacctaggccatagagggtatgtggctaaaccgggcggagaacatgacgcaggcttaacctacatcaaagacttagcggccggcaaatacaaattgccttgggaagatcacatgaaaatcaaagacggctctatttatggctaccctaccaccggtgggcgttttgggaaataa

SEQ ID NO: 1669 - DNA (genomic), 1041 bp, Helicobacter pylori; double-stranded, circular
  misc_feature (B) LOCATION 1...1041
  hypothetical: NO
  anti-sense: NO
ttgttattgcgacaaaactttttagaaggagttattatgggaagtatcggtagtatgggcaaacctattgaagggtttttagtggcagccattcagtttcctgtgccaattgtcaatagccgtaaggacattgatcacaacattgaaagcattatcagaaccttgcatgcgactaaagcggggtatccgggagtggagcttatcattttccctgagtatagcacgcaaggtttgaataccgctaagtggcttagcgaagagtttttattagacgtcccgggtaaagagacagagctatacgctaaggcgtgtaaagaggcgaaagtttatggtgttttgtcaatcatggaacgcaatcctgattctaacgaaaacccctacaacaccgccattatcattgatccgcaaggtaaaatcattctaaaataccgcaagctattcccatggaatcccattgagccatggtatcctggggatttaggaatgcctgtgtgcgaggggcctggcggatcaaaattagccgtgtgcatttgtcatgacggcatgattccagaactcgctagagaagcggcctataaagggtgcaatgtgtatatccgcatttcaggctatagcactcaagtcaatgatcaatggattttgaccaaccgctccaacgcatggcacaatttgatgtataccgtgagcgtgaatttagccggctatgacaatgtcttttactacttcggcgaagggcaaatctgtaactttgacggcacgactctcgttcaagggcaccgcaacccttgggagattgtaaccggggaaatctatcctaaaatggcagacaacgcccgcttaagctggggattagaaaacaacatttacaacctaggccatagagggtatgtggctaaaccgggcggagaacatgacgcaggcttaacctacatcaaagacttagcggccggcaaatacaaattgccttgggaagatcacatgaaaatcaaagacggctctatttatggctaccctaccaccggtgggcgttttgggaaataa

SEQ ID NO: 1670 - DNA (genomic), 297 bp, Helicobacter pylori; double-stranded, circular
  misc_feature (B) LOCATION 1...297
  hypothetical: NO
  anti-sense: NO
tttcttcagcagaggcttatggattatgcgtccttaaaaagcgtgaaaaatttagagggcatgcctagcgtggttttagaagtcaaagagcctaacgcatgcttactcattcaaagcgaaagcgatgatcctttgattttagaaaaccacatgcaaacgattttaaacgctttgaatgcggtaccggtcgttttagattctcaaatcagcagtgatcctgatatttatcaatcgtggtggaagatcagaaaggcattttccctatcgcagcgtcaaaaagaaaaagccaaagctctg

SEQ ID NO: 1671 - DNA (genomic), 819 bp, Helicobacter pylori; double-stranded, circular
  misc_feature (B) LOCATION 1...819
  hypothetical: NO
  anti-sense: NO
tatttatcaatcgtggtggaagatcagaaaggcattttccctatcgcagcgtcaaaaagaaaaagccaaagctctgtgatcattgaagacgtgtgcttcagcaaagaggattttgtagaaggggcaaaagcgattgaggggcttttaaaaaaacatggctttaaggataatggcattatttttgggcatgcgttaagcgggaatttgcactttgtcgttacgccgattctagaaaatgaagctgaaagaaaagcgtttgaaaatttagtttctgagatgtttttaatggtgagcaaaagctctggctctattaaagccgaacatggcacaggcaggatggtagccccttttgtggaaatggagtggggagaaaaagcttataagatccacaaacaaatcaaggaattgtttgatcctaatggccttttaaaccctgatgtgatcatcacaaacgataaagaaatccacactaaaaatttaaagagcatttaccctattgaagagcatttggacatgtgcatggaatgtgggttttgtgaaaggatctgccccagtaaagatttatccttaacgccacgacaacgcatcgtcatccacagagaggtagagcgtttgaaagaaagggtaagtcatggtcatgatgaagatcaggttttactagatgagcttttaaaagagtctgaatacttagcgcatgccacttgcgcggtgtgccatatgtgttccactttatgccctttagggattgataccgggagtatcgctttaaatcattatcaaaaaaaccctaaaggcgaaaagatctgcttcaaagattct

SEQ ID NO: 1672 - DNA (genomic), 858 bp, Helicobacter pylori; double-stranded, circular
  misc_feature (B) LOCATION 1...858
  hypothetical: NO
  anti-sense: NO
aaagcgctttcgtggtttcaaaaactcataggccctcacaacttggtgagcctaaccaaagggattaaaaaattcatcaagcctttccctaaagcctttcattacatgcccaaaaacaacgcctatcctttagaaaataaaacgcttaagggtggagaaaaagtcatttatttcagtacctgcatcaaccgctcgtttgccccatcaaccaaaatggcggataaaagatgcattcaagaagtgtttgaatccttatgccaaaaagccaaggtttctgtggtgtatcctaacggattaaacgcgctttgttgcgggaaagcctttattaattacaccgccttaaccaagcaaaacaatgaaaaaaaccatgcgatttttttacaattaagcgatgagggaaaaatccccattgttttagaccatagcgcatgttcgacgcattttatcaagcaaatgaaagcttataaggatttgaaagtctatgatttgagcgtctatattgaagaagttttaagcccaaaattaaaattcaaccccattaacgaagacatagggttatacacgatgtgtgctttaaagttagaaaataaagaagagctgttattgaatttggctaaaaaatgcactttgggcgagattgttatccacaaaaagacgggttgttgcggttttgcggggaataagggctttttcacccctgaattgaatgagagcgctttaaacggctttcaagcgttttaccaatcctatgatcttaaaaggggcttttccacttctagcacttgcgaaatcggtttgagtgaaaaaacccaattcgcttggcagcatatcgcttatttagtggatgcttgcacgctt

SEQ ID NO: 1673 - DNA (genomic), 972 bp, Helicobacter pylori; double-stranded, circular
  misc_feature (B) LOCATION 1...972
  hypothetical: NO
  anti-sense: NO
ggagtgtgcgtggaagaaaattatcatgctttttttaccgaagcgagcgggtttttaaacgagcggatctttaaggattatttacgccgtttggcttatggcattgacgcgtcatgttatcgttatatccctaaaatagtcgcttgggtgaaaaatgaagaagaagtccaaaagctttgtgctttagccaaaaagcatggcgttacattgacttttagagcggctggtagttccttatcagggcaagcgagttgcgatggggtgctagtggtggtggcgcattttttcaaagacgctcacattttagacaacgctcaaagcattcagctttcatgcggagtcataggaagccatgcgaatgatttattaaaaccttaccataaaaaaataggcccggatcccgctacgataaacaccgccatgataggggggattgtcgctaataacgctagcgggatgtgttgcggggtggagcaaaacagctacaaaaccttaaaatccttaagagtcattttagctgatggcacgcttttagacacggctgatcaagagagtgttgagaatttcaaaaacgcgcgcaaggatttgattgaaggggttttaaacttaagaaaggagatcttaaaagataaagaattgcatgccttgattaagaaaaaatacgagatcaaaaacaccaccggctatagcttaaacgctctcattgattttgaagatccgattgaaatcatcagccatttgttcataggctctgaggggactttaggctttatttcaagcgtgggattagaatgcgtgaaagactacgcttataaaacttgcgcgttattgttttatgaaaatttagagcaatgtgctaaagccgctcaaatcttagccgctttaaaagccaaacaacctgaaatgatttcttcagcagaggcttatggattatgcgtccttaaaaagcgtgaaaaatttagagggcatgcc

SEQ ID NO: 1674 - DNA (genomic), 2847 bp, Helicobacter pylori; double-stranded, circular
  misc_feature (B) LOCATION 1...2847
  hypothetical: NO
  anti-sense: NO
gtgtgcgtggaagaaaattatcatgctttttttaccgaagcgagcgggtttttaaacgagcggatctttaaggattatttacgccgtttggcttatggcattgacgcgtcatgttatcgttatatccctaaaatagtcgcttgggtgaaaaatgaagaagaagtccaaaagctttgtgctttagccaaaaagcatggcgttacattgacttttagagcggctggtagttccttatcagggcaagcgagttgcgatggggtgctagtggtggtggcgcattttttcaaagacgctcacattttagacaacgctcaaagcattcagctttcatgcggagtcataggaagccatgcgaatgatttattaaaaccttaccataaaaaaataggcccggatcccgctacgataaacaccgccatgataggggggattgtcgctaataacgctagcgggatgtgttgcggggtggagcaaaacagctacaaaaccttaaaatccttaagagtcattttagctgatggcacgcttttagacacggctgatcaagagagtgttgagaatttcaaaaacgcgcgcaaggatttgattgaaggggttttaaacttaagaaaggagatcttaaaagataaagaattgcatgccttgattaagaaaaaatacgagatcaaaaacaccaccggctatagcttaaacgctctcattgattttgaagatccgattgaaatcatcagccatttgttcataggctctgaggggactttaggctttatttcaagcgtgggattagaatgcgtgaaagactacgcttataaaacttgcgcgttattgttttatgaaaatttagagcaatgtgctaaagccgctcaaatcttagccgctttaaaagccaaacaacctgaaatgatttcttcagcagagcttatggattatgcgtccttaaaaagcgtgaaaaatttagagggcatgcctagcgtggttttagaagtcaaagagcctaacgcatgcttactcattcaaagcgaaagcgatgatcctttgattttagaaaacaacatgcaaacgattttaaacgctttgaatgcggtaccggtcgttttagattctcaaatcagcagtgatcctgatatttatcaatcgtggtggaagatcagaaaaggcattttccctatcgcagcgtcaaaaagaaaaagccaaagctctgtgatcattgaagacgtgtgcttcagcaaagaggattttgtagaaggggcaaaagcgattgaggggcttttaaaaaaacatggctttaaggataatggcattatttttgggcatgcgttaagcgggaatttgcactttgtcgttacgccgattctagaaaatgaagctgaaagaaaagcgtttgaaaatttagtttctgagatgtttttaatggtgagcaaaagctctggctctattaaagccgaacatggcacaggcaggatggtagccccttttgtggaaatggagtggggagaaaaagcttataagatccacaaacaaatcaaggaattgtttgatcctaatggccttttaaaccctgatgtgatcatcacaaacgataaagaaatccacactaaaaatttaaagagcatttaccctattgaagagcatttggacatgtgcatggaatgtgggttttgtgaaaggatctgccccagtaaagatttatccttaacgccacgacaacgcatcgtcatccacagagaggtagagcgtttgaaagaaagggtaagtcatggtcatgatgaagatcaggttttactagatgagcttttaaaagagtctgaatacttagcgcatgccacttgcgcggtgtgccatatgtgttccactttatgccctttagggattgataccgggagcatcgctttaaatcattatcaaaaaaaccctaaaggcgaaaagatcgcttcaaagatcttaaatcacatgcaaacgaccacaagcgtggctcgtttttctttaaaaagcgctttcgtggttcaaaaactcataggccctcacaacttggtgagcctaaccaaagggattaaaaaattcatcaagcctttccctaaagcctttcattacatgcccaaaaacaacgcctatcctttagaaaataaaacgcttaagggtggagaaaaagtcatttatttcagtacctgcatcaaccgctcgtttgccccatcaaccaaaatggcggataaaagatgcattcaagaagtgtttgaatccttatgccaaaaagccaaggtttctgtggtgtatcctaacggattaaacgcgctttgttgcgggaaagcctttattaattacaccgccttaaccaagcaaaacaatgaaaaaaaccatgcgatttttttacaattaagcgatgagggaaaaatccccattgttttagaccatagcgcatgttcgacgcattttatcaagcaaatgaaagcttataaggatttgaaagtctatgatttgagcgtctatattgaagaagttttaagcccaaaattaaaattcaaccccattaacgaagacatagggttatacacgatgtgtgctttaaagttagaaaataaagaagagctgttattgaatttggctaaaaaatgcactttgggcgagattgttatccacaaagagacgggttgttgcggttttgcggggaataagggctttttcacccctgaattgaatgagagcgctttaaacggctttcaagcgttttaccaatcctatgatcttaaaaggggcttttccacttctagcacttgcgaaatcggtttgagtgaaaaaacccaattcgcttggcagcatatcgcttatttagtggatgcttgcacgctttaa

SEQ ID NO: 1675 - DNA (genomic), 378 bp, Helicobacter pylori; double-stranded, circular
  misc_feature (B) LOCATION 1...378
  hypothetical: NO
  anti-sense: NO
accgtggggcatatgtatggcaaggtgcaaatcccggatttagaagaagtgcaaaagatgaccattaatcgtaaggaatttgcgggcgataaaaaggactacaagccttatggggtcgcacaagacgagccggctgttttaaaccctttcttcaaaggctatcgttatcatgtttcaggtttgcaccatgggcctattggctttcctactgaagacgccaaaatcggtggggatttgattgacagattattccataagattgaatccaaacaagacattatcaatgaaaatgaggaaatggatctagagggcactgaaatcgttatcatcgcttatggttcggtttctctagcggtaaagagccttgaaagattacaa

SEQ ID NO: 1676 - DNA (genomic), 462 bp, Helicobacter pylori; double-stranded, circular
  misc_feature (B) LOCATION 1...462
  hypothetical: NO
  anti-sense: NO
tcgctaaagcggcgattgagaggggtgtcggtttttgggggctatcctatcacgccaagttcggatattatgcatgcgatgagcgtggctttgcccaaatgcggcggccattttatccaaatggaagatgaaatcagcgggattagcgtgtctttaggggcgagcatgagcgggacgaagtctatgacagcgaaatatagtcctggtatttcattgaaagtggagcaaatcggttattctttcatggcagaaatccctttagtgatcgctgatgtgatgcgttcaggcccatcaaccgggatgcccactcgtgtggctcaaggcgatgtgaattttttaagacaccccatacatggggatataaaaccttttggtttaggtgaaaaattaaaagcccctacgaaacagaaaaaaaggaaggggacggaaatcgctgaaattatagtaaggggaccccggggt

SEQ ID NO: 1677 - DNA (genomic), 891 bp, Helicobacter pylori; double-stranded, circular
  misc_feature (B) LOCATION 1...891
  hypothetical: NO
  anti-sense: NO
atgcgtgagattatttctgatgggaatgaattagtcgctaaagcggcgattgaagtggggtgtcggttttttgggggctatcctatcacgccaagttcggatattatgcatgcgatgagcgtggctttgcccaaatgcggcggccattttatccaaatggaagatgaaatcagcgggattagcgtgtctttaggggcgagcatgagcgggacgaagtctatgacagcgagttctggtcctggtatttcattgaaagtggagcaaatcggttattctttcatggcagaaatccctttagtgatcgctgatgtgatgcgttcaggcccatcaaccgggatgcccactcgtgtggctcaaggcgatgtgaattttttaagacaccccatacatggggattttaaagccgtcgcgctcgctcctgcaaatttagaagaagcttacaccgaaaccgttcgcgcgttcaatttagctgaaatgctcatgactcctgtgttcttactcatggatgaaaccgtggggcatatgtatggcaaggtgcaaatcccggatttagaagaagtgcaaaagatgaccattaatcgtaaggaatttgcgggcgataaaaaggactacaagccttatggggtcgcacaagacgagccggctgttttaaaccctttcttcaaaggctatcgttatcatgtttcaggtttgcaccatgggcctattggctttcctactgaagacgccaaaatcggtggggatttgattgacagattattccataagattgaatccaaacaagacattatcaatgaaaatgaggaaatggatctagagggcactgaaatcgttatcatcgcttatggttcggtttctctagcggtaaagagccttgaaagattacaataa

SEQ ID NO: 1678 - DNA (genomic), 714 bp, Helicobacter pylori; double-stranded, circular
  misc_feature (B) LOCATION 1...714
  hypothetical: NO
  anti-sense: NO
atgcccactttgtggtgctggggctgtggcgatggcgtgattttgaaatccactatccgcacgattgatgctttaggctggaaaatggatgatgtgtgcttggtgagcgggattggttgtagctggcgcatgagttcgtatgtgaattgcaacaccgttcataccacgcatggcagggctgtagcgtatgcgacagggattaaattggctaaccctagtaagcatgtgatcgtggtttctggcgatggcgatggctttgcgattggaggcaatcacaccatgcacgcatgcagaagaaacattgatttgaattttattttagtgaataatttcatttatggtttgaccaactctcaaacttcgcccaccacgcctaatggcatgtggacggttacggctcaatgggggaatattgacaaccagtttgacccatgcgctttaaccaccgctgccggggcgagttttgtggctagagagagcgttttagaccctcaaaaattagaaaaagtgcttaaagaaggtttcacgcataagggctttagcttctttgatgtccatagcaattgccatatcaatttagggcgtaagaataaaatgggcgaagcgtctcaaatgctgaaatggatggaaagccggttagtgagcaaacgccaatttgaagccatgagtcctgaagaaagggtggataaattccctacaggcggttttaaagca

SEQ ID NO: 1679 - DNA (genomic), 711 bp, Helicobacter pylori; double-stranded, circular
  misc_feature (B) LOCATION 1...711
  hypothetical: NO
  anti-sense: NO
cccactttgtggtgctggggctgtggcgatggcgtgattttgaaatccactatccgcacgattgatgctttaggctggaaaatggatgatgtgtgcttggtgagcgggattggttgtagctggcgcatgagttcgtatgtgaattgcaacaccgttcataccacgcatggcagggctgtagcgtatgcgacagggattaaattggctaaccctagtaagcatgtgatcgtggtttctggcgatggcgatggctttgcgattggaggcaatcacaccatgcacgcatgcagaagaaacattgatttgaattttattttagtgaataatttcatttatggtttgaccaactctcaaacttcgcccaccacgcctaatggcatgtggacggttacggctcaatgggggaatattgacaaccagtttgacccatgcgctttaaccaccgctgccggggcgagttttgtggctagagagagcgttttagaccctcaaaaattagaaaaagtgcttaaagaaggtttcacgcataagggctttagcttctttgatgtccatagcaattgccatatcaatttagggcgtaagaataaaatgggcgaagcgtctcaaatgctgaaatggatggaaagccggttagtgagcaaacgccaatttgaagccatgagtcctgaagaaagggtggataaattccctacaggcggttttaaagca

SEQ ID NO: 1680 - DNA (genomic), 783 bp, Helicobacter pylori; double-stranded, circular
  misc_feature (B) LOCATION 1...783
  hypothetical: NO
  anti-sense: NO
atgcccactttgtggtgctggggctgtggcgatggcgtgattttgaaatccactatccgcacgattgatgctttaggctggaaaatggatgatgtgtgcttggtgagcgggattggttgtagcgggcgcatgagttcgtatgtgaattgcaacaccgttcataccacgcatggcagggctgtagcgtatgcgacagggattaaattggctaaccctagtaagcatgtgatcgtggtttctggcgatggcgatggctttgcgattggaggcaatcacaccatgcacgcatgcagaagaaacattgatttgaattttattttagtgaataatttcatttatggtttgaccaactctcaaacttcgcccaccacgcctaatggcatgtggacggttacggctcaatgggggaatattgacaaccagtttgacccatgcgctttaaccaccgctgccggggcgagttttgtggctagagagagcgttttagaccctcaaaaattagaaaaagtgcttaaagaaggtttcacgcataagggctttagcttctttgatgtccatagcaattgccatatcaatttagggcgtaagaataaaatgggcgaagcgtctcaaatgctgaaatggatggaaagccggttagtgagcaaacgccaatttgaagccatgagtcctgaagaaagggtggataaattccctacaggcgttttaaagcatgacacggacaggaaagaatattgcgaagcgtatcaagaaatcattgaaaaagcacaaggaaaacaataa

SEQ ID NO: 1681 - DNA (genomic), 822 bp, Helicobacter pylori; double-stranded, circular
  misc_feature (B) LOCATION 1...822
  hypothetical: NO
  anti-sense: NO
atggcgtttaattatgatgaatatttgcgtgtggataaaatgcccactttgtggtgctggggctgtggcgatggcgtgattttgaaatccattatccgcacgattgatgctttaggctggaaaatggatgatgtgtgcttggtgagcgggattggttgtagcgggcgcatgagttcgtatgtgaattgcaacaccgttcataccacgcatggcagggctgtagcgtatgcgacagggattaaattggctaaccctagtaagcatgtgatcgtggtttctggcgatggcgatggctttgcgattggaggcaatcacaccatgcacgcatgcagaagaaacattgatttgaattttattttagtgaataatttcatttatggtttgaccaactctcaaacttcgcccaccacgcctaatggcatgtggacggttacggctcaatgggggaatattgacaaccagtttgacccatgcgctttaaccaccgctgccggggcgagttttgtggctagagagagcgttttagaccctcaaaaattagaaaaagtgcttaaagaaggtttcacgcataagggctttagcttctttgatgtccatagcaattgccatatcaatttagggcgtaagaataaaatgggcgaagcgtctcaaatgctgaaatggatggaaagccggttagtgagcaaacgccaatttgaagccatgagtcctgaagaaagggtggataaattccctacaggcgttttaaagcatgacacggacaggaaagaatattgcgaagcgtatcaagaaatcattgaaaaagcacaaggaaaacaataa

SEQ ID NO: 1682 - DNA (genomic), 252 bp, Helicobacter pylori; double-stranded, circular
  misc_feature (B) LOCATION 1...252
  hypothetical: NO
  anti-sense: NO
ttgaaagattacaataaagaaagcaagcaaaaagtcggctttttcaggcccaaaaccttatggccaagcccggctaaacgcttgaaagaaataggggacaaatacgaaaaaatccttgtgattgaattgaataaggggcagtatttagaagaaattgaaagggttatgcaaaggaaagtgcatttctttgggcaagccaatgggcgtacgatttcgcccaaacaaatcatcgcaaagttgaaggagctttaa

SEQ ID NO: 1683 - DNA (genomic), 282 bp, Helicobacter pylori; double-stranded, circular
  misc_feature (B) LOCATION 1...282
  hypothetical: NO
  anti-sense: NO
agagccttgaaagattacaataaagaaagcaagcaaaaagtcggctttttcaggcccaaaaccttatggccaagcccggctaaacgcttgaaagaaataggggacaaatacgaaaaaatccttgtgattgaattgaataaggggcagtatttagaagaaattgaaagggttatgcaaaggaaagtgcatttctttgggcaagcccaatgggcgtacgatttcgcccaaacaaatcatcgcaaagttgaaggagctttaaaatggcgtttaattatgatgaat

SEQ ID NO: 1684 - DNA (genomic), 249 bp, Helicobacter pylori; double-stranded, circular
  misc_feature (B) LOCATION 1...249
  hypothetical: NO
  anti-sense: NO
atggaagcgcaattacgatttacgggtgttggagggcaaggcgtgttgttagcgggagagattttagctgaggctaagatcgtgagcgggggctatggcactaagacttccacctacacttcgcaagtgcgtggaggtcccactaaagtggatattttgttagataaagatgaaattattttcccttatgctaaagagggcgagattgatttcatgctttcagtcgctcaaatcagctacaaccagttt

SEQ ID NO: 1685 - DNA (genomic), 513 bp, Helicobacter pylori; double-stranded, circular
  misc_feature (B) LOCATION 1...513
  hypothetical: NO
  anti-sense: NO
aaaagcacaaggaaaacaataatggaagcgcaattacgatttacgggtgttggagggcaaggcgtgttgttagcgggagagattttagctgaggctaagatcgtgagcgggggctatggcactaagacttccacctacacttcgcaagtgcgtggaggtcccactaaagtggatattttgttagataaagatgaaattattttcccttatgctaaagagggcgagattgatttcatgctttcagtcgctcaaatcagctacaaccagtttaaaagcgacattaaaaaaggcggtatcgttgtcattgatcccaatctagtaacccccactaaagaagatgaggaaaaataccagctttataaaatccctatcattagtatcgctaaagatgaagtgggtaacattatcacgcaatctgtggtggcgttagccattaccgtggagctgactaaatgcgtggaagaaaatatcgttctagataccatgcttaaaaaagttccctgcaaaagtcgc

SEQ ID NO: 1686 - DNA (genomic), 555 bp, Helicobacter pylori; double-stranded, circular
  misc_feature (B) LOCATION 1...555
  hypothetical: NO
  anti-sense: NO
atggaagcgcaattacgatttacgggtgttggagggcaaggcgtgttgttagcgggagagattttagctgaggctaagatcgtgagcgggggctatggcactaagacttccacctacacttcgcaagtgcgtggaggtcccactaaagtggatattttgttagataaagatgaaattattttcccttatgctaaagagggcgagattgatttcatgctttcagtcgctcaaatcagctacaaccagtttaaaagcgacattaaaaaaggcggtatcgttgtcattgatcccaatctagtaacccccactaaagaagatgaggaaaaataccagctttataaaatccctatcattagtatcgctaaagatgaagtgggtaacattatcacgcaatctgtggtggcgttagccattaccgtggagctgactaaatgcgtggaagaaaatatcgttctagataccatgcttaaaaaagtccctgcaaaagtcgctgaaacgaacaaaaaagcctttgaaattggcaaaaaacatgctttagaagctttgaaaaaataa

SEQ ID NO: 1687 - DNA (genomic), 564 bp, Helicobacter pylori; double-stranded, circular
  misc_feature (B) LOCATION 1...564
  hypothetical: NO
  anti-sense: NO
gtgtgccgcgctgggatttgcggctcttgcgcaatgatggttaatgggagaccaagattggcttgtaaaaccctaacttccagttttgaaaacggggtgatcacgctgatgcccatgcccagttttacgctcattaaagatttgagcgtgaataccggcgattggtttagcgatatgactaaaagggtggagagttgggcgcattctaaagaagaagtggatattactaagccggaaaaaagggttgagcctgatgaagcccaagaagtctttgaattagacaggtgtattgaatgcgggtgctgtatcgcttcttgtgggaccaaactcatgcgccctaatttcattggggctgctggcatgaacagagccatgcgtttcatgattgacagccacgatgaaagaagcgatgacgatttttatgaattagtcggcgacgatgatggcgtttttgggtgcatgagcttgattgcttgccatgacacttgccctaaagaattacccttgcaaagcagtatcgctactttgcgtaaccgaatgttgaaagtgggtaaaagccgctaa

SEQ ID NO: 1688 - DNA (genomic), 573 bp, Helicobacter pylori; double-stranded, circular
  misc_feature (B) LOCATION 1...573
  hypothetical: NO
  anti-sense: NO
agttttgattttgtgggccgcgctgggatttgcggctcttgcgcaatgatggttaatgggagaccaagattggcttgtaaaaccctagcttccagttttgaaaacggggtgatcacgctgatgcccatgcccagttttacgctcattaaagatttgagcgtgaataccggcgattggtttagcgatatgactaaaagggtggagagttgggcgcattctaaagaagaagtggatattactaagccggaaaaaagggttgagcctgatgaagcccaagaagtctttgaattagacaggtgtattgaatgcgggtgctgtatcgcttcttgtgggaccaaactcatgcgccctaatttcattggggctgctggcatgaacagagccatgcgtttcatgattgacagccacgatgaaagaagcgatgacgatttttatgaattagtcggcgacgatgatggcgtttttgggtgcatgagcttgattgcttgccatgacacttgccctaaagaattacccttgcaaagcagtatcgctactttgcgtaaccgaatgttgaaagtgggtaaaagccgc

SEQ ID NO: 1689 - DNA (genomic), 570 bp, Helicobacter pylori; double-stranded, circular
  misc_feature (B) LOCATION 1...570
  hypothetical: NO
  anti-sense: NO
tttgattttgtgggccgcgctgggatttgcggctcttgcgcaatgatggttaatgggagaccaagattggcttgtaaaaccctagcttccagttttgaaaacggggtgatcacgctgatgcccatgcccagttttacgctcattaaagatttgagcgtgaataccggcgattggtttagcgatatgactaaaagggtggagagttgggcgcattctaaagaagaagtggatattactaagccggaaaaaagggttgagcctgatgaagcccaagaagtctttgaattagacaggtgtattgaatgcgggtgctgtatcgcttcttgtgggaccaaactcatgcgccctaatttcattggggctgctggcatgaacagagccatgcgtttcatgattgacagccacgatgaaagaagcgatgacgatttttatgaattagtcggcgacgatgatggcgtttttgggtgcatgagcttgattgcttgccatgacacttgccctaaagaattacccttgcaaagcagtatcgctactttgcgtaaccgaatgttgaaagtgggtaaaagccgc

SEQ ID NO: 1690 - DNA (genomic), 738 bp, Helicobacter pylori; double-stranded, circular
  misc_feature (B) LOCATION 1...738
  hypothetical: NO
  anti-sense: NO
atgagtgataatgaacgaacgattgtagttagagtgttaaaatttgaccctcaaagcgcggtgaataagccgcattttaaagagtatcaattgaaagaaacgccatccatgacgctctttatcgctttaaacctcattagagagcatcaagatccggatttgagttttgattttgtgtgccgcgctgggatttgcggctcttgcgcaatgatggttaatgggagaccaagattggcttgtaaaaccctaacttccagttttgaaaacggggtgatcacgctgatgcccatgcccagttttacgctcattaaagatttgagcgtgaataccggcgattggtttagcgatatgactaaaagggtggagagttgggcgcattctaaagaagaagtggatattactaagccggaaaaaagggttgagcctgatgaagcccaagaagtctttgaattagacaggtgtattgaatgcgggtgctgtatcgcttcttgtgggaccaaactcatgcgccctaatttcattggggctgctggcatgaacagagccatgcgtttcatgattgacagccacgatgaaagaagcgatgacgatttttatgaattagtcggcgacgatgatggcgtttttgggtgcatgagcttgattgcttgccatgacacttgccctaaagaattacccttgcaaagcagtatcgctactttgcgtaaccgaatgttgaaagtgggtaaaagccgctaa

SEQ ID NO: 1691 - DNA (genomic), 207 bp, Helicobacter pylori; double-stranded, circular
  misc_feature (B) LOCATION 1...207
  hypothetical: NO
  anti-sense: NO
ttgaaagaaaaatttgatttttttaaaggcaaaaattttaaaattgtctattgtattggcgaagatttaacgaccagagaaaagggttttagggctgtaaaggaatttttaagcgagcaattagaaaatattgatcttaattattccaatttaattgtggcttatgagcctatttgggcgattggcactaaaaaagcgcgcttttag

SEQ ID NO: 1692 - DNA (genomic), 213 bp, Helicobacter pylori; double-stranded, circular
  misc_feature (B) LOCATION 1...213
  hypothetical: NO
  anti-sense: NO
cctagctttttgaaagaaaaatttgatttttttaaaggcaaaaattttaaaattgtctattgtattggcgaagatttaacgaccagagaaaagggttttagggctgtaaaggaatttttaagcgagcaattagaaaatattgatcttaattattccaatttaattgtggcttatgagcctatttgggcgattggcactaaaaaagcgcgcttt

SEQ ID NO: 1693 - DNA (genomic), 210 bp, Helicobacter pylori; double-stranded, circular
  misc_feature (B) LOCATION 1...210
  hypothetical: NO
  anti-sense: NO
agctttttgaaagaaaaatttgatttttttaaaggcaaaaattttaaaattgtctattgtattggcgaagatttaacgaccagagaaaagggttttagggctgtaaaggaatttttaagcgagcaattagaaaatattgatcttaattattccaatttaattgtggcttatgagcctatttgggcgattggcactaaaaaagcgcgcttt

SEQ ID NO: 1694 - DNA (genomic), 342 bp, Helicobacter pylori; double-stranded, circular
  misc_feature (B) LOCATION 1...342
  hypothetical: NO
  anti-sense: NO
atgacaaaaattgccatggctaatttcaaatccgctatgcctgtttttaaaagccatgcgtatttaaaagaattggaaaaaactttaaagccgcagcattttgatagggtgtttgtattccctgattttttggggttattgcctaacgcgtttttgcatttcactttaggagcgcaaaacgcttaccctaaagattgtggggcttttaccggtgaaatcacttccaaacatttagaaaaactgaaaatccacacgcttttaatagggcataccgagaggcgagtgcttttaaaggacagccctacctttttgaaagaaaaatttgaattttttaaaggttaa

SEQ ID NO: 1695 - DNA (genomic), 705 bp, Helicobacter pylori; double-stranded, circular
  misc_feature (B) LOCATION 1...705
  hypothetical: NO
  anti-sense: NO
atgacaaaaattgccatggctaatttcaaatccgctatgcctgtttttaaaagccatgcgtatttaaaagaattggaaaaaactttaaagccgcagcattttgatagggtgtttgtattccctgattttttggggttattgcctaacgcgtttttgcatttcactttaggagcgcaaaacgcttaccctagagattgtggggcttttaccggtgaaatcacttccaaacatttagaagaactgaaaatccacacgcttttaatagggcatagcgagaggcgagtgcttttaaaggaaagccctagctttttgaaagaaaaatttgatttttttaaaggtaaaaattttaaaattgtctattgtattggcgaagatttaacgaccagagaaaagggttttagggctgtaaaggaatttttaagcgagcaattagaaaatattgatcttaattattccaatttaattgtggcttatgagcctatttgggcgattggcactaaaaaaagcgcgtctttagaagatatttacctcacgcatggttttttaaagcaaatcttaaatcaaaaaacgcccttattgtatggggggagcgtgaatgcgcaaaacgctaaagaaattttagggattgatagcgtggatggcttattgattgggagcgcgtctttggaattagaaaattttaaaacaatcatttcatttttataa

SEQ ID NO: 1696 - DNA (genomic), 786 bp, Helicobacter pylori; double-stranded, circular
  misc_feature (B) LOCATION 1...786
  hypothetical: NO
  anti-sense: NO
atgatcatgcctttagggtttgagagttttaaagaagctttaagagcgagtgcggaagtctatcacacgcttaaaaaacttttagatgaaaagaatcagctcacaagcgtgggcgatgaggggggctttgcgcctaattttaacaacaatgtagaacctcttgaaatcatttctcaagccattgaaaaagccggctataaattaggtgaagaaatagcgctcgctttagatgtggcgagcagtgagttagtggatgaacatttcaattaccatttaaagggcgaaaataagattttagattcgcatgaattagtggcttattataaagagttggtggcaaaatacccgattgtgtccattgaagatggtttgagcgaagacgattgggagggttgggcgtttttaagcaaggaattagggcgtcaaatccaattagtgggcgatgatttgtttgtaacgaacgcgagcatcttgcaaaaaggcattgaaaaaaacgttgcaaacgccattttgatcaaacccaatcaaatcggcaccattagtgaaactttagagaccataagattggccaaacaccatgcctatcaatgcgtgataagccatagaagcggggagagtgaagacagctttatcgctgattttgcggtcgcattgaatacgggagagattaaaaccggatccaccgcaaggagtgaaaggatcgctaaatacaaccgccttttggagattgagcatgaattaaaaggggggatttatatcggcaaagagttgtttaagcatggctag

SEQ ID NO: 1697 - DNA (genomic), 804 bp, Helicobacter pylori; double-stranded, circular
  misc_feature (B) LOCATION 1...804
  hypothetical: NO
  anti-sense: NO
tccatagacttccaagaatacatgatcatgcctttagggtttgagagttttaaagaagctttaagagcgagtgcggaagtctatcacacgcttaaaaaacttttagatgaaaagaatcagctcacaagcgtgggcgatgaggggggctttgcgcctaattttaacaacaatgtagaacctcttgaaatcatttctcaagccattgaaaaagccggctataaattaggtgaagaaatagcgctcgctttagatgtggcgagcagtgagttagtggatgaacatttcaattaccatttaaagggcgaaaataagattttagattcgcatgaattagtggcttattataaagagttggtggcaaaatacccgattgtgtccattgaagatggtttgagcgaagacgattgggagggttgggcgtttttaagcaaggaattagggtgggaaatccaattagtgggcgatgatttgtttgtaacgaacgcgagcatcttgcaaaaaggcattgaaaaaaacgttgcaaacgccattttgatcaaacccaatcaaatcggcaccattagtgaaactttagagaccataagattggccaaacaccatgcctatcaatgcgtgataagccatagaagcggggagagtgaagacagctttatcgctgattttgcggtcgcattgaatacgggagagattaaaaccggatccaccgcaaggagtgaaaggatcgctaaatacaaccgccttttggagattgagcatgaattaaaaggggggatttatatcggcaaagagttgtttaagcatggc

SEQ ID NO: 1698 - DNA (genomic), 801 bp, Helicobacter pylori; double-stranded, circular
  misc_feature (B) LOCATION 1...801
  hypothetical: NO
  anti-sense: NO
atagacttccaagaatacatgatcatgcctttagggtttgagagttttaaagaagctttaagagcgagtgcggaagtctatcacacgcttaaaaaacttttagatgaaaagaatcagctcacaagcgtgggcgatgaggggggctttgcgcctaattttaacaacaatgtagaacctcttgaaatcatttctcaagccattgaaaaagccggctataaattaggtgaagaaatagcgctcgctttagatgtggcgagcagtgagttagtggatgaacatttcaattaccatttaaagggcgaaaataagattttagattcgcatgaattagtggcttattataaagagttggtggcaaaatacccgattgtgtccattgaagatggtttgagcgaagacgattgggagggttgggcgtttttaagcaaggaattagggtgggaaatccaattagtgggcgatgatttgtttgtaacgaacgcgagcatcttgcaaaaaggcattgaaaaaaacgttgcaaacgccattttgatcaaacccaatcaaatcggcaccattagtgaaactttagagaccataagattggccaaacaccatgcctatcaatgcgtgataagccatagaagcggggagagtgaagacagctttatcgctgattttgcggtcgcattgaatacgggagagattaaaaccggatccaccgcaaggagtgaaaggatcgctaaatacaaccgccttttggagattgagcatgaattaaaaggggggatttatatcggcaaagagttgtttaagcatggc

SEQ ID NO: 1699 - DNA (genomic), 1281 bp, Helicobacter pylori; double-stranded, circular
  misc_feature (B) LOCATION 1...1281
  hypothetical: NO
  anti-sense: NO
atgctaaccattaaagatattcatgctttagaagtgatggatagtaggggcaatcctaccattcaagccagcgtgattttaagcgataacactaaggcgagcgcgattgtgcctagcggggcgagcaccggtaaaagagaagcgttagaattaagggataatgacaaaacccgttttttgggtaaaggggttttaagggcatgcgaaaatgtcaatagcgtgatcaaacaccatttgatagggcttgaagcgactaatcaggcctttgtagatgagaggttaagggctttagacggcacgcctaattacgctaatttaggggcgaacgctgttttgggcgtttctatggcgttagcaagggctagcgcgaaggctttaaatctgccattataccgctatttagggggggctaacgctttgactttgccggtgccgatgctcaatatcatcaacggcggaacgcatgcgaacaattccatagacttccaagaatacatgatcatgcctttagggtttgagagttttaaagaagctttaagagcgagtgcggaagtctatcacacgcttaaaaaacttttagatgaaaagaatcagctcacaagcgtgggcgatgaggggggctttgcgcctaattttaacaacaatgtagaacctcttgaaatcatttctcaagccattgaaaaagccggctataaattaggtgaagaaatagcgctcgctttagatgtggcgagcagtgagttagtggatgaacatttcaattaccatttaaagggcgaaaataagattttagattcgcatgaattagtggcttattataaagagttggtggcaaaatacccgattgtgtccattgaagatggtttgagcgaagacgattgggagggttgggcgtttttaagcaaggaattagggcgtcaaatccaattagtgggcgatgatttgtttgtaacgaacgcgagcatcttgcaaaaaggcattgaaaaaaacgttgcaaacgccattttgatcaaacccaatcaaatcggcaccattagtgaaactttagagaccataagattggccaaacaccatgcctatcaatgcgtgataagccatagaagcggggagagtgaagacagctttatcgctgattttgcggtcgcattgaatacgggagagattaaaaccggatccaccgcaaggagtgaaaggatcgctaaatacaaccgccttttggagattgagcatgaattaaaaggggggatttatatcggcaaagagttgtttaagcatggctag

SEQ ID NO: 1700 - DNA (genomic), 1281 bp, Helicobacter pylori; double-stranded, circular
  misc_feature (B) LOCATION 1...1281
  hypothetical: NO
  anti-sense: NO
atgctaaccattaaagatattcatgctttagaagtgatggatagtaggggcaatcctaccattcaagccagcgtgattttaagcgataacactaaggcgagcgcgattgtgcctagcggggcgagcaccggtaaaagagaagcgttagaattaagggataatgacaaaacccgctttttgggtaaaggggttttaagggcatgcgaaaatgtcaatagcgtgatcaaacaccatttgatagggcttgaagcgactaatcaggcctttgtagatgagaggttaagggctttagacggcacgcctaattacgctaatttaggggcgaacgctgttttgggcgtttctatggcgttagcaagggctagcgcgaaggctttaaatctgccattataccgctatttagggggggctaacgctttgactttgccggtgccgatgctcaatatcatcaacggcggaacgcatgcgaacaattccatagacttccaagaatacatgatcatgcctttagggtttgagagttttaaagaagctttaagagcgagtgcggaagtctatcacacgcttaaaaaacttttagatgaaaagaatcagctcacaagcgtgggcgatgaggggggctttgcgcctaattttaacaacaatgtagaacctcttgaaatcatttctcaagccattgaaaaagccggctataaattaggtgaagaaatagcgctcgctttagatgtggcgagcagtgagttagtggatgaacatttcaattaccatttaaagggcgaaaataagattttagattcgcatgaattagtggcttattataaagagttggtggcaaaatacccgattgtgtccattgaagatggtttgagcgaagacgattgggagggttgggcgtttttaagcaaggaattagggcgtcaaatccaattagtgggcgatgatttgtttgtaacgaacgcgagcatcttgcaaaaaggcattgaaaaaaacgttgcaaacgccattttgatcaaacccaatcaaatcggcaccattagtgaaactttagagaccataagattggccaaacaccatgcctatcaatgcgtgataagccatagaagcggggagagtgaagacagctttatcgctgattttgcggtcgcattgaatacgggagagattaaaaccggatccaccgcaaggagtgaaaggatcgctaaatacaaccgccttttggagattgagcatgaattaaaaggggggatttatatcggcaaagagttgtttaagcatggctag

SEQ ID NO: 1701 - DNA (genomic), 234 bp, Helicobacter pylori; double-stranded, circular
  misc_feature (B) LOCATION 1...234
  hypothetical: NO
  anti-sense: NO
ttgcgatggagctggggcggcgagcgcttagaaaccggcgtggctaaattaggcaacatggaagcggtgcaattccaccctaccgctttagtgccaagcgggattttaatgaccgaaggttgtaggggcgatggcggggttttaagagacaagtttggcagacgcttcatgtccgcttatgagtacggagaaaaaagagcttgcgagcgagatgtggtctcaaggcggtcttag

SEQ ID NO: 1702 - DNA (genomic), 246 bp, Helicobacter pylori; double-stranded, circular
  misc_feature (B) LOCATION 1...246
  hypothetical: NO
  anti-sense: NO
atgctttatgcggtcgcgaatgaagccttacaccacaaggtggatattcaagacagaaaggacatgctcgctttcattcatcatgataataaatgctatggggcggtagtaagggatttgatcaccggcgaaatttcagcgtatgtttctaaaggcacgcttttagctaccggaggttatgggcgcgtgtataaacacaccactaacgccgtgatttgcgatggagctggggcggcgagcgcttag

SEQ ID NO: 1703 - DNA (genomic), 270 bp, Helicobacter pylori; double-stranded, circular
  misc_feature (B) LOCATION 1...270
  hypothetical: NO
  anti-sense: NO
cttacggctgatgccacagggcataccatgctttatgcggtcgcgaatgaagccttacaccacaaggtggatattcaagacagaaaggacatgctcgctttcattcatcatgataataaatgctatggggcggtagtaagggatttgatcaccggcgaaatttcagcgtatgtttctaaaggcacgcttttagctaccggaggttatgggcgcgtgtataaacacaccactaacgccgtgatttgcgatggagctggggcggcgagcgct

SEQ ID NO: 1704 - DNA (genomic), 267 bp, Helicobacter pylori; double-stranded, circular
  misc_feature (B) LOCATION 1...267
  hypothetical: NO
  anti-sense: NO
acggctgatgccacagggcataccatgctttatgcggtcgcgaatgaagccttacaccacaaggtggatattcaagacagaaaggacatgctcgctttcattcatcatgataataaatgctatggggcggtagtaagggatttgatcaccggcgaaatttcagcgtatgtttctaaaggcacgcttttagctaccggaggttatgggcgcgtgtataaacacaccactaacgccgtgatttgcgatggagctggggcggcgagcgct

SEQ ID NO: 1705 - DNA (genomic), 285 bp, Helicobacter pylori; double-stranded, circular
  misc_feature (B) LOCATION 1...285
  hypothetical: NO
  anti-sense: NO
cgccgtgatttgcgatggagctggggcggcgagcgcttagaaaccggcgtggctaaattaggcaacatggaagcggtgcaattccaccctaccgctttagtgccaagcgggattttaatgaccgaaggttgtaggggcgatggcggggttttaagagacaagtttggcagacgcttcatgtccgcttatgagtacggagaaaaaagagcttgcgagcgagatgtggtctcaaggcggatcttagagcatatccaaaaaggctatggagccaaatcgccttatggg

SEQ ID NO: 1706 - DNA (genomic), 2145 bp, Helicobacter pylori; double-stranded, circular
  misc_feature (B) LOCATION 1...2145
  hypothetical: NO
  anti-sense: NO
atgaaaataacatattgtgatgcgttgattattggaggcggattggccgggttaagggctagtatcgcatgcaaacaaaagggtttaaacaccatcgttttaagcctagtgcctgtcaggcgttcgcactcggcggccgctcaagggggcatgcaagcgagccttgcgaacgctaaaaaaagcgagggcgataatgaagatttgcactttttagacacggttaaggggagcgattgggggtgcgatcagcaagtggctaggatgtttgtaaccactgcccctaaagccattagggaattggccagttggggggtgccttggactaggattaaaaagggcgataggcctgcggtcgtcaatggtgagcatgtaattatcactgaaagagacgataggcatggctatattctaagtcgtgattttggcggtactaaaaaatggcgcacatgctttacggctgatgccacagggcataccatgctttatgcggtcgcgaatgaagccttacaccacaaggtggatattcaagacagaaaggacatgctcgctttcattcatcatgataataaatgctatggggcggtagtaagggatttgatcaccggcgaaatttcagcgtatgtttctaaaggcacgcttttagctaccggaggttatgggcgcgtgtataaacacaccactaacgccgtgatttgcgatggagctggggcggcgagcgctttagaaaccggcgtggctaaattaggcaacatggaagcggtgcaattccaccctaccgctttagtgccaagcgggattttaatgaccgaaggttgtaggggcgatggcggggttttaagagacaagtttggcagacgcttcatgcccgcttatgagccggagaaaaaagagcttgcgagcagagatgtggtctcaaggcggatcttagagcatatccaaaaaggctatggagccaaatcgccttatggggatcatgtgtggctggatattgctattttagggcgtaaccatgtggaaaaaaacttgagagatgtgcgcgatattgccatgacttttgcgggcattgatccggcggatagcgaagagcaaaccaaagacaacatgcaaggagcacccactaatgagccagaatacggccaagcgatggctaagcaaaaaggttggatccccataaagcccatgcaacactattctatggggggggttaggacaaaccctaaaggcgaaacccatttaaagggcttgttttgcgccggtgaagcggcatgctgggatttgcatgggtttaaccgcttggggggtaattccgtgagtgaaccggtggtcgctggcatgatcataggggattatttcgcctcacattgtttagaagcgcaaattgaaatcaacacgcaaaaagttgaagctttcattaaagaaagccaggattacatgcatttcttgttgcataatgaaggcaaggaagacgtgtatgaaattagagagcgcatgaaagaagtcatggacgaaaaagtgggcgtttttagagagggcaaaaaattagaagaagcccttaaagaattgcaagaactttatgcgcgctccaaaaacatttgcgtgaaaaacaaggttttacacaataaccctgaattagaagacgcttaccgcaccaaaaaaatgctcaaactcgcgctttgcatcactcaaggggcgttactgcgcaccgaaagcagaggggctcacacaaggattgattaccctaaaagagacgatgaaaagtggcttaatcggactttagcgagctggcctagcgctgagcaagacatgcccacgattgaatacgaagaattagatgtgatgaaaatggaaatcagccctgattttaggggctatggcaaaaagggtaatttcatcccccaccccaaaaaagaagagcgcgacgctgagattttgaaaacgattttggaattagaaaagcttggaaaagacaggatagaagtccagcatgcgctcatgccttttgaattgcaagaaaaatacaaagccaggaacatgcgtttagaagatgaagaagtgagggctaggggggaacatttgtattctttcaatgtccatgatttattagaccaacacaacgctaatctaaaaggagaacaccatgagtga

SEQ ID NO: 1707 - DNA (genomic), 1131 bp, Helicobacter pylori; double-stranded, circular
  misc_feature (B) LOCATION 1...1131
  hypothetical: NO
  anti-sense: NO
gtgcgatatatcaagtttttcaaagagttgaacaataagaatgtgaatctggttgggggcaagaacgctagcattggtgaaatgtttcaagaattagtgccaattgggattaaagtgcctgatggctttgcgatcaccagcgaagcgtattggtatcttttagagcaagggggggctaaacaaaaaatcatagagcttttagaaaatgttgatgccacggaaattgatgtgttaaaaatccgctccaaacaaatcagagagcttatttttggcacgccttttcctagcgatttaagagatgagatttttcaagcttatgaaattttaagccagcaataccacatgaaagaagccgatgtggctgtaaggagctccgctactgcagaagatttgccagacgcttcttttgccgggcagcaagacacttatttaaacattaagggtaaaaccgaattgatccactatatcaaatcctgtttggcgtcgctttttaccgatagagcgattagctatagagcgagtcgtgggtttgatcatttaaaagtcgctctaagtgtgggggtgcaaaaaatggtgcgagcggataaaggcagcgcgggcgtgatgttttctattgacaccgaaaccggttttaaagacgcggtgtttatcacttcagcatgggggttaggcgaaaatgtggtgggtggcacgataaaccctgatgaattttatgtgtttaagcccactttagagcaaaacaaacgccccattatcaaacgccaactcggcaataaaacgcaaaaaatggtctatgccccaaggggtagcgaacaccccaccagaaacattaaaaccaccaaaaaagaatggcaatccttttcattgagcgatgaagacgtgctgattttagccaaatacgctattgaaattgaaaaacattactctaaagaagccaaacaataccgccctatggatatagaatgggctaaagatggcgagagcggggaaatctttatcgttcaagcgcgcccagaaaccgttcaaagccaaaaaaccaaagaagaaaatcaagtctttgaaaaattcaaattcaaaaaccctaacggaaaaaaaagaaattatcttacaaggcagagcgattgggagtaa

SEQ ID NO: 1708 - DNA (genomic), 2358 bp, Helicobacter pylori; double-stranded, circular
  misc_feature (B) LOCATION 1...2358
  hypothetical: NO
  anti-sense: NO
atgtttcaagaattagtgccaattgggattaaagtgcctgatggctttgcgatcaccagcgaagcgtattggtatcttttagagcaagggggggctaaacaaaaaatcatagagcttttagaaaatgttgatgccacggaaattgatgtgttaaaaatccgctccaaacaaatcagagagcttatttttggcacgccttttcctagcgatttaagagatgagatttttcaagcttatgaaattttaagccagcaataccacatgaaagaagccgatgtggctgtaaggagctccgctactgcagaagatttgccagacgcttcttttgccgggcagcaagacacttatttaaacattaagggtaaaaccgaattgatccactatatcaaatcctgtttggcgtcgctttttaccgatagagcgattagctatagagcgagtcgtgggtttgatcatttaaaagtcgctctaagtgtgggggtgcaaaaaatggtgcgagcggataaaggcagcgcgggcgtgatgttttctattgacaccgaaaccggttttaaagacgcggtgtttatcacttcagcatgggggttaggcgaaaatgtggtgggtggcacgataaaccctgatgaattttatgtgtttaagcccactttagagcaaaacaaacgccccattatcaaacgccaactcggcaataaaacgcaaaaaatggtctatgccccaaggggtagcgaacaccccaccagaaacattaaaaccaccaaaaaagaatggcaatccttttcattgagcgatgaagacgtgctgattttagccaaatacgctattgaaattgaaaaacattactctaaagaagccaaacaataccgccctatggatatagaatgggctaaagatggcgagagcggggaaatctttatcgttcaagcgcgcccagaaaccgttcaaagccaaaaaaccaaagaagaaaatcaagtctttgaaaaattcaaattcaaaaaccctaacgaaaaaaaagaaattatcttacaaggcagagcgattgggagtaaaattggctcagggaaagtgcgcatcatcaatgatttggagcacatgaattcttttaaagagggcgaaattttagttacggataataccgatccggattgggagccttgcatgaaaaaagcgagcgcggttatcactaatcgtggagggcgcacttgccatgcggcgattgtggcgagagaaattggcgtgccagccattgttggggtgagtggggcgactgatagcctttataccggcatggaaatcacggtttcttgcgctgagggtgaagagggctatgtgtatgcgggcatttatgagcatgaaattgaaagggtggagctttctaacatgcaagaaactcaaacaaaaatttacatcaatattggaaaccctgaaaaagcctttagcttttctcaactccctaatcacggcgtagggctggccagaatggaaatgattattttaaatcaaatcaaagcccaccccttagctttagtggatttgcaccacaaaaaaagcgtgaaagaaaaaaatgaaattgaaaacctcatggcaggctatgctaaccctaaagatttttttgtgaaaaaaatcgctgaaggcattggcatgatcagcgcggcgttttaccctaaacctgtgattgtaaggactagcgatttcaaatccaatgaatacatgcgcatgcttggcggctctagctatgagcctaatgaagaaaaccccatgcttggctataggggggctagtcggtattattcagagagctataacgaagcgttttcgtgggagtgtgaagccttagcgttagtgagggaagaaatgggcttgacgaatatgaaagtgatgatcccctttttgcgaaccattgaagagggtaaaaaagtcctagaaatcttaagaaaaaacaatttagaatccggtaaaaacgggcttgaaatttatatcatgtgtgaattaccggtgaatgtcattctggctgatgatttcttaagcttgtttgatggcttttctattggctctaatgatttaacccagctcactttaggcgtggatagagacagcgagttagtcagccatgtctttgatgaaaggaatgaagcgatgctaaaaatgtttaaaaaagcgattgaagcttgcaaaaggcacaacaaatattgcgggatttgcgggcaagccccaagcgattaccctgaagtaacagagtttttagtcaaagagggcatcacttccatttctttaaaccctgatagcgtgatccccacttggaacgctgtagccaagttagaaaaagagttgaaagaccatggcttaactgcacgttga

SEQ ID NO: 1709 - DNA (genomic), 1227 bp, Helicobacter pylori; double-stranded, circular
  misc_feature (B) LOCATION 1...1227
  hypothetical: NO
  anti-sense: NO
ttgataggagaaatgatggaaattttagttttgaatctgggcagttcgtctattaagtttaagttgtttgacatgaaagagaacaagcccttagcgagcggtttagccgaaaaaatcggcgaagaaatagggcagttgaaaatcaaatcgcatctgcaccataacgatcaagaattaaaagaaaagcttgtgattaaagatcatgcgatcgggcttttaatgattcgtgagaatttaacgaaaatggggattatcaaagatttcaatcaaattgacgctatagggcatcgtgtggttcaagggggggataaattccatgccccggtgttagtggatgaaaaagtcatgcgagaaattggcaatctttctattttagcccccttacacaacccggcgaatttggccggtattgagttcgttcaaaaagcgcacccccatatccctcaaatcgctgtttttgacaccgcattccatgccagcatgcccagttacgcttacatgtatgcgttaccttatgaattgtatgaaaagtatcaaatccggcgctatggtttccatgggacttcacaccattatgtggctaaagaagcggcgaagtttttgaatatcccttatgaggaatttaacgctatcagtttgcatttagggaacggctcaagcgcggccgccattcaaaatggcaagagcgtggacacttctatggggctaaccccactagaaggcttgattatgggcacaaggtgtggggatattgaccccactgtggtggaatacatcgcgcaatgcgcaaataaaagtttagaagaagtgatgaagattttaaatcatgaaagcggtttgaaaggcatttgtggggataatgacgccagaaacatagaagtcagaaaggaaaaaggcgataaacaagccaagctcgcttttgaaatgtgcgtttatcgcattaaaaagtatatcggggcttacatggtagtcttaaaaaaagtagatgcgatcatttttacagggggattaggggaaaactactcggctttaagagagagcgtgtgcgagggcttagaaaatttagggatcgctttacacaagcccacaaacgacaatccgggcagcgctctagtgaatttaagccagcctaacaccaaaatccaaattttacgaatccccactgacgaagagctagaaatcgctttacaagccaaagaaatggtagaaaaaataaaggtcgtttaa

SEQ ID NO: 1710 - DNA (genomic), 315 bp, Helicobacter pylori; double-stranded, circular
  misc_feature (B) LOCATION 1...315
  hypothetical: NO
  anti-sense: NO
atgttagaagtgattaacgggaagaattacgcagaaaaaaccgctcatcaagcggtagtggtcaatgtgggggcgagttggtgcccggattgcaggaagattgagccgatcatggaaaatttagccaaaacttacaaaggcaaggtggaattttttaaggtttcttttgatgagagccaggatctcaaagagagcttaggcatccgcaaaatccctactttgattttttacaaaaacgccaaagaagtgggtgaaaggcttgtagaacctagctctcaaaaaccgattgaagacgccctaaaagcattattataa

SEQ ID NO: 1711 - DNA (genomic), 327 bp, Helicobacter pylori; double-stranded, circular
  misc_feature (B) LOCATION 1...327
  hypothetical: NO
  anti-sense: NO
aaaataaggattatcatgttagaagtgattaacgggaagaattacgcagaaaaaaccgctcatcaagcggtagtggtcaatgtgggggcgagttggtgcccggattgcaggaagattgagccgatcatggaaaatttagccaaaacttacaaaggcaaggtggaattttttaaggtttcttttgatgagagccaggatctcaaagagagcttaggcatccgcaaaatccctactttgattttttacaaaaacgccaaagaagtgggtgaaaggcttgtagaacctagctctcaaaaaccgattgaagacgccctaaaagcattatta

SEQ ID NO: 1712 - DNA (genomic), 429 bp, Helicobacter pylori; double-stranded, circular
  misc_feature (B) LOCATION 1...429
  hypothetical: NO
  anti-sense: NO
aggatattcatgaaattagttttaggcatcagtggggcgagcgggatacccctagccttgcggtttttagagaaattacctaaagaaattgaagtttttgtcgtggcgtctaaaaacgcgcatgtcgtggcgttagaagaatctaacatcaaccttaaaaacgccatgaaagacttacggcctagcgcgactttttttaacgagcaagacatccatgcgagcatcgcctcagggagttatggtatccataaaatggcgatcattccagcgagcatggacatggtggctaaaatcgcgcatggctttgggggggatttgatttctaggagcgcctctgtcatgctgaaagaaaagcgccccttactcattgcccctagagaaatgcctttaagcgctatcatgttagaaaatttgctcaaactcgcgcgt

SEQ ID NO: 1713 - DNA (genomic), 432 bp, Helicobacter pylori; double-stranded, circular
  misc_feature (B) LOCATION 1...432
  hypothetical: NO
  anti-sense: NO
aggatattcatgaaattagttttaggcatcagtggggcgagcgggatacccctagccttgcggtttttagagaaattacctaaagaaattgaagtttttgtcgtggcgtctaaaaacgcgcatgtcgtggcgttagaagaatctaacatcaaccttaaaaacgccatgaaagacttacggcctagcgcgactttttttaacgagcaagacatccatgcgagcatcgcctcagggagttatggtatccataaaatggcgatcattccagcgagcatggacatggtggctaaaatcgcgcatggctttgggggggatttgatttctaggagcgcctctgtcatgctgaaagaaaagcgccccttactcattgcccctagagaaatgcctttaagcgctatcatgttagaaaatttgctcaaactcgcgcgttct

SEQ ID NO: 1714 - DNA (genomic), 564 bp, Helicobacter pylori; double-stranded, circular
  misc_feature (B) LOCATION 1...564
  hypothetical: NO
  anti-sense: NO
atgaaattagttttaggcatcagcggggcgagcgggatacccctagccttgcggtttttagagaaattacctaaagaaattgaaatttttgtcgtggcgtctaaaaacgcgcatgtcgtggcgttagaagaatctaacatcaaccttaaaaacgccatgaaagacttacggcctagcgcgactttttttaacgagcaagacatccatgcgagcatcgcctcagggagttatggtatccataaaatggcgatcattccagcgagcatggacatggtggctaaaatcgcgcatggctttgggggggatttgatttctaggagcgcctctgtcatgctgaaagaaaagcgccccttactcattgcccctagagaaatgcctttaagcgctatcatgttagaaaatttgctcaaactcgcccattctaatgcgatcatcgcgccgccgatgatgacttattatacccagagcaagactttagaagcgatgcaagattttttagtggggaagtggtttgacagcttgggaatagaaaatgacttatacccacgatggggaatgaactga

SEQ ID NO: 1715 - DNA (genomic), 210 bp, Helicobacter pylori; double-stranded, circular
  misc_feature (B) LOCATION 1...210
  hypothetical: NO
  anti-sense: NO
aaatttcataggcgtagatataagcaaagaatacatacaaatagcccaaaaaagattacaacaatatcaacaaggcttattcgtatgctaaaaaatgatgattttgtaatcgcaaaaaatcaattaggtaatattgtccaaattctgtgggtgtcattagagctgtcaatggaaaatctgcaatggtgctatttatcggacttaatgagt

SEQ ID NO: 1716 - DNA (genomic), 522 bp, Helicobacter pylori; double-stranded, circular
  misc_feature (B) LOCATION 1...522
  hypothetical: NO
  anti-sense: NO
tattgtccaaattctgtgggtgtcattagagctgtcaatggaaaatctgcaatggtgctatttatcggacttaatgagttaaaaagggttgattttagtgagctagaagcgatagatatttataggacaggtaagggctatgataaaaagatatgtaatatttgccatattttaaaaaacacagatggctttgaaatcaaccaaacagatgccaaaggtagaaaaactactcgtccaagttgcagagaatgccgaaaaaatattgatggtgtgaaattatcttccacagagaaaaagaaaatggatgaaatcgcaccacctaaaggaagcgtttttacctgtcctatttgtgaaaagcgaagtatagttggcgttacagcaaatctagtgcacgatcacaatcacgacacaggttggggcagagagtggatttgtgatagttgtaacacaggacttggcagatttaaagacaatccaaaatttttagagaaagtcatagaatatttgaaaaaatatgagaag

SEQ ID NO: 1717 - DNA (genomic), 573 bp, Helicobacter pylori; double-stranded, circular
  misc_feature (B) LOCATION 1...573
  hypothetical: NO
  anti-sense: NO
atgctaaaaaatgatgattttgtaatcgcaaaaaatcaattaggtaatattgtaccaaattctgtgggtgtcattagagctgtcaatggaaaatctgcaatggtgctatttatcggacttaatgagttaaaaagggttgattttagtgagctagaagcgatagatatttataggacaggtaagggctatgataaaaagatatgtaatatttgccatattttaaaaaacacagatggctttgaaatcaaccaaacagatgccaaaggtagaaaaactactcgtccaagttgcagagaatgccgaaaaaatattgatggtgtgaaattatcttccacagagaaaaagaaaatggatgaaatcgcaccacctaaaggaagcgtttttacctgtcctatttgtgaaaagcgaagtatagttggcgttacagcaaatctagtgcacgatcacaatcacgacacaggttggggcagagagtggatttgtgatagttgtaacacaggacttggcagatttaaagacaatccaaaatttttagagaaagtcatagaatatttgaaaaaatatgagaagtaa

SEQ ID NO: 1718 - DNA (genomic), 147 bp, Helicobacter pylori; double-stranded, circular
  misc_feature (B) LOCATION 1...147
  hypothetical: NO
  anti-sense: NO
ccaaccacacctgctgggagcgtgtattgctttgttttagggaatggagtcaaatccataaaaaacggagcgttgaacaatatcgctagcagcgtgttaaagctcatgggcatcaaagccccagcaacgatggacgaacccttattt

SEQ ID NO: 1719 - DNA (genomic), 1281 bp, Helicobacter pylori; double-stranded, circular
  misc_feature (B) LOCATION 1...1281
  hypothetical: NO
  anti-sense: NO
aaagtcctaaaaatggcgcaaaaaactcttttgattatcaccgatggcattgggtatcgtaaagatagcgatcataacgctttcttccatgccaaaaaacccacttatgacttgatgtttaaaaccttgccctatagcctgattgatacgcatggcttgagcgtgggcttgcctaaggggcaaatggggaattctgaagtggggcatatgtgcattggggctggtagggtgctgtatcaggatttagtcagaatttctttaagccttcaaaacgatgagttaaaaaacaaccccgcttttttaaacacgatccaaaaaagccatgtggtgcatcttatgggtttaatgagcgatggaggcgtgcattcacacattgagcattttatcgctctggctttagagtgtgaaaaatcccataaaaaagtctgtttgcatttaatcaccgatgggcgcgatgttgcccctaaaagcgctttaacttatttaaaacagatgcaaaatatctgcaatgaaaacattcaaatcgctaccataagcggtcgtttttatgcgatggatagggacaatcgctttgaaaggattgagcttgcgtataacagcctaatggggcttaatcacacgcctttaagccctagcgagtatatccaaagccaatacgataaaaacattaccgatgaatttatcatacccgcttgttttaaaaattattgcggcatgcaagatgatgaaagctttatttttatcaatttcaggaatgatagggctagagaaatcgtgagcgctttaggccaaaaggaatttaacagctttaagcgtcaagcttttaaaaaactccatatcgctaccatgacgccttatgacaactccttcccctaccctgttttattccctaaagaaagcgttcaaaacacgctcgctgaagtggtgtctcaacacaacctgacccaaagccatatcgctgagactgaaaaatacgcgcatgtaacctttttcatcaatggcggagtggagacgccttttaaaaatgaaaaccgggtgcttatccaaagccctaaagttaccacctatgatttaaagcctgaaatgagcgctaaaggagtaacccttgcggtgttggagcaaatgaggctggggacggatttgatcattgtgaattttgctaatggcgacatggtggggcatacagggaattttgaagcgagcattaaagcggtagaagcggtggatgcatgcttaggggaaacccttcactggctaaagaattggattacgccatgcttt

SEQ ID NO: 1720 - DNA (genomic), 1476 bp, Helicobacter pylori; double-stranded, circular
  misc_feature (B) LOCATION 1...1476
  hypothetical: NO
  anti-sense: NO
atggcgcaaaaaactcttttgattatcaccgatggcattgggtatcgtaaagatagcgatcataacgctttcttccatgccaaaaaacccacttatgacttgatgtttaaaaccttgccctatagcctgattgatacgcatggcttgagcgtgggcttgcctaaggggcaaatggggaattctgaagtggggcatatgtgcattggggctggtagggtgctgtatcaggatttagtcagaatttctttaagccttcaaaacgatgagttaaaaaacaaccccgcttttttaaacacgatccaaaaaagccatgtggtgcatcttatgggtttaatgagcgatggaggcgtgcattcacacattgagcattttatcgctctggctttagagtgtgaaaaatcccataaaaaagtctgtttgcatttaatcaccgatgggcgcgatgttgcccctaaaagcgctttaacttatttaaaacagatgcaaaatatctgcaatgaaaacattcaaatcgctaccataagcggtcgtttttatgcgatggatagggacaatcgctttgaaaggattgagcttgcgtataacagcctaatggggcttaatcacacgcctttaagccctagcgagtatatccaaagccaatacgataaaaacattaccgatgaatttatcatacccgcttgttttaaaaattattgcggcatgcaagatgatgaaagctttatttttatcaatttcaggaatgatagggctagagaaatcgtgagcgctttaggccaaaaggaatttaacagctttaagcgtcaagcttttaaaaaactccatatcgctaccatgacgccttatgacaactccttcccctaccctgttttattccctaaagaaagcgttcaaaacacgctcgctgaagtggtgtctcaacacaacctgacccaaagccatatcgctgagactgaaaaatacgcgcatgtaacctttttcatcaatggcggagtggagacgccttttaaaaatgaaaaccgggtgcttatccaaagccctaaagttaccacctatgatttaaagcctgaaatgagcgctaaaggagtaacccttgcggtgttggagcaaatgaggctggggacggatttgatcattgtgaattttgctaatggcgacatggtggggcatacagggaattttgaagcgagcattaaagcggtagaagcggtggatgcatgcttaggggaaatcctttcactggctaaagaattggattacgccatgcttttaacaagcgatcatgggaattgcgaacgcatgaaagatgaaaaccaaaaccccttaaccaaccacactgctgggagcgtgtattgctttgttttagggaatggagtcaaatccataaaaaacggagcgttgaacaatatcgctagcagcgtgttaaagctcatgggcatcaaagccccagcaacgatggacgaacccttattttaa

SEQ ID NO: 1721 - DNA (genomic), 276 bp, Helicobacter pylori; double-stranded, circular
  misc_feature (B) LOCATION 1...276
  hypothetical: NO
  anti-sense: NO
atgaaatttttggatcacgaggaaagaagacaattattgaacgaacgccattcttgcaagatgtttgacagccattatgagttctctagcacagaattagaagaaatcgctgaaatcgccagactatcaccaagctcttacaacacccaaccatggcattttgtgatggttactaataaggatttaaaaaaacaaattgcagcgcacagctattttaatgaagagatgattaaaagcgcttcagctgttaatggtggtatgctctttaaaacctag

SEQ ID NO: 1722 - DNA (genomic), 291 bp, Helicobacter pylori; double-stranded, circular
  misc_feature (B) LOCATION 1...291
  hypothetical: NO
  anti-sense: NO
aaaaataaaggagaaataatgaaatttttggatcacgaggaaagaagacaattattgaacgaacgccattcttgcaagatgtttgacagccattatgagttctctagcacagaattagaagaaatcgctgaaatcgccagactatcaccaagctcttacaacacccaaccatggcattttgtgatggttactaataaggatttaaaaaaacaaattgcagcgcacagctattttaatgaagagatgattaaaagcgcttcagctgttaatggtggtatgctctttaaaacc

SEQ ID NO: 1723 - DNA (genomic), 384 bp, Helicobacter pylori; double-stranded, circular
  misc_feature (B) LOCATION 1...384
  hypothetical: NO
  anti-sense: NO
atggtggtatgctctttaaaacctagcgagttgttgcccactagtcattacatgcaaaacctttatccggagtcttataaagttagagtgatcccgtcttttgctcaaatgcttggcgtgagattcaaccacagcatgcaaaaattagaaagctatattttagagcaatgctatattgcggtggggcaaatttgcatgggcgtgagcttaatgggattggatagttgcattattggaggctttgatcctttaaaagtgggagagattttagaagagcgtatcaataagcctaaaatcgtgtgtttgatcgcattgggtaagagggtggcagaagcgagcaaaaaatcaagaaaatcaaaagttgatgcaattacttggttgtga

SEQ ID NO: 1724 - DNA (genomic), 402 bp, Helicobacter pylori; double-stranded, circular
  misc_feature (B) LOCATION 1...402
  hypothetical: NO
  anti-sense: NO
ttaaaagcgcttcagctgttaatggtggtatgctctttaaaacctagcgagttgttgcccactagtcattacatgcaaaacctttatccggagtcttataaagttagagtgatcccgtcttttgctcaaatgcttggcgtgagattcaaccacagcatgcaaaaattagaaagctatattttagagcaatgctatattgcggtggggcaaatttgcatgggcgtgagcttaatgggattggatagttgcattattggaggctttgatcctttaaaagtgggagagattttagaagagcgtatcaataagcctaaaatcgtgtgtttgatcgcattgggtaagagggtggcagaagcgagcaaaaaatcaagaaaatcaaaagttgatgcaattacttggttg

SEQ ID NO: 1725 - DNA (genomic), 633 bp, Helicobacter pylori; double-stranded, circular
  misc_feature (B) LOCATION 1...633
  hypothetical: NO
  anti-sense: NO
atgaaatttttggatcacgaaaaaagaagacaattattgaacgaacgccattcttgcaagatgtttgacagccattatgagttctctagcacagaattagaagaaatcgctgaaatcgccagactatcaccaagctcttacaacacccaaccatggcattttgtgatggttactaataaggatttaaaaaaacaaattgcagcgcacagctattttaatgaagagatgattaaaagcgcttcagcgttaatggtggtatgctctttaaaacctagcgagttgttgcccactagtcattacatgcaaaacctttatccggagtcttataaagttagagtgatcccgtcttttgctcaaatgcttggcgtgagattcaaccacagcatgcaaaaattagaaagctatattttagagcaatgctatattgcggtggggcaaatttgcatgggcgtgagcttaatgggattggatagttgcattattggaggctttgatcctttaaaagtgggagagattttagaagagcgtatcaataagcctaaaatcgtgtgtttgatcgcattgggtaagagggtggcagaagcgagcaaaaaatcaagaaaatcaaaagttgatgcaattacttggttgtga

SEQ ID NO: 1726 - DNA (genomic), 579 bp, Helicobacter pylori; double-stranded, circular
  misc_feature (B) LOCATION 1...579
  hypothetical: NO
  anti-sense: NO
gtgagtgttcctgcaacgagtgcgaatttaggccccggttttgattgcttgggtttgagtttgaatttacgcaatcgtttttttattgagcctagtaatatccatgcggtgaaattggttggggagggtgaagggatccctaaatttttaaccaacaatattttcaccaaagtgttttatgagattttaaaaaagcatgggaatgacggctcgtttaaatttttattgcataataaagtccctattacaaggggcatggggtctagctcagcgatgattgtgggggcggtcgcttcagcgtttgcgtttttagggtttgcttttgatagagaaaacattctcaatactgctctaatttatgaaaaccacccggataatatcaccccggcggtgtttggggggtataatgcagcgtttgtggaaaaaaagaaagtgataagtttaaaaaccaaaatcccttcttttttaaaagcggtgatggtgatccctaatagggtcatttctaccaagcaatcgcgccatctctgcccaagcgttacagcgtgcaagaaagcgtgtttaacctttcgcatgcgagtt

SEQ ID NO: 1727 - DNA (genomic), 882 bp, Helicobacter pylori; double-stranded, circular
  misc_feature (B) LOCATION 1...882
  hypothetical: NO
  anti-sense: NO
ttggtagtgagtgttcctgcaacgagtgcgaatttaggccccggttttgattgcttgggtttgagtttgaatttacgcaatcgtttttttattgagcctagtaatatccatgcggtgaaattggttggggagggtgaagggatccctaaatttttaaccaacaatattttcaccaaagtgttttatgagattttaaaaaagcatgggaatgacggctcgtttaaatttttattgcataataaagtccctattacaaggggcatggggtctagctcagcgatgattgtgggggcggtcgcttcagcgtttgcgtttttagggtttgcttttgatagagaaaacattctcaatactgctctaatttatgaaaaccacccggataatatcaccccggcggtgtttggggggtataatgcagcgtttgtggaaaaaaagaaagtgataagtttaaaaaccaaaatcccttcttttttaaaagcggtgatggtgatccctaatagggtcatttctaccaagcaatcgcgccatctcttgcccaagcgttacagcgtgcaagaaagcgtgtttaacctttcgcatgcgagtttgatgacgatggcgattgtgcaagggaagtgggacttgttgcgttgttgttctaaagacaggatgcaccaatataagcgcatgcaaacttatcccgtgttgtttgcgatccaaaagctcgctttagaaaataacgccttaatgagcacgctttcagggagtggttcgtcgttttttaacatgtgttatgaagaagacgctcctaaattaaagcaggttttgagcaagaaattccctaaatttagggtagcggttttagattttgacaatgatggagtccttattgagaaagactga

SEQ ID NO: 1728 - DNA (genomic), 882 bp, Helicobacter pylori; double-stranded, circular
  misc_feature (B) LOCATION 1...882
  hypothetical: NO
  anti-sense: NO
aatttggtagtgagtgttcctgcaacgagtgcgaatttaggccccggttttgattgcttgggtttgagtttgaatttacgcaatcgtttttttattgagcctagtaatatccatgcggtgaaattggttggggagggtgaagggatccctaaatttttaaccaacaatattttcaccaaagtgttttatgagattttaaaaaagcatgggaatgacggctcgtttaaatttttattgcataataaagtccctattacaaggggcatggggtctagctcagcgatgattgtgggggcggtcgcttcagcgtttgcgtttttagggtttgcttttgatagagaaaacattctcaatactgctctaatttatgaaaaccacccggataatatcaccccggcggtgtttggggggtataatgcagcgtttgtggaaaaaaagaaagtgataagtttaaaaaccaaaatcccttcttttttaaaagcggtgatggtgatccctaatagggtcatttctaccaagcaatcgcgccatctcttgcccaagcgttacagcgtgcaagaaagcgtgtttaacctttcgcatgcgagtttgatgacgatggcgattgtgcaagggaagtgggacttgttgcgttgttgttctaaagacaggatgcaccaatataagcgcatgcaaacttatcccgtgttgtttgcgatccaaaagctcgctttagaaaataacgccttaatgagcacgctttcagggagtggttcgtcgttttttaacatgtgttatgaagaagacgctcctaaattaaagcaggttttgagcaagaaattccctaaatttagggtagcggttttagattttgacaatgatggagtccttattgagaaagac

SEQ ID NO: 1729 - DNA (genomic), 369 bp, Helicobacter pylori; double-stranded, circular
  misc_feature (B) LOCATION 1...369
  hypothetical: NO
  anti-sense: NO
ttgaaagggaggtttttgtgccagccccttttcaagcattttgcctacactttaaacgcgctttctatgcaagcgcaacaatacatttcttcgcccctaaccgtggctaaaatgacgcaatatttagagattgatcatgtggatagcgtgctagaaattggctgcgggagcggctatcaagcggcggttttgtctcaaattttcaggcgcgttttcagcattgaaaggattgaaagcctgtatatagaagcgcgtttgcgccttaaaactctcggtttagacaacgttcatgtcaaattcgctgatgggaataagggctgggagcgatacgccccctacgataggattttattctctggcttgcgctaa

SEQ ID NO: 1730 - DNA (genomic), 417 bp, Helicobacter pylori; double-stranded, circular
  misc_feature (B) LOCATION 1...417
  hypothetical: NO
  anti-sense: NO
gggaggctatggaaagcattgaaagggaggtttttgtgccagccccttttcaagcattttgcctacactttaaacgcgctttctatgcaagcgcaacaatacatttcttcgcccctaaccgtggctaaaatgacgcaatatttagagattgatcatgtggatagcgtgctagaaattggctgcgggagcggctatcaagcggcggttttgtctcaaattttcaggcgcgttttcagcattgaaaggattgaaagcctgtatatagaagcgcgtttgcgccttaaaactctcggttttagacaacgttccatgttcaaatcgctgatgggaataagggctgggagcgatacgccccctacgataggatttattctctggcttgcgcaaaaatattccccaagtgtttatcgatcagct

SEQ ID NO: 1731 - DNA (genomic), 495 bp, Helicobacter pylori; double-stranded, circular
  misc_feature (B) LOCATION 1...495
  hypothetical: NO
  anti-sense: NO
gggaggctatggaaagcattgaaagggaggtttttgtgccagccccttttcaagcattttgcctacactttaaacgcgctttctatgcaagcgcaacaatacatttcttcgcccctaaccgtggctaaaatgacgcaatatttagagattgatcatgtggatagcgtgctagaaattggctgcgggagcggctatcaagcggcggttttgtctcaaattttcaggcgcgttttcagcattgaaaggattgaaagcctgtatatagaagcgcgtttgcgccttaaaactctcggtttagacaacgttcatgtcaaattcgctgatgggaataagggctgggagcgatacgccccctacgataggattttattctctgcttgcgctaaaaatatcccccaagcgcttatcgatcagcttgaagaaggcgggatattagttgacacccattcaagaaaacaacgagcaagtgatcaaacgctttgtgaaacaaaataa

SEQ ID NO: 1732 - DNA (genomic), 627 bp, Helicobacter pylori; double-stranded, circular
  misc_feature (B) LOCATION 1...627
  hypothetical: NO
  anti-sense: NO
atgatccgtctagccgcgttttttttagctctcgcttgcgcgattacgccaaaaagccgccttcttttaaaaaatgtcttgctcaaccccactcgcatagaagcttttgaggttttgaaaaaaatgggcgctcatatagaatatgttatccaatccaaagatttagaagttattggcgatatttacatagagcatgcccctttaaaagcgatcagtattgatcagaatatcgccagccttattgatgaaatccccgctttaagcatcgctatgctttttgcaaaaggcaaaagcatggtgagaaacgctaaagatttacgagccaaagaaagcgataggattaaagcggttgtttctaatttcaaagctttagggattgagtgcgaagaatttgaagacgggttttatatagagggattaggagatgcgagtcaattaaagcagcatttttctaagattaaaccccctattatcaagagtttcaatgatcacaggattgcgatgagtttcgctgttttaactttagcgttgcctttagaaattgataatttagaatgcgcgaacatttctttcccaacctttcagctttggctcaatctattcaaaaaaaggagtctcaatggaaat

SEQ ID NO: 1733 - DNA (genomic), 1290 bp, Helicobacter pylori; double-stranded, circular
  misc_feature (B) LOCATION 1...1290
  hypothetical: NO
  anti-sense: NO
gtgatagagcttgacattaacgccagcgataaatcgctctcgcacagagccgttatttttagcctgctcgctcaaaaaccttgtttcgtgcggaattttttaatgggagaagattgtttaagctctttagaaatcgctcaaaatttaggggctaaagtggaaaataccgccaaaaattcttttaaaatcacacccccaacaactataaaagagcctaataagattttaaattgcaacaattctggcactagcatgcgtttatacagcgggcttttaagcgctcaaaaaggcctttttgttttaagcggggacaattccctaaacgcacgccccatgaaaagaatcattgagcctttaaaggcgtttggggcaaagattttagggagagaggataaccattttgcccccttagcgattgtagggggtcctttaaaagcttgcgattatgaaagccctatcgcttcagctcaagtcaaaagcgcttttattttaagcgccttacaagctcaaggcataagcgcctataaagaaagcgagcttagccgtaaccacacagaaatcatgcttaaaagtttgggggctaacattcaaaatcaagacggcgttttaaaaatttcacccctagaaaaacccctagaatcctttgactttaccatagccaatgatccgtctagcgcgttttttttagctctcgcttgcgcgattacgccaaaaagccgccttcttttaaaaaatgtcttgctcaaccccactcgcatagaagcttttgaggttttgaaaaaaatgggcgctcatatagaatatgttatccaatccaaagatttagaagttattggcgatatttacatagagcatgcccctttaaaagcgatcagtattgatcagaatatcgccagccttattgatgaaatccccgctttaagcatcgctatgctttttgcaaaaggcaaaagcatggtgagaaacgctaaagatttacgagccaaagaaagcgataggattaaagcggttgtttctaatttcaaagctttagggattgagtgcgaagaatttgaagacgggttttatatagagggattaggagatgcgagtcaattaaagcagcatttttctaagattaaaccccctattatcaagagtttcaatgatcacaggattgcgatgagtttcgctgttttaactttagcgttgcctttagaaattgataatttagaatgcgcgaacatttctttcccaacctttcagctttggctcaatctattcaaaaaaaggagtctcaatggaaattaa

SEQ ID NO: 1734 - DNA (genomic), 1290 bp, Helicobacter pylori; double-stranded, circular
  misc_feature (B) LOCATION 1...1290
  hypothetical: NO
  anti-sense: NO
tatgtgatagagcttgacattaacgccagcgataaatcgctctcgcacagagccgttatttttagcctgctcgctcaaaaaccttgtttcgtgcggaattttttaatgggagaagattgtttaagctctttagaaatcgctcaaaatttaggggctaaagtggaaaataccgccaaaaattcttttaaaatcacacccccaacaactataaaagagcctaataagattttaaattgcaacaattctggcactagcatgcgtttatacagcgggcttttaagcgctcaaaaaggcctttttgttttaagcggggacaattccctaaacgcacgccccatgaaaagaatcattgagcctttaaaggcgtttggggcaaagattttagggagagaggataaccattttgcccccttagcgattgtagggggtcctttaaaagcttgcgattatgaaagccctatcgcttcagctcaagtcaaaagcgcttttattttaagcgccttacaagctcaaggcataagcgcctataaagaaagcgagcttagccgtaaccacacagaaatcatgcttaaaagtttgggggctaacattcaaaatcaagacggcgttttaaaaatttcacccctagaaaaacccctagaatcctttgactttaccatagccaatgatccgtctagcgcgttttttttagctctcgcttgcgcgattacgccaaaaagccgccttcttttaaaaaatgtcttgctcaaccccactcgcatagaagcttttgaggttttgaaaaaaatgggcgctcatatagaatatgttatccaatccaaagatttagaagttattggcgatatttacatagagcatgcccctttaaaagcgatcagtattgatcagaatatcgccagccttattgatgaaatccccgctttaagcatcgctatgctttttgcaaaaggcaaaagcatggtgagaaacgctaaagatttacgagccaaagaaagcgataggattaaagcggttgtttctaatttcaaagctttagggattgagtgcgaagaatttgaagacgggttttatatagagggattaggagatgcgagtcaattaaagcagcatttttctaagattaaaccccctattatcaagagtttcaatgatcacaggattgcgatgagtttcgctgttttaactttagcgttgcctttagaaattgataatttagaatgcgcgaacatttctttcccaacctttcagctttggctcaatctattcaaaaaaaggagtctcaatggaaat

SEQ ID NO: 1735 - DNA (genomic), 171 bp, Helicobacter pylori; double-stranded, circular
  misc_feature (B) LOCATION 1...171
  hypothetical: NO
  anti-sense: NO
attggcatttgcatccgtttgcacagcggtggcactggggtttgggcaaagagtggggggatcaattttatatttggccttagcagcactgaagttttagaagcgatgcgccttttagaagaaaacgacttactaggcatttctacagaaaaagccggccttttcccaaaa

SEQ ID NO: 1736 - DNA (genomic), 513 bp, Helicobacter pylori; double-stranded, circular
  misc_feature (B) LOCATION 1...513
  hypothetical: NO
  anti-sense: NO
ttgaattggtcgtttttccaaagcttgccggattattggggcttgaggcagaatttcccggtcatgcccttgaataaattagatgaaaagcccaccaggagcgcgagcttgtgggatattacttgcgatagcgatggggaaatcgcttttgattccacgaagcccttgtttttgcatgatatagacatagatgaagaagaatactttttagcgttctttttagtgggagcgtatcaagaagttttaggtatgaaacacaatttattcacgcaccctacggaatttagcgtggtttttgatgaaaaaggcgattatgaagtggaagatatttgcgaagcccaaacgattttagacgtgctagacgatttagactatgacactaaagagatcgagcgccttttaaaacaaaaaattgaagacaacaaccaactggacatggaagaaaagaaagaaatcatggggcgcttgtatgtcatgctgagcgaaaacgggtatttgcgcacgatttcttaa

SEQ ID NO: 1737 - DNA (genomic), 522 bp, Helicobacter pylori; double-stranded, circular
  misc_feature (B) LOCATION 1...522
  hypothetical: NO
  anti-sense: NO
atgcaagaagtccatgattatgggattaatttttggagcaataacgaatttaagatagaaaaaggcttggttaaagtttgtcatggcaaaaacccctcgcttctagaaatcgttcaaagcgtgcacgataagggctatagagggcctttgttggtgcgattcccccatctggtgcaaaaacaaatcaaaagcctgtttgatgcgttttctttggcgattaaagagtatcaatacagcggggcttttaaggcggttttccctttaaaggtcaatcaaatgccctcgtttgttttgcctttagtgcaaggggctaaggggttaaattatggtttagaggccgggagtaaatccgaactcatcattgcgatgagctacactaaccccacagcccctatcaccgtgaatggctttaaagacaaggaaatgattgagcttggttttatcgctaaaagcatgcagcatgagatcactttaacgattgagggtttgaatgagctaaaaaccattattcgccgtggctaa

SEQ ID NO: 1738 - DNA (genomic), 522 bp, Helicobacter pylori; double-stranded, circular
  misc_feature (B) LOCATION 1...522
  hypothetical: NO
  anti-sense: NO
aaaatgcaagaagtccatggttatgggattaatttttggagcaataacgagtttgagatagaaagaggcttggttaaagtttgtcatggcaaaaacccctcgcttctagaaatcgttcaaagcgtgcacgataagggctatagagggcctttgttggtgcgattcccccatctggtgcaaaaacaaatcaaaagcctgtttgatgcgttttctttggcgattaaagagtatcaatacagcggggcttttaaggcggttttccctttaaaggtcaatcaaatgccctcgtttgttttgcctttagtgcaaggggctaaggggttaaattatggtttagaggccgggagtaaatccgaactcatcattgcgatgagctacactaaccccacagcccctatcaccgtgaatggctttaaagacaaggaaatgattgagcttggttctaccgctaaaagcatgcagcatgagatcactttaacgattgagggtttggatgaggttaaaaccattattcgccgtggc

SEQ ID NO: 1739 - DNA (genomic), 789 bp, Helicobacter pylori; double-stranded, circular
  misc_feature (B) LOCATION 1...789
  hypothetical: NO
  anti-sense: NO
gtggctaaacaaaacgattttgtagcatgccctaaaattggcattcgcatccgtttgcacagcgctggcactggcgtttgggcaaagagtggggggatcaattctaaatttggccttagcagcactgaagttttagaagcgatgcgccttttagaagaaaacgacttactagagcatttccacatgatacatttccacataggctctcaaatcagcgatatttcgcccttaaaaaaggctttaagagaagcgggtaacttgtatgcagaattgcgtaaaatgggcgctaaaaatctcaatagcgtgaatattggaggggggttagccgtagaatacacccaacacaaacaccaccaagataaaaactacactttagaggaattcagcgctgatgtggtgtttttattgagagaaattgtgaaaaataagcaagaaatcgagccggacattttcattgaatcaggccgttacatttccgctaaccatgccgttttagtggccccagtgttagaattgttttcgcatgaatacaatgaaaaatccctaaaaatcaaagaaaataataacccccccttgattgatgaaatgctagacttgctcgctaatatcaatgaaaaaaacgccattgaatacttgcatgatagttttgatcacaccgagtcgctattcacgctttttgatctgggctatattgatttgattgacaggagcaacactgaagttttagcccatttgatcgtcaaaaaagcggtgcaattgtttatgttaaggatcataacgatattttaa

SEQ ID NO: 1740 - DNA (genomic), 1029 bp, Helicobacter pylori; double-stranded, circular
  misc_feature (B) LOCATION 1...1029
  hypothetical: NO
  anti-sense: NO
actattggaggggggttagccgtagaatacacccaacacaaacaccaccaagataaaaactacactttagaggaattcagcgctgatgtggtgtttttattgagagaaattgtgaaaaataagcaagaaatcgagccggacattttcattgaatcaggccgttacatttccgctaaccatgccgttttagtggccccagtgttagaattgttttcgcatgaatacaatgaaaaatccctaaaaatcaaagaaaataataacccccccttgattgatgaaatgctagacttgctcgctaatatcaatgaaaaaaacgccattgaatacttgcatgatagttttgatcacaccgagtcgctattcacgctttttgatctgggctatattgatttgattgacaggagcaacactgaagttttagcccatttgatcgtcaaaaaagcggtgcaattgctttatgtcaaggatcataaacgagatattaaacgcattaaagagcagttccaagagcgctatttattgaattgtgtcgttatccaaagcttgccggattattggggcttgaggcagaatcccccgctcatgcccttgaataaattagatgaaaagcccaccaggagcgcgagcttgtgggatattacttgcgatagcgatggggaaatcgctttttattccacgaagcccttgtttttgcatgatatagacatagatgaagaagaatactttttagcgttctttttagtgggagcgtatcaagaagttttaggtatgaaacacaatttattcacgcaccctacggaatttagcgtggtttttgatgaaaaaggcgattatgaagtggaagatatttgcgaagcccaaacgattttagacgtgctagacgatttagactatgacactaaagagatcgagcgccttttaaaacaaaaaattgaagacaacaaccaactggacatggaagaaaagaaagaaatcatggggcgcttgtatgtcatgctgagcgaaaacgggtatttgcgcacgatttct

SEQ ID NO: 1741 - DNA (genomic), 1338 bp, Helicobacter pylori; double-stranded, circular
  misc_feature (B) LOCATION 1...1338
  hypothetical: NO
  anti-sense: NO
atgcaagaagtccatgattatgggattaatttttggagcaataacgaatttaagatagaaaaaggcttggttaaagtttgtcatggcaaaaacccctcgcttctagaaatcgttcaaagcgtgcacgataagggctatagagggcctttgttggtgcgattcccccatctggtgcaaaaacaaatcaaaagcctgtttgatgcgttttctttggcgattaaagagtatcaatacagcggggcttttaaggcggttttccctttaaaggtcaatcaaatgccctcgtttgttttgcctttagtgcaaggggctaaggggttaaattatggtttagaggccgggagtaaatccgaactcatcattgcgatgagctacactaaccccacagcccctatcaccgtgaatggctttaaagacaaggaaatgattgagcttggttttatcgctaaaagcatgcagcatgagatcactttaacgattgagggtttgaatgagctaaaaaccattatcgccgtggctaaacaaaacgattttgtagcatgccctaaaattggcattcgcatccgtttgcacagcgctggcactggcgtttgggcaaagagtggggggatcaattctaaatttggccttagcagcactgaagttttagaagcgatgcgccttttagaagaaaacgacttactagagcatttccacatgatacatttccacataggctctcaaatcagcgatatttcgcccttaaaaaaggctttaagagaagcgggtaacttgtatgcagaattgcgtaaaatgggcgctaaaaatctcaatagcgtgaatattggaggggggttagccgtagaatacacccaacacaaacaccaccaagataaaaactacactttagaggaattcagcgctgatgtggtgtttttattgagagaaattgtgaaaaataagcaagaaatcgagccggacattttcattgaatcaggccgttacatttccgctaaccatgccgttttagtggccccagtgttagaattgttttcgcatgaatacaatgaaaaatccctaaaaatcaaagaaaataataacccccccttgattgatgaaatgctagacttgctcgctaatatcaatgaaaaaaacgccattgaatacttgcatgatagttttgatcacaccgagtcgctattcacgctttttgatctgggctatattgatttgattgacaggagcaacactgaagttttagcccatttgatcgtcaaaaaagcggtgcaattgtttatgttaaggatcataacgatattttacgcattcaagagcaggtccaagagcgctatttattga

SEQ ID NO: 1742 - DNA (genomic), 459 bp, Helicobacter pylori; double-stranded, circular
  misc_feature (B) LOCATION 1...459
  hypothetical: NO
  anti-sense: NO
cccaaatacaccccaacagaaaattaccccaaaggggggaatgccatatggcatgtgccttgttttgcggcttttcctagcgcgactgagaatgaattgagcgttttagacgctaaaaccctcctttctaatgggtgtaaatgcgtggctgaaggggcgaacatgccctcaagtaatgaagcgattgaattgttcttacaggctaagatttcttatggtataggcaaggcggctaatgctgggggggggagcgtgagcggcttggaaatggcgcaaaacgcgagcatgcacccttggagttttgaagtggtggatgcgaaattacaccatattatgaaagagatttataagaatgtctctcaaaccgctaaagagtttaaagaccctactaatttcgttttaggggctaatatcgctggttttagaaaagtggcgtctgcgatgatagcgcaaggggtt

SEQ ID NO: 1743 - DNA (genomic), 570 bp, Helicobacter pylori; double-stranded, circular
  misc_feature (B) LOCATION 1...570
  hypothetical: NO
  anti-sense: NO
aggatgccgctcatgtatgttgaaaaaattctccagtctttacagaaaaaatacccttatcaaaaagagttccatcaagccgtctatgaagctatcacttctttaaaaccccttttagacagcgataaaagctatgaaaagcatgcggttttagagcgtttgattgagcctgaaagggagattttttttagggtgtgttggctagatgataaccatcaaatccaagtcaatcgggggtgtagggttgaattcaattcagcgattggcccttataaggggggcttgagattccaccctagcgtgaatgaaagcgtgatcaagtttttaggctttgagcaagtgttgaaaaattcgctcaccactttggctatggggggcgctaagggggggagcgattttgaccctaaagaaaagagcgagcatgagatcatgcgtttttgccaggcgttcatgaatgaattataccgccatattggagccacgactgatgtggccagctggggatattggagtgggcgaaagagagattggctatctgtttgggcaatacaaaaaattagtcaatcgttt

SEQ ID NO: 1744 - DNA (genomic), 1347 bp, Helicobacter pylori; double-stranded, circular
  misc_feature (B) LOCATION 1...1347
  hypothetical: NO
  anti-sense: NO
atgtatgttgaaaaaattctccagtctttacagaaaaaatacccttatcaaaaagagttccatcaagccgtctatgaagctatcacttctttaaaaccccttttagacagcgataaaagctatgaaaagcatgcggttttagagcgtttgattgagcctgaaagggagattttttttagggtgtgttggctagatgataaccatcaaatccaagtcaatcgggggtgtagggttgaattcaattcagcgattggcccttataaggggggcttgagattccaccctagcgtgaatgaaagcgtgatcaagtttttaggctttgagcaagtgttgaaaaattcgctcaccactttggctatggggggcgctaagggggggagcgattttgaccctaaagaaaagagcgagcatgagatcatgcgtttttgccaggcgttcatgaatgaattataccgccatattggagccacgactgatgtgccagctggggatattggagtgggcgaaagagagattggctatctgtttgggcaatacaaaaaattagtcaatcgttttgagggcgtattgaccggtaaaggactcacttatggggggagcttgtgcagaaaagaagccaccggttatggttgcgtgtattttgcagaagaaatgctgcaagaaaggaacagctctttagaaggtaaggtttgcagcgtttctgggagcggtaatgtcgctatttataccattgaaaaactgcttcaaataggagccaaaccggtaacggcgagcgattctaatggcatgatttatgataaagacggcattgatttagagcttttgaaagagattaaagaagcgcgtcgtgggaggatcaaagaatacgctttagaaaaaactagcgcaaaatacaccccaacagaaaattaccccaaaggggggaatgccatatggcatgtgccttgttttgcggcttttcctagcgcgactgagaatgaattgagcgttttagacgctaaaaccctcctttctaatgggtgtaaatgcgtggctgaaggggcgaacatgccctcaagcaatgaagcgattgaattgttcttacaggctaagatttcttatggtataggcaaggcggctaatgctgggggggtgagcgtgagcggcttggaaatggcgcaaaacgcgagcatgcacccttggagttttgaagtggtggatgcgaaattacaccatattatgaaagagatttataagaatgtctctcaaaccgctaaagagtttaaagaccctactaatttcgttttaggggctaatatcgctggttttagaaaagtggcgtctgcgatgatagcgcaaggggtttga

SEQ ID NO: 1745 - DNA (genomic), 1173 bp, Helicobacter pylori; double-stranded, circular
  misc_feature (B) LOCATION 1...1173
  hypothetical: NO
  anti-sense: NO
atgccctattcttctaaagtccaatccctttcagaatccgcaacgatcgctatcagcacactcgctaaagaattgaaatcgcaaggaaaagatattttaagtttttcagcgggcgagcctgattttgacaccccgcaagcgatcaaagatgcggctataaaagccctaaatgacggctttacaaaatacactccagtagctggaatccctgaattattaaaagcgatcgcttttaaattgaaaaaagaaaacaacctggattatgaaccgagtgaaattctggtgagcaatggcgctaagcaaagcttgttcaatgcgattcaagccttgataggggagggcgatgaggtggttatccctgtgcctttttgggtaacttaccctgagcttgtgaaatacagcggaggagtgagccaattcattcaaaccgatgaaaaaagccattttaaaatcacccccaagcagcttaaagacgccttaagccccaaaacaaaaatgctcattctcaccaccccatcaaaccctaccggcatgctttatagtaaggcggaattagaggctttgggcgaagttttgaaagacaccaaagtttgggtgcttagcgatgaaatttatgaaaagcttgtctataaaggggagtttgtttcttgcgcggcggtgagtgaagagatgaaaaaacgcaccattaccattaatggcttgagcaagtcagtggcgatgacaggctggcgtatgggctatgcggcgagcaaggataaaaaattagtcaaattgatgagtaatttgcaaagccaatgcacttccaatatcaattctatcacgcaaatggcttctattgtggcgcttgaagggttggtggataaggaaattgaaacgatgcgtcaggcttttgaaaagcgctgtcatttagcccacgcaaaaatcaatgcgattgaagggctgaacgctttaaaacctgatggggcgttttatctgtttattaatattggcagtctttgtgggggggattcgatgcgattttgccatgagctattagaaaaagaaggcgtggcgttagtgcctggaaaggcttttggattggaaggctatgttcgtttgtcttttgcatgctcagaagaacagattgaaaaggggattgaacgcatcgctcgctttgtcaaatcaaaaggataa

SEQ ID NO: 1746 - DNA (genomic), 1179 bp, Helicobacter pylori; double-stranded, circular
  misc_feature (B) LOCATION 1...1179
  hypothetical: NO
  anti-sense: NO
ggattaagcatgccctattcttctaaagtccaatccctttcagaatccgcaacgatcgctatcagcacactcgctaaagaattgaaatcgcaaggaaaagatattttaagtttttcagcgggcgagcctgattttgacaccccgcaagcgatcaaagatgcggctataaaagccctaaatgacggctttacaaaatacactccagtagctggaatccctgaattattaaaagcgatcgcttttaaattgaaaaaagaaaacaacctggattatgaaccgagtgaaattctggtgagcaatggcgctaagcaaagcttgttcaatgcgattcaagccttgataggggagggcgatgaggtggttatccctgtgcctttttgggtaacttaccctgagcttgtgaaatacagcggaggagtgagccaattcattcaaaccgatgaaaaaagccattttaaaatcacccccaagcagcttaaagacgccttaagccccaaaacaaaaatgctcattctcaccaccccatcaaaccctaccggcatgctttatagtaaggcggaattagaggctttgggcgaagttttgaaagacaccaaagtttgggtgcttagcgatgaaatttatgaaaagcttgtctataaaggggagtttgtttcttgcgcggcggtgagtgaagagatgaaaaaacgcaccattaccattaatggcttgagcaagtcagtggcgatgacaggctggcgtatgggctatgcggcgagcaaggataaaaaattagtcaaattgatgagtaatttgcaaagccaatgcacttccaatatcaattctatcacgcaaatggcttctattgtggcgcttgaagggttggtggataaggaaattgaaacgatgcgtcaggcttttgaaaagcgctgtcatttagcccacgcaaaaatcaatgcgattgaagggctgaacgctttaaaacctgatggggcgttttatctgtttattaatattggcagtctttgtgggggggattcgatgcgattttgccatgagctattagaaaaagaaggcgtggcgttagtgcctggaaaggcttttggattggaaggctatgttcgtttgtcttttgcatgctcagaagaacagattgaaaaggggattgaacgcatcgctcgctttgtcaaatcaaaagga

SEQ ID NO: 1747 - DNA (genomic), 456 bp, Helicobacter pylori; double-stranded, circular
  misc_feature (B) LOCATION 1...456
  hypothetical: NO
  anti-sense: NO
ggaagtcaaatgaacactttggggcgttttttaaggctaacgacctttggggaatcgcatggggatatgatagggggggtattagacggcatgcctagcgggattaagatagactatgacttattagaaaatgaaatgaagcgccgtcaaggggggaggaacattttcaccacgccacgaaaagaagacgataaagtggaaataacaagtggggtttttgaaggttttagcgcagggacgcccatagggtttttaatccacaaccaaagggctaggagcaaggattacgataacattaaaaaccttttcaggcctagccatgcggatttcacttattttcataaatacggcatcaggaattttagaggtggggggaggagttcggccagagagagcgctataagagtggctgctggggcgtttgctaaaatgcttttaagagaaattggcgttgtt

SEQ ID NO: 1748 - DNA (genomic), 459 bp, Helicobacter pylori; double-stranded, circular
  misc_feature (B) LOCATION 1...459
  hypothetical: NO
  anti-sense: NO
ggaagtcaaatgaacactttggggcgttttttaaggctaacgacctttggggaatcgcatggggatatgatagggggggtattagacggcatgcctagcgggattaagatagactatgacttattagaaaatgaaatgaagcgccgtcaaggggggaggaacattttcaccacgccacgaaaagaagacgataaagtggaaataacaagtggggtttttgaaggttttagcgcagggacgcccatagggtttttaatccacaaccaaagggctaggagcaaggattacgataacattaaaaaccttttcaggcctagccatgcggatttcacttattttcataaatacggcatcaggaattttagaggtggggggaggagttcggccagagagagcgctataagagtggctgctggggcgtttgctaaaatgcttttaagagaaattggcgttgtttgt

SEQ ID NO: 1749 - DNA (genomic), 582 bp, Helicobacter pylori; double-stranded, circular
  misc_feature (B) LOCATION 1...582
  hypothetical: NO
  anti-sense: NO
aaaagcgagatttttgccctagacaaagaacaagaagaagcgcaaaaaacagccattcaaaacgctatcaaaaaccacgacagcattgggggcgtggctttgattagagctaggggtgcgaaaacaaatcaaaagctccccattggcttaggtcaagggctatacgctaaattggacgctaaaatcgctgaagcgatgatggggcttaacggggtgaaagcggttgaaataggcaagggggtagaaagctctttactaaaaggctcagaatataacgatttaatgagtcaaaaagggtttttgagcaatcatagcgggggggttttagggggcatgagcaatggggaagaaatcattgttaaggtgcattttaaacccacgccaagcattttccaaccccaacgaaccatagacattaagggtaatgaatgcgaatgcttgttgaaaggcaggcatgatccttgcattgcgattagagggagcgtggtgtgcgaaagtttgctttcgttggtgttagccgatatggtattactcaatttgacttcaaaaatagagtatttaaaaacgatttataatgagaat

SEQ ID NO: 1750 - DNA (genomic), 579 bp, Helicobacter pylori; double-stranded, circular
  misc_feature (B) LOCATION 1...579
  hypothetical: NO
  anti-sense: NO
agcgagatttttgccctagacaaagaacaagaagaagcgcaaaaaacagccattcaaaacgctatcaaaaaccacgacagcattgggggcgtggctttgattagagctaggggtgcgaaaacaaatcaaaagctccccattggcttaggtcaagggctatacgctaaattggacgctaaaatcgctgaagcgatgatggggcttaacggggtgaaagcggttgaaataggcaagggggtagaaagctctttactaaaaggctcagaatataacgatttaatgagtcaaaaagggtttttgagcaatcatagcgggggggttttagggggcatgagcaatggggaagaaatcattgttaaggtgcattttaaacccacgccaagcattttccaaccccaacgaaccatagacattaagggtaatgaatgcgaatgcttgttgaaaggcaggcatgatccttgcattgcgattagagggagcgtggtgtgcgaaagtttgctttcgttggtgttagccgatatggtattactcaatttgacttcaaaaatagagtatttaaaaacgatttataatgagaat

SEQ ID NO: 1751 - DNA (genomic), 1098 bp, Helicobacter pylori; double-stranded, circular
  misc_feature (B) LOCATION 1...1098
  hypothetical: NO
  anti-sense: NO
atgaacactttggggcgttttttaaggctaacgacctttggggaatcgcatggggatatgatagggggggtattagacggcatgcctagcgggattaagatagactatgacttattagaaaatgaaatgaagcgccgtcaaggggggaggaacattttcaccacgccacgaaaagaagacgataaagtggaaataacaagtggggtttttgaaggttttagcgcagggacgcccatagggtttttaatccacaaccaaagggctaggagcaaggattacgataacattaaaaaccttttcaggcctagccatgcggatttcacttattttcataaatacggcatcagggattttagaggtggggggaggagttcggccagagagagcgctataagagtggctgctggggcgtttgctaaaatgcttttaagagaaattggcgttgtttgtgaaagcgggattattaaaattgggggcattgaagccaaaaattacgattttaatcacgctttaaaaagcgagatttttgccctagacaaagaacaagaagaagcgcaaaaaacagccattcaaaacgctatcaaaaaccacgacagcattgggggcgtggctttgattagagctaggggtgcgaaaacaaatcaaaagctccccattggcttaggtcaagggctatacgctaaattggacgctaaaatcgctgaagcgatgatggggcttaacggggtgaaagcggttgaaataggcaagggggtagaaagctctttactaaaaggctcagaatataacgatttaatgagtcaaaaagggtttttgagcaatcatagcgggggggttttagggggcatgagcaatggggaagaaatcattgttaaggtgcattttaaacccacgccaagcattttccaaccccaacgaaccatagacattaagggtaatgaatgcgaatgcttgttgaaaggcaggcatgatccttgcattgcgattagagggagcgtggtgtgcgaaagtttgctttcgttggtgttagccgatatggtattactcaatttgacttcaaaaatagagtatttaaaaacgatttataatgagaattaa

SEQ ID NO: 1752 - DNA (genomic), 177 bp, Helicobacter pylori; double-stranded, circular
  misc_feature (B) LOCATION 1...177
  hypothetical: NO
  anti-sense: NO
aaaggattgagtaccgggcatatgatgtactcgtattctaagggtgaaatgctactcgccttgcaacgcttgttgaatatcagtaaagatcgcactttagtcgtgggcgatggagcgaatgacttgagcagttcaaacatgcacatatcaaaatcgctttcaacgctaaagaaatcc

SEQ ID NO: 1753 - DNA (genomic), 267 bp, Helicobacter pylori; double-stranded, circular
  misc_feature (B) LOCATION 1...267
  hypothetical: NO
  anti-sense: NO
aagcaggaaatcttaattttagggtattgggtgcaaaaactagccgtttttgattttgactccacgctagtcaatgctgagacgattgagtctttagcgagggcgtggggggtgtttgatgaagtgagagagatcactttgaaagctatgaatggcgagacagattttcataagagtcttattttaagggtttctaaactcaaatacatgcccttgccactagccccagctcttagagagacctacccgacattaaagtcgaaaccc

SEQ ID NO: 1754 - DNA (genomic), 270 bp, Helicobacter pylori; double-stranded, circular
  misc_feature (B) LOCATION 1...270
  hypothetical: NO
  anti-sense: NO
aagcaggaaatcttaattttagggtattgggtgcaaaaactagccgtttttgattttgactccacgctagtcaatgctgagacgattgagtctttagcgagggcgtggggggtgtttgatgaagtgagagagatcactttgaaagctatgaatggcgagacagattttcataagagtcttattttaagggtttctaaactcaaatacatgcccttgccactagccccagctcttagagagacctacccgacattaaagtcgaaaccccgc

SEQ ID NO: 1755 - DNA (genomic), 624 bp, Helicobacter pylori; double-stranded, circular
  misc_feature (B) LOCATION 1...624
  hypothetical: NO
  anti-sense: NO
gtgcaaaaactagccgtttttgattttgactccacgctagtcaatgctgagacgattgagtctttagcgagggcgtggggggtgtttgatgaagtgagagagatcactttgaaagctatgaatggcgagacagattttcataagagtcttattttaagggtttctaaactcaaaaacatgcccttaaaactagccaaagaagtttgtgaaagtctgcctttgtttgagggggcgtttgaactcattagtgccttaaaagagaaaaattacaaagtggtttgctttagcggaggttttgatctagcgacgaatcattacagggatttattaaatttagatgcggctttcagtaacacgctgatcgtggaaaataacgccttaaacggcttggttaccgggcatatgatgttttcgtattctaagggtgaaatgctactcgccttgcaacgcttgttgaatatcagtaaagatcgcactttagtcgtgggcgatggagcgaatgacttgagcatgttcaaacatgcccatatcaaaatcgctttcaacgctaaagaaatcctaaaacagcacgccacgcattgcattgataaacccaatttagccttaatcaagcctttgatttaa

SEQ ID NO: 1756 - DNA (genomic), 693 bp, Helicobacter pylori; double-stranded, circular
  misc_feature (B) LOCATION 1...693
  hypothetical: NO
  anti-sense: NO
gatacaggaggctttatactttctatatcaattacatcatggggttttaaaaaagggtgtgtcatggaaatcttacaattcatcggctatgggaacatggctcaagcgattttagaaggctctcatgaaattttatccaagcgttttattttagagattaccggaaggaaccctgaaaaaatcgccccttttttacaagaaaaaaacattcaagcccaaatcgtgccttacaaagacgctattgatatacaccaaaaattcgtgtttttattgtttaagccttataaccttaaggattttaattatcaagggcaagccaaaagcgttttgagcgctttagctggcgtaaattttgaagctttaagcaatgcgattaattctttacattacttaaaatgcatgcctaatattgcgagcaaattcgccctttcttctacggcggtgtgtgaaaaatcggttgcgccttcaataagcgagaaagctttgaatattattgaaagttttgggaattgcgtgcgagtgggcaatgaagagcaggttgattctagcgtggcgacaaacgggagcgcgcttgcgtttttaagcttggtagcgagcagtttgaaagatgccggtattagagagggcttgaacgctaaagattctttagaattggtgaagatgagttttaaaggctttgccaagctggttaga

SEQ ID NO: 1757 - DNA (genomic), 774 bp, Helicobacter pylori; double-stranded, circular
  misc_feature (B) LOCATION 1...774
  hypothetical: NO
  anti-sense: NO
atggaaatcttacaattcatcggctatgggaacatggctcaagcgattttagaaggctctcatgaaattttatccaagcgttttattttagagattaccggaaggaaccctgaaaaaatcgccccttttttacaagaaaaaaacattcaagcccaaatcgtgccttacaaagacgctattgatatacaccaaaaattcgtgtttttattgtttaagccttataaccttaaggattttaattatcaagggcaagccaaaagcgttttgagcgctttagctggcgtaaattttgaagctttaagcaatgcgattaattctttacattacttaaaatgcatgcctaatattgcgagcaaattcgccctttcttctacggcggtgtgtgaaaaatcggttgcgccttcaataagcgagaaagctttgaatattattgaaagttttgggaattgcgtgcgagtgggcaatgaagagcaggttgattctagcgtggcgacaaacgggagcgcgcttgcgtttttaagcttggtagcgagcagtttgaaagatgccggtattagagagggcttgaacgctaaagattctttagaattggtgaagatgagttttaaaggctttgccaagctgttagaaaaagaacgccccgagatgattatagagcaaatctgcacccctaaaggcgcaacgattgaaggcttgagcgttttagaaaaaaagggggttaggggagcgttcatcaaagcatgtcatgagagcgtgaaaaaaatgcgcctctaa

SEQ ID NO: 1758 - DNA (genomic), 216 bp, Helicobacter pylori; double-stranded, circular
  misc_feature (B) LOCATION 1...216
  hypothetical: NO
  anti-sense: NO
aaacttttgtcgttcatcatgaagtcgcggcaagcgcaaggcgaagtgggcgtgaaatttggggatttagtggaagccgctgataatgtccaaaaactcaaatatgtggttaaaatggtcgctcatttaaatgggaaaacggctactttcatgccaaaacccctatatggggataatgggagtgggatgcacagcccatgtgagtatttggaagaa

SEQ ID NO: 1759 - DNA (genomic), 669 bp, Helicobacter pylori; double-stranded, circular
  misc_feature (B) LOCATION 1...669
  hypothetical: NO
  anti-sense: NO
atgggaaaacggctactttcatgccaaaacccctatatggggataatgggagtgggatgcacagcccatgtgagtatttggaagaataacgaaaacctttttggtggtgaaacttacaagggcttgagcgagtttgcgttgtattttttagggggcgtgttgcgccacgctagagggttagccgctttcactaacgcttccaccaattcttacaaacgcctgattccgggatatgaagccccatccattttaacttattcagccagcaataggagcgctagcgtgcgtatcccttatgggatttctaaaaatagtgctaggtttgaattcaggtttcctgacagctcatcaaacccctacctggcttttggggctattttaatggcgggcattgatggcattaaaaataaaatggatcccggcgaagcgatggacattaaccttttcaagctaactttggacgaaatcagagaaaaaggcatcaaacaaatgccccacactttaaggagatcgttagaagaaatgctagccgataagcagtatttaaaagagggtcaggtctttagcgaagaatttatccaggcctatcagtctcttaaattccattctgaagtgttcccatgggagagtaaaccccatccttttgaatttatcaccacttattcatgc

SEQ ID NO: 1760 - DNA (genomic), 735 bp, Helicobacter pylori; double-stranded, circular
  misc_feature (B) LOCATION 1...735
  hypothetical: NO
  anti-sense: NO
aggtggttaatggtagtaagaactcaaaatagcgaaagcaagatcaaagagttttttgaattttgcaaagaaaatgaagtagaatttgtggattttagattcagcgatattaaaggcacttggaaccatatcgcttattcttttggggctttaacgcatgatatgtttaaagaagggattccttttgatgcgagctcttttaaaggctggcaaggcattgaacactccgatatgattttaacccccgatttggtgcgttatttcattgacccttttagtgcggatgtgagcgcggtcgtgttttgcgatgtgtatgatgtgtataaaaaccagccttatgaaaaatgccctagaagtatcgctaaaaaagccctaaaacatttaagagatttaggcttgggcgatgtggcttattttggcgcggagaatgaattttttatctttgattctattaagattaaagacgcttccaattcccaatactacgaagtggatagcgaagagggcgaatggaatagggataaaagctttgaaaacggcgtgaattttgggcatagaccgggaaagcaaggaggctatatgcctgtgcctccaacggatacgatgatggatattcgcacagaaatcgtgaaagtcttaaaccaagtggggttagaaacttttgtcgttcatcatgaagtcgcggcaagcgcaaggcgaagtgggcgtgaaatttggggatttagtggaagccgc

SEQ ID NO: 1761 - DNA (genomic), 1446 bp, Helicobacter pylori; double-stranded, circular
  misc_feature (B) LOCATION 1...1446
  hypothetical: NO
  anti-sense: NO
atggtagtaagaactcaaaatagcgaaagcaagatcaaagagttttttgaattttgcaaagaaaatgaagtagaatttgtggattttagattcagcgatattaaaggcacttggaaccatatcgcttattcttttggggctttaacgcatgatatgtttaaagaagggattccttttgatgcgagctcttttaaaggctggcaaggcattgaacactccgatatgattttaacccccgatttggtgcgttatttcattgacccttttagtgcggatgtgagcgcggtcgtgttttgcgatgtgtatgatgtgtataaaaaccagccttatgaaaaatgccctagaagtatcgctaaaaaagccctaaaacatttaagagatttaggcttgggcgatgtggcttattttggcgcggagaatgaattttttatctttgattctattaagattaaagacgcttccaattcccaatactacgaagtggatagcgaagagggcgaatggaatagggataaaagctttgaaaacggcgtgaattttgggcatagaccgggaaagcaaggaggctatatgcctgtgcctccaacggatacgatgatggatattcgcacagaaatcgtgaaagtcttaaaccaagtggggttagaaacttttgtcgttcatcatgaagtcgcgcaagcgcaaggcgaagtgggcgtaaaatttggggatttagtggaagccgctgataatgtccaaaaactcaaatatgtggttaaaatggtcgctcatttaaatgggaaaacggctactttcatgccaaaacccctatatggggataatgggagtgggatgcacacccatgtgagtatttggaagaataacgaaaacctttttggtggcgaaacttacaagggcttgagcgagtttgcgttgtattttttagggggcgtgttgcgccacgctagagggttagccgctttcactaacgcttccaccaattcttacaaacgcctgattccgggatatgaagccccatccattttaacttattcagccagcaataggagcgctagcgtgcgtatcccttatgggatttctaaaaatagtgctaggtttgaattcaggtttcctgacagctcatcaaacccctacctggcttttggggctattttaatggcgggcattgatggcattaaaaataaaatggatcccggcgaagcgatggacattaaccttttcaagctaactttggacgaaatcagagaaaaaggcatcaaacaaatgccccacactttaaggagatcgttagaagaaatgctagccgataagcagtatttaaaagagggtcaggtctttagcgaagaatttatccaggcctatcagtctcttaaattccattctgaagtgttcccatgggagagtaaaccccatccttttgaatttatcaccacttattcatgctaa

SEQ ID NO: 1762 - DNA (genomic), 465 bp, Helicobacter pylori; double-stranded, circular
  misc_feature (B) LOCATION 1...465
  hypothetical: NO
  anti-sense: NO
cctttttgggtttggcgaacgctggaattgatgcaagctttagaagaagagaaattttatgccttaaagcctaaagaattagcccttttacaggagcatttttcttgcgcgagctgctccgatgaagattgtttgaaaaccattcaagaagtttatgcagagcaccaatacctgattgacccccacaccgccaccgctttaaacgccagcttgaaaacccacgaaaaaacccttgtttctgccaccgcttcttatgaaaaattccctaaaaccacccttttagccctgaatgagcaaaagaaaaacgatgacgataaagccgccctagaaacgcttaaaaacagctacaataccccggatagccaacgccttgatgatttgtttgaaagaggcatcaagcaccaagaagttttaaaactcaatgagatcaaatcttctattcttttgtggctagaaaacacgcat

SEQ ID NO: 1763 - DNA (genomic), 975 bp, Helicobacter pylori; double-stranded, circular
  misc_feature (B) LOCATION 1...975
  hypothetical: NO
  anti-sense: NO
tttattgaagcggtattaaaccccaacgcccccaaaggcgggctttacactttagagcattttgaaacgctagaatggcaagattgtttgggcatgagctatagcgaattagtagagcatgtgtttgaagctttaaatttagaaatccctaaaaatttactagcgagcgctttaaaacgctatgaaaattttgataaccctaaaaatccagcccctatttttgcactcaatgaaaggctttttgtccaagaactctaccatgggcctagtttggcgtttaaagatatggcgttacagcctttagcgagcttgttttctaatctagcggtggggaaaaacgaaaagtatttggtgttagtatccacaagtggggataccggccctgcgactttagaaggtttagcgggcatgcctaatgtttttgtggtgtgtttataccccaaagacggcacaagcttagttcaaaaactccaaatggtaacccaaaacgccagcaatttaaaggtgtttggggtgagtggggattttgatgatgcgcaaaacgcgctcaaaaaccttttaaaagacgacgattttaacgaggctttaaaagcgcgccaattaaaattaagcgtggctaattccgtgaattttgggcgcatcgcttttcaaatcgtctatcatatttggggctttttggaattgtataaaaaaggggcgatcaattttaaagaaaaaatcaccctagccataccaagcggtaattttgggaacgctttaggggcgttttatgccaaaaaaatgggcttgaatatcgctaaaatcaaggtcgtaaccaacagcaatgatgttttaagtgagcttatagagacagggcgttacgatttgactaagcgctctttaaagcaaactttctcgccagctatggatattttaaaaagctccaatgtggaaagggcgctttttagcctttttgggtttggcgaacgctggaat

SEQ ID NO: 1764 - DNA (genomic), 1461 bp, Helicobacter pylori; double-stranded, circular
  misc_feature (B) LOCATION 1...1461
  hypothetical: NO
  anti-sense: NO
atgccttttgtccccacgcgctctttgaaagaaagaaagattgattttattgaagcggtattaaaccccaacgcccccaaaggcgggctttacactttagagcattttgaaacgctagaatggcaagattgtttgggcatgagctatagcgaattagtagagcatgtgtttgagcttttaaatttagaaatccctaaaaatttactagcgagcgctttaaaacgctatgaaaattttgataaccctaaaaatccagcccctatttttgcactcaatgaaaggctttttgtccaagaactctaccatgggcctagtttggcgtttaaagatatggcgttacagcctttagcgagcttgttttctaatctagcggtggggaaaaacgaaaagtatttggtgttagtatccacaagtggggataccggccctgcgactttagaaggtttagcgggcatgcctaatgtttttgtggtgtgtttataccccaaagacggcacaagcttagttcaaaaactccaaatggtaacccaaaacgccagcaatttaaaggtgtttggggtgagtggggattttgatgatgcgcaaaacgcgctcaaaaaccttttaaaagacgacgattttaacgaggctttaaaagcgcgccaattaaaattaagcgtggctaattccgtgaattttgggcgcatcgcttttcaaatcgtctatcatatttggggctttttggaattgtataaaaaaggggcgatcaattctaaagaaaaaatcaccctagccataccaagcggtaattttgggaacgctttaggggcgttttatgccaaaaaaatgggcttgaatatcgctaaaatcaaggtcgtaaccaacagcaatgatgttttaagggagtttatagagacagggcgttacgatttgactaagcgctctttaaagcaaactttctcgccagctatggatattttaaaaagctccaatgtggaaagggcgctttttagcctttttgggtttgagcgaacgctggaattgatgcaagctttagaagaagagaaattttatgccttaaagcctaaagaattagcccttttacaggagcatttttcttgcgcgagctgctccgatgaagattgtttgaaaaccattcaagaagtttatgcagagcaccaatacctgattgacccccacaccgccaccgctttaaacgccagcttgaaaacccacgaaaaaacccttgtttctgccaccgcttcttatgaaaaattccctaaaaccacccttttagccctgaatgagcaaaagaaaaacgatgacgataaagccgccctagaaacgcttaaaaacagctacaataccccggatagccaacgccttgatgatttgtttgaaagaggcatcaagcaccaagaagttttaaaactcaatgagatcaaatcttctattcttttgtggctagaaaacacgcattaa

SEQ ID NO: 1765 - DNA (genomic), 513 bp, Helicobacter pylori; double-stranded, circular
  misc_feature (B) LOCATION 1...513
  hypothetical: NO
  anti-sense: NO
atgaaaattttagtgattcaagggcctaatttaaacatgttaggacacagagacccaagactttatggcatggtaaccttagaccaaatccatgaaatcatgcaaactttcgtgaagcaaggcaatttagatgtggaattagagttttttcaaaccaattttgagggcgaaatcattgataaaatccaagagagcgtgggcagcgattatgaggggattatcattaaccctggagcgttttcgcacacttctattgcgattgcggatgcgatcatgctagcgggcaaacctgtcattgaagtgcatctcactaacattcaagccagagaagaattcaggaaaaattcttacaccggagcggcttgtggaggcgtgatcatgggatttggcccgcttggctacaacatggctttaatggcgatggtcaatattttagccgaaatgaaagcgttccaagaagcccaaaaaaacaaccctaataaccccaataacccgatcaacaatcaaaaataa

SEQ ID NO: 1766 - DNA (genomic), 513 bp, Helicobacter pylori; double-stranded, circular
  misc_feature (B) LOCATION 1...513
  hypothetical: NO
  anti-sense: NO
ataatagaaattttagtgattcaagggcctaatttaaacatgttaggacacagagacccaagactttatggcatggtaaccttagaccaaatccatgaaatcatgcaaactttcgtgaagcaaggcaatttagatgtggaattagagttttttcaaaccaattttgagggcgaaatcattgataaaatccaagagagcgtgggcagcgattatgaggggattatcattaaccctggagcgttttcgcacacttctattgcgattgcggatgcgatcatgctagcgggcaaacctgtcattgaagtgcatctcactaacattcaagccagagaagaattcaggaaaaattcttacaccggagcggcttgtggaggcgtgatcatgggatttggcccgcttggctacaacatggctttaatggcgatggtcaatattttagccgaaatgaaagcgttccaagaagcccaaaaaaacaaccctaataaccccaataacccgatcaacaatcaaaaa

SEQ ID NO: 1767 - DNA (genomic), 192 bp, Helicobacter pylori; double-stranded, circular
  misc_feature (B) LOCATION 1...192
  hypothetical: NO
  anti-sense: NO
agaagagtgaaaaatgattgcgcgagcgtcctccagcatgcttattgcggctctagaaaaaagactatagagcatacagccaacctgcttgaacaagcgctaaaaaaacaccctaaaaccaatttagtggtgttgcaagaattgaacccttatagttatttttgccagagcgagaaccctaaattttttgat

SEQ ID NO: 1768 - DNA (genomic), 318 bp, Helicobacter pylori; double-stranded, circular
  misc_feature (B) LOCATION 1...318
  hypothetical: NO
  anti-sense: NO
cgaagaaaaaagcgtcagcaaaacgcatgggagacgatccaaagagggcatgcgatcgctaatggcttgcctttgattgcgactaacagagtgggcgtggagttagatcctagtggcgcgattaaggggggcattactttttttggctctagttttgtggtgggggctttaggcgaatttttggctaaagcgagcgataaagaagagattttgtatgcggaaattgaattagaacgcaccgaagaagtgcgccgaatgtggccgtttttaagagacagacgcattgatttttataacgatttgttgaaacgctatatt

SEQ ID NO: 1769 - DNA (genomic), 465 bp, Helicobacter pylori; double-stranded, circular
  misc_feature (B) LOCATION 1...465
  hypothetical: NO
  anti-sense: NO
ccaaatttttttgatttaggcgagtattttgaagaagataaggctttttttagcgctttagctcaaaaatttcaagtggtgcttatcgcttctttatttgaaaagcgcgctaaagggttgtatcacaacagcgcggttgtgtttgaaaaagatggctcaatcgctggagtgtatcgcaaaatgcacatccctgatgacccggggttttatgaaaaattttatttcacgccaggggatttgggctttgagcctattgctacaagcgtggggaaattagggcttatggtgtgttgggatcagtggtatcctgaggcggctagaattatggctttaaaaggggcagaaattttaatctaccctagtgcgatagggtttttagaagaagattctaacgaagaaaaaagcgtcagcaaaacgcatgggagacgatccaaagagggcatgcgatcgctaatggcttgcctt

SEQ ID NO: 1770 - DNA (genomic), 462 bp, Helicobacter pylori; double-stranded, circular
  misc_feature (B) LOCATION 1...462
  hypothetical: NO
  anti-sense: NO
aatttttttgatttaggcgagtattttgaagaagataaggctttttttagcgctttagctcaaaaatttcaagtggtgcttatcgcttctttatttgaaaagcgcgctaaagggttgtatcacaacagcgcggttgtgtttgaaaaagatggctcaatcgctggagtgtatcgcaaaatgcacatccctgatgacccggggttttatgaaaaattttatttcacgccaggggatttgggctttgagcctattgctacaagcgtggggaaattagggcttatggtgtgttgggatcagtggtatcctgaggcggctagaattatggctttaaaaggggcagaaattttaatctaccctagtgcgatagggtttttagaagaagattctaacgaagaaaaaagcgtcagcaaaacgcatgggagacgatccaaagagggcatgcgatcgctaatggcttgcctt

SEQ ID NO: 1771 - DNA (genomic), 879 bp, Helicobacter pylori; double-stranded, circular
  misc_feature (B) LOCATION 1...879
  hypothetical: NO
  anti-sense: NO
atgattcgcgcgagcgtcctccagcatgcttattgcggctctagaaaaaagactatagagcatacagccaacctgcttgaacaagcgctaaaaaaacaccctaaaaccaatttagtggtgttgcaagaattgaacccttatagttatttttgccagagcgagaaccctaaattttttgatttaggcgagtattttgaagaagataaggctttttttagcgctttagctcaaaaatttcaagtggtgcttatcgcttctttatttgaaaagcgcgctaaagggttgtatcacaacagcgcggttgtgtttgaaaaagatggctcaatcgctggagtgtatcgcaaaatgcacatccctgatgacccggggttttatgaaaaattttatttcacgccaggggatttgggctttgagcctattgctacaagcgtggggaaattagggcttatggtgtgttgggatcagtggtatcctgaggcggctagaattatggctttaaaaggggcagaaattttaatctaccctagtgcgatagggtttttagaagaagattctaacgaagaaaaaaagcgtcagcaaaacgcatgggagacgatccaaagagggcatgcgatcgctaatggcttgcctttgattgcgactaacagagtgggcgtggagttagatcctagtggcgcgattaaggggggcattactttttttggctctagttttgtggtgggggctttaggcgaatttttggctaaagcgagcgataaagaagagattttgtatgcggaaattgaattagaacgcaccgaagaagtgcgccgaatgtggccgtttttaagagacagacgcattgatttttataacgatttgttgaaacgctatatttaa

SEQ ID NO: 1772 - DNA (genomic), 309 bp, Helicobacter pylori; double-stranded, circular
  misc_feature (B) LOCATION 1...309
  hypothetical: NO
  anti-sense: NO
atgttgcttttcactccaggccctgtagccattaatgaagagatgcgctcaagcttttctcagccaatgccccaccaccgcaccaaagattttgaaaagattttccaaagcgtgcgagaaaatttgaaaaaaatgaccggtttagaagaagttttgcttttaagcagcagtgggacaggggctatggaagcgagtgtgatttccttgtgtcaaaaagagttgctttttgttaatgcgggtaagtttggcgaaaggtttggcaagatcgctaaagcccattccatcaaagcccatgaattagttctatga

SEQ ID NO: 1773 - DNA (genomic), 273 bp, Helicobacter pylori; double-stranded, circular
  misc_feature (B) LOCATION 1...273
  hypothetical: NO
  anti-sense: NO
gagcatttagaaataacgcatgttgatgcgtcaattggagagagtcaaaaagcgttcatgctaccccatgcgatgagattaatcgcattgagccaaaaggcgattgatagcatagaagaacgcaatgtggggtattatttcaatttgaagagcgaattgaaaaaccaaaagaacaacaccacaaggtacaccgctcgtattttacacactttagggttgcaacgatattttgaattggtgcagaatctagggggctttgaagcgctctatcaa

SEQ ID NO: 1774 - DNA (genomic), 270 bp, Helicobacter pylori; double-stranded, circular
  misc_feature (B) LOCATION 1...270
  hypothetical: NO
  anti-sense: NO
catttagaaataacgcatgttgatgcgtcaattggagagagtcaaaaagcgttcatgctaccccatgcgatgagattaatcgcattgagccaaaaggcgattgatagcatagaagaacgcaatgtggggtattatttcaatttgaagagcgaattgaaaaaccaaaagaacaacaccacaaggtacaccgctcgtattttacacactttagggttgcaacgatattttgaattggtgcagaatctagggggctttgaagcgctctatcaa

SEQ ID NO: 1775 - DNA (genomic), 336 bp, Helicobacter pylori; double-stranded, circular
  misc_feature (B) LOCATION 1...336
  hypothetical: NO
  anti-sense: NO
actgaaagagtcgctctagtcagtcaaaaagccgttttagcactgggtttaaagattttccctaaaagtccgagcttgagcatgacaacgattgttagcgagcatgccaaagaattaaaaaaccctttgaaagaaaaataccaggtgcaatttgcgggcggtcaagagccttataaacgacacgctccattctgcatccaaccacaatggctgatcattcctgtttacaaaagcgcttacgccttaaacgccctagaattagccttaaacgatttggatttaagggaatttgacggcatggcgaatacaacctttttgaagcaatattatgaaatt

SEQ ID NO: 1776 - DNA (genomic), 807 bp, Helicobacter pylori; double-stranded, circular
  misc_feature (B) LOCATION 1...807
  hypothetical: NO
  anti-sense: NO
atgaatgggaacacaccggctcaagtggatggaatattaaacgcgcttaaagccaaccccaacattgatgcgttttgcattcaagcatgcgagtctagtggagggttacgacaccctgtagaaaaaatcgctcaagcgatcaaagaaactaacccaaatgtttttgtgattgtagatgcgatcaccgctttaggggttgagcctttagaaataacgcatgttgatgcgctcattggagggagtcaaaaagcgttcatgctaccccctgcgatgagcttaatcgcattgagccaaaaggcgattgatcgcatagaagaacgcaatgtggggttttatttcaatttgaagagcgaattgaaaaaccaaaagaacaacaccacaagctacaccgctcctattttacacactttagggttgcaacgctattttgaattggtgcagaatttagggggctttgaagcgctctatcaagagactaaaagagtcgctctagccagtcaaaaagccgttttagcactgggtttaaagattttccctaaaagcccgagcttgagcatgacaacgattgttagcgagcatgccaaagaattaaaaaaccttttgaaagaaaaataccaggtgcaatttgcgggcggtcaagagccttataaagacacgctcattcgcatcaaccacatggggatcattcctgtttacaaaagcgcttacgccttaaacgccctagaattagccttaaacgatttggatttaagggaatttgacggcatggcgaatacaacctttttgaagcaatattatgaaatttaa

SEQ ID NO: 1777 - DNA (genomic), 264 bp, Helicobacter pylori; double-stranded, circular
  misc_feature (B) LOCATION 1...264
  hypothetical: NO
  anti-sense: NO
aagggcattcaaaagaaacaaaatcttaaagaggtggctttagacgctttcttgcctaaaagcatcaattactaccattttaacggctctctcaccgctcctccttgcacagagggggtggcatggtttgtcatagaagaacctttggaagtttctgccaaacaattggctgaaatcaaaaaacgcatgaaaaattcgcccaaccaacgccccgtccagcctgactacaacaccgtgatcattaaaagctcggctgagacccgc

SEQ ID NO: 1778 - DNA (genomic), 450 bp, Helicobacter pylori; double-stranded, circular
  misc_feature (B) LOCATION 1...450
  hypothetical: NO
  anti-sense: NO
aggataattaaaatgaaaaaaacttttttgatcgctttagcgcttacggcttctcttataggcgctgaaaacaccaaatgggattataaaaataaagaaaatggcccgcaccgctgggacaaattgcacaaagattttgaagtgtgcaaaagcggtaaaagccaatcgcccatcaacattgagcattactaccacacgcaagataaagccgatttgcaattcaaatacgccgcttctaaacctaaagcggtctttttcacccaccatactttaaaggcttcgtttgagccgactaaccacatcaattatagagggcatgactatgtgttggataatgtgcatttccacgcccctatggagtttttaatcaataataaaaccaggcctttgagcgcgcatttcgtgcataaagacgctaaagggcgtttgttggtgttagcgattgggttt

SEQ ID NO: 1779 - DNA (genomic), 744 bp, Helicobacter pylori; double-stranded, circular
  misc_feature (B) LOCATION 1...744
  hypothetical: NO
  anti-sense: NO
atgaaaaaaacttttttgatcgctttagcgcttacggcttctcttataggcgctgaaaacaccaaatgggattataaaaataaagaaaatggcccgcaccgctgggacaaattgcacaaagattttgaagtgtgcaaaagcggtaaaagccaatcgcccatcaacattgagcattactaccacacgcaagataaagccgatttgcaattcaaatacgccgcttctaaacctaaagcggtctttttcacccaccatactttaaaggcttcgtttgagccgactaaccacatcaattatagagggcatgactatgtgttggataatgtgcatttccacgcccctatggagtttttaatcaataataaaaccaggcctttgagcgcgcatttcgtgcataaagacgctaaagggcgtttgttggtgttagcgattggttttgaagaagggaaagaaaaccccaaccttgatcctattttagaaggcattcaaaagaaacaaaatcttaaagaggtggctttagacgctttcttgcctaaaagcatcaattactaccattttaacggctctctcaccgctcctccttgcacagagggggtggcatggtttgtcatagaagaacctttggaagtttctgccaaacaattggctgaaatcaaaaaacgcatgaaaaattcgcccaaccaacgccccgtccagcctgactacaacaccgtgatcattaaaagctcggctgagacccgctaa

SEQ ID NO: 1780 - DNA (genomic), 741 bp, Helicobacter pylori; double-stranded, circular
  misc_feature (B) LOCATION 1...741
  hypothetical: NO
  anti-sense: NO
atgaaaaaaacttttttgatcgctttagcgcttacggcttctcttataggcgctgaaaacaccaaatgggattataaaaataaagaaaatggcccgcaccgctgggacaaattgcacaaagattttgaagtgtgcaaaagcggtaaaagccaatcgcccatcaacattgagcattactaccacacgcaagataaagccgatttgcaattcaaatacgccgcttctaaacctaaagcggtctttttcacccaccatactttaaaggcttcgtttgagccgactaaccacatcaattatagagggcatgactatgtgttggataatgtgcatttccacgcccctatggagtttttaatcaataataaaaccaggcctttgagcgcgcatttcgtgcataaagacgctaaagggcgtttgttggtgttagcgattggttttgaagaagggaaagaaaaccccaaccttgatcctattttagaaggcattcaaaagaaacaaaatcttaaagaggtggctttagacgctttcttgcctaaaagcatcaattactaccattttaacggctctctcaccgctcctccttgcacagagggggtggcatggtttgtcatagaagaacctttggaagtttctgccaaacaattggctgaaatcaaaaaacgcatgaaaaattcgcccaaccaacgccccgtccagcctgactacaacaccgtgatcattaaaagctcggctgagacccgc

SEQ ID NO: 1781 - DNA (genomic), 366 bp, Helicobacter pylori; double-stranded, circular
  misc_feature (B) LOCATION 1...366
  hypothetical: NO
  anti-sense: NO
aaatggtgcatgaaacccataaaatcatgggcgtggatttccctatcagcgcgacttgcgtgcgcgtggccggtattaaggagtcatagcgagagtttgagtatcgcttttgaaaaagaattcgatcttaaagaagtctatgaagttttaaaaaacgcccctagcgtggttgtttgcgatgatcctagccataatctctaccccacgcccttaaaagcgagccacacggatagcgtctttatagggcgcttgaggaaggatttgtttgataagaaaaccttgcacggcttttgcgtggcggatcaattaagagtgggggcagccaccaacgcgctcaaaatcgctctgcattacattaagaacgct

SEQ ID NO: 1782 - DNA (genomic), 786 bp, Helicobacter pylori; double-stranded, circular
  misc_feature (B) LOCATION 1...786
  hypothetical: NO
  anti-sense: NO
aagcccttgaaatcattggagaaaacgatgaagacttataatgtcgctattgttggggctagtggggcggtagggcaagagctgattaaaggtttagaaaattcttttttcccaattaaaaaatttgtcccgctcgctagtgctaggagcgccggtaaaaagattagagctttcaataaagactatgaaattttagaaaccacgcatgaggtttttgaaaaagaagaaatagacattgccttttttagcgctggggggagcgtgagcgaagaatttgctataagcgcttcaaaaacggccctagtgattgataacacgagcttttttagattgaataaagatgtgcctttagtcgtgcctgaaatcaacgctcaagaaatttttaacgctcccttgaatatcatcgctaaccctaattgctccaccattcaaatgacgcaaattttaaaccctttacaccttcattttaagataaaaagcgttattgttagcacctatcaagccgtgagtggggcagggaacaagggcatagagagtttaaaaaatgaattaaaaaccgctttagaacatttggaaaaagaccccgctattgatttaaaccaagtcttgcaagctggggctttcgcttatccgatcgctttcaatgcgatcgctcatattgatacttttaaggagaatggctacacgaaggaagagctgaaaatggtgcatgaaacccataaaatcatgggcgtggatttccctatcagcgcgacttgcgtgcgcgtggccggtattaaggagtca

SEQ ID NO: 1783 - DNA (genomic), 1041 bp, Helicobacter pylori; double-stranded, circular
  misc_feature (B) LOCATION 1...1041
  hypothetical: NO
  anti-sense: NO
atgaagacttataatgtcgctattgttggggctagtggggcggtagggcaagagctgattaaaggtttagaaaattcttttttcccaattaaaaaatttgtcccgctcgctagtgctaggagcgccggtaaaaagattagagctttcaataaagactatgaaattttagaaaccacgcatgaggtttttgaaaaagaagaaatagacattgccttttttagcgctggggggagcgtgagcgaagaatttgctataagcgcttcaaaaacggccctagtgattgataacacgagcttttttagattgaataaagatgtgcctttagtcgtgcctgaaatcaacgctcaagaaatttttaacgctcccttgaatatcatcgctaaccctaattgctccaccattcaaatgacgcaaattttaaaccctttacaccttcattttaagataaaaagcgttattgttagcacctatcaagccgtgagtggggcagggaacaagggcatagagagtttaaaaaatgaattaaaaaccgctttagaacatttggaaaaagaccccgctattgatttaaaccaagtcttgcaagctggggctttcgcttatccgatcgctttcaatgcgatcgctcatattgatacttttaaggagaatggctacacgaaggaagagctgaaaatggtgcatgaaacccataaaatcatgggcgtggatttccctatcagcgcgacttgcgtgcgcgtgccggtattaaggagtcatagcgagagtttgagtatcgcttttgaaaaagaattcgatcttaaagaagtctatgaagttttaaaaaacgcccctagcgtggttgtttgcgatgatcctagccataatctctaccccacgcccttaaaagcgagccacacggatagcgtctttatagggcgcttgaggaaggatttgtttgataagaaaaccttgcacggcttttgcgtggcggatcaattaagagtgggggcagccaccaacgcgctcaaaatcgctctgcattacattaagaacgcttga

SEQ ID NO: 1784 - DNA (genomic), 1062 bp, Helicobacter pylori; double-stranded, circular
  misc_feature (B) LOCATION 1...1062
  hypothetical: NO
  anti-sense: NO
ttgaaatcattggagaaaacgatgaagacttataatgtcgctattgttggggctagtggggcggtagggcaagagctgattaaaggtttagaaaattcttttttcccaattaaaaaatttgtcccgctcgctagtgctaggagcgccggtaaaaagattagagctttcaataaagactatgaaattttagaaaccacgcatgaggtttttgaaaaagaagaaatagacattgccttttttagcgctggggggagcgtgagcgaagaatttgctataagcgcttcaaaaacggccctagtgattgataacacgagcttttttagattgaataaagatgtgcctttagtcgtgcctgaaatcaacgctcaagaaatttttaacgctcccttgaatatcatcgctaaccctaattgctccaccattcaaatgacgcaaattttaaaccctttacaccttcattttaagataaaaagcgttattgttagcacctatcaagccgtgagtggggcagggaacaagggcatagagagtttaaaaaatgaattaaaaaccgctttagaacatttggaaaaagaccccgctattgatttaaaccaagtcttgcaagctggggctttcgcttatccgatcgctttcaatgcgatcgctcatattgatacttttaaggagaatggctacacgaaggaagagctgaaaatggtgcatgaaacccataaaatcatgggcgtggatttccctatcagcgcgacttgcgtgcgcgtgccggtattaaggagtcatagcgagagtttgagtatcgcttttgaaaaagaattcgatcttaaagaagtctatgaagttttaaaaaacgcccctagcgtggttgtttgcgatgatcctagccataatctctaccccacgcccttaaaagcgagccacacggatagcgtctttatagggcgcttgaggaaggatttgtttgataagaaaaccttgcacggcttttgcgtggcggatcaattaagagtgggggcagccaccaacgcgctcaaaatcgctctgcattacattaagaacgcttga

SEQ ID NO: 1785 - DNA (genomic), 450 bp, Helicobacter pylori; double-stranded, circular
  misc_feature (B) LOCATION 1...450
  hypothetical: NO
  anti-sense: NO
atgcaagaaatcttaatccctttaaaagaaaaaagctataaagtgtttttgggggaactgcctgaaataaaattgaaacaaaaagcgctcatcattagcgatagcatcgtggccgggttgcatttgccctatttgttagagcgcttgaacgccttagaagtcagagtgtgcgtgatagagtccggggaaaaatacaaaaattttcattcattagagcggattttaaacaacgcctttgaaatgcaattaaaccgccattctttaatgatagcccttggtgggggagtgataagcgatatggtggggtttgcgagcagtatttatttcagggggattgattttattaatattccctacgactttactcgctcaagtggatgcgagcgtgggggggaaaacagggatcaacacgccttatggcaagaacctaatcggatcgttccaccagcc

SEQ ID NO: 1786 - DNA (genomic), 1032 bp, Helicobacter pylori; double-stranded, circular
  misc_feature (B) LOCATION 1...1032
  hypothetical: NO
  anti-sense: NO
atgcaagaaatcttaatccctttaaaagaaaaaagctataaagtgtttttgggggaactgcctgaaataaaattgaaacaaaaagcgctcatcattagcgatagcatcgtggccgggttgcatttgccctatttgttagagcgcttgaacgccttagaagtcagagtgtgcgtgatagagtccggggaaaaatacaaaaattttcattcattagagcggattttaaacaacgcctttgaaatgcaattaaaccgccattctttaatgatagcccttggtgggggagtgataagcgatatggtggggtttgcgagcagtatttatttcagggggattgattttattaatatccctacgactttactcgctcaagtggatgcgagcgtgggggggaaaacagggatcaacacgccttatggcaagaacctaatcggatcgttccaccagcctaaagcggtttatatggatttagcttttttaaaaacccttgaaaaaagggaatttcaagcgggggttgctgaaatcattaaaatggcggtgtgttttgataaaaacttggtagaaagattagaaacaaaggatttaaaagattgtttagaagaagtaatctttcaaagcgtcaatatcaaagctcaagtcgttgttcaagatgaaaaagagcgaaacatcagggctgggttgaactatgggcatacctttggcatgctgatagaaaacgagaccaattacgagcgatttttgcatggcgaagcgatcgctattggcatgcgcatggctaatgatttagccctttctttaggcatgctcactttaaaagaatacgaacgcatagaaaatttattgaaaaaatttgatctgatattcaattaccaaatcactgatattcaaaaattttacgaacgcttgtttttagacaaaaaaagcgagaaccaaaccctaaaattcattttgcctaaaggtgttggagcgtttgagattgcctctcatatccctaaagaaacgattttaaaggtgttagaaaaatggcattaa

SEQ ID NO: 1787 - DNA (genomic), 1041 bp, Helicobacter pylori; double-stranded, circular
  misc_feature (B) LOCATION 1...1041
  hypothetical: NO
  anti-sense: NO
cggagtgaaagaatgcaagaaatcttaatccctttaaaagaaaaaagctataaagtgtttttgggggaactgcctgaaataaaattgaaacaaaaagcgctcatcattagcgatagcatcgtggccgggttgcatttgccctatttgttagagcgcttgaacgccttagaagtcagagtgtgcgtgatagagtccggggaaaaatacaaaaattttcattcattagagcggattttaaacaacgcctttgaaatgcaattaaaccgccattctttaatgatagcccttggtgggggagtgataagcgatatggtggggtttgcgagcagtatttatttcagggggattgattttattaatatccctacgactttactcgctcaagtggatgcgagcgtgggggggaaaacagggatcaacacgccttatggcaagaacctaatcggatcgttccaccagcctaaagcggtttatatggatttagcttttttaaaaacccttgaaaaaagggaatttcaagcgggggttgctgaaatcattaaaatggcggtgtgttttgataaaaacttggtagaaagattagaaacaaaggatttaaaagattgtttagaagaagtaatctttcaaagcgtcaatatcaaagctcaagtcgttgttcaagatgaaaaagagcgaaacatcagggctgggttgaactatgggcatacctttggcatgctgatagaaaacgagaccaattacgagcgatttttgcatggcgaagcgatcgctattggcatgcgcatggctaatgatttagccctttctttaggcatgctcactttaaaagaatacgaacgcatagaaaatttattgaaaaaatttgatctgatattcaattaccaaatcactgatattcaaaaattttacgaacgcttgtttttagacaaaaaaagcgagaaccaaaccctaaaattcattttgcctaaaggtgttggagcgtttgagattgcctctcatatccctaaagaaacgattttaaaggtgttagaaaaatggcat

SEQ ID NO: 1788 - DNA (genomic), 1128 bp, Helicobacter pylori; double-stranded, circular
  misc_feature (B) LOCATION 1...1128
  hypothetical: NO
  anti-sense: NO
atgacttttgagccatatccttttgaacgattaagagccttgtttaaagagatcacccctaaaaaaaaggggttagatttaggcatcggcgagccgcgatttgaaacgcccaaattcattcaagacgctcttaaaagccacacccattcgctcaatatctaccctaaaagcgcgtttgaagagagtttgagagaggctcaaaggggtttttttaaacgccgttttaagatagaattgaaagaaaacgagttagtctccacgctaggatctagggaagtgttattcaatttccctagttttgttttatttgattatccaaaccccactatcgcctaccctaaccctttttatcaaatctatgaaggatcagcccaattcgctagggctaaaagccttttaatgcctttagttaaagaaaatgatttcactccaagcttgaatgaaaaagagttgcaagaagtggatttagtgattttaaattcccctaacaaccccaccggaagaaccctttctttagaagagctgatcgcttgggtcaaactcgctttaaagcatgattttattttaattaatgatgaatgttatagtgaaatttatgaaaacacgcctccttcttcgcttttagaagcttgcatgctggctgataatggagcgtttaaaaatgttttggttatccattcgctctccaaacgatctagcgctccagggctaaggagtggttttatcgctggggatagtagccttttagaaaaatacaaagcgtttcgcacctatttaggctatacgagcgctaatgcgatccaaaaggctagtgaagtggcttggctagatgataggcatgcagaatttttccgcaatatttatgcgaataatttgaaactagcgcgaaaaatctttaaagaaacgctcatttatccttatagtttttatgcgtatctgcccgttaaagatggcgaaaattttgctaaaacgctttatcaaaacgaaggcatcaccaccttaccagctttgtatttagggcgtaatcatatcggtgctgactatgtgcgtttagcccttgtctatgacacttctcttttagaaaagcctttagaaatcatagaagcttaccgagaaaattatgcttga

SEQ ID NO: 1789 - DNA (genomic), 1134 bp, Helicobacter pylori; double-stranded, circular
  misc_feature (B) LOCATION 1...1134
  hypothetical: NO
  anti-sense: NO
agtagccctatgacttttgagccatatccttttgaacgattaagagccttgtttaaagagatcacccctaaaaaaaaggggttagatttaggcatcggcgagccgcgatttgaaacgcccaaattcattcaagacgctcttaaaagccacacccattcgctcaatatctaccctaaaagcgcgtttgaagagagtttgagagaggctcaaaggggtttttttaaacgccgttttaagatagaattgaaagaaaacgagttagtctccacgctaggatctagggaagtgttattcaatttccctagttttgttttatttgattatccaaaccccactatcgcctaccctaaccctttttatcaaatctatgaaggatcagcccaattcgctagggctaaaagccttttaatgcctttagttaaagaaaatgatttcactccaagcttgaatgaaaaagagttgcaagaagtggatttagtgattttaaattcccctaacaaccccaccggaagaaccctttctttagaagagctgatcgcttgggtcaaactcgctttaaagcatgattttattttaattaatgatgaatgttatagtgaaatttatgaaaacacgcctccttcttcgcttttagaagcttgcatgctggctgataatggagcgtttaaaaatgttttggttatccattcgctctccaaacgatctagcgctccagggctaaggagtggttttatcgctggggatagtagccttttagaaaaatacaaagcgtttcgcacctatttaggctatacgagcgctaatgcgatccaaaaggctagtgaagtggcttggctagatgataggcatgcagaatttttccgcaatatttatgcgaataatttgaaactagcgcgaaaaatctttaaagaaacgctcatttatccttatagtttttatgcgtatctgcccgttaaagatggcgaaaattttgctaaaacgctttatcaaaacgaaggcatcaccaccttaccagctttgtatttagggcgtaatcatatcggtgctgactatgtgcgtttagcccttgtctatgacacttctcttttagaaaagcctttagaaatcatagaagcttaccgagaaaattatgct

SEQ ID NO: 1790 - DNA (genomic), 477 bp, Helicobacter pylori; double-stranded, circular
  misc_feature (B) LOCATION 1...477
  hypothetical: NO
  anti-sense: NO
gtgaaatgtttattaataaaaaaatcacttctatttgcactgaaaccattgccggacctaaaaacgactacccctattttagcgcctatgagcgtggtggctgggaggttgrctscscatttagtccagcattatttactggctttagagcatgttaaagggtttatgggtaagggggtcatactagggggtttgtcgggtgcscaaagggctaaaatcgtcgtaattggaggcggtgtggttggcatggagagcgcgaaagtcttaarccaaatggggrctaaagtaacgattttagaattagactacgctaaattacaaaaccacccttattatcatttgtatgatttagaagtcttaagcgtgaatgaagccaatatcattcaagccttaaacgggrcggtggggctagtgggagcggtrctggttacarcgagccaaacccctaaagtgrtcttaagaaggcatttaaaatac

SEQ ID NO: 1791 - DNA (genomic), 987 bp, Helicobacter pylori; double-stranded, circular
  misc_feature (B) LOCATION 1...987
  hypothetical: NO
  anti-sense: NO
gtgggggctaaaatcgtggattctaaaacggcgtgggggcaggatttggtggtcaaatgcaaagagcctttagagcatgaataccctttgctcaaagaaaaagcgactctgtttagttatttggatttagcgtatcaaaaaagcttgtgtgaaatgtttattaataaaaaaatcacttctatttgcactgaaaccattgccgggcctaaaaacgactaccctattttagcgcctatgagcgtggtggctgggaggttggctgcgcatttagtccagcattatttactggctttagagcatgttaaagggtttatgggtaagggggtcatgctagggggtttgtcgggtgcgcaaagggctaaaatcgtcgtaattggaggcggtgtggttggcatggagagcgcgaaagtcttaagccaaatgggggctaaagtaacgattttagaattagactacgctaaattacaaaaccacccttattatcatttgtatgatttagaagtcttaagcgtgaatgaagccaatatcattcaagccttaaacggggcggtggggctagtgggagcggtgctggttacagcgagccaaacccctaaagtgatcttaagaaggcatttaaaatacatgcaaaaacaaggggtagtcattgatgtggcttgcgatttaggggggtgcatagagaccatacgccagacaagccattctaacccggtgtatgtggaagaagatttgttgcattatggcgtgccgaacatgccagggattgtcgctaaaacgagctctacggcttatagccatgcgagtgtgccgtatttgttgtattatttagagcatggcttgaagggttttttaacagccaacactaaaatcgtggcgaacacgcttggaggcttgagcgcttataacggctatatcacccaagaaggcatcgctaaagcgttcaatctggcgttcaaatcgcctttagaaattttaaaggagctttag

SEQ ID NO: 1792 - DNA (genomic), 1074 bp, Helicobacter pylori; double-stranded, circular
  misc_feature (B) LOCATION 1...1074
  hypothetical: NO
  anti-sense: NO
tgtggcgctaatcgctcaaaagggcgtggaggttttagttcaaaatgcgcgggcgcgaatagcggttatagtaacgaagcgtatgaaagcgtgggggctaaaatcgtggattctaaaacggcgtgggggcaggatttggtggtcaaatgcaaagagcctttagagcatgaataccctttgctcaaagaaaaagcgactctgtttagttatttggatttagcgtatcaaaaaagcttgtgtgaaatgtttattaataaaaaaatcacttctatttgcactgaaaccattgccgggcctaaaaacgactaccctattttagcgcctatgagcgtggtggctgggaggttggctgcgcatttagtccagcattatttactggctttagagcatgttaaagggtttatgggtaagggggtcatgctagggggtttgtcgggtgcgcaaagggctaaaatcgtcgtaattggaggcggtgtggttggcatggagagcgcgaaagtcttaagccaaatgggggctaaagtaacgattttagaattagactacgctaaattacaaaaccacccttattatcatttgtatgatttagaagtcttaagcgtgaatgaagccaatatcattcaagccttaaacggggcggtggggctagtgggagcggtgctggttacagcgagccaaacccctaaagtgatcttaagaaggcatttaaaatacatgcagacacaaggggtagtcattgatgtggcttgcagtttaggggggtgcataagagccatacgccaagcaagccattctaacccggtgtatgtggaagaaagtttgttgcattatggcgtgccgaacatgccagggattgtcgctaaaacgagctctacggcttatagccatgcgagtgtgccgtatttgttgtattatttagagcatggcttgaagggttttttaacagccaacactaaaatcgtggcgaacacgcttggaggcttgagcgcttataacggctatatcacccaagaaggcatcgctaaagcgttcaatctggcgttcaaatcgcctttagaaattttaaaggagctt

SEQ ID NO: 1793 - DNA (genomic), 204 bp, Helicobacter pylori; double-stranded, circular
  misc_feature (B) LOCATION 1...204
  hypothetical: NO
  anti-sense: NO
gagaaaacatgcaaggagtggttcaaaaaccaaagaattgttacagcggtggatattatttaccttagcttggatttagacattatggatggcaagcttttcacttctaccggcgtgcgtgaaaataatgggctgagttttgatgaattaaggcaattactgggcttgcttttagaaagttttaaagacctgattaggagccgt

SEQ ID NO: 1794 - DNA (genomic), 654 bp, Helicobacter pylori; double-stranded, circular
  misc_feature (B) LOCATION 1...654
  hypothetical: NO
  anti-sense: NO
agcgtcaaagaggcaccgataaaggggttagggtttgagagaagttttagcaaaacgcatggcgatgtgattaaaggcatgcaaacaatcactcaagagcggtgcgtgctttataaagagtttagatacgctaagaattttgaagattactaccttttttgtaaagaaaatttgatcccttgcatgaaagaagtgtttgagaaaaaagaattccctttaattttaagctcagagcatgcgaacatgtttgggattttccaagcctttaggagcgttcataaagacaaaaaaatagggattttgtatttagacgcgcatgcggatattcatacggcttatgacagcgattcaaagcatatccacggcatgcctttaggcatggttttaaatcgtgtccgtagcgggtttaatcgcatgaatgagagcgaagaaaaggcatggcaaaagctctgctctttggggttagaaaagggagcgttagaaattgatcctaaatgtttggtgtattttggggtaagaagcaccgaacagagcgaaagagatgtgattaaggaattagaaatccctttatttagcgtgggcgcgataagagaaaacatgcaaggagtggttcaaaaaccaaagaattgttacagcggtggatattatttacct

SEQ ID NO: 1795 - DNA (genomic), 705 bp, Helicobacter pylori; double-stranded, circular
  misc_feature (B) LOCATION 1...705
  hypothetical: NO
  anti-sense: NO
atgattttagtaggattagaagcggaattaggagcgtcaaaaagaggcaccgataaaggggttaggcgtttgagagaagttttaagcaaaacgcatggcgatgtgattaaaggcatgcaaacaatcactcaagagcggtgcgtgctttataaagagtttagatacgctaagaattttgaagattactaccttttttgtaaagaaaatttgatcccttgcatgaaagaagtgtttgagaaaaaagaattccctttaattttaagctcagagcatgcgaacatgtttgggattttccaagcctttaggagcgttcataaagacaaaaaaatagggattttgtatttagacgcgcatgcggatattcatacggcttatgacagcgattcaaagcatatccacggcatgcctttaggcatggttttaaatcgtgtccgtagcgggtttaatcgcatgaatgagagcgaagaaaaggcatggcaaaagctctgctctttggggttagaaaagggagcgttagaaattgatcctaaatgtttggtgtattttggggtaagaagcaccgaacagagcgaaagagatgtgattaaggaattagaaatccctttatttagcgtgggcgcgataagagaaaacatgcaaggagtggttcaaaaaaccaaagaattgttacagcggtggatattatttaccttagcttggatttag

SEQ ID NO: 1796 - DNA (genomic), 969 bp, Helicobacter pylori; double-stranded, circular
  misc_feature (B) LOCATION 1...969
  hypothetical: NO
  anti-sense: NO
atgattttagtaggattagaagcggaattaggagcgtcaaaaagaggcaccgataaaggggttaggcgtttgagagaagttttaagcaaaacgcatggcgatgtgattaaaggcatgcaaacaatcactcaagagcggtgcgtgctttataaagagtttagatacgctaagaattttgaagattactaccttttttgtaaagaaaatttgatcccttgcatgaaagaagtgtttgagaaaaaagaattccctttaattttaagctcagagcatgcgaacatgtttgggattttccaagcctttaggagcgttcataaagacaaaaaaatagggattttgtatttagacgcgcatgcggatattcatacggcttatgacagcgattcaaagcatatccacggcatgcctttaggcatggttttaaatcgtgtccgtagcgggtttaatcgcatgaatgagagcgaagaaaaggcatggcaaaagctctgctctttggggttagaaaagggagcgttagaaattgatcctaaatgtttggtgtattttggggtaagaagcaccgaacagagcgaaagagatgtgattaaggaattagaaatccctttatttagcgtgggcgcgataagagaaaacatgcaaggagtggttcaaaaaaccaaagaattgttaaaagcggtggatattatttaccttagcttggatttagacattatggatggcaagcttttcacttctaccggcgtgcgtgaaaataatgggctgagttttgatgaattaaggcaattactgggcttgcttttagaaagttttaaagaccgattaggagccgttgaggtaaccgaatacaaccccacggtgagtgctaaacacaccgatgaagaagaaaagcaggttttagaaatcctggatctcatcatcaatcgctgcaaaattaaagatagggagcgatcttttgcaatgagcagctga

SEQ ID NO: 1797 - DNA (genomic), 1794 bp, Helicobacter pylori; double-stranded, circular
  misc_feature (B) LOCATION 1...1794
  hypothetical: NO
  anti-sense: NO
atgtgcgggattgtaggttatataggggatagcgagaaaaaatccattcttttagagggattaaaagaattggaatacagaggttatgacagtgcgggtttagccgtattgagtgctaatcgtttggaagtgtttaaaactcaagggaaattagaaaaccttagaacagagcttaaaaataaagagtttttaaattttggcgtgagtatcgctcatacgagatgggcgacgcatgggaagccaagcagtgcgaatgcccacccgcattttacagaaaatttagccttagtgcataacggcatcattgaaaattacgcgagtttgaaaaaagaattagaaaataaagggcatgcgtttttaagccaaacggacacggaagtgattgcgcatttattagaagaaacgcttaaaagcgagggcgatttattgaaagcttttgaaaaaagcatcagccttttgaaagggagctatgcgattttgatgctccataaaagggctaaagaaagcttgttttacgctaaatcttcttcgcctttgatcgtgggcaagggcaaagagggggtgttttttgcgtccagtttgagcgtgttagcccctaaagtggatcaatttgtcattttagaagaaaacagcgtggggcagatttctttagaaaattttaaagatttaaacaatattgaaaacatgaaagattacgcttttgaaaacaaggattattctaaaggcaatttcaggaattatttagaaaaagagatttatgagcagcacagcagtttgttagagtgcttagaggggcgcttggaagccttgagtgtgtattgcgagatcgatcctgaatttttagaaaacgtgagcgaaatcacgctgtgttcttgcgggagcagttaccatgcgagtttggcgagcgtgtatttgtttgaaagattggccaaaataagagcgagggccattttagcgagcgagtaccgctacgcccattttaaaagcaaccctaacgagctttttatagcgatttctcaaagcggggaaaccgctgacactttggaggctttaaaattagccaaagcccaagggcttaaaaccattagtttgtgtaacgccccttttagcatgatgagccgcattagtgatcacacgcttttgattagagcgggggtagaaaggagcgtggcatccactaaggcgttttcttcgcaagtgatgcttttatggcttttgagcgtgtatctaggcaaacagctagggaccatctctaaagaagaagaaagaatccaagccaaaaacatgctcaatagcgtgaaggcaatgaaagtagagcctaaattgcatgaaaaaatcaagcgcttatccaaacgctacttgcatgggcatggctttttttatatcgggcgcgatgtgttttacccgctcgctttagaaggggcgttgaaacttaaagaaatcagctacttgcacgctgaggggtatgcgagcgcggaaatgaagcatgggcctattgcgttggtggattctaacctttttaccattgctttattgtctaagcatctgttatttgataaaaccaaaagcaatattgaagaattgagcgctagggattctacgatttgcgtgttaagttctgaaattttagagatcgctgatgattttatccaactagaagagagcgaaagttatatggaagaatttttccgcatgaatttagcgatgcagcttttagccttagaaatcgctatgcgtttgaaccacgatgtggatcacccaagaaacttggctaaaagcgttaccgtggaataa

SEQ ID NO: 1798 - DNA (genomic), 1791 bp, Helicobacter pylori; double-stranded, circular
  misc_feature (B) LOCATION 1...1791
  hypothetical: NO
  anti-sense: NO
atgtgcgggattgtaggttatataggggatagcgagaaaaaatccattcttttagagggattaaaagaattggaatacagaggttatgacagtgcgggtttagccgtattgagtgctaatcgtttggaagtgtttaaaactcaagggaaattagaaaaccttagaacagagcttaaaaataaagagtttttaaattttggcgtgagtatcgctcatacgagatgggcgacgcatgggaagccaagcagtgcgaatgcccacccgcattttacagaaaatttagccttagtgcataacggcatcattgaaaattacgcgagtttgaaaaaagaattagaaaataaagggcatgcgtttttaagccaaacggacacggaagtgattgcgcatttattagaagaaacgcttaaaagcgagggcgatttattgaaagcttttgaaaaaagcatcagccttttgaaagggagctatgcgattttgatgctccataaaagggctaaagaaagcttgttttacgctaaatcttcttcgcctttgatcgtgggcaagggcaaagagggggtgttttttgcgtccagtttgagcgtgttagcccctaaagtggatcaatttgtcattttagaagaaaacagcgtggggcagatttctttagaaaattttaaagatttaaacaatattgaaaacatgaaagattacgcttttgaaaacaaggattattctaaaggcaatttcaggaattatttagaaaaagagatttatgagcagcacagcagtttgttagagtgcttagaggggcgcttggaagccttgagtgtgtattgcgagatcgatcctgaatttttagaaaacgtgagcgaaatcacgctgtgttcttgcgggagcagttaccatgcgagtttggcgagcgtgtatttgtttgaaagattggccaaaataagagcgagggccattttagcgagcgagtaccgctacgcccattttaaaagcaaccctaacgagctttttatagcgatttctcaaagcggggaaaccgctgacactttggaggctttaaaattagccaaagcccaagggcttaaaaccattagtttgtgtaacgccccttttagcatgatgagccgcattagtgatcacacgcttttgattagagcgggggtagaaaggagcgtggcatccactaaggcgttttcttcgcaagtgatgcttttatggcttttgagcgtgtatctaggcaaacagctagggaccatctctaaagaagaagaaagaatccaagccaaaaacatgctcaatagcgtgaaggcaatgaaagtagagcctaaattgcatgaaaaaatcaagcgcttatccaaacgctacttgcatgggcatggctttttttatatcgggcgcgatgtgttttacccgctcgctttagaaggggcgttgaaacttaaagaaatcagctacttgcacgctgaggggtatgcgagcgcggaaatgaagcatgggcctattgcgttggtggattctaacctttttaccattgctttattgtctaagcatctgttatttgataaaaccaaaagcaatattgaagaattgagcgctagggattctacgatttgcgtgttaagttctgaaattttagagatcgctgatgattttatccaactagaagagagcgaaagttatatggccggctttttccgcatgaatttagcgatgcagcttttagccttagaaatcgctatgcgtttgaaccacgatgtggattacccaagaaacttggctaaaagcgttaccgtggaa

SEQ ID NO: 1799 - DNA (genomic), 612 bp, Helicobacter pylori; double-stranded, circular
  misc_feature (B) LOCATION 1...612
  hypothetical: NO
  anti-sense: NO
aaagttgagcaacggcacaccttgctttttgaaagcgctgagattgagagcaaagcgcacaccaaatcccttttaatggctaaggcttgtttgaagctagtttgcaaccacaatatcgtaaccatcactagcctaacgcctaatggcggggcgtttttacaaacattgagcgcgtttttcaaaacgcctatacaagacaatgccctaaccttaacctacaccaaagataaaaaaatccaagatgagtttttaaaactctttgagcctagcccttttgacgctttaagggggctttttaaaagcgttaaaacaagacccaaacacccctttacgctctttagcgcgggcgttttttcttttgaaatgctcaatttttttgaagatttgccccacttaaaagcaaacgacaacaccgcaaatgactttattttttatgtcgcgcaaaatttgatcatcatagatcataaagaaaaaagcgctgaaatcttgggggcatgttttgatgaacgctttaaaacagagatagctaaagaattacaggatttaaaagaattggttaaaaacattaaaagcgattttatccctaaaaaagctaagcaaaggcatagaagt

SEQ ID NO: 1800 - DNA (genomic), 639 bp, Helicobacter pylori; double-stranded, circular
  misc_feature (B) LOCATION 1...639
  hypothetical: NO
  anti-sense: NO
aagaattggttaaaaacattaaaagcgattttatccctaaaaaagctaagcaaaggcatagaagttagcgttagttgtgatgatagcgagtttgaaaaaaaggtgttattcttacaagaagaaatcaaaaagggcgaaatctttcaagcggtgttgtcgcgcagtttttatatggagtgcttggagggtttgagcgcgtattatcacttaaaactctctaaccctagcccctatatgttctatatcaaagacagcgattttatcctttttggggccagccctgagagcgctttaaaatacaacgccctaacgaatacggctgaaatttatcccattgctggcactcgtttaaggggtaaggacaagcaagggaatattgattacgatttagatagtaaaatggaatttgatttgcaacacgactataaagaaagggctgaacacatcatgttagtggatttagccagaaacgacatggccagggtttcaaaaaaacgctattgcgacaagcttttaaaagtggataagtattccaatgtcatgcatttagtctcaagggttgtgggggaattgaaaaaagggtgcgatagtttgcatgcttacaggagttttatgaacgccggcacgctgcggagcgcc

SEQ ID NO: 1801 - DNA (genomic), 1506 bp, Helicobacter pylori; double-stranded, circular
  misc_feature (B) LOCATION 1...1506
  hypothetical: NO
  anti-sense: NO
ttgatgattagcctgatagaaaaagccccttatattccttaccccctagctctttatgaaaagttagagcaacggcacaccttgctttttgaaagcgctgagattgagagcaaagcgcacaccaaatcccttttaatggctaaggcttgtttgaagctagtttgcaaccacaatatcgtaaccatcactagcctaacgcctaatggcggggcgtttttacaaacattgagcgcgtttttcaaaacgcctatacaagacaatgccctaaccttaacctacaccaaagataaaaaaatccaagatgagtttttaaaactctttgagcctagcccttttgacgctttaagggggctttttaaaagcgttaaaacaagacccaaacacccctttacgctctttagcgcgggcgttttttcttttgaaatgctcaatttttttgaagatttgccccacttaaaagcaaacgacaacaccgcaaatgactttattttttatgtcgcgcaaaatttgatcatcatagatcataaagaaaaaagcgctgaaatcttgggggcatgttttgatgaacgctttaaaacagagatagctaaagaattacaggatttaaaagaattggttaaaaacattaaaagcgattttatccctaaaaaagctaagcaaagcatagaagttagcgttagttgtgatgatagcgagtttgaaaaaaaggtgttattcttacaagaagaaatcaaaaagggcgaaatctttcaagcggtgttgtcgcgcagtttttatatggagtgcttggagggtttgagcgcgtattatcacttaaaactctctaaccctagcccctatatgttctatatcaaagacagcgattttatcctttttggggcaagccctgagagcgctttaaaatacaacgccctaacgaatacggctgaaatttatcccattgctggcactcgtttaaggggtaaggacaagcaagggaatattgattacgatttagatagtaaaatggaatttgatttgcaacacgactataaagaaagggctgaacacatcatgttagtggatttagccagaaacgacatggccagggtttcaaaaaaacgctattgcgacaagcttttaaaagtggataagtattccaatgtcatgcatttagtctcaagggttgtgggggaattgaaaaaagggtgcgatagtttgcatgcttacaggagttttatgaacgccggcacgctcagcggagcgcctaaaatctccgcgatcaaattgatttaccaattagaaaaccaaaggagaggttcttatggggggagcgtggggtatttaaacagcgagggctctatggattcttgcatcactatccgttcatgttttgtcaaaaacaatagagcagtgatccaagcaggagccggtattgtgttagacagcgtgccacaaaatgaagcgaatgaaacaagagccaaagtgcaagcccttattgatgcgatcaggaaaaccatctcatga

SEQ ID NO: 1802 - DNA (genomic), 258 bp, Helicobacter pylori; double-stranded, circular
  misc_feature (B) LOCATION 1...258
  hypothetical: NO
  anti-sense: NO
attggaggggggtctaacgctatagggatattcagtgcgtttttaaacgataaagaggtcaaactcataagcgtaaaaccagccggtttatggctagaaaccaataagcatggggcgactttgaataaaaggcgtgtggggaatttgcatgggaataaaacctatctattacaaaatgatgaaagccaaattgcaaaaagccacagcattagcgccgggcttgattatccacgggtggggccagaaaacacctattta

SEQ ID NO: 1803 - DNA (genomic), 567 bp, Helicobacter pylori; double-stranded, circular
  misc_feature (B) LOCATION 1...567
  hypothetical: NO
  anti-sense: NO
gagagtattaaaatgaatcaaaaagcgtattttggggagtttggagggagttttgtgtcagaattgttagtgcctgcattaagagagttagaacaggcgtttgatacgtgtttaaaagatgaggaattccaaaaagagtattttcgtcttttaaaggattttgtgggccgtcctagccctttaaccttgtgtcaaaacatcgtttctaaccctaaagtcaagctttatttaaaacgagaggatttaatccatggcggggcgcataagactaatcaggctttagggcaagcccttttagcgaaaaaaatgggtaaaacaaggattattgctgaaacaggcgctgggcagcatggcgttgcaacggctatcgcttgcgcgttattgaacttaaaatgcgtgatttttatgggaggcaaagacattaagcgccaggaaatgaatgtttttagaatgcgcttattgggtgctgaagtgagagaagttaattcagggagcgcgacgcttaaagacgccgtgaatgaggccttgagaaatgggcgagcagttacaaggacacgcattatttgc

SEQ ID NO: 1804 - DNA (genomic), 1182 bp, Helicobacter pylori; double-stranded, circular
  misc_feature (B) LOCATION 1...1182
  hypothetical: NO
  anti-sense: NO
atgaatcaaaaagcgtattttggggagtttggagggagttttgtgtcagaattgttagtgcctgcattaagagagttagaacaggcgtttgatacgtgtttaaaagatgaggaattccaaaaagagtattttcgtcttttaaaggattttgtgggccgtcctagccctttaaccttgtgtcaaaacatcgtttctaaccctaaagtcaagctttatttaaaacgagaggatttaatccatggcggggcgcataagactaatcaggctttagggcaagcccttttagcgaaaaaaatgggtaaaacaaggattattgctgaaacaggcgctgggcagcatggcgttgcaacggctatcgcttgcgcgttattgaacttaaaatgcgtgatttttatgggaggcaaagacattaagcgccaggaaatgaatgtttttagaatgcgcttattgggtgctgaagtgagagaagttaattcagggagcgcgacgcttaaagacgccgtgaatgaggccttgagagattgggcgagcagttacaaggacacgcattatttgctaggcacatccgccgggccgcacccttaccccacgatggttaaaacctttcaaaaaatgataggcgatgaagttaaaagccaaattctagaaaaagaaaaccgcttgcctgattatgtgatcgcatgcgttggaggggggtctaacgctatagggatattcagtgcgtttttaaacgataaagaggtcaaactcataggcgtagagccagccggtttagggctagaaaccaataagcatggggcgactttgaataaagggcgtgtggggattttgcatgggaataaaacctatcttttacaagatgatgaaggccagattgcagaaagccacagcattagcgccgggcttgattatccaggggtggggccagaacacagctatttaaaagagattgggcgcgcggtttatgagagcgcaagcgatattgaagcactagaagccttcaggttgttgtgccaaaaagaaggcattatcccggcattagagagttcgcatgccttagcgtatgccttaaaactcgctcaaaaatgcgcgcaagaaaagattatcgtagtgaatttaagcggtcggggggataaggatttaagcaccgtttataacgctttaaaaggaggtttaaaatga

SEQ ID NO: 1805 - DNA (genomic), 801 bp, Helicobacter pylori; double-stranded, circular
  misc_feature (B) LOCATION 1...801
  hypothetical: NO
  anti-sense: NO
atgaaattaaaatcttttggggtttttgggaatcccattaaacattccaaatcgcccttaatccataacgcttgttttttaacttttcaaaaagaattagggtttttggggcattaccaccccatattactccctttagaaagccgtatcaaaaacgagtttttacatttgggattgagtggggctaatgtaaccctaccctttaaagaaagggcgtttcaaatttgcgacaaaatcaaaggtatcgcgcttgaatgcgcttcagtcaatacgcttgttttagaaaatgatgagcttgtgggttacaataccgacgctttagggttttacctctctttaaaacaccaaaactaccaaaacgaccaaaacgctttgattttaggcgctggggggagtgctaaagccctagcgtgcggattacaaaaacaaggcttaaaagtgagcgtgttaaaccgctctgctaggggattggattttttccaacgcttgggctgtgattgttttatggagcctcctaaaagcgcttttgatttgatcattaacgccacttcagcgagtttgcataacgaattgcctttaaataaagaggttttgaaagggtattttaaagagagcaagctcgcttatgatttggcgtatgggtttttaacgccctttttgtctctggctaaagagttaaaaatcccctttcaagacgggaaagacatgctcatctatcaagcctctttaagttttgaaaaattcagcgattctcaaattccttattcaaaagcgtttgaagtcatgcgaagtgttttttga

SEQ ID NO: 1806 - DNA (genomic), 819 bp, Helicobacter pylori; double-stranded, circular
  misc_feature (B) LOCATION 1...819
  hypothetical: NO
  anti-sense: NO
aaaaggctgaatgaaagaataatgaaattaaaatcttttggggtttttgggaatcccattaaacattccaaatcgcccttaatccataacgcttgttttttaacttttcaaaaagaattagggtttttggggcattaccaccccatattactccctttagaaagccgtatcaaaaacgagtttttacatttgggattgagtggggctaatgtaaccctaccctttaaagaaagggcgtttcaaatttgcgacaaaatcaaaggtatcgcgcttgaatgcgcttcagtcaatacgcttgttttagaaaatgatgagcttgtgggttacaataccgacgctttagggttttacctctctttaaaacaccaaaactaccaaaacgaccaaaacgctttgattttaggcgctggggggagtgctaaagccctagcgtgcggattacaaaaacaaggcttaaaagtgagcgtgttaaaccgctctgctaggggattggattttttccaacgcttgggctgtgattgttttatggagcctcctaaaagcgcttttgatttgatcattaacgccacttcagcgagtttgcataacgaattgcctttaaataaagaggttttgaaagggtattttaaagagagcaagctcgcttatgatttggcgtatgggtttttaacgccctttttgtctctggctaaagagttaaaaatcccctttcaagacgggaaagacatgctcatctatcaagcctctttaagttttgaaaaattcagcgattctcaaattccttattcaaaagcgtttgaagtcatgcgaagtgttttt

SEQ ID NO: 1807 - DNA (genomic), 330 bp, Helicobacter pylori; double-stranded, circular
  misc_feature (B) LOCATION 1...330
  hypothetical: NO
  anti-sense: NO
aagcatcatgactttacaagggagggcgttattagaacaaagcgtggggtttttaagagagttgtcatgaaagatattttaaacgctctctatcatcaaaaagacttgaacgatgaagaagtcaaaaagttattcacgctcattattgatgaaaaagtaagtcccgcacaacttggggcggttttgtgcgctttaaaaatcaagggcgagagctttaaggagattagcgtcgctgcaaccacgcttttagagcatgcccctaagccttttaatagcggcttggatttaatagacaattgcggcacagggggcgatggggctaaaaacgat

SEQ ID NO: 1808 - DNA (genomic), 681 bp, Helicobacter pylori; double-stranded, circular
  misc_feature (B) LOCATION 1...681
  hypothetical: NO
  anti-sense: NO
agcgtgtccagtcatagcgggagcgcggatttgttggaaaatttgggcgtgaatattgaaatgaaccccatgcaattagaaaattgcttcaaacaatcgcattttgggtttttattcgcgcctttataccatcaaagttttaaaaaatccgcccctttaagaaaagagcttttcactaaaacgattttcaattgcttagggcctttaatcaaccccttaaggccaaaaatccagcttttaggcgtgtatgacaaatccttgtgtaagaccatggcgctagcgttgaaggctttaggcgttaaaagggcgatggtggttaatggaggggggacagatgaaatcgtgttgcatgacattacgcatgcgtgcgaattgaaaaataacgaaattttagagtatgatttgagcgctaaagattttgatttacccccctatgatttgaaagaattacagattgaaaacgccaaagaaagcgttcaagcgtgtttagatattttagaaaataaaggcaaagattcgcatacaatggtggttgcggcgaatgtggcgagtttgttgtatttgagccatagggctaaaggatttaaaagagggcgtgagcatgactttagagcatttaaaaaccaaagcgcattatgtgcatttacaaaaaatcataaggctaagccatgcctagcgtgt

SEQ ID NO: 1809 - DNA (genomic), 678 bp, Helicobacter pylori; double-stranded, circular
  misc_feature (B) LOCATION 1...678
  hypothetical: NO
  anti-sense: NO
gtgtccagtcatagcgggagcgcggatttgttggaaaatttgggcgtgaatattgaaatgaaccccatgcaattagaaaattgcttcaaacaatcgcattttgggtttttattcgcgcctttataccatcaaagttttaaaaaatccgcccctttaagaaaagagcttttcactaaaacgattttcaattgcttagggcctttaatcaaccccttaaggccaaaaatccagcttttaggcgtgtatgacaaatccttgtgtaagaccatggcgctagcgttgaaggctttaggcgttaaaagggcgatggtggttaatggaggggggacagatgaaatcgtgttgcatgacattacgcatgcgtgcgaattgaaaaataacgaaattttagagtatgatttgagcgctaaagattttgatttacccccctatgatttgaaagaattacagattgaaaacgccaaagaaagcgttcaagcgtgtttagatattttagaaaataaaggcaaagattcgcatacaatggtggttgcggcgaatgtggcgagtttgttgtatttgagccatagggctaaaggatttaaaagagggcgtgagcatgactttagagcatttaaaaaccaaagcgcattatgtgcatttacaaaaaatcataaggctaagccatgcctagcgtgt

SEQ ID NO: 1810 - DNA (genomic), 1008 bp, Helicobacter pylori; double-stranded, circular
  misc_feature (B) LOCATION 1...1008
  hypothetical: NO
  anti-sense: NO
atgaaagatattttaaacgctctctatcatcaaaaagacttgaacgatgaagaagtcaaaaagttattcacgctcattattgatgaaaaagtaagtcccgcacaacttggggcggttttgtgcgctttaaaaatcaagggcgagagctttaaggagattagcgtcgctgcaaccacgcttttagagcatgcccctaagccttttaatagcggcttggatttaatagacaattgcggcacagggggcgatgggctaaaaacgattaatatcagcacgattgccgcactcattgccagctctatggggttatctatggcaaaacatggatcaaggagcgtgtccagtcatagcgggagcgcggatttgttggaaaatttgggcgtgaatattgaaatgaaccccatgcaattagaaaattgcttcaaacaatcgcattttgggtttttattcgcgcctttataccatcaaagttttaaaaaatccgcccctttaagaaaagagcttttcactaaaacgattttcaattgcttagggcctttaatcaaccccttaaggccaaaaatccagcttttaggcgtgtatgacaaatccttgtgtaagaccatggcgctagcgttgaaggctttaggcgttaaaagggcgatggtggttaatggaggggggacagatgaaatcgtgttgcatgacattacgcatgcgtgcgaattgaaaaataacgaaattttagagtatgatttgagcgctaaagattttgatttacccccctatgatttgaaagaattacagattgaaaacgccaaagaaagcgttcaagcgtgtttagatattttagaaaataaaggcaaagattcgcatacaatggtggttgcggcgaatgtggcgagtttgttgtatttgagccatagggctaaagatttaaaagagggcgtgagcatgactttagagcatttaaaaaccaaagcgccttatgcgcatttacaaaaaatcataaggctaagccatgcctag

SEQ ID NO: 1811 - DNA (genomic), 444 bp, Helicobacter pylori; double-stranded, circular
  misc_feature (B) LOCATION 1...444
  hypothetical: NO
  anti-sense: NO
ccaaaaacccccttattgttcatctcacccgggcctggtaaccctaatagttcaggcaatcttttaaaaatcattgcaatggctaaaaagaaattccctattttaggggtttgtttgggcttgcaagctttagcgcaaagctatggggctaaaatcataaggagtaaagaaatcgtgcatggcaaagcgaccactatcgcgctcaaaaagcatgccgtttttaaaggtttaggggagagcatggtggtggggcgttaccattctttaatggcgagcgggttgcctaaaaatttagaagtgatcgctgagcatgacaatatccctatggctattgtcaatgaagaagataaaatcttagcttatcaattccaccctgaaagcatcatgactttacaagggagggcgttattagaacaaagcgtggggtttttaagagagttgtca

SEQ ID NO: 1812 - DNA (genomic), 441 bp, Helicobacter pylori; double-stranded, circular
  misc_feature (B) LOCATION 1...441
  hypothetical: NO
  anti-sense: NO
aaaacccccttattgttcatctcacccgggcctggtaaccctaatagttcaggcaatcttttaaaaatcattgcaatggctaaaaagaaattccctattttaggggtttgtttgggcttgcaagctttagcgcaaagctatggggctaaaatcataaggagtaaagaaatcgtgcatggcaaagcgaccactatcgcgctcaaaaagcatgccgtttttaaaggtttaggggagagcatggtggtggggcgttaccattctttaatggcgagcgggttgcctaaaaatttagaagtgatcgctgagcatgacaatatccctatggctattgtcaatgaagaagataaaatcttagcttatcaattccaccctgaaagcatcatgactttacaagggagggcgttattagaacaaagcgtggggtttttaagagagttgtca

SEQ ID NO: 1813 - DNA (genomic), 585 bp, Helicobacter pylori; double-stranded, circular
  misc_feature (B) LOCATION 1...585
  hypothetical: NO
  anti-sense: NO
atgaaaatcttttttatagataattttgattctttctcttataatttggtgtatgaattagagtgtttgggttatgaagtggctgtttatcaaaacgatattgatccgagttatctcatgggcttaatgaatgaagaaccaaaaacccccttattgttcatctcacccgggcctggtaaccctaatagttcaggcaatcttttaaaaatcattgcaatggctaaaaagaaattccctattttaggggtttgtttgggcttgcaagctttagcgcaaagctatggggctaaaatcataaggagtaaagaaatcgtgcatggcaaagcgaccactatcgcgctcaaaaagcatgccgtttttaaaggtttaggggagagcatggtggtggggcgttaccattctttaatggcgagcgggttgcctaaaaatttagaagtgatcgctgagcatgacaatatccctatggctattgtcaatgaagaagataaaatcttagcttatcaattccaccctgaaagcatcatgactttacaagggagggcgttattagaacaaagcgtggggtttttaagagagttgtcatga

SEQ ID NO: 1814 - DNA (genomic), 198 bp, Helicobacter pylori; double-stranded, circular
  misc_feature (B) LOCATION 1...198
  hypothetical: NO
  anti-sense: NO
gccatgcctagcgtgttagaaaacatccttaaagacaaactcctagaagtcgctgtgcttaaaaaaaatcacgctttaccgataaacatagccccaagcgacagggattttaaaaaagcgttattggaaaaaaagacaagctttattttagaatacaaaaaagcattggccttccaaaggtttgatcagaaaagattt

SEQ ID NO: 1815 - DNA (genomic), 360 bp, Helicobacter pylori; double-stranded, circular
  misc_feature (B) LOCATION 1...360
  hypothetical: NO
  anti-sense: NO
ggctattcgcaaaaagaaatcgctcaattggaaaaatcgctccctaaaacttgcgcgatctggcaagtagtgagcgtggcggattctaaagatttagcgcctaaaactaaagaggcctctctaatcttatacgacactaagggggataaaatgggaggcaatggcgtgagttttgattgggaaattttagaaaatgccaaaacgcctttcatgctagctggtgggcttaatttggataacattcaaaaagccttgaaaattaaagcgttgggtttggatttcaattcaggtttagaaataagccctgggattaaaaataaggataaaatcaagcaattagcccgaattttaagagagtat

SEQ ID NO: 1816 - DNA (genomic), 528 bp, Helicobacter pylori; double-stranded, circular
  misc_feature (B) LOCATION 1...528
  hypothetical: NO
  anti-sense: NO
gctcttatgaaaacattaagatcgtttcgcagcattccactaagccccattttatgcaaagattttatcattgacgcttttcagatcaaactcgctagggttatgggatctaatgcggtgcttttaatgttaagcgtgttagatgataaaaactatttagagcttttcaacctcgccaaatccttaaacatgagcgttttaactgaagtttccaaccagcaagaaattgagcgcttgctcaaactccaatacgacattataggcatcaataacagggatttacacaccttgaaaaccgatatttttcacacgctggaattacgccccctgttgcctaaagacgcgatcattatcagtgagtccggtatttattcgcatgcgcaaatcaaagccctagccccttgtgtgaatggctttttagtgggcagctctttaatgaaagaaaaggatttgaaaaaagcgtgtattaaattgattctaggcgaaaataaagtgtgcgggcttacaaggattaaagacgccaaaacc

SEQ ID NO: 1817 - DNA (genomic), 1359 bp, Helicobacter pylori; double-stranded, circular
  misc_feature (B) LOCATION 1...1359
  hypothetical: NO
  anti-sense: NO
atgcctagcgtgttagaaaacatccttaaagacaaactcctagaagtcgctgtgcttaaaaaaaatcacgctttaccgataaacatagccccaagcgacagggattttaaaaaagcgttattggaaaaaaagacaagctttattttagaatacaaaaaagcatcgccctccaaaggtttgatcagaaaagattttgacttgttggaaataacgaaaacttatgaaaaatttgcctcttgcgtttcggttttagccgattctaaatattttttaggctcttatgaaaacattaagatcgtttcgcagcattccactaagcccattttatgcaaagattttatcattgacgcttttcagatcaaactcgctagggttatgggatctaatgcggtgcttttaatgttaagcgtgttagatgataaaaactatttagagcttttcaacctcgccaaatccttaaacatgagcgttttaactgaagtttccaaccagcaagaaattgagcgcttgctcaaactccaatacgacattataggcatcaataacagggatttacacaccttgaaaaccgatatttttcacacgctggaattacgccccctgttgcctaaagacgcgatcattatcagtgagtccggtatttattcgcatgcgcaaatcaaagccctagccccttgtgtgaatggctttttagtgggcagctctttaatgaaagaaaaggatttgaaaaaagcgtgtattaaattgattctaggcgaaaataaagtgtgcgggcttacaaggattaaagacgccaaagccgtttataaaaaccatttcatttatgggggtttgatttttgaaaaatcttcgccccgatacatcaagcctaaagaagccttaaagatcacaaaagcggttaaaaaactggattttgtgggcgtgtttgtgaaagataaaatcaaaaaaatcgcaaaaatcgccaaaaagcttgatttaaaagcggtgcagctttatggctattcgcaaaaagaaatcgctcaattgaaaaaatcgctccctaaaacttgcgcgatctggcaagtagtgagcgtggcggattctaaagatttagcgcctaaaactaaagaggcctctctaatcttatacgacactaagggggataaaatgggaggcaatggcgtgagttttgattgggaaattttagaaaatgccaaaacgcctttcatgctagctggtgggcttaatttggataacattcaaaaagccttgaaaattaaagcgttgggtttggatttcaattcaggtttagaaataagccctgggattaaaaataaggataaaatcaagcaattagcccgaattttaagagagtattaa

SEQ ID NO: 1818 - DNA (genomic), 756 bp, Helicobacter pylori; double-stranded, circular
  misc_feature (B) LOCATION 1...756
  hypothetical: NO
  anti-sense: NO
aaaaacacaaaaaaatggcgtttatccccgtttgtaaccttgggcgatcccaattatgaattgagttttgaaatcgttaaaaccttaattattagcggggtgagcgctttggaattgggtcttgctttttctgatcctgtagcggatggcaccaccatacaagcgagccatttaagggcgttaaaacacgcttctatggctaaaaatttccagcttttaaaaaagattagaggttacaaccatgatattcccatagggcttttagcgtatgcgaatttaattttttcttatggcgttgatggtttttacgctcaagctaaagaatgcggtgtggatagcgttttaatagcggacatgcccctaatagaaaaagaattggtcatcaaatccgctcaaaaacaccaaatcaaacaaatctttatcgccagccctaatgcgagcagtaaagatttagaacaagtcgctacgcattcgcaaggctatatctacactttagccaggagtggggttacaggggcgagccatactttagaaaatgatgcgagcgctattattaaaaccctaaaaacctttagctctaccccagccttattgggctttggcatttccaaaaaagaacacatcacaaacgctaaaggcatgggcgctgatggtgtgatttgcggatcagcgttagttaaaatcatagaagaaaatttaaacaatgaagacgccatgctagaaaaaattaaggggtttgtaggaggaatgatttct

SEQ ID NO: 1819 - DNA (genomic), 789 bp, Helicobacter pylori; double-stranded, circular
  misc_feature (B) LOCATION 1...789
  hypothetical: NO
  anti-sense: NO
atgaggtatcaaaacatgtttgaaaccttaaaaaaacacaaaaaaatggcgtttatcccgtttgtaaccttgggcgatcccaattatgaattgagttttgaaatcgttaaaaccttaattattagcggggtgagcgctttggaattgggtcttgctttttctgatcctgtagcggatggcaccaccatacaagcgagccatttaagggcgttaaaacacgcttctatggctaaaaatttccagcttttaaaaaagattagaggttacaaccatgatattcccatagggcttttagcgtatgcgaatttaattttttcttatggcgttgatggtttttacgctcaagctaaagaatgcggtgtggatagcgttttaatagcggacatgcccctaatagaaaaagaattggtcatcaaatccgctcaaaaacaccaaatcaaacaaatctttatcgccagccctaatgcgagcagtaaagatttagaacaagtcgctacgcattcgcaaggctatatctacactttagccaggagtggggttacaggggcgagccatactttagaaaatgatgcgagcgctattattaaaaccctaaaaacctttagctctaccccagccttattgggctttggcatttccaaaaaagaacacatcacaaacgctaaaggcatgggcgctgatggtgtgatttgcggatcagcgttagttaaaatcatagaagaaaatttaaacaatgaagacgccatgctagaaaaaattaaggggtttgtaggaggaatgatttcttaa

SEQ ID NO: 1820 - DNA (genomic), 1113 bp, Helicobacter pylori; double-stranded, circular
  misc_feature (B) LOCATION 1...1113
  hypothetical: NO
  anti-sense: NO
tttaggaaaacgggctttttttgcaaccgcaaagttttgggggctagcggcactcaattgggcgagcttgtttttaacacttctatgagcggctatcaagaagtcattaacgaccccagctataaggggcaattcgtggtttttaacatgcctgaaattggggttgtgggcgctaatcctaaaaatgatgaatcctttttttcatgcgcaggggttttaccgcgccattacaacgaatttttttctaactcaagggcggattctagcttgagcacttatttggaaaagcgtggcgttttagggattagtggggttgataccaggagtttgattaaaaccttacgccaccatgggtgcttgatgatgatagcttccacgatcgagcatgacagaaacaagcttgaagaggttttaaaaaacgcccctaaaatttctcactcccccttagtgtctagcgtttccacgccaaaaatcatcacgcaccagcgtgctacttttgatttcaacaccctagattacaagccttttgatgaaaaaattccgcataaaattatcgccgtgctagactttggggctaagggcaacattttaaacgagcttcaaaatgtggggttaaaagcccttatttacccgcaccacactaaagctaacgagctgattaaggcctatgaaaaaaaagaaattagcgggatttttctctctaatgggccaggcgatcctttaagcttgcagcaagaaattggagaaatcaaacgactcattaacgctaaaatccccatgtttggcatttgcttagggcatcaattgctctctatcgcgcaaggctaccctacttataagctcaaatttggccatcatgggagcaaccaccccgttaaaaacctagaaacaaacgctgttgaaatcaccgcacaaaaccacaactattgcgtccctgaagaaattgaggagatcgctactatcacgcaccgcaatctttttgacaacaccattgagggcgtgcgttataaaaacgctcccatcatctctgtccagcaccacccagaaagcagcccaggccctaaagagagccactatatttttaaggaatttgtgggattgctagagggcttt

SEQ ID NO: 1821 - DNA (genomic), 1128 bp, Helicobacter pylori; double-stranded, circular
  misc_feature (B) LOCATION 1...1128
  hypothetical: NO
  anti-sense: NO
atggtctctctctatttagaaaacgggctttttttgcaagcgcaaagttttggggctaccggcacgcaagtgggcgagcttgtttttaacacttctatgagcggctatcaagaagtcattagcgaccccagctataaggggcaattcgtggtttttagcatgcctgaaattggggttgtgggcgctaatcctaaagatgatgaatcctttttttcatgcgcaggggttttagcgcgccattacaacgaatttttttctaactcaagggcggattctagcttgagcacttatttggaaaagcgtggcgttttagggattagtggggttgataccaggagtttgattaaaaccttacgccaccatgggtgcttgatgatgatagcttccacgatcgagcatgacagaaacaagcttgaagaggttttaaaaaacgcccctaaaatttctcactcccccttagtgtctagcgtttccacgccaaaaatcatcacgcaccagcgtgctacttttgatttcaacaccctagattacaagccttttgatgaaaaaattccgcataaaattatcgccgtgctagactttggggctaagggcaacattttaaacgagcttcaaaatgtggggttaaaagcccttatttacccgcaccacactaaagctaacgagctgattaaggcctatgaaaaaaaagaaattagcgggatttttctctctaatgggccaggcgatcctttaagcttgcagcaagaaattggagaaatcaaacgactcattaacgctaaaatccccatgtttggcatttgcttagggcatcaattgctctctatcgcgcaaggctaccctacttataagctcaaatttggccatcatgggagcaaccaccccgttaaaaacctagaaacaaacgctgttgaaatcaccgcacaaaaccacaactattgcgtccctgaagaaattgaagagatcgctactatcacgcaccgcaatctttttgacaacaccattgagggcgtgcgttataaaaacgctcccatcatctctgtccagcaccacccagaaagcagcccaggccctaaagagagccactatatttttaaggaatttgtgggattgctagagggcttttag

SEQ ID NO: 1822 - DNA (genomic), 1128 bp, Helicobacter pylori; double-stranded, circular
  misc_feature (B) LOCATION 1...1128
  hypothetical: NO
  anti-sense: NO
atggtctctctctatttagaaaacgggctttttttgcaagcgcaaagttttggggctaccggcacgcaagtgggcgagcttgtttttaacacttctatgagcggctatcaagaagtcattagcgaccccagctataaggggcaattcgtggtttttagcatgcctgaaattggggttgtgggcgctaatcctaaagatgatgaatcctttttttcatgcgcaggggttttagcgcgccattacaacgaatttttttctaactcaagggcggattctagcttgagcacttatttgaaaaagcgtggcgttttagggattagtggggttgataccaggagtttgattaaaaccttacgccaccatgggtgcttgatgatgatagcttccacgatcgagcatgacagaaacaagcttgaagaggttttaaaaaacgcccctaaaatttctcactcccccttagtgtctagcgtttccacgccaaaaatcatcacgcaccagcgtgctacttttgatttcaacaccctagattacaagccttttgatgaaaaaattccgcataaaattatcgccgtgctagactttggggctaagggcaacattttaaacgagcttcaaaatgtggggttaaaagcccttatttacccgcaccacactaaagctaacgagctgattaaggcctatgaaaaaaaagaaattagcgggatttttctctctaatgggccaggcgatcctttaagcttgcagcaagaaattggagaaatcaaacgactcattaacgctaaaatccccatgtttggcatttgcttagggcatcaattgctctctatcgcgcaaggctaccctacttataagctcaaatttggccatcatgggagcaaccaccccgttaaaaacctagaaacaaacgctgttgaaatcaccgcacaaaaccacaactattgcgtccctgaagaaattgaagagatcgctactatcacgcaccgcaatctttttgacaacaccattgagggcgtgcgttataaaaacgctcccatcatctctgtccagcaccacccagaaagcagcccaggccctaaagagagccactatatttttaaggaatttgtgggattgctagagggcttttag

SEQ ID NO: 1823 - DNA (genomic), 438 bp, Helicobacter pylori; double-stranded, circular
  misc_feature (B) LOCATION 1...438
  hypothetical: NO
  anti-sense: NO
ttggataagaatcaggctcgtgtgagcatggagggcgtggaagacagacctggcattgccgctgaaatctttggcgctttagcggaatatcgcattaatgtggatatgatagtccaaacgattggcagagacggcaaaaccgatttggattttacgatcgtcaaaacccaaatagaagaaaccaagcaggccttaaagccttttttagcgcaaatggattccattgattatgatgaaaatatcgctaaagtttccatagtgggcgtgggcatgaagtcgcattctggggtggcgagcatcgcttttaaagccctagccaaagacaatattaatatcatgatgatttccacaagcgagattaaaatttcggttttgattgacattaaatacgctgaattagcggttagaaccttgcatgcggtgtatcaattagatcaa

SEQ ID NO: 1824 - DNA (genomic), 435 bp, Helicobacter pylori; double-stranded, circular
  misc_feature (B) LOCATION 1...435
  hypothetical: NO
  anti-sense: NO
gataagaatcaggctcgtgtgagcatggagggcgtggaagacagacctggcattgccgctgaaatctttggcgctttagcggaatatcgcattaatgtggatatgatagtccaaacgattggcagagacggcaaaaccgatttggattttacgatcgtcaaaacccaaatagaagaaaccaagcaggccttaaagccttttttagcgcaaatggattccattgattatgatgaaaatatcgctaaagtttccatagtgggcgtgggcatgaagtcgcattctggggtggcgagcatcgcttttaaagccctagccaaagacaatattaatatcatgatgatttccacaagcgagattaaaatttcggttttgattgacattaaatacgctgaattagcggttagaaccttgcatgcggtgtatcaattagatcaa

SEQ ID NO: 1825 - DNA (genomic), 540 bp, Helicobacter pylori; double-stranded, circular
  misc_feature (B) LOCATION 1...540
  hypothetical: NO
  anti-sense: NO
gtgttaatcgttcaaaaatacggcggcacgagcatgggcagcatagaaaggatccacaatgtcgcccaaagggttttagaaagcgttaaattagggcatcaggtggtggtggtggtttctgcgatgagcggcgaaacggatcggcttttagaatttggcaagaattttagccataaccctaacaagcgagaaatggacaggattgtcagtgcgggggaatggatttcaagcgcggctttgagcatggcgttagaaagatacgggcatagggccatttccttgagcgggaaagaagcgggcattttaaccagttcgcattttcaaaacgccgtgatccaatccattgacacccaacgcatcacagagcttttagaaaaaaactacattgtggtgatcgctgggtttcaaggcgctgatattcaaggcgaaacaacgactttagggcgcggagggagcgatttgagcgcggtcgctttggccggggctttaaaagcgcatttgtgtgaaatctatacggatgtggatggagtttataccacc

SEQ ID NO: 1826 - DNA (genomic), 555 bp, Helicobacter pylori; double-stranded, circular
  misc_feature (B) LOCATION 1...555
  hypothetical: NO
  anti-sense: NO
aaaagaggggtatttggggtgttaatcgttcaaaaatacggcggcacgagcatgggcagcatagaaaggatccacaatgtcgcccaaagggttttagaaagcgttaaattagggcatcaggtggtggtggtggtttctgcgatgagcggcgaaacggatcggcttttagaatttggcaagaattttagccataaccctaacaagcgagaaatggacaggattgtcagtgcgggggaatggatttcaagcgcggctttgagcatggcgttagaaagatacgggcatagggccatttccttgagcgggaaagaagcgggcattttaaccagttcgcattttcaaaacgccgtgatccaatccattgacacccaacgcatcacagagcttttagaaaaaaactacattgtggtgatcgctgggtttcaaggcgctgatattcaaggcgaaacaacgactttagggcgcggagggagcgatttgagcgcggtcgctttggccggggctttaaaagcgcatttgtgtgaaatctatacggatatggagggagtttatacc

SEQ ID NO: 1827 - DNA (genomic), 1218 bp, Helicobacter pylori; double-stranded, circular
  misc_feature (B) LOCATION 1...1218
  hypothetical: NO
  anti-sense: NO
gtgttaatcgttcaaaaatacggcggcacgagcatgggcagcatagaaaggatccacaatgtcgcccaaagggttttagaaagcgttaaattagggcatcaggtggtggtggtggtttctgcgatgagcggcgaaacggatcggcttttagaatttggcaagaattttagccataaccctaacaagcgagaaatggacaggattgtcagtgcgggggaatggatttcaagcgcggctttgagcatggcgttagaaagatacgggcatagggccatttccttgagcgggaaagaagcgggcattttaaccagttcgcattttcaaaacgccgtgatccaatccattgacacccaacgcatcacagagcttttagaaaaaaactacattgtggtgatcgctgggtttcaaggcgctgatattcaaggcgaaacaacgactttagggcgcggagggagcgatttgagcgcggtcgctttggccggggctttaaaagcgcatttgtgtgaaatctatacggatgtggatggcgtttataccaccgatccgcgcattgaagaaaaggctcaaaaaatcgcgcaaatcagctatgatgaaatgcttgaactggcttctatgggggctaaagttttattgaaccgctcggtagaattagccaaaaaactcagcgtgaagttagtgactcgcaattcgtttaaccatagcgaaggcacgctcattgtcgctgaaaaagactttaaaggagaacgcatggaaacccctatagtgagtgggatcgcattggataagaatcaggctcgtgtgagcatggagggcgtggaagacagacctggcattgccgctgaaatctttggcgctttagcggaatatcgcattaatgtggatatgatagtccaaacgattggcagagacggcaaaaccgatttggattttacgatcgtcaaaacccaaatagaagaaaccaagcaggccttaaagccttttttagcgcaaatggattccattgattatgatgaaaatatcgctaaagtttccatagtgggcgtgggcatgaagtcgcattctggggtggcgagcatcgcttttaaagccctagccaaagacaatattaatatcatgatgatttccacaagcgagattaaaatttcggttttgattgacattaaatacgctgaattagcggttagaaccttgcatgcggtgtatcaattagatcaatga

SEQ ID NO: 1828 - DNA (genomic), 267 bp, Helicobacter pylori; double-stranded, circular
  misc_feature (B) LOCATION 1...267
  hypothetical: NO
  anti-sense: NO
cgtttcaaaggcatggatattgttaaaaagcaagctaaggaatgttatatgtggatcacccaagaaatcacgccgtatttgcgtaaagaatacaccatagaagcgaaattattagatgtgaggagcgagcataatatcttagagatttttaaatctaaggattttggtgaaattgcgatgctcaaccgccagttgttgttcaagaattttttgcacattgaaagcgagttgctcgctcatatgggggggttgcaccaagaaagagct

SEQ ID NO: 1829 - DNA (genomic), 693 bp, Helicobacter pylori; double-stranded, circular
  misc_feature (B) LOCATION 1...693
  hypothetical: NO
  anti-sense: NO
agatttttaaatctaaggattttggtgaaattgcgatgctcaaccgccagttgttgttcaagaattttttgcacattgaaagcgagttgctcgctcatatgggggggttgcaccaagaaagagcttagagaggttttgattgtagatgggtttgatttggaattagcccaccagctttttaaatacgacacgcgtatagattttgtgcaagcggatgaaaagattttggatagcttcattagttttttcccccatttccatgaagtgaaaaataataagaatttcacgcacgctaaacaacttttagatttagacattaaaaaatacgatttgatcctttgcttgcaagagccggatattcataaaattgatggtttaaaaagaatgcttaaagaagatggggtgtttatttcggtagctaaacacccgttattagagcatgtgagcatgcaaaacgcccttaaaaacttgggcgacttttttcctattactatcccttttgtagcgcctttaaggattttgagcaataagggttatatttacgcttcctttaaaacccaccccttaaaagatctcatgacgccaaaaatagaagcgctaaaaagcgtgagatactataacgaagacattcatagggccgcattcgctttgcctaaaaatttacaagaagtctttaaagacaatatcaaatct

SEQ ID NO: 1830 - DNA (genomic), 789 bp, Helicobacter pylori; double-stranded, circular
  misc_feature (B) LOCATION 1...789
  hypothetical: NO
  anti-sense: NO
atgtggatcacccaagaaatcacgccgtatttgcgtaaagaatacaccatagaagcgaaattattagatgtgaggagcgagcataatatcttagagatttttaaatctaaggattttggtgaaattgcgatgctcaaccgccagttgttgttcaagaattttttgcacattgaaagcgagttgctcgctcatatggggggttgcaccaagaaagagcttagagaggttttgattgtagatgggtttgatttggaattagcccaccagctttttaaatacgacacgcgtatagattttgtgcaagcggatgaaaagattttggatagcttcattagttttttcccccatttccatgaagtgaaaaataataagaatttcacgcacgctaaacaacttttagatttagacattaaaaaatacgatttgatcctttgcttgcaagagccggatattcataaaattgatggtttaaaaagaatgcttaaagaagatggggtgtttatttcggtagctaaacacccgttattagagcatgtgagcatgcaaaacgcccttaaaaacttgggcgacttttttcctattactatcccttttgtagcgcctttaaggattttgagcaataagggttatatttacgcttcctttaaaacccaccccttaaaagatctcatgacgccaaaaatagaagcgctaaaaagcgtgagatactataacgaagacattcatagggccgcattcgctttgcctaaaaatttacaagaagtctttaaagacaatatcaaatcttaa

SEQ ID NO: 1831 - DNA (genomic), 1251 bp, Helicobacter pylori; double-stranded, circular
  misc_feature (B) LOCATION 1...1251
  hypothetical: NO
  anti-sense: NO
atggcttattttttagaacaaacggatagtgaaatctttgagttcatcgttgaagaatttaaacgccaaaatgagcatttagaaatgatagcgagcgagaattacacttttcctagtgtcatggaggctatggggagtattttaacgaataaatacgctgaaggctatcctaacaaacgctattatgggggctgtgaagtggtggataaaatagaaagcctagccatagaaagggctaaaaagcttttcaattgccagttcgctaacgtgcaagcgcattcaggctcacaagccaataacgctgtttatcacgcccttttaaagctttatgacaagattttaggcatggatttaagctgtggagggcatttaacgcatggcgctaaagtgagtttaaccggcaagcattaccagagcttttcttatggcgtgggtttggatggctatattgattatgaagaggcgctaaaaatcgctcaaagcgttaagccacaaatcattgtgtgcgggttttcagcctatccaagggagattgattttaagaaatttagggaaatcgctgatgcagtgggggcgttattactaggcgatatagcccatgtggcagggcttgtagtcgctaatgagcatgcccatcctttcccgcattgccatgtggtttcaagcaccactcataagaccttaagagggcctagaggggggcttattctaactaatgacgaagaaatagcggctaagattgacaaagcgatttttccagggactcaaggcgggcctttgatgcatgtgattgctgctaaagcggtggggtttaaagagaatttaaaaccagaatttaaagcttatgcaaaattagtgaaatctaacatgcaagttctcgctaaaacattaaaagaaaaaaaccacaaattagtgagcggtggcacttctaaccatttgcttttaatggattttttagataagccttatagcgggaaagacgctgacattgctttagggaatgctgggatcaccgtgaataaaaacaccattcctggcgaaacgcgcaacccttttgtaacgagcgggataaggattggctcagcagcattgagcgcaagaggcatgggagctaaagaatttgaaatcatagggaataaaatatcagatattttgaatgatattaataatgttagtttgcaattgcatgtgaaagaagaattgaagaccatggctaatcaattccctgtgtaccaccaacctattttttaa

SEQ ID NO: 1832 - DNA (genomic), 1254 bp, Helicobacter pylori; double-stranded, circular
  misc_feature (B) LOCATION 1...1254
  hypothetical: NO
  anti-sense: NO
agaataatggcttattttttagaacaaacggatagtgaaatctttgagttcatcgttgaagaatttaaacgccaaaatgagcatttagaaatgatagcgagcgagaattacacttttcctagtgtcatggaggctatggggagtattttaacgaataaatacgctgaaggctatcctaacaaacgttattatgggggctgtgaagtgctggataaaatagaaagcctagccatagaaaggggtaaaaagcttttcaattgccagttcgctaacgtgcaagcgcattcaggctcacaagccaataacgctgtttatcacgcccttttaaacctttatgacaagattttagggatggatttaagctgtggagggcatttaacgcatggcgataaagtgagtttaaccggcaagcattaccagagcttttcttatggcgtgggtttggatggctatattgattatgaagaggcgctaaaaatcgctcaaagcgttaagccacaaatcattgtgtgcgggttttcagcctatccaagggagattgattttaagaaatttagggaaatcgctgatgcagtgggggcgttattactaggcgatatagcccatgtggcagggcttgtagtcgctaatgagcatgcccatcctttcccgcattgccatgtggtttcaagcaccactcataagaccttaagagggcctagaggggggcttattctaactaatgacgaagaaatagcggctaagattgacaaagcgatttttccagggactcaaggcgggcctttgatgcatgtgattgctgctaaagcggtggggtttaaagagaatttaaaaccagaatttaaagcttatgcaaaattagtgaaatctaacatgcaagttctcgctaaaacattaaaagaaaaaaaccacaaattagtgagcggtggcacttctaaccatttgcttttaatggattttttagataagccttatagcgggaaagacgctgacattgctttagggaatgctgggatcaccgtgaataaaaacaccattcctggcgaaacgcgcaacccttttgtaacgagcgggataaggattggctcagcagcattgagcgcaagaggcatgggagctaaagaatttgaaatcatagggaataaaatatcagatattttgaatgatattaataatgttagtttgcaattgcatgtgaaagaagaattgaagaccatggctaatcaattccctgtgtaccaccaacctattttt

SEQ ID NO: 1833 - DNA (genomic), 180 bp, Helicobacter pylori; double-stranded, circular
  misc_feature (B) LOCATION 1...180
  hypothetical: NO
  anti-sense: NO
gtcttaaagaatgaaataagctataataagcccattttgaacaccaacgattatttgaataaagacaatacgatgaaagatagttttcttttcacttccgaatcagtaaccgaagggcatcctgataaaatggccgatcagatcagcgatgcggttttagattacatgattgagcgggat

SEQ ID NO: 1834 - DNA (genomic), 333 bp, Helicobacter pylori; double-stranded, circular
  misc_feature (B) LOCATION 1...333
  hypothetical: NO
  anti-sense: NO
aaaaccaaagtcgcatgcaagactttagtttctaatggtttatgcatgatcactggcgagttagaaacttctgtttatgcaccgatgctagagatcgcaagacatatggttagaaaaattggctatacaaacgctctctattgctttgattacagaagcgcggcggttttaaatggcattggcgagcaaagtcctgatattaatcaaggcgtggatagagaagatggcgagattggggcgggggatcaagggcttatgtttggttatgcatgcaaagagactgaaacgctcatgcctttacccatccatttagcgcaccagctcgctttcgcc

SEQ ID NO: 1835 - DNA (genomic), 759 bp, Helicobacter pylori; double-stranded, circular
  misc_feature (B) LOCATION 1...759
  hypothetical: NO
  anti-sense: NO
aacgctcatgcctttacccatccatttagcgcaccagctcgctttcgcctagctcaaaaaagaaaagacaacaccttgccttttttaaggcctgatggcaagtctcaagtgagcgtgcgttatgaaaacaacaagcctgtaagcgttgatacgattgtcatttccacccaacattccccagaagtttcacaaaagcatttaaaagaagcggtgattgaagagatcgtgtataaggttttacccaaagaatatttgcatgacaatatcaagttttttataaaccctacaggaaaattcgtcatcggtgggcctcaaggcgatgcgggtttgacaggtagaaaaatcatctgggatacttatggagggttttgcccgcatggagggggagcgtttaccgggaaagacccttacaaggtggatatgagcgcggcttatgcggcccgctatgtggctaaaaatttggtagcgagcggggtttgcgataaagcgaccgtgcagcttgcttatgcgattggggtgatagagcctgtgtctatttatgtgaacacgcataacacgagcaagcattcaagcgcggagttggaaaaatgcgtgaaatcggttttcaaactcacgccaaaaggcatcattgaaagcttggatttgttaagacccatttattcgctcacttcagcttatgggcattttgggcgcgagttagaagaattcacttgggaaaagactaacaaggttgaagagattaaagcgttctttaagcgt

SEQ ID NO: 1836 - DNA (genomic), 1158 bp, Helicobacter pylori; double-stranded, circular
  misc_feature (B) LOCATION 1...1158
  hypothetical: NO
  anti-sense: NO
atgaaagatagttttcttttcacttccgaatcagtaaccgaagggcatcctgataaaatggccgatcagatcagcgatgcggttttagattacattattgagcgggataaaaaagccaaagtcgcatgcgagactttagtttctaatggtttttgcatgatcactggcgagttaaaaacttctgtttatgccccgatgcaagagatcgcaagagaagtggttaaaaaaattggctatacagacgctctttatggctttgattacagaagcgcggcggttttaaatggcattggcgagcaaagccctgatattaatcaaggcgtggatagagaagatggcgagattggggcgggggatcaagggcttatgtttggttatgcatgcaaagagactgaaacgctcatgcctttacccatccatttagcgcaccagctcgctttcgctctagctcaaaaaagaaaagacaacaccttgccttttttaaggcctgatggcaagtctcaagtgagcgtgcgttatgaaaacaacaagcctgtaagcgttgatacgattgtcatttccacccaacattccccagaagtttcacaaaagcatttaaaagaagcggtgattgaagagatcgtgtataaggttttacccaaagaatatttgcatgacaatatcaagttttttataaaccctacaggaaaattcgtcatcggtgggcctcaaggcgatgcgggtttgacaggtagaaaaatcatcgtggatacttatggagggttttgcccgcatggagggggagcgtttagcgggaaagaccctagcaaggtggataggagcgcggcttatgcggcccgctatgtggctaaaaatttggtagcgagcggggtttgcgataaagcgaccgtgcagcttgcttatgcgattggggtgatagagcctgtgtctatttatgtgaacacgcataacacgagcaagcattcaagcgcggagttggaaaaatgcgtgaaatcggttttcaaactcacgccaaaaggcatcattgaaagcttggatttgttaagacccatttattcgctcacttcagcttatgggcattttgggcgcgagttagaagaattcacttgggaaaagactaacaaggttgaagagattaaagcgttctttaagcgttaa

SEQ ID NO: 1837 - DNA (genomic), 186 bp, Helicobacter pylori; double-stranded, circular
  misc_feature (B) LOCATION 1...186
  hypothetical: NO
  anti-sense: NO
atgcagcatttagtcttaatcggttttatggggagcggtaaaagctctctagcacaagaattggggctggctttgaaattagaagtgctggatacggatatgatcattagcgagagggtgggcttgagcgtgagagggatttttgaagagcttggcgaagacaatttcaggatgtttgaaaaaatt

SEQ ID NO: 1838 - DNA (genomic), 489 bp, Helicobacter pylori; double-stranded, circular
  misc_feature (B) LOCATION 1...489
  hypothetical: NO
  anti-sense: NO
atgcagcatttagtcttaatcggttttatggggagcggtaaaagctctctagcacaagaattggggctggctttgaaattagaagtgctggatacggatatgatcattagcgagagggtgggcttgagcgtgagagggatttttgaagagcttggcgaagacaatttcaggatgtttgaaaaaaatttgattgatgaattaaaaacgctcaaaaccccccatatcatttctaccggtgggggcattgtgatgcatgaaaatcttaagggtttaggcacaactttttacctcaaaatggattttgagaccttgattaagcgtttgaatcaaaaagaaagggaaaaacgcccccttttgaataacctcactcaagccaaagagctttttgaaaaacgacaagccctctatgaaaaaaacgcttcctttatcattgatgcaaggggtggtttaaataattctttaaaacaagtgctacaattcatcgcataa

SEQ ID NO: 1839 - DNA (genomic), 495 bp, Helicobacter pylori; double-stranded, circular
  misc_feature (B) LOCATION 1...495
  hypothetical: NO
  anti-sense: NO
aataaaagcatgcagcatttagtcttaatcggttttatggggagcggtaaaagctctctagcacaagaattggggctggctttgaaattagaagtgctggatacggatatgatcattagcgagagggtgggcttgagcgtgagagggatttttgaagagcttggcgaagacaatttcaggatgtttgaaaaaaatttgattgatgaattaaaaacgctcaaaaccccccatatcatttctaccggtgggggcattgtgatgcatgaaaatcttaagggtttaggcacaactttttacctcaaaatggattttgagaccttgattaagcgtttgaatcaaaaagaaagggaaaaacgcccccttttgaataacctcactcaagccaaagagctttttgaaaaacgacaagccctctatgaaaaaaacgcttcctttatcattgatgcaaggggtggtttaaataattctttaaaacaagtgctacaattcatcgca

SEQ ID NO: 1840 - DNA (genomic), 516 bp, Helicobacter pylori; double-stranded, circular
  misc_feature (B) LOCATION 1...516
  hypothetical: NO
  anti-sense: NO
ccgcccccactaatggggcgtgcgcggtggctgccaagcgtgctttcatacgccaaaaaccatttgtttgaaaatttatcgcaaaaatctatcaatgattttttactcactagtgcggcgattggctatctttacaaaaaaaacgcttccttaagcggcgcagaagccgggtgtcaggctgaaattggtgtggcaagctctatggctgcgggggggttagcccatttgtgccaagcgaccacgcaacaggttttgatcgctagtgaaatcgctatggagcaccatttaggattgacatgcgatccggtggggggcttggtgcaaatcccttgcattgaacgcaatgttttaggggcgattaaagcgattagcgcttctaaactggccttagaagatgaatacaagcctaaagtgagtctagatgaagtgatcgctacgatgtatgcgactgggaaagacatgaatgaaaaatacaaagagacttcgttaggggggctagctaaaaccttaaaatgc

SEQ ID NO: 1841 - DNA (genomic), 993 bp, Helicobacter pylori; double-stranded, circular
  misc_feature (B) LOCATION 1...993
  hypothetical: NO
  anti-sense: NO
aaacttcaaagtggatatttttgtgtttgtctttgggagcttgacggctttgagcgtgtttttaggactattttaatggctagtttttccattttatccatttttaaaatcggcgtggggcctagctcttcacacaccataggacctatggaagcgggggcgagattttgcgggttgttaaaaggcattttagagcaggttgaacgcgttcaaatcaccttgcatggctcattagccttaaccggtaaagggcatttgagcgatgaggcggttttgattggcttgcatggtatttatgctaacgaattagatataacaaccaaaaaagccttattgcatgaagcgtttgagaataaagttttaaaactcgctaaccagcatcatatcccttttgattatgctaaagatttgatttttgacaacaaacctttagccagacaccaaaacgccctcattctaaaagcttttaatgctaaaaatgaggttttaaaagaagagacttattattctgttggtggagggtttgtttatactgaaaaagaattagacaacttatctgaagagggtgaaaatgaaagcgttgcttatgatttttcaagcgctaaggaattgctagaattgtgccaaaaacaccaaaaaagcatcgctgaaatcgtgcgtttgagagaaaacgccctcaaaaaccaccctgatgcaacgatgaccaaaatctatcatgcgatgcttgagtgttatcataatggggctaattctaaagaaaggtatctgcccggttctttgaaagtaacacgattagccccaagcgttaaaacgcgcctagaaaagcaccccacaagcgggaaagaccccttagccttgattgattacatttcgctttacgctcgctccattgccgaagaaaacagctgcggaggcaaggtggtaaccgcccccactaatggggcgtgcgcggtggctgccaagcgtgctttcatacgccaaaaaccatttgtt

SEQ ID NO: 1842 - DNA (genomic), 1368 bp, Helicobacter pylori; double-stranded, circular
  misc_feature (B) LOCATION 1...1368
  hypothetical: NO
  anti-sense: NO
atggctagtttttccattttatccatttttaaaatcggcgtggggcctagctcttcacacaccataggacctatggaagcgggggcgagattttgcgggttgttaaaaggcattttagagcaggttgaacgcgttcaaatcaccttgcatggctcattagccttaaccggtaaagggcatttgagcgatgaggcggttttgattggcttgcatggtatttatgctaacgaattagatataacaaccaaaaaagccttattgcatgaagcgtttgagaataaagttttaaaactcgctaaccagcatcatatcccttttgattatgctaaagatttgatttttgacaacaaacctttagccagacaccaaaacgccctcattctaaaagcttttaatgctaaaaatgaggttttaaaagaagagacttattattctgttggtggagggtttgtttatactgaaaaagaattagacaacttatctgaagagggtgaaaatgaaagcgttgcttatgatttttcaagcgctaaggaattgctagaattgtgccaaaaacaccaaaaaagcatcgctgaaatcgtgcgtttgagagaaaacgccctcaaaaaccaccctgatgcaacgatgaccaaaatctatcatgcgatgcttgagtgttatcataatggggctaattctaaagaaaggtatctgcccggttctttgaaagtaacacgattagccccaagcgttaaaacgcgcctagaaaagcaccccacaagcgggaaagaccccttagccttgattgattacatttcgctttacgctcgctccattgccgaagaaaacgctagcggaggcaaggtggtaaccgcccccactaatggggcgtgcgcggtggtgccaagcgtgctttcatacgccaaaaaccatttgtttgaaaatttatcgcaaaaatctatcaatgattttttactcactagtgcggcgattggctatctttacaaaaaaaacgcttccttaagcggcgcagaagccgggtgtcaggctgaaattggtgtggcaagctctatggctgcgggggggttagcccatttgtgccaagcgaccacgcaacaggttttgatcgctagtgaaatcgctatggagcaccatttaggattgacatgcgatccggtggggggcttggtgcaaatcccttgcattgaacgcaatgttttaggggcgattaaagcgattagcgcttctaaactggccttagaagatgaatacaagcctaaagtgagtctagatgaagtgatcgctacgatgtatgcgactgggaaagacatgaatgaaaaatacaaagagacttcgttaggggggctagctaaaaccttaaaatgctaa

SEQ ID NO: 1843 - DNA (genomic), 318 bp, Helicobacter pylori; double-stranded, circular
  misc_feature (B) LOCATION 1...318
  hypothetical: NO
  anti-sense: NO
agaaggtgggcggcgaatttttttggcatcacgcatgatgatgcctttatcaccccgcattcgccaagcattctgccaagcgttaccagaaaaagcttgatgggtttggctaaagaacacttgaaactcaaagtagaagagagggaaattttaattgatgagttgggcgcgtttaaagaagccggagcgtgcgggacagccgcaatcattacgcccattaaagaaatcgcgcacaacaacaagtcttattcttttgaagcgccgggcaatattactaaacaactctatgatttgcttttatccatccagcaaggtgaa

SEQ ID NO: 1844 - DNA (genomic), 387 bp, Helicobacter pylori; double-stranded, circular
  misc_feature (B) LOCATION 1...387
  hypothetical: NO
  anti-sense: NO
ctgctcatgcccaaagtgagcgaagagctgtttttaaaggcatgcgctgaagtgattaaagcgaatcaaaaatggctcgctccttacaaaagtggggcgagtttgtatttgcgcccttttgtcataggcgtgggggataatttgggggtaaagccggccagtgaatacctttttatcgtgttttgcgcgcctgtgggggcgtattttaaggggggcatagaaaaagggggggctaggtttatcactacggcgtttgatagagccgcgcctaaaggcaccggtggggtgaaagtgggggggaattatgccgcaagcctgttagcccataaaatagccacagagcaaggctatgatgattgcatttatttaagaccccaccacgcacac

SEQ ID NO: 1845 - DNA (genomic), 384 bp, Helicobacter pylori; double-stranded, circular
  misc_feature (B) LOCATION 1...384
  hypothetical: NO
  anti-sense: NO
ctcatgcccaaagtgagcgaagagctgtttttaaaggcatgcgctgaagtgattaaagcgaatcaaaaatggctcgctccttacaaaagtggggcgagtttgtatttgcgcccttttgtcataggcgtgggggataatttgggggtaaagccggccagtgaatacctttttatcgtgttttgcgcgcctgtgggggcgtattttaaggggggcatagaaaaagggggggctaggtttatcactacggcgtttgatagagccgcgcctaaaggcaccggtggggtgaaagtgggggggaattatgccgcaagcctgttagcccataaaatagccacagagcaaggctatgatgattgcatttatttaagaccccaccacgcacac

SEQ ID NO: 1846 - DNA (genomic), 747 bp, Helicobacter pylori; double-stranded, circular
  misc_feature (B) LOCATION 1...747
  hypothetical: NO
  anti-sense: NO
atgcccaaagtgagcgaagagctgtttttaaaggcatgcgctgaagtgattaaagcgaatcaaaaatggctcgctccttacaaaagtggggcgagtttgtatttgcgcccttttgtcataggcgtgggggataatttgggggtaaagccggccagtgaatacctttttatcgtgttttgcgcgcctgtgggggcgtattttaaggggggcatagaaaaagggggggctaggtttatcactacggcgtttgatagagccgcgcctaaaggcaccggtggggtgaaagtgggggggaattatgccgcaagcctgttagcccataaaatagccacagagcaaggctatgatgattgcatttatttagaccccaccacgcacactaaaattgaagaagtgggggcggcgaatttttttggcatcacgcatgatgatgcctttatcaccccgcattcgccaagcattctgccaagcgttaccagaaaaagcttgatggttttggctaaagaacacttgaaactcaaagtagaagagagggaaattttaattgatgagttgggcgcgtttaaagaagccggagcgtgcgggacagccgcaatcattacgcccattaaagaaatcgcgcacaacaacaagtcttattcttttgaagcgccgggcaatattactaaacaactctatgatttgcttttatccatccagcaaggcgaacaagaagcccctaaagattggatttttgaagttggctaa

SEQ ID NO: 1847 - DNA (genomic), 1023 bp, Helicobacter pylori; double-stranded, circular
  misc_feature (B) LOCATION 1...1023
  hypothetical: NO
  anti-sense: NO
atgccaaatttagaaaatttagactggaaaaatctaggctttagctacattaaaacggattttcgcttcatcgctacttataaaaacggctcgtggtcgcaaggcgaattggttagcgaaaatgcgttacagctcagcgaaggctcaccggtcttgcattatgggcaggcttgttttgaaggcttgaaggcttaccgctctcaaaaggggaaagctcttctttttcgccctttagaaaacgccaaacgcttgcaaacttcatgcgaaagactgctcatgcccaaagtgagcgaagagctgtttttaaaggcatgcgctgaagtgattaaagcgaatcaaaaatggctcgctccttacaaaagtggggcgagtttgtatttgcgcccttttgtcataggcgtgggggataatttgggggtaaagccggccagtgaatacctttttatcgtgttttgcgcgcctgtgggggcgtattttaaggggggcatagaaaaagggggggctaggtttatcactacggcgtttgatagagccgcgcctaaaggcaccggtggggtgaaagtgggggggaattatgccgcaagcctgttagcccataaaatagccacagagcaaggctatgatgattgcatttatttagaccccaccacgcacactaaaattgaagaagtgggggcggcgaatttttttggcatcacgcatgatgatgcctttatcaccccgcattcgccaagcattctgccaagcgttaccagaaaaagcttgatggttttggctaaagaacacttgaaactcaaagtagaagagagggaaattttaattgatgagttgggcgcgtttaaagaagccggagcgtgcgggacagccgcaatcattacgcccattaaagaaatcgcgcacaacaacaagtcttattcttttgaagcgccgggcaatattactaaacaactctatgatttgcttttatccatccagcaaggcgaacaagaagcccctaaagattggatttttgaagttggctaa

SEQ ID NO: 1848 - DNA (genomic), 258 bp, Helicobacter pylori; double-stranded, circular
  misc_feature (B) LOCATION 1...258
  hypothetical: NO
  anti-sense: NO
ggggtagagggcttaaggaagcacatttctaacaccgctgaatttggggcgattaaagctagagagcctatgggaaatctgttggaaaaacgcatgcaaaaaatcttaaaaaagattcaaaacggtgcattcgctaaggattttttactagaaaagagcttgaattaccccaggttaaacacagagaggaaagcccttaaagagactaaaatagaacaaattggggaaattttacgcgccccattcaatcataaaaaa

SEQ ID NO: 1849 - DNA (genomic), 303 bp, Helicobacter pylori; double-stranded, circular
  misc_feature (B) LOCATION 1...303
  hypothetical: NO
  anti-sense: NO
gtgcatttcaatcaggttgttctcccaaaaggcgtgggcgcgattttagtcgcaccaaaagggcccgggagcgctttaagagaagaataccttaaaaataggggtttataccatctaatcgccatagagcaagaaagctcaattcataacgctaaagcggtggctttaagctatgctaaagcgatgggtggggggagaatgggggttttagaaacgagttttaaagaagaatgcgagagcgatttattcggcgagcaagcggtcttgtgcggggggttagaagtcgatcgtaagaatggggtt

SEQ ID NO: 1850 - DNA (genomic), 768 bp, Helicobacter pylori; double-stranded, circular
  misc_feature (B) LOCATION 1...768
  hypothetical: NO
  anti-sense: NO
atccctccgagcacaccatttcttaacattctgcatgtttttaaacattatcgctcccattatggtaaaataaatacttgcttaaacacgctaggagatttgattttggcattacccgtttattatgataaagacattgatttaggcgttatccaatccttacaagtgggcattattggctatggcgtgcaaggagaggctcaagcactcaatttgagggactctaaagtgaaggtgcgtattggcttgtatcaagggagtttgagcgtttcaaaagcaaaaaaagagggctttgaggtgctaggagtcaaggaattagtccaacaatctgatgtgatcatggcgttacttccggatgaattgcataaagaagtgttagaaaaagaagtgatcccttttttaaaagaggggcaaattataggctttgctcatggttttagcgtgcatttcaatcaggttgttctcccaaaaggcgtgggcgcgattttagtcgcaccaaaagggcccgggagcgctttaagagaagaataccttaaaaataggggtttataccatctaatcgccatagagcaagaaagctcaattcataacgctaaagcggtggctttaagctatgctaaagcgatgggtggggggagaatgggggttttagaaacgagttttaaagaagaatgcgagagcgatttattcggcgagcaagcggtcttgtgcggggggttagaagcgatcgtaagaatggggtttgaaactttaatcaaggcaggatac

SEQ ID NO: 1851 - DNA (genomic), 771 bp, Helicobacter pylori; double-stranded, circular
  misc_feature (B) LOCATION 1...771
  hypothetical: NO
  anti-sense: NO
atccctccgagcacaccatttcttaacattctgcatgtttttaaacattatcgctcccattatggtaaaataaatacttgcttaaacacgctaggagatttgattttggcattacccgtttattatgataaagacattgatttaggcgttatccaatccttacaagtgggcattattggctatggcgtgcaaggagaggctcaagcactcaatttgagggactctaaagtgaaggtgcgtattggcttgtatcaagggagtttgagcgtttcaaaagcaaaaaaagagggctttgaggtgctaggagtcaaggaattagtccaacaatctgatgtgatcatggcgttacttccggatgaattgcataaagaagtgttagaaaaagaagtgatcccttttttaaaagaggggcaaattataggctttgctcatggttttagcgtgcatttcaatcaggttgttctcccaaaaggcgtgggcgcgattttagtcgcaccaaaagggcccgggagcgctttaagagaagaataccttaaaaataggggtttataccatctaatcgccatagagcaagaaagctcaattcataacgctaaagcggtggctttaagctatgctaaagcgatgggtggggggagaatgggggttttagaaacgagttttaaagaagaatgcgagagcgatttattcggcgagcaagcggtcttgtgcggggggttagaagcgatcgtaagaatggggtttgaaactttaatcaaggcaggataccct

SEQ ID NO: 1852 - DNA (genomic), 993 bp, Helicobacter pylori; double-stranded, circular
  misc_feature (B) LOCATION 1...993
  hypothetical: NO
  anti-sense: NO
ttggcattacccgtttattatgataaagacattgatttaggcgttatccaatccttacaagtgggcattattggctatggcgtgcaaggagaggctcaagcactcaatttgagggactctaaagtgaaggtgcgtattggcttgtatcaagggagtttgagcgtttcaaaagcaaaaaaagagggctttgaggtgctaggagtcaaggaattagtccaacaatctgatgtgatcatggcgttacttccggatgaattgcataaagaagtgttagaaaaagaagtgatcccttttttaaaagaggggcaaattataggctttgctcatggttttagcgtgcatttcaatcaggttgttctcccaaaaggcgtgggcgcgattttagtcgcaccaaaagggcccgggagcgctttaagagaagaataccttaaaaataggggtttataccatctaatcgccatagagcaagaaagctcaattcataacgctaaagcggtggctttaagctatgctaaagcgatgggtggggggagaatgggggttttagaaacgagttttaaagaagaatgcgagagcgatttattcggcgagcaagcggtcttgtgcggggggttagaagcgatcgtaagaatggggtttgaaactttaatcaaggcaggataccctgaagaattagcctattttgaatgcgtgcatgaagtgaaattggtggcggatttattgcattataagggggtagagggcttaaggaagcacatttctaacaccgctgaatttggggcgattaaagctagagagcctatgggaaatctgttggaaaaacgcatgcaaaaaatcttaaaaaagattcaaaacggtgcattcgctaaggattttttactagaaaagagcttgaattaccccaggttaaacacagagaggaaagcccttaaagagactaaaatagaacaaattggggaaattttacgcgccccattcaatcataaaaaataa

SEQ ID NO: 1853 - DNA (genomic), 204 bp, Helicobacter pylori; double-stranded, circular
  misc_feature (B) LOCATION 1...204
  hypothetical: NO
  anti-sense: NO
atgattaacgccgtctcttcgctcactccagtgcaatctgtggggaattacaagcgtgtggaaaagaatgaaaaagttgagaacaatgaagccgctcttgatagggtagctgaaatcaagcaagcgattgaaaataaccagtataaaatcaacttgcatgagacttctcacaaaatggcacaggatttattggggataagctag

SEQ ID NO: 1854 - DNA (genomic), 237 bp, Helicobacter pylori; double-stranded, circular
  misc_feature (B) LOCATION 1...237
  hypothetical: NO
  anti-sense: NO
tcaaacgaattgaatattagattaaaggattttaagatgattaacgccgtctcttcgctcactccagtgcaatctgtggggaattacaagcgtgtggaaaagaatgaaaaagttgagaacaatgaagccgctcttgatagggtagctgaaactaagcaagcgattgaaaataaccagtataaaatcaacttgcatgagacttctcacaaaatggcacaggatttattggggataagc

SEQ ID NO: 1855 - DNA (genomic), 408 bp, Helicobacter pylori; double-stranded, circular
  misc_feature (B) LOCATION 1...408
  hypothetical: NO
  anti-sense: NO
gatgaagaagtgttgagttacagaggggatattatcaatgggatttccaaaaaagaaagagagccaaagcctgaaagaatgcttaaagcctaccatcaaagcgtagcgactttaaaccttatcagagcctttgctcaaggcgggttagcggatttggagcaagtgcatcgtttcaatttggattttgtcaaaaacaacgactttgggcaaaaataccagcaaatcgctgatcggatcacgcaagctttagggttcatgcgagcatgcggggtggagatagagcgaacgcctattcttagagaagtggagttttacacgagccacgaagcgttactgctccattatgaagagccgctggtgcgtaaggatagtttgactaaccagtcctatgattgctccgccacatgc

SEQ ID NO: 1856 - DNA (genomic), 405 bp, Helicobacter pylori; double-stranded, circular
  misc_feature (B) LOCATION 1...405
  hypothetical: NO
  anti-sense: NO
gaagaagtgttgagttacagaggggatattatcaatgggatttccaaaaaagaaagagagccaaagcctgaaagaatgcttaaagcctaccatcaaagcgtagcgactttaaaccttatcagagcctttgctcaaggcgggttagcggatttggagcaagtgcatcgtttcaatttggattttgtcaaaaacaacgactttgggcaaaaataccagcaaatcgctgatcggatcacgcaagctttagggttcatgcgagcatgcggggtggagatagagcgaacgcctattcttagagaagtggagttttacacgagccacgaagcgttactgctccattatgaagagccgctggtgcgtaaggatagtttgactaaccagtcctatgattgctccgccacatgc

SEQ ID NO: 1857 - DNA (genomic), 1191 bp, Helicobacter pylori; double-stranded, circular
  misc_feature (B) LOCATION 1...1191
  hypothetical: NO
  anti-sense: NO
gtggtgaagatcattgacaataaagcgtttttgttgcaagggggcgattgcgcggagtcgttttcccaatttagcgctaaccgaattagggacatgtttaaagtgatgatgcaaatggcgattgtcttaacttttgctggctctataccgatcgtgaaagtggggcgcattgccgggcaatttgccaagcctcgctctaatgcgactgaaatactggatgatgaagaagtgttgagttacagaggggatattatcaatgggatttccaaaaaagaaagagagccaaagcctgaaagaatgcttaaagcctaccatcaaagcgtagcgactttaaaccttatcagagcctttgctcaaggcgggttagcggatttggagcaagtgcatcgtttcaatttggattttgtcaaaaacaacgactttgggcaaaaataccagcaaatcgctgatcggatcacgcaagctttagggttcatgcgagcatgcggggtggagatagagcgaacgcctattcttagagaagtggagttttacacgagccacgaagcgttactgctccattatgaagagccgttggtgcgtaaggatagtttgactaaccagttttatgattgctccgcgcacatgctatggattggcgaaaggacaagagaccctaaaggcgcgcatgtggagtttttaaggggggtttgtaaccctattggcgtgaaaatcgggcctaatgcgagcgtgagcgaagtgctagaattgtgcgatgttttaaacccgcacaaccttaaagggcgtttgaatttgatcgtgcgcatgggttctaaaatcattaaagagcgtttgcctaagcttttacaaggggtgttgaaagaaaaacgccacattttatggagcattgatcccatgcatggcaacacggtcaaaaccaacttgggggttaaaacaagggcttttgatagcgtgttagatgaagtgaaaagcttttttgaaatccatagggctgaagggagcttggcttcaggggttcatttggaaatgacaggagaaaatgttacagaatgtatcggtggctcgcaagcgatcaccgaagagggtttgagctgccattactatacgcaatgcgatccaagattaaacgccactcaagccctagaactcgcttttttaatcgctgacatgcttaaaaaacaacgcacttga

SEQ ID NO: 1858 - DNA (genomic), 213 bp, Helicobacter pylori; double-stranded, circular
  misc_feature (B) LOCATION 1...213
  hypothetical: NO
  anti-sense: NO
ccttgcaagaatgggggcgttttaaaagcgtttataggctatgatcataacgctttgcatgccaaattggctttgactttgggacttgtagatgaatgcgtggaatttgaaaagattttagaatgcgatgtgatttttctggccattccggttgagggcatcattgaatgtttgaaaaaaatgactcctatcaaaaaaggcgcaacgatttat

SEQ ID NO: 1859 - DNA (genomic), 486 bp, Helicobacter pylori; double-stranded, circular
  misc_feature (B) LOCATION 1...486
  hypothetical: NO
  anti-sense: NO
atgtgcgggacagagttttatggccctaaagcgagcgttaaagggctgtatgaaaacgctttggtgatattgtgcgatttagaagattcagggactgaacaagtagagatcgctaaagaaatctttctaggcattaaagcgcgcttgatcaagatgaaatccaacgagcatgacacccatgtagcttatatcagccatttaccccatgttttgagctacgctctagctaacagcgttttaaagcaaaacgacccagagatgattttatccttagcgggtggggggtttagggacatgagccgtttgtctaaaagctcgcctttaatgtggaaggatattttcaaacagaaccgagacaatgtcttagaagcgattgaaaaatgcgaaaaagaaatcgcgcaagctaaggcctggatagaaaataacgattatgagagtctcgcagaatggatggcgcaagcgaacaaactccaggagttcatgtaa

SEQ ID NO: 1860 - DNA (genomic), 591 bp, Helicobacter pylori; double-stranded, circular
  misc_feature (B) LOCATION 1...591
  hypothetical: NO
  anti-sense: NO
ctcctatcaaaaaaggcgcaacgatttattgatttagggggggcaaaagcacaaatccttcacaatatccctaaaagcatccgtcaaaatttcatcgccgcgcaccccatgtgcgggacagagttttatggccctaaagcgagcgttaaagggctgtatgaaaacgctttggtgatattgtgcgatttagaagattcagggactgaacaagtagagatcgctaaagaaatctttctaggcattaaagcgcgcttgatcaagatgaaatccaacgagcatgacacccatgtagcttatatcagccatttaccccatgttttgagctacgctctagctaacagcgttttaaagcaaaacgacccagagatgattttatccttagcgggtggggggtttagggacatgagccgtttgtctaaaagctcgcctttaatgtggaaggatattttcaaacagaaccgagacaatgtcttagaagcgattgaaaaatgcgaaaaagaaatcgcgcaagctaaggcctggatagaaaataacgattatgagagtctcgcagaatggatggcgcaagcgaacaaactccaggagttcatg

SEQ ID NO: 1861 - DNA (genomic), 828 bp, Helicobacter pylori; double-stranded, circular
  misc_feature (B) LOCATION 1...828
  hypothetical: NO
  anti-sense: NO
atgaaagcaggcattattggtttagggcttatgggggggagtttagggctagccttgcaagaatgggggcgttttaaaagcgttataggctatgatcataacgctttgcatgccaaattggctttgactttgggacttgtagatgaatgcgtggaatttgaaaagattttagaatgcgatgtgatttttctggccattccggttgagggcatcattgaatgtttgaaaaaaatgactcctatcaaaaaaagcgcaacgattattgatttagggggggcaaaagcacaaatccttcacaatatccctaaaagcatccgtcaaaatttcatcgccgcgcaccccatgtgcgggacagagttttatggccctaaagcgagcgttaaagggctgtatgaaaacgctttggtgatattgtgcgatttagaagattcagggactgaacaagtagagatcgctaaagaaatctttctaggcattaaagcgcgcttgatcaagatgaaatccaacgagcatgacacccatgtagcttatatcagccatttaccccatgttttgagctacgctctagctaacagcgttttaaagcaaaacgacccagagatgattttatccttagcgggtggggggtttagggacatgagccgtttgtctaaaagctcgcctttaatgtggaaggatattttcaaacagaaccgagacaatgtcttagaagcgattgaaaaatgcgaaaaagaaatcgcgcaagctaaggcctggatagaaaataacgattatgagagtctcgcagaatggatggcgcaagcgaacaaactccaggagttcatgtaa

SEQ ID NO: 1862 - DNA (genomic), 621 bp, Helicobacter pylori; double-stranded, circular
  misc_feature (B) LOCATION 1...621
  hypothetical: NO
  anti-sense: NO
atgctagataatattcctattaccattcaaaaaagtaaaaaaatcaaaaccctgagcttgaatgtcacgccctctttagaagtgattctaaaaatgcctgattcttgccctcaagctagggcgaacgcttttttaaaagaacaagaagcttggctaaaaaaaacccttttagcgatgcaagaaaaacactcgctcttgcgtactaacctagaaaaatataaaaacaaaatccttgtgtttgatgagatgagaaacgccaacgattacaccctaacagatcttaaaaaaatcttaaaaacttatttggagcagaaactccctttgatcgctcaaaaaatgcaaacttcatacacccattttagcattaggaacaacgctaaagttttggggagttgctcctatcataaccgcttgagttttgctcttttactagtttgcgctaaaaaagaagcgattgattatgtcatcatccatgaactcgcccacacgatccacaaaaaccattccaaaaatttctggcgttgcgttcaaatcttttgccctaattaccgcgctctaagagagcgtttaaaacaaagggttgttttttatacccaactgctcaagccattacagccataa

SEQ ID NO: 1863 - DNA (genomic), 675 bp, Helicobacter pylori; double-stranded, circular
  misc_feature (B) LOCATION 1...675
  hypothetical: NO
  anti-sense: NO
acagccttacattctagcgcaaattttagtaaaatacgcatcatgctagataatattcctattaccattcaaaaaagtaaaaaaatcaaaaccctgagcttgaatgtcacgccctctttagaagtgattctaaaaatgcctgattcttgccctcaagctagggcgaacgcttttttaaaagaacaagaagcttggctaaaaaaaacccttttagcgatgcaagaaaaacactcgctcttgcgtactaacctagaaaaatataaaaacaaaatccttgtgtttgatgagatgagaaacgccaacgattacaccctaacagatcttaaaaaaatcttaaaaacttatttggagcagaaactccctttgatcgctcaaaaaatgcaaacttcatacacccattttagcattaggaacaacgctaaagttttggggagttgctcctatcataaccgcttgagttttgctcttttactagtttgcgctaaaaaagaagcgattgattatgtcatcatccatgaactcgcccacacgatccacaaaaaccattccaaaaatttctggcgttgcgttcaaatcttttgccctaattaccgcgctctaagagagcgtttaaaacaaaggggttgttttttatacccaactgctcaagccattacagccataaagattaagcct

SEQ ID NO: 1864 - DNA (genomic), 588 bp, Helicobacter pylori; double-stranded, circular
  misc_feature (B) LOCATION 1...588
  hypothetical: NO
  anti-sense: NO
atgggatacattccttatgtaatagaaaatacagagcgtggcgaacgcagttatgatatttactcacgccttttaaaggatcgcatcgttttattgagcggtgagattaacgatagcgtggcgtcttctatcgtggcccaactcttgtttttggaagccgaagatcctgaaaaagacattggcttgtatatcaattctcccggtggggtgataacgagcggtcttagcatttatgacaccatgaattttatccgccctgatgtttccacgatttgcatcggtcaagcggcttctatgggggcgtttttactaagctgtggggctaagggcaagcgcttttcactgccccattcaaggattatgatccaccagcctttagggggggctcaagggcaagcgagcgatattgaaatcatttctaacgagatccttaggcttaagggtttgatgaattctattttggctcaaaactcagggcagagtttggagcaaatcgctaaagacacggatagggatttttacatgagcgctaaagaagctaaagagtatggcttgattgataaagtgttacagaaaaacgtgaagtga

SEQ ID NO: 1865 - DNA (genomic), 591 bp, Helicobacter pylori; double-stranded, circular
  misc_feature (B) LOCATION 1...591
  hypothetical: NO
  anti-sense: NO
atgatgggatacattccttatgtaatagaaaatacagagcgtggcgaacgcagttatgatatttactcacgccttttaaaggatcgcatcgttttattgagcggtgagattaacgatagcgtggcgtcttctatcgtggcccaactcttgtttttggaagccgaagatcctgaaaaagacattggcttgtatatcaattctcccggtggggtgataacgagcggtcttagcatttatgacaccatgaattttatccgccctgatgtttccacgatttgcatcggtcaagcggcttctatgggggcgtttttactaagctgtggggctaagggcaagcgcttttcactgccccattcaaggattatgatccaccagcctttagggggggctcaagggcaagcgagcgatattgaaatcatttctaacgagatccttaggcttaagggtttgatgaattctattttggctcaaaactcagggcagagtttggagcaaatcgctaaagacacggatagggatttttacatgagcgctaaagaagctaaagagtatggcttgattgataaagtgttacagaaaaacgtgaagtga

SEQ ID NO: 1866 - DNA (genomic), 597 bp, Helicobacter pylori; double-stranded, circular
  misc_feature (B) LOCATION 1...597
  hypothetical: NO
  anti-sense: NO
aagggaaaaatgatgggatacattccttatgtaatagaaaatacagagcgtggcgaacgcagttatgatatttactcacgccttttaaaggatcgcatcgttttattgagcggtgagattaacgatagcgtggcgtcttctatcgtggcccaactcttgtttttggaagccgaagatcctgaaaaagacattggcttgtatatcaattctcccggtggggtgataacgagcggtcttagcatttatgacaccatgaattttatccgccctgatgtttccacgatttgcatcggtcaagcggcttctatgggggcgtttttactaagctgtggggctaagggcaagcgcttttcactgccccattcaaggattatggtccaccagcctttagggggggctcaagggcaagcgagcgatattgaaatcatttctaacgagatccttaggcttaagggtttgatgaattctattttggctcaaaactcagggcagagtttggagcaaatcgctaaagacacggatagggatttttacatgagcgctaaagaagctaaagagtatggcttgattgataaagtgttacagcaaaacgtgaag

SEQ ID NO: 1867 - DNA (genomic), 357 bp, Helicobacter pylori; double-stranded, circular
  misc_feature (B) LOCATION 1...357
  hypothetical: NO
  anti-sense: NO
tgggcgaaaaaggataatgaaagcgttcgttacgcgcaagtgcatttagagagtgaatacgaattcagcaagtatcattttgaagtggcgagcgtggaaaggctgttagaaatgtttaaaaacgcccaagccgaagccttgcattgcttggaaaacaagctccccttaccggcttatgatttggtgatgctatgctcgcattttttcaatattttagacgccagaaaggcgatttcggtggctgaaaggcaaaactatattttacaaatcagggatttagccaaagggtgcgccgttctttataaagagcaagaagaagaaagagaagagcgcctaaaaaacgctctaacaaaggct

SEQ ID NO: 1868 - DNA (genomic), 897 bp, Helicobacter pylori; double-stranded, circular
  misc_feature (B) LOCATION 1...897
  hypothetical: NO
  anti-sense: NO
atgcaagatttttcaagtttattattaaaattacaagagtattggaaagatcaaggctgtttggtgatccagccttatgatattcctgcaggagctgggacattccaccccgccacgcttttaaggagcttggataaaaagccgtggaatgtggcgtatgtcgcgccctctagaaggcccactgatgggcgctatggggaaaaccctaaccgcttggggagttattaccaattccaagtcgttatcaagccaagcccttctaatatccaagaactctatttaaaaagcttggaagtgttagggataaaccttaatgagcatgacatacgatttgtagaagacaattgggagagtccgactttaggggcatgggggcttggctgggaagtgtggcttgatggcatggaggttacgcaattcacttatttccagcaagtggggggcattccttgtagccctatccctgtggaaatcacttacggcttagaaagattaacgatgtatgtccaaaaagtggaaaatatcctagagattgaatgggcgaaaaaggataatgaaagcgttcgttacgcgcaagtgcatttagagagcgaatacgaattcagcaagtatcattttgaagtggcgagcgtggaaaggctgttagaaatgtttaaaaacgcccaagccgaagccttgcattgcttggaaaacaagctccccttaccggcttatgatttggtgatgctatgctcgcattttttcaatattttagacgccagaaaggcgatttcggtggctgaaaggcaaaactatattttacaaatcagggatttagccaaagggtgcgccgttctttataaagagcaagaagaagaaagagaagagcgcctaaaaaacgctctaacaaaggcttaa

SEQ ID NO: 1869 - DNA (genomic), 621 bp, Helicobacter pylori; double-stranded, circular
  misc_feature (B) LOCATION 1...621
  hypothetical: NO
  anti-sense: NO
atgttcagtggtctaatcaatcaaatagctaaagtgaagagtttccacaacaatattttaagcatagagagcaatctcaatcccaagcttggcgacagcattgcgattaatggggcgtgtttgaccgctatagaaagttcaaaaacgcattttagcgtggaattgagccaaaaaacccaaaacagcgtggcgttagaaaattacaaggatttagtccatattgagccagccctaaaagcgaacgctagtttagacgggcattttgtgcaagggcatattgacgctatcggggtcattgaaaaaatcattcacaactctaatcaagtggattttttcatcagcgcttctaaagaaacgcttttgttgtgcgttgagcaaggctctattgccattgatggggtgagcttgactttaagcaaggtagaagaaaaggggttttggctaacgattatcccttacactttagagaataccctttttaagacttataaactcaaacggcgtgtgaatattgaaacggacatgttagtccgcagcgttgcgtctattttgaaaaaaacaaaggggcttgaaaaaaaattctcttggaatgaggccgacgctttgactttagggtattag

SEQ ID NO: 1870 - DNA (genomic), 624 bp, Helicobacter pylori; double-stranded, circular
  misc_feature (B) LOCATION 1...624
  hypothetical: NO
  anti-sense: NO
ttaactatgttcagtggtctaatcaatcaaatagctaaagtgaagagtttccacaacaatattttaagcatagagagcaatctcaatcccaagcttggcgacagcattgcgattaatggggcgtgtttgaccgctatagaaagttcaaaaacgcattttagcgtggaattgagccaaaaaacccaaaacagcgtggcgttagaaaattacaaggatttagtccatattgagccagccctaaaagcgaacgctagtttagacgggcattttgtgcaagggcatattgacgctatcggggtcattgaaaaaatcattcacaactctaatcaagtggattttttcatcagcgcttctaaagaaacgcttttgttgtgcgttgagcaaggctctattgccattgatggggtgagcttgactttaagcaaggtagaagaaaaggggttttggctaacgattatcccttacactttagagaataccctttttaagacttataaactcaaacggcgtgtgaatattgaaacggacatgttagtccgcagcgttgcgtctattttgaaaaaaacaaaggggcttgaaaaaaaattctcttggaatgaggccgacgctttgactttagggtat

SEQ ID NO: 1871 - DNA (genomic), 924 bp, Helicobacter pylori; double-stranded, circular
  misc_feature (B) LOCATION 1...924
  hypothetical: NO
  anti-sense: NO
atggctaaaaagaaaattgcgatcagctgtggggatattcaaggcgtaggcttagaattgatcttaaaaagccataaggaagtgagtgcactttgtgagccgttgtatctcgttcatagcgaacttctagaacgagccaatcaattgcttgataacgcttatgaaactaaaacgcttaatgcgatcgctattgatgcccctttacccttattaaactctagcacgataggcaaagtcagcactcaaagcggggcgtatagctttgagagttttaaaaaggcttgcgagttggcggatagtaaagaagtggatggcatttgcactttgcctatcaacaaactcgcatggcaacaagctcaaatcccttttgtggggcataccgattttttgaaacaacgctacaaagatcatcaaattattatgatgcttgggtgttcaaaactctttgtggggctatttagcgaccatgtgcctttaagcgcggtttctcaactcattcaagtgaaagcgttagttaagtttttattagcgtttcaaaaaagcactcaagccaaaatcgttcaagtgtgtggtttcaacccccatgcgggcgaagagggattgtttggggaagaagatgaaaagattttaaaagccattcaagagagcaaccaaacgctaggttttgaatgctttttggggccactgcccgctgatagcgcttttgcccccaataaacgcaaaataacccccttttatgtgagcatgagccatgatgtagggctagcccctttaaaagcgctctattttgatgaaagcatcaatgtgagtttgaacgctcccattttacgcgcttccactgaccacggcacggcgtttgatattgcttatcaaaataaggcgaaccataaaagctatttgaacgcgatcaaatacttggcttaa

SEQ ID NO: 1872 - DNA (genomic), 924 bp, Helicobacter pylori; double-stranded, circular; identical to SEQ ID NO: 1871
  misc_feature (B) LOCATION 1...924
  hypothetical: NO
  anti-sense: NO

SEQ ID NO: 1873 - DNA (genomic), 948 bp, Helicobacter pylori; double-stranded, circular
  misc_feature (B) LOCATION 1...948
  hypothetical: NO
  anti-sense: NO
aaatggcgcaactcatcaagcgataaaatggctaaaaagaaaattgcgatcagctgtggggatattcaaggcgtaggcttagaattgatcttaaaaagccataaggaagtgagtgcactttgtgagccgttgtatctcgttcatagcgaacttctagaacgagccaatcaattgcttgataacgcttatgaaactaaaacgcttaatgcgatcgctattgatgcccctttacccttattaaactctagcacgataggcaaagtcagcactcaaagcggggcgtatagctttgagagttttaaaaaggcttgcgagttggcggatagtaaagaagtggatggcatttgcactttgcctatcaacaaactcgcatggcaacaagctcaaatcccttttgtggggcataccgattttttgaaacaacgctacaaagatcatcaaattattatgatgcttgggtgttcaaaactctttgtggggctatttagcgaccatgtgcctttaagcgcggtttctcaactcattcaagtgaaagcgttagttaagtttttattagcgtttcaaaaaagcactcaagccaaaatcgttcaagtgtgtggtttcaacccccatgcgggcgaagagggattgtttggggaagaagatgaaaagattttaaaagccattcaagagagcaaccaaacgctaggttttgaatgctttttggggccactgcccgctgatagcgcttttgcccccaataaacgcaaaataacccccttttatgtgagcatgagccatgatgtagggctagcccctttaaaagcgctctattttgatgaaagcatcaatgtgagtttgaacgctcccattttacgcgcttccactgaccacggcacggcgtttgatattgcttatcaaaataaggcgaaccataaaagctatttgaacgcgatcaaatacttggct

SEQ ID NO: 1874 - DNA (genomic), 348 bp, Helicobacter pylori; double-stranded, circular
  misc_feature (B) LOCATION 1...348
  hypothetical: NO
  anti-sense: NO
tcccaagatttgcttttagacattgaaatagcgccatgcgagattgtgcgcgatagcgataatctggctttaagctctaagaatgtgtatttgaatgccacagaaagaaaacaagccctagcgatcccaaaagctttagaaaaaatccagcaagccatagataggggcgaaaaagcgtgcgaaaaactgaaaaaactagggcttgaaattttaaaaaatttagaagtggattatttggaatgttgtaaccacaagctagagcctttaaaaaccatagagccggctaacacgctggttttggtggcggctcgtgtgggtaaaaccaggcttttagataatttgtgggtg

SEQ ID NO: 1875 - DNA (genomic), 537 bp, Helicobacter pylori; double-stranded, circular
  misc_feature (B) LOCATION 1...537
  hypothetical: NO
  anti-sense: NO
agaaatggttttagagcttttaaaggattgttaatgcgggcgttagaaacgattgctactttaagagaatatcgtataagtttgaaagatagcgtggggtatgtgccgactatgggggctttacacagagggcatcaaagcttgatagaaaggagtttgaaagaaaattcccacacgattgtaagcgtttttgtcaaccccacgcaatttggggctaacgaggattttagcgcttacccgcgccctttggaaaaggatttggctttgtgtgaaaaatcaggcgttaatgcggtgtttgcgcctaaaattggcgaaatgtatccctatgaagcaaagcaacgcctaaaactctacgcccctgcatttttatcccactctttagagggggcggtgcgtaaggggcattttgatggggttgttcaggtcgtgttaagattgttccatcttactaatcccactagagcgtattttggcaaaaaggacgcccaacagcttttaatcatccatcatttaatcccaagatttgcttttagacat

SEQ ID NO: 1876 - DNA (genomic), 837 bp, Helicobacter pylori; double-stranded, circular
  misc_feature (B) LOCATION 1...837
  hypothetical: NO
  anti-sense: NO
ttgttaatgcgggcgttagaaacgattgctactttaagagaatatcgtaaaagtttgaaagaaagcgtggggtttgtgccgactatgggggctttacacagagggcatcaaagcttgatagaaaggagtttgaaagaaaattcccacacgattgtaagcgtttttgtcaaccccacgcaatttggggctaacgaggattttagcgcttacccgcgccctttggaaaaggatttggctttgtgtgaaaaatcaggcgttaatgcggtgtttgcgcctaaaattggcgaaatgtatccctatgaagcaaagcaacgcctaaaactctacgcccctgcatttttatcccactctttagagggggcggtgcgtaaggggcattttgatggggttgttcaggtcgtgttaagattgttccatcttactaatcccactagagcgtattttggcaaaaaggacgcccaacagcttttaatcatccagcatttagtccaagatttgcttttagacattgaaatagcgccatgcgagattgtgcgcgatagcgataatctggctttaagctctaggaatgtgtgtttgaatgccacagaaagaaaacaagccctagcgatcccaaaagctttagaaaaaatccagcaagccatagataggggcgaaaaagcgtgcgaaaaactgaaaaaactagggcttgaaattttaaaaaatttagaagtggattatttggaatgttgtaaccacaagctagagcctttaaaaaccatagagccggctaacacgctggttttggtggcggctcgtgtgggtaaaaccaggcttttagataatttgtgggtgtag

SEQ ID NO: 1877 - DNA (genomic), 228 bp, Helicobacter pylori; double-stranded, circular
  misc_feature (B) LOCATION 1...228
  hypothetical: NO
  anti-sense: NO
gcgatcattataggggggactccgcattttgactacgtgagcgcggaaacgactcaaggcattgctagtgcgatgctaaaatacagcatgccggtaagctttggcgtgctgaccacagacaatattgaacaagcgattgaaagagcgggcagtaaagccggtaataagggctttgaagcgatgagcaccctcattgaattattgagcttgtgccaaactctcaaggat

SEQ ID NO: 1878 - DNA (genomic), 471 bp, Helicobacter pylori; double-stranded, circular
  misc_feature (B) LOCATION 1...471
  hypothetical: NO
  anti-sense: NO
atgcaaatcatagaagggaaattgcaattacaagggaatgaaaaaatcgctattttaacatcgcgcttcaaccatatcatcacagacagattaaaagaaggggcgatggattgctttaaaaggcatgggggcgatgaggagcttttagatctcgtgctagtgcctggggcttatgaattgcctttgattttagacaaattgttagagagcggaaaatacgatggcgtgtgcgttttaggagcgatcattagaggggggactccgcattttgactacgtgagcgcggaagcgactaagggcattgctagtgcgatgctaaaatacagcatgccggtaagctttggcgtgctgaccacagacaatattgaacaagcgattgaaagagcgggcagtaaagccggtaataagggctttgaagcgatgagcaccctcattgaattattgagcttgtgccaaactctcaaggattaa

SEQ ID NO: 1879 - DNA (genomic), 789 bp, Helicobacter pylori; double-stranded, circular
  misc_feature (B) LOCATION 1...789
  hypothetical: NO
  anti-sense: NO
atgcgttttggattgaatattgatcacattgttactttaagggaagtgagaaagacttatgagcctgagattttagaggctctgtttatcgctaaaaacacccataaagtggatttaatcaccatccatttaagagaagacaaacggcacattcaaaatgaagacgttttgaggttgcttgaaataagccccttgcctatcaacattgaatgctctatcaatgctgaaatcactgattttttatgctctttgaaaaataagccgagtaaggttaccatcgtgcctgaaaacagaaatgaggttacgacagaggggggattggattgctcactaaagggtttagaagaggtgattagagcgtatcacaataaaggcattgaagtgtctttgtttgttgatcctttaaaagacgctctgcattttgcaaaggagcatcaagtcaagcaggtggagttccacactggggtgtatgcgaatttgcacaacgctttatattctaacgctaacaatcaaatccatgccattagcacgctcaaagacaaatgccccaaagaattgaaagaagaattgcacaacgcctttttgcaattaaggagaatgagcaaagaagcattttttatgggtattgtggtgtgcgctgggcatgggttgaattattctaacgtgaaagaattgctaaaaatcccctctttaagagagcttaatattgggcatagcgtggtttcaaaagcggttttagtgggtttagaaaaagcgattttagaaatggcgcaactcatcaagcgataa

SEQ ID NO: 1880 - DNA (genomic), 786 bp, Helicobacter pylori; double-stranded, circular
  misc_feature (B) LOCATION 1...786
  hypothetical: NO
  anti-sense: NO
ccatgcgttgggttgaatattgatcacattgttactttaagggaagtgagaaagacttatgagcctgagattttagaggctctgtttatcgctaaaaacacccataaagtggatttaatcaccatccatttaagagaagacaaacggcacattcaaaatgaagacgttttgaggttgcttgaaataagccccttgcctatcaacattgaatgctctatcaatgctgaaatcactgattttttatgctctttgaaaaataagccgagtaaggttaccatcgtgcctgaaaacagaaatgaggttacgacagaggggggattggattgctcactaaagggtttagaagaggtgattagagcgtatcacaataaaggcattgaagtgtctttgtttgttgatcctttaaaagacgctctgcattttgcaaaggagcatcaagtcaagcaggtggagttccacactggggtgtatgcgaatttgcacaacgctttatattctaacgctaacaatcaaatccatgccattagcacgctcaaagacaaatgccccaaagaattgaaagaagaattgcacaacgcctttttgcaattaaggagaatgagcaaagaagcattttttatgggtattgtggtgtgcgctgggcatgggttgaattattctaacgtgaaagaattgctaaaaatcccctctttaagagagcttaatattgggcatagcgtggtttcaaaagcggttttagtgggtttagaaaaagcgattttagaaatggcgcaactcatcaagcga

SEQ ID NO: 1881 - DNA (genomic), 120 bp, Helicobacter pylori; double-stranded, circular
  misc_feature (B) LOCATION 1...120
  hypothetical: NO
  anti-sense: NO
atgaaagtggaaatcgtggatgtcaataacggcgaacgcttcagcacctatgtgattttagggaaaaaaaagggcaaaaattggtgtcaatggtgcagcatgccagaaaggtggccatag

SEQ ID NO: 1882 - DNA (genomic), 168 bp, Helicobacter pylori; double-stranded, circular
  misc_feature (B) LOCATION 1...168
  hypothetical: NO
  anti-sense: NO
ggaaaaaaaagggcaaaaattggtgtcaatggtgcagcagccagaaaggtggccataggcgatgtggtgatcattttagcttatgcgagcatgaatgaagatgaaatcaatacgcacaagccaagcattgtgctagtggatgaaaaaaacgaaattttagaaaagggt

SEQ ID NO: 1883 - DNA (genomic), 243 bp, Helicobacter pylori; double-stranded, circular
  misc_feature (B) LOCATION 1...243
  hypothetical: NO
  anti-sense: NO
atgacttttgaaatgctttatagtaaaatccatagggcgactatcacagacgctaatctcaactatataggctcgatcaccatagatgaggatttagccaagctcgctaagctcagagagggcatgaaagtggaaatcgtggatgtcaataacggcgaacgcttcagcacctatgtgattttagggaaaaaaaagggcaaaaattggtgtcaatggtgcagcatgccagaaaggtggccatag

SEQ ID NO: 1884 - DNA (genomic), 267 bp, Helicobacter pylori; double-stranded, circular
  misc_feature (B) LOCATION 1...267
  hypothetical: NO
  anti-sense: NO
tcgaaaactatatatgcccatagggcgactatcacagacgctgatctcaactatataggctcgatcaccatagatgaggatttagccaagctcgctaagctcagagagggcatgaaagtggaaatcgtggatgtcaataacggcgaacgcttcagcacctatgtgattttagggaaaaaaaagggcaaaaattggtgtcaatggtgcagcagccagaaaggtggccataggcgatgtggtgatcattttagcttatgcgagcatgaa

SEQ ID NO: 1885 - DNA (genomic), 264 bp, Helicobacter pylori; double-stranded, circular
  misc_feature (B) LOCATION 1...264
  hypothetical: NO
  anti-sense: NO
aaaactatatatgcccatagggcgactatcacagacgctgatctcaactatataggctcgatcaccatagatgaggatttagccaagctcgctaagctcagagagggcatgaaagtggaaatcgtggatgtcaataacggcgaacgcttcagcacctatgtgattttagggaaaaaaaagggcaaaaattggtgtcaatggtgcagcagccagaaaggtggccataggcgatgtggtgatcattttagcttatgcgagcatgaa

SEQ ID NO: 1886 - DNA (genomic), 354 bp, Helicobacter pylori; double-stranded, circular
  misc_feature (B) LOCATION 1...354
  hypothetical: NO
  anti-sense: NO
atgacttttgaaatgctttatagtaaaatccatagggcgactatcacagacgctaatctcaactatataggctcgatcaccatagatgaggatttagccaagctcgctaagctcagagagggcatgaaagtggaaatcgtggatgtcaataacggcgaacgcttcagcacctatgtgattttagggaaaaaaaggggcaaaatttgtgtcaatggtgcagcagccagaaaggtggccataggcgatgtggtgatcattttagcttatgcgagcatgaatgaagatgaaatcaatacgcacaagccaagcattgtgctagtggatgaaaaaaacgaaattttagaaaagggttag

SEQ ID NO: 1887 - DNA (genomic), 657 bp, Helicobacter pylori; double-stranded, circular
  misc_feature (B) LOCATION 1...657
  hypothetical: NO
  anti-sense: NO
atgctctttatcagcgcgactaacaccaatgctggaaaaaccacatgcgctaggctattagcccaatattgcaacgcttgtggcgttaaaacgattttattaaaacccattgaaacgggcgttaatgacgccattaaccactctagcgatgcgcacctattcttacaggataaccgccttttagatcgctctttaaccttaaaagacatttcattctatcgttatcataaagcttcagcccctctcatcgcccaacaagaagaagatccaaacgcccccattgatacggacaatttaacccaacgccttcacaatttcaccaaaacttacgatttagtcatcgttgaaggggctggagggttatgcgtgcctatcactttagaagaaaacatgttggattttgccctaaaattaaaagccaaaatgcttttgattagccatgataatttgggcttgattaatgattgtttgttgaatgactttttattgaaatcctaccaattagattataaaatcgctatcaatttgagaggaaacaacaccgctttttacagcgtgagcttgccctatattgagctttttaataaacgctccaataaccccattgtgattttccaacaaagcctaaaagaattaatgagctttgcccttaaataa

SEQ ID NO: 1888 - DNA (genomic), 657 bp, Helicobacter pylori; double-stranded, circular
  misc_feature (B) LOCATION 1...657
  hypothetical: NO
  anti-sense: NO
accatgctctttatcagcgcgactaacaccaatgctggaaaaaccacatgcgctaggctattagcccaatattgcaacgcttgtggcgttaaaacgattttattaaaacccattgaaacgggcgttaatgacgccattaaccactctagcgatgcgcacctattcttacaggataaccgccttttagatcgctctttaaccttaaaagacatttcattctatcgttatcataaagcttcagcccctctcatcgcccaacaagaagaagatccaaacgcccccattgatacggacaatttaacccaacgccttcacaatttcaccaaaacttacgatttagtcatcgttgaaggggctggagggttatgcgtgcctatcactttagaagaaaacatgttggattttgccctaaaattaaaagccaaaatgcttttgattagccatgataatttgggcttgattaatgattgtttgttgaatgactttttattgaaatcctaccaattagattataaaatcgctatcaatttgagaggaaacaacaccgctttttacagcgtgagcttgccctatattgagctttttaataaacgctccaataaccccattgtgattttccaacaaagcctaaaagaattaatgagctttgcccttaaa

SEQ ID NO: 1889 - DNA (genomic), 276 bp, Helicobacter pylori; double-stranded, circular
  misc_feature (B) LOCATION 1...276
  hypothetical: NO
  anti-sense: NO
gtgtgtttagggctagctgatgtgatggtggttttaagcttgcacctcaacctaaaccccaccaaccctaaatggctcaatagggacaggttggtttttagcggagggcatgcgagcgcgttagtgtatagtttgttgcatttgtggggctttgatttgagtttagacgatttaaagcgtttcaggcaattacactctaaaaccccaggacaccctgaattacaccacaccgaaggcattgaaatcaccacascctttagggcaaggttttgctaa

SEQ ID NO: 1890 - DNA (genomic), 1926 bp, Helicobacter pylori; double-stranded, circular
  misc_feature (B) LOCATION 1...1926
  hypothetical: NO
  anti-sense: NO
atgcaattgagtaacgctgatttagaacgattaaaaagcatggcgaacacgcttcgctttttgtgtgcggacatgatagataaggctaatagcgggcatccaggcgtgtgtttagggctagctgatgtgatggtggttttaagcttgcacctcaacctaaaccccaccaaccctaaatggctcaatagggacaggttggtttttagcggagggcatgcgagcgcgttagtgtatagtttgttgcatttgtggggctttgatttgagtttagacgatttaaagcgtttcaggcaattacactctaaaaccccaggacaccctgaattacaccacaccgaaggcattgaaatcaccacagcgcctttagggcaaggttttgctaacgctgtaggctttagcatggcgagccaatacgctcaaacccttttagataaagaggcgatttctcataaagtctattgcttgtgtggggatggggatttgcaagaaggcattagttatgagagcacttctttagccgggcaccttcgccttgataatctcattgtgatttatgacagcaaccagatcagcattgaaggcgctattaatattagttttagcgaacaggttaaaacacgctttttagcgcaaaattgggaagtgctagaatgcgatgggcatgactatcaagcgattcataacgctttagaagaagccaaaaaatcccataaacccacgcttttaatcgctcatacgatcattggtaagggggctattggcttagaggggagtgaaaaaacgcatggctcgcctttaagtaaagaagtgttgaaacaatccaaagaaaacgctcaaatcaatcctaacgaaagctttataattagcccaaaaaacaaaatgcattttgaagaagtgaaagttaggggtattagtttagaagccttatgggaaaagtccttaagccctaaaacaaaagaaaagatccatgcgttaaagaattttgattttaacgccattaattaccccgcctttaaaaaaggcgaatctctagccacgagagtgagtaacggcatgattttaaacgctatcgctaaagaatgcgagggctttttaggagggagtgcggatttagccccatccaataacacgcatttgaaacactctggcgatttccctttagggcaaaacctgcattttgggatcagggagcatgccatgggggctatcactaacgctttagcggcgtatggcttgtttgtgcctttttgcgcgaccttttttgtgtttagcgattatttaatgcctagcattcgtttgagcgctttaatgaaattaaaagccctttttatcttcacgcatgacagcattggggtgggcgaagacggggcgacgcaccagcccatagagcaattgagccatttacgagccttgccgcatttctatgctttcaggcctagcgatgcttttgaaaataaggcttgcatgcaagtggcattaagtttgaacgcccctagcgctcttattttatcgcgccagaatttgtccgtgcttgatgaggtttctaaagagcaggttctaaaaggggcgtatgttaaacaccactctaaagatcccattatcacgcttgttgcgagcgggagcgaagtctctttagctttagagagcgctaagattttagagcgagaaaatattcccactcaagtagtgagcgcgccatgctttgacttgttggtagagcaagatgaaagctattttaaagaactctttaagggtaaagtcttagtgattgaagcgagccgcgcgatagagtggtatcgttttgcggataaaatcattggcatggattcttttgggagctcagcaaagggcgataaactctttgaaaaatttggctttagcgttgaaaacattaccgctcaagcgaaaaggttactcaacgcatga

SEQ ID NO: 1891 - DNA (genomic), 1929 bp, Helicobacter pylori; double-stranded, circular
  misc_feature (B) LOCATION 1...1929
  hypothetical: NO
  anti-sense: NO
ttgatgcaattgagtaacgctgatttagaacgattaaaaagcatggcgaacacgcttcgctttttgtgtgcggacatgatagataaggctaatagcgggcatccaggcgtgtgtttagggctagctgatgtgatggtggttttaagcttgcacctcaacctaaaccccaccaaccctaaatggctcaatagggacaggttggtttttagcggagggcatgcgagcgcgttagtgtatagtttgttgcatttgtggggctttgatttgagtttagacgatttaaagcgtttcaggcaattacactctaaaaccccaggacaccctgaattacaccacaccgaaggcattgaaatcaccacagcgcctttagggcaaggttttgctaacgctgtaggctttagcatggcgagccaatacgctcaaacccttttagataaagaggcgatttctcataaagtctattgcttgtgtggggatggggatttgcaagaaggcattagttatgagagcacttctttagccgggcaccttcgccttgataatctcattgtgatttatgacagcaaccagatcagcattgaaggcgctattaatattagttttagcgaacaggttaaaacacgctttttagcgcaaaattgggaagtgctagaatgcgatgggcatgactatcaagcgattcataacgctttagaagaagccaaaaaatcccataaacccacgcttttaatcgctcatacgatcattggtaagggggctattggcttagaggggagtgaaaaaacgcatggctcgcctttaagtaaagaagtgttgaaacaatccaaagaaaacgctcaaatcaatcctaacgaaagctttataattagcccaaaaaacaaaatgcattttgaagaagtgaaagttaggggtattagtttagaagccttatgggaaaagtccttaagccctaaaacaaaagaaaagatccatgcgttaaagaattttgattttaacgccattaattaccccgcctttaaaaaaggcgaatctctagccacgagagtgagtaacggcatgattttaaacgctatcgctaaagaatgcgagggctttttaggagggagtgcggatttagccccatccaataacacgcatttgaaacactctggcgatttccctttagggcaaaacctgcattttgggatcagggagcatgccatgggggctatcactaacgctttagcggcgtatggcttgtttgtgcctttttgcgcgaccttttttgtgtttagcgattatttaatgcctagcattcgtttgagcgctttaatgaaattaaaagccctttttatcttcacgcatgacagcattggggtgggcgaagacggggcgacgcaccagcccatagagcaattgagccatttacgagccttgccgcatttctatgctttcaggcctagcgatgcttttgaaaataaggcttgcatgcaagtggcattaagtttgaacgcccctagcgctcttattttatcgcgccagaatttgtccgtgcttgatgaggtttctaaagagcaggttctaaaaggggcgtatgttaaacaccactctaaagatcccattatcacgcttgttgcgagcgggagcgaagtctctttagctttagagagcgctaagattttagagcgagaaaatattcccactcaagtagtgagcgcgccatgctttgacttgttggtagagcaagatgaaagctattttaaagaactctttaagggtaaagtcttagtgattgaagcgagccgcgcgatagagtggtatcgttttgcggataaaatcattggcatggattcttttgggagctcagcaaagggcgataaactctttgaaaaatttggctttagcgttgaaaacattaccgctcaagcgaaaaggttactcaacgcatga

SEQ ID NO: 1892 - DNA (genomic), 1938 bp, Helicobacter pylori; double-stranded, circular
  misc_feature (B) LOCATION 1...1938
  hypothetical: NO
  anti-sense: NO
aaatggaaaaatttgatgcaattgagtaacgctgatttagaacgattaaaaagcatggcgaacacgcttcgctttttgtgtgcggacatgatagataaggctaatagcgggcatccaggcgtgtgtttagggctagctgatgtgatggtggttttaagcttgcacctcaacctaaaccccaccaaccctaaatggctcaatagggacaggttggtttttagcggagggcatgcgagcgcgttagtgtatagtttgttgcatttgtggggctttgatttgagtttagacgatttaaagcgtttcaggcaattacactctaaaaccccaggacaccctgaattacaccacaccgaaggcattgaaatcaccacagcgcctttagggcaaggttttgctaacgctgtaggctttagcatggcgagccaatacgctcaaacccttttagataaagaggcgatttctcataaagtctattgcttgtgtggggatggggatttgcaagaaggcattagttatgagagcacttctttagccgggcaccttcgccttgataatctcattgtgatttatgacagcaaccagatcagcattgaaggcgctattaatattagttttagcgaacaggttaaaacacgctttttagcgcaaaattgggaagtgctagaatgcgatgggcatgactatcaagcgattcataacgctttagaagaagccaaaaaatcccataaacccacgcttttaatcgctcatacgatcattggtaagggggctattggcttagaggggagtgaaaaaacgcatggctcgcctttaagtaaagaagtgttgaaacaatccaaagaaaacgctcaaatcaatcctaacgaaagctttataattagcccaaaaaacaaaatgcattttgaagaagtgaaagttaggggtattagtttagaagccttatgggaaaagtccttaagccctaaaacaaaagaaaagatccatgcgttaaagaattttgattttaacgccattaattaccccgcctttaaaaaaggcgaatctctagccacgagagtgagtaacggcatgattttaaacgctatcgctaaagaatgcgagggctttttaggagggagtgcggatttagccccatccaataacacgcatttgaaacactctggcgatttccctttagggcaaaacctgcattttgggatcagggagcatgccatgggggctatcactaacgctttagcggcgtatggcttgtttgtgcctttttgcgcgaccttttttgtgtttagcgattatttaatgcctagcattcgtttgagcgctttaatgaaattaaaagccctttttatcttcacgcatgacagcattggggtgggcgaagacggggcgacgcaccagcccatagagcaattgagccatttacgagccttgccgcatttctatgctttcaggcctagcgatgcttttgaaaataaggcttgcatgcaagtggcattaagtttgaacgcccctagcgctcttattttatcgcgccagaatttgtccgtgcttgatgaggtttctaaagagcaggttctaaaaggggcgtatgttaaacaccactctaaagatcccattatcacgcttgttgcgagcgggagcgaagtctctttagctttagagagcgctaagattttagagcgagaaaatattcccactcaagtagtgagcgcgccatgctttgacttgttggtagagcaagatgaaagctattttaaagaactctttaagggtaaagtcttagtgattgaagcgagccgcgcgatagagtggtatcgttttgcggataaaatcattggcatggattcttttgggagctcagcaaagggcgataaactctttgaaaaatttggctttagcgttgaaaacattaccgctcaagcgaaaaggttactcaacgca

SEQ ID NO: 1893 - DNA (genomic), 312 bp, Helicobacter pylori; double-stranded, circular
  misc_feature (B) LOCATION 1...312
  hypothetical: NO
  anti-sense: NO
gatttttcaatgagcatgcaaaccgccccaattaaaaaaatcatccttagtcacctccaagctaaaaaaaatcaagaaaaaatcatcgccattaccgcttatgacgccctattcgctcaaatatttgatccgctagtggatgtgattttagtgggcgatagtttgaatatgagttttttcaatcaaaacgacactttaagcgcgagtgttaaaatgatgctctatcacactaaagccgtgtgcgcgggcgctaatactccttttatcatcacagacatgccctttggagactgtgaagattacattcagccc

SEQ ID NO: 1894 - DNA (genomic), 459 bp, Helicobacter pylori; double-stranded, circular
  misc_feature (B) LOCATION 1...459
  hypothetical: NO
  anti-sense: NO
atgagcatgcaaaccgccccaattaaaaaaatcacccttagtcacctccaagctaaaaaaaatcaagaaaaaatcatcgccattaccgcttatgacgccctattcgctcaaatatttgatccgctagtggatgtgattttagtgggcgatagtttgaatatgagtttattcaatcaaaacgacactttaagcgcgagtgtaaaaatgatgctctatcacactaaaaccgtgtgcgcgggcgctaagattccttttatcatcacagacatgccctttggaagctataaagatgaaaaaacagccctaaaaaacgccatcagggtttataaagaaacccaagcgagcgcgatcaaactagagggggggaaagaaaaagcgaaactggttaaaacgctcactgatgagggcgttatcgtggtagggcatattggcttgatgcctcaattcgtgcgttcttga

SEQ ID NO: 1895 - DNA (genomic), 294 bp, Helicobacter pylori; double-stranded, circular
  misc_feature (B) LOCATION 1...294
  hypothetical: NO
  anti-sense: NO
ttgagtttagaagaagctggagtgggtttgttggttttagagggtataaccacccctatcgctcaaacaatcacgcaaaaaatcaaaatccccacgatcggcatagggagcggcaaggattgcgacgggcagattttagtgtggagcgatatgttaggcttttttgatagttttaagcctaaattcgtgcgagaataccttaaagggaaagaattgattcaaaacgcgattcaacaatacgctgacgatgtgaaaaagggaaacttccctaacgaattagaaagttatcattaa

SEQ ID NO: 1896 - DNA (genomic), 639 bp, Helicobacter pylori; double-stranded, circular
  misc_feature (B) LOCATION 1...639
  hypothetical: NO
  anti-sense: NO
ccacgagcgagtcgcttcctttaccaaagttcgctcaaaaaatcggctcggaatgcgattttatccttaagcccttattataaccgccccacccaacaaggcttgtttgaacattataaaactatcgctcaatcggtggaaatccctgtcatgctttatgatgtgccaagccgaacgggcgtgtctattgaagtcccaaccgccctcaaactctttagggaagtccctaacattaaagccattaaggaagcgtctggctctttgaaaagagtcacagaattgcattactatgaaaaagattttaaaatttttagcggggaagattcgctcaaccactctatcatgttttcaggggggtgtggcgtgatttcagtgaccggtaatttaatgcccaatttgatttcacaaatggtcaattgcgcgctcaaatttgaataccaacaagccctagaaatccaaaataagcttttgatttgcatcaaagccctttttgtggaaacgaaccctatccctattaaaatggccatgcatttagccggcttgattgaaaacccaagttacagactgcctttagtggctccaagcaaagaaacgatcaaacttttagaaaaaaccctacaacaatatgaggtaattgca

SEQ ID NO: 1897 - DNA (genomic), 636 bp, Helicobacter pylori; double-stranded, circular
  misc_feature (B) LOCATION 1...636
  hypothetical: NO
  anti-sense: NO
cgagcgagtcgcttcctttaccaaagttcgctcaaaaaatcggctcggaatgcgattttatccttaagcccttattataaccgccccacccaacaaggcttgtttgaacattataaaactatcgctcaatcggtggaaatccctgtcatgctttatgatgtgccaagccgaacgggcgtgtctattgaagtcccaaccgccctcaaactctttagggaagtccctaacattaaagccattaaggaagcgtctggctctttgaaaagagtcacagaattgcattactatgaaaaagattttaaaatttttagcggggaagattcgctcaaccactctatcatgttttcaggggggtgtggcgtgatttcagtgaccggtaatttaatgcccaatttgatttcacaaatggtcaattgcgcgctcaaatttgaataccaacaagccctagaaatccaaaataagcttttgatttgcatcaaagccctttttgtggaaacgaaccctatccctattaaaatggccatgcatttagccggcttgattgaaaacccaagttacagactgcctttagtggctccaagcaaagaaacgatcaaacttttagaaaaaaccctacaacaatatgaggtaattgca

SEQ ID NO: 1898 - DNA (genomic), 903 bp, Helicobacter pylori; double-stranded, circular
  misc_feature (B) LOCATION 1...903
  hypothetical: NO
  anti-sense: NO
atgcaatttcattcatctagtgcgttaattacgccttttaaaaaagatttgagcgttgatgaggccgcttatgaaaccttgatcaagcgccaaatttttcagggcatggacgcatgcgtgcctgttggcacgacaggagaatccgccacgctcacccataaagaacatatgcgttgcattgaaatcgccatagagacttgcaaaagcactaaaacgccttccaattcacgcatgaaagtgttagccggcgtgggcagtaacgccacgagcgagtcgctttctttagcaaagttcgctcaaaaaatcggcgcggatgcgattttatgcgtaagcccttattataaccgccccacccaacaaggcttgtttgaacattataaaactatcgctcaatcggtggaaatccctgtcatgctttatgatgtgccaagccgaacgggcgtgtctattgaagtcccaaccgccctcaaactctttagggaagtccctaacattaaagccattaaggaagcgtctggctctttgaaaagagtcacagaattgcattactatgaaaaagattttaaaatttttagcggggaagattcgctcaaccactctatcatgttttcaggggggtgtggcgtgatttcagtgaccggtaatttaatgcccaatttgatttcacaaatggtcaattgcgcgctcaaatttgaataccaacaagccctagaaatccaaaataagctttttgatttgcatcaagccctttttgtggaaacgaaccctatccctattaaaatggccatgcatttagccggcttgattgaaaacccaagttacagactgcctttagtggctccaagcaaagaaacgatcaaacttttagaaaaaaccctacaacaatatgaggtaattgcatga

SEQ ID NO: 1899 - DNA (genomic), 288 bp, Helicobacter pylori; double-stranded, circular
  misc_feature (B) LOCATION 1...288
  hypothetical: NO
  anti-sense: NO
aggacagaaatggcgcacattttagttagcggagcgacttcagggtttgggctagaaatcgctaaggcgtttttacaaaaaaaccatgtggtttttggcacagggaggcggcaagagaatttacaaaaattgcagctcgcttaccctaagcgtttcattcccctgtgttttgatcttcaaaacaagcctgaaactaagcgagcgatagaaactattttttccatgacggatcgcattgacgctttaatcaataacgccggcttagcgctagggcttgaacaaggctta

SEQ ID NO: 1900 - DNA (genomic), 489 bp, Helicobacter pylori; double-stranded, circular
  misc_feature (B) LOCATION 1...489
  hypothetical: NO
  anti-sense: NO
ggcttgaacaaggcttatgaatgcgagttagacgactgggaagtcatgatagacacgaatatcaaggggttgttgcatctcacccgcttgatcttgccctctatgatagagcatgaccaagggactatcatcaatcttggttctatcgctggcacttacgcctatcctggagggaatgtctatggagcgagcaaggcgtttgtgaaacaattttctttaaatttgcgagcggatttggctggcactaacattagagtgagtaatgttgaacccggtttgtgtggcgaaaccgaattcagcatggtgcgttttaaaggcgataaaatcaaagcccaatccgtctatgaaaacaccctttacctcaaaccacaagacattgctaacatcgtgactaggatttacgaacaaccctcgcatgtcaatatcaaccgcatagaaatcatgcccacaagccaaactttcgctcccctacccacccataaaaaccct

SEQ ID NO: 1901 - DNA (genomic), 696 bp, Helicobacter pylori; double-stranded, circular
  misc_feature (B) LOCATION 1...696
  hypothetical: NO
  anti-sense: NO
atggcgcacattttagttagcggagcgacttcagggtttgggctagaaatcgctaaggcgtttttacaaaaaaaccatgtggtttttggcacagggaggcggcaagagaatttacaaaaattgcagctcgcttaccctaagcgtttcattcccctgtgttttgatcttcaaaacaagcctgaaactaagcgagcgatagaaactattttttccatgacggatcgcattgacgctttaatcaataacgccggcttagcgctaggcttgaacaaggcttatgaatgcgagttagacgactgggaagtcatgatagacacgaatatcaaggggttgttgcatctcacccgcttgatcttgccctctatgatagagcatgaccaagggactatcatcaatcttggttctatcgctggcacttacgcctatcctggagggaatgtctatggagcgagcaaggcgtttgtgaaacaattttctttaaatttgcgagcggatttggctggcactaacattagagtgagtaatgttgaacccggtttgtgtggcgaaaccgaattcagcatggtgcgttttaaaggcgataaaatcaaagcccaatccgtctatgaaaacaccctttacctcaaaccacaagacattgctaacatcgtgctaggatttacgaacaaccctcgcatgtcaatatcaaccgcatag

SEQ ID NO: 1902 - DNA (genomic), 183 bp, Helicobacter pylori; double-stranded, circular
  misc_feature (B) LOCATION 1...183
  hypothetical: NO
  anti-sense: NO
gttaggaccacgtataagattcagggcaggggccctgtaatgatcaccgaactagatgctaataaattaggcattaggcatggtgaaatcgtggaagtgtttaacgctagggggaggttgttagcaggggcgtttgtaactaaaaatatccgtcaaggggttttaagtatccaagaaggggcg

SEQ ID NO: 1903 - DNA (genomic), 264 bp, Helicobacter pylori; double-stranded, circular
  misc_feature (B) LOCATION 1...264
  hypothetical: NO
  anti-sense: NO
atgatcaccgaactagatgctaataaattaggcattaggcatggtgaaatcgtggaagtgtttaacgctagggggaggttgttagcaggggcgtttgtaactaaaaatatccgtcaaggggttttgagtatccaagaaggggcgtggtatgatccagaagacgtgaatactagaaacccaaggtgcaatgcagggagtgtgaatacgctcacttcttcgcgccctacaagcagcatgacgcgaagctatttcacgtcaatacgg

SEQ ID NO: 1904 - DNA (genomic), 348 bp, Helicobacter pylori; double-stranded, circular
  misc_feature (B) LOCATION 1...348
  hypothetical: NO
  anti-sense: NO
atgatcaccgaactagatgctaataaattaggcattaggcatggtgaaatcgtggaagtgtttaacgctagggggaggttgttagcaggggcgtttgtaactaaaaatatccgtcaaggggttttgagtatccaagaaggggcgtggtatgatccagaagacgtgaatactagaaacccaaggtgcaatgcagggagtgtgaatacgctcacttcttcgcgccctacaagcagcatgacgcaagctatttcagtcaatacggccttagttaatattagaagacttagaaagtatgaattggtcaagccctatcattccatttcaacaccaagcatcattggggcttaa

SEQ ID NO: 1905 - DNA (genomic), 627 bp, Helicobacter pylori; double-stranded, circular
  misc_feature (B) LOCATION 1...627
  hypothetical: NO
  anti-sense: NO
aatgggcgtccaaatcactggagtgagccagaaaagatccaagaattagcggatttgtttgtctctaagcgcacttttttagcgggtaattggaccatccaaagagctcagcatggcgagcaaccggattgggcgttaattgttttagccagcatgattggtcaagtgggcttatctggtgggggctttggcttttctatgcattatggaggcaacgctcaagcaagctctggggcaagagttgttcctatgatttcgcaagggaataatgctgtaaaaagcgttattccagcgtctagggtttctgaagcgattttaaatccggataaagaaattgattttaaaggtaaaaaactcaaattgcctaaaatcaaaatgatctataattgtggggcgaatttattagggcatgaagctgatacaaacgagctgattcgcgctttaagaaccttagattgcgtgatcgtgcatgagccttggtggacgcctacggcaaaatttgctgatattatttttgcttccactagcactatggaaagggatgatattacttttggagggagttattctaagaacgtggtttatgccatgcgtaaggtagtagagcctgtttatgaatctaaagac

SEQ ID NO: 1906 - DNA (genomic), 915 bp, Helicobacter pylori; double-stranded, circular
  misc_feature (B) LOCATION 1...915
  hypothetical: NO
  anti-sense: NO
aggagaaccatgtccatttcacgcaggagtatcctaaaaaaaatcccaatcgcgctcgctagcactaatgttttaaaagctgttggtgtttttgaaaaagtaaaatccattccgcatgcaacgcattttggcccctttatcgcaaaggttcaaaatggagtgattaaagatattgtcccccaaaagagcgattataaccctaccatgatgttaaaagcgatggcagatagggtgtattcagatagtagggtgaagtatccttgcgtgcgtaagagcttcttagaaaacaaaaaaaaccacaaagaattgcgcgggagagaagaatttgtgcgcgtgagctgggacatggcattggatttagcggctaaaaaggttaaagaaatccctaaagaaaacatctctaatgccagctatggtggttgggggcatgcgggcagcttgcatcgttgcaataatctagcatggcgtttttttaacacgactttagggggggctattggcactgatggggaatatagtaatggtgcggccgcaagaataaaccctatgattgtaggggatatggaagtttattcgcaacaaaccactcatgaagagatgattaaaaattgtaaggtgtatgtcatgtggggggcggatttattcaagtgcaaccgcattgattattttgtgccaaaccatgtcaatgatagctactaccctaagtataaaagagccggcattaaattagtcaggatcgatcccatttatgccgaaaccgctcaagcctttaacgctgaatggatacccattgaccctaacactgatgtagcgttaatgctcggcatgatgcatcatctttatacgagcaatcaatacgataaagcgtttatcgctaaatacactgatggtttgatagatttttaccctattttc

SEQ ID NO: 1907 - DNA (genomic), 1674 bp, Helicobacter pylori; double-stranded, circular
  misc_feature (B) LOCATION 1...1674
  hypothetical: NO
  anti-sense: NO
atgtccatttcacgcaggagtatcctaaaaaaaatcccaatcgcgctcgctagcactaatgttttaaaagctgttggtgtttttgaaaaagtaaaatccattccgcatgcaacgcattttggcccctttatcgcaaaggttcaaaatggagtgattaaagatattgtcccccaaaagagcgattataaccctaccatgatgttaaaagcgatggcagatagggtgtattcagatagtagggtgaagtatccttgcgtgcgtaagagcttcttagaaaacaaaaaaaaccacaaagaattgcgcgggagagaagaatttgtgcgcgtgagctgggacatggcattggatttagcggctaaaaaggttaaagaaatccctaaagaaaacatctctaatgccagctatggtggttgggggcatgcgggcagcttgcatcgttgcaataatctagcatggcgtttttttaacacgactttagggggggctattggcactgatggggaatatagtaatggtgcggccgcaagaataaaccctatgattgtaggggatatggaagtttattcgcaacaaaccactcatgaagagatgattaaaaattgtaaggtgtatgtcatgtggggggcggatttattcaagtgcaaccgcattgattattttgtgccaaaccatgtcaatgatagctactaccctaagtataaaagagccggcattaaattcatcagcatcgatcccatttataccgaaaccgctcaagcctttaacgctgaatggatacccattcgccctaacactgatgtagcgttaatgctaggcatgatgcatcatctttatacgagcaatcaatacgataaagcgtttatcgctaaatacactgatggttttgatagatttttaccctatttgctaggagagagcgataaggcgcctaagactttagaatgggcgtctcaaatcactggagtgagcgcagaaaagatccaagaattagcggatttgtttgtctctaagcgcacttttttagcgggtaattggaccatccaaagagctcagcatggcgagcaaccggattgggcgttaattgttttagccagcatgattggtcaagtgggcttatctggtgggggctttggcttttctatgcattatggaggcaacgctcaagcaagctctggggcaagagttgttcctatgatttcgcaagggaataatgctgtaaaaagcgttattccagcgtctagggtttctgaagcgattttaaatccggataaagaaattgattttaaaggtaaaaaactcaaattgcctaaaatcaaaatgatctataattgtggggcgaatttattagggcatgaagctgatacaaacgagctgattcgcgctttaagaaccttagattgcgtgatcgtgcatgagccttggtggacgcctacggcaaaatttgctgatattatttttgcttccactagcactatggaaagggatgatattacttttggagggagttattctaagaacgtggtttatgccatgcgtaaggtagtagagcctgtttatgaatctaaagacgattatgagattttcaggcagctcgctttacgcgttgggggtaatgaaacagagcagcgattcactgaattaagagttacatggaatggattaaggagcttatga

SEQ ID NO: 1908 - DNA (genomic), 1677 bp, Helicobacter pylori; double-stranded, circular
  misc_feature (B) LOCATION 1...1677
  hypothetical: NO
  anti-sense: NO
atgtccatttcacgcaggagtatcctaaaaaaaatcccaatcgcgctcgctagcactaatgttttaaaagctgttggtgtttttgaaaaagtaaaatccattccgcatgcaacgcattttggcccctttatcgcaaaggttcaaaatggagtgattaaagatattgtcccccaaaagagcgattataaccctaccatgatgttaaaagcgatggcagatagggtgtattcagatagtagggtgaagtatccttgcgtgcgtaagagcttcttagaaaacaaaaaaaaccacaaagaattgcgcgggagagaagaatttgtgcgcgtgagctgggacatggcattggatttagcggctaaaaaggttaaagaaatccctaaagaaaacatctctaatgccagctatggtggttgggggcatgcgggcagcttgcatcgttgcaataatctagcatggcgtttttttaacacgactttagggggggctattggcactgatggggaatatagtaatggtgcggccgcaagaataaaccctatgattgtaggggatatggaagtttattcgcaacaaaccactcatgaagagatgattaaaaattgtaaggtgtatgtcatgtggggggcggatttattcaagtgcaaccgcattgattattttgtgccaaaccatgtcaatgatagctactaccctaagtataaaagagccggcattaaattcatcagcatcgatcccatttataccgaaaccgctcaagcctttaacgctgaatggatacccattcgccctaacactgatgtagcgttaatgctaggcatgatgcatcatctttatacgagcaatcaatacgataaagcgtttatcgctaaatacactgatggttttgatagatttttaccctatttgctaggagagagcgataaggcgcctaagactttagaatgggcgtctcaaatcactggagtgagcgcagaaaagatccaagaattagcggatttgtttgtctctaagcgcacttttttagcgggtaattggaccatccaaagagctcagcatggcgagcaaccggattgggcgttaattgttttagccagcatgattggtcaagtgggcttatctggtgggggctttggcttttctatgcattatggaggcaacgctcaagcaagctctggggcaagagttgttcctatgatttcgcaagggaataatgctgtaaaaagcgttattccagcgtctagggtttctgaagcgattttaaatccggataaagaaattgattttaaaggtaaaaaactcaaattgcctaaaatcaaaatgatctataattgtggggcgaatttattagggcatgaagctgatacaaacgagctgattcgcgctttaagaaccttagattgcgtgatcgtgcatgagccttggtggacgcctacggcaaaatttgctgatattatttttgcttccactagcactatggaaagggatgatattacttttggagggagttattctaagaacgtggtttatgccatgcgtaaggtagtagagcctgtttatgaatctaaagacgattatgagattttcaggcagctcgctttacgcgttgggggtaatgaaacagagcagcgattcactgaatctaagagttacatggaatggattaagggtctttactga

SEQ ID NO: 1909 - DNA (genomic), 201 bp, Helicobacter pylori; double-stranded, circular
  misc_feature (B) LOCATION 1...201
  hypothetical: NO
  anti-sense: NO
gctaaaagcgataatgaaccgtatttagcccttcaaaaggcggacttacgccgtaattttcaaggctataccacgaaaaaattcactcaaaccattggcattggcgttacgaagtattggcgaaagggagcgattattacacgcaaaattataaggatttgcactattatgaaaaagcccttgatttggggcatttaccgg

SEQ ID NO: 1910 - DNA (genomic), 198 bp, Helicobacter pylori; double-stranded, circular
  misc_feature (B) LOCATION 1...198
  hypothetical: NO
  anti-sense: NO
aaaagcgataatgaaccgtatttagcccttcaaaaggcggacttacgccgtaattttcaaggctataccacgaaaaaattcactcaaaccattggcattggcgttacgaagtattggcgaaagggagcgattattacacgcaaaattataaggatttgcactattatgaaaaagcccttgatttggggcatttaccgg

SEQ ID NO: 1911 - DNA (genomic), 342 bp, Helicobacter pylori; double-stranded, circular
  misc_feature (B) LOCATION 1...342
  hypothetical: NO
  anti-sense: NO
ttgcactattatgaaaaagcccttgatttggggcatttaccggtagaaaggggcgtagcgctcagtcaagaagatgtgttgagaaaagaagtgatcatgcagatgatgagtaatttaaaactagattactctaagattgaagaaaaattttctattgattttaaagcgcattttaaaaaagaattagaaaaattaaagccttatgaagaagcgggcctgctttctttcaattctaaaggctttgagatgacaagaacggggggcatgctcgtaagaaacatggctatggagtttgacgcgtatttgcgtgggggcgaaaaacatttcagtaaaacgctatga

SEQ ID NO: 1912 - DNA (genomic), 441 bp, Helicobacter pylori; double-stranded, circular
  misc_feature (B) LOCATION 1...441
  hypothetical: NO
  anti-sense: NO
ttttcaaggctataccacgaaaaaattcactcaaaccattggcattggcgttacgaagtattggcgaaagggagcgattattacacgcaaaattataaggatttgcactattatgaaaaagcccttgatttggggcatttaccggtagaaaggggcgtagcgctcagtcaagaagatgtgttgagaaaagaagtgatcatgcagatgatgagtaatttaaaactagattactctaagattgaagaaaaattttctattgattttaaagcgcattttaaaaaagaattagaaaaattaaagccttatgaagaagcgggcctgctttctttcaattctaaaggctttgagatgacaagaacggggggcatgctcgtaagaaacatggctatggagtttgacgcgtatttgcgtgggggcgaaaaacatttcagtaaaacgctt

SEQ ID NO: 1913 - DNA (genomic), 549 bp, Helicobacter pylori; double-stranded, circular
  misc_feature (B) LOCATION 1...549
  hypothetical: NO
  anti-sense: NO
ttgaaaacggcgttttttaaccatgacaacctcaaaaaccccatgcccttatcgctttatgcggatttgcctttttgtaggagcgcgtgttatttttgcgcttgttcagtcatttacaccagtttagaagagaaaaaagtccgctatatcagctaccttaaaaaagaactcgcccttttaaaaaatgcgatggacaccaaccgagaagtggcgcaattccactatggcggtggcacgccgacctttttttcgccccctcaattagatgggatcacgcaaagcattcaagaagttttccctaatttcagtcaagatattgaaatgagttgcgagattgaccccaggcatttcactaaagaacacatgcaaaccttgtttgatagggggtttaaccgcttgagttttggggtgcaggattttgatttggaagtccaaaaagccattcataggatccagccttttgaaatggttcaagaatccgtgaagctcgctagagattacggcatcaaatccattaattttgatttgatttatggcttacccagccag

SEQ ID NO: 1914 - DNA (genomic), 543 bp, Helicobacter pylori; double-stranded, circular
  misc_feature (B) LOCATION 1...543
  hypothetical: NO
  anti-sense: NO
aaaacggcgttttttaaccatgacaacctcaaaaaccccatgcccttatcgctttatgcggatttgcctttttgtaggagcgcgtgttatttttgcgcttgttcagtcatttacaccagtttagaagagaaaaaagtccgctatatcagctaccttaaaaaagaactcgcccttttaaaaaatgcgatggacaccaaccgagaagtggcgcaattccactatggcggtggcacgccgacctttttttcgccccctcaattagatgggatcacgcaaagcattcaagaagttttccctaatttcagtcaagatattgaaatgagttgcgagattgaccccaggcatttcactaaagaacacatgcaaaccttgtttgatagggggtttaaccgcttgagttttggggtgcaggattttgatttggaagtccaaaaagccattcataggatccagccttttgaaatggttcaagaatccgtgaagctcgctagagattacggcatcaaatccattaattttgatttgatttatggcttacccagc

SEQ ID NO: 1915 - DNA (genomic), 660 bp, Helicobacter pylori; double-stranded, circular
  misc_feature (B) LOCATION 1...660
  hypothetical: NO
  anti-sense: NO
atgcaaaccatcgattttgaaaaattttcgcaatattcaaagcccggcccacgatacaccagctaccccacagcggtggagtttaaagaaaattttaatgaagagagcttgaaaacggcgttttttaaccatgacaacctcaaaaaccccatgcccttatcgctttatacgcatttgcctttttgtaggagcgcgtgttatttttgcgcttgttcagtcatttacaccagtttagaagagaaaaaagtccgctatatcagctaccttaaaaaagaactcgcccttttaaaaaatgcgatggacaccaaccgagaagtggcgcaattccactatggcggtggcacgccgacctttttttcgccccctcaattagatgggatcacgcaaagcattcaagaagttttccctaatttcagtcaagatattgaaatgagttgcgagattgaccccaggcatttcactaaagaacacatgcaaaccttgtttgatagggggtttaaccgcttgagttttggggtgcaggattttgatttggaagtccaaaaagccattcataggatccagccttttgaaatggttcaagaatccgtgaagctcgctagagattacggcatcaaatccattaattttgatttgatttatggcttacccagccagact

SEQ ID NO: 1916 - DNA (genomic), 1374 bp, Helicobacter pylori; double-stranded, circular
  misc_feature (B) LOCATION 1...1374
  hypothetical: NO
  anti-sense: NO
atgcaaaccatcgattttgaaaaattttcgcaatattcaaagcccggcccacgatacaccagctaccccacagcggtggagtttaaagaaaattttaatgaagagagcttgaaaacggcgttttttaaccatgacaacctcaaaaaccccatgcccttatcgctttatacgcatttgcctttttgtaggagcgcgtgttatttttgcgcttgttcagtcatttacaccagtttagaagagaaaaaagtccgctatatcagctaccttaaaaaagaactcgcccttttaaaaaatgcgatggacaccaaccgagaagtggcgcaattccactatggcggtggcacgccgacctttttttcgccccctcaattagatgagatcacgcaaagcattcaagaagttttccctaatttcagtcaagatattgaaatgagttgcgagattgaccccaggcatttcactaaagaacacatgcaaaccttgtttgatagggggtttaaccgcttgagttttggggtgcaggattttgatttggaagtccaaaaagccattcataggatccagccttttgaaatggttcaagaatccgtgaagctcgctagagattacggcatcaaatccattaattttgatttgatttatggcttacccaaccagactaaagagggttttttaaaaactttggaatgggttttaaaactggatccggaccgattagcggtgttcaattacgcgcatgtgccttgggtgaaaaaaacgatgcgtaaaattgatgaaaccctattgccaagccctagagacaagctagagattttagaatctctcattagttttttagaaaaagccaactatcaaatgataggcatggatcatttcgctaaaagcgataatgaattgtatttagcccttcaaaaggcggaattacgccgtaattttcaaggctataccacgaaaaaattcactcaaaccattggcattggcgttacgagtattggcgaagggagcgattattacacgcaaaattataaggatttgcactattatgaaaaagcccttgatttggggcatttaccggtagaaaggggcgtagcgctcagtcaagaagatgtgttgagaaaagaagtgatcatgcagatgatgagtaatttaaaactagattactctaagattgaagaaaaattttctattgattttaaagcgcattttaaaaaagaattagaaaaattaaagccttatgaagaagcgggcctgctttctttcaattctaaaggctttgagatgacaagaacggggggcatgctcgtaagaaacatggctatggagtttgacgcgtatttgcgtgggggcgaaaaacatttcagtaaaacgctatga

SEQ ID NO: 1917 - DNA (genomic), 333 bp, Helicobacter pylori; double-stranded, circular
  misc_feature (B) LOCATION 1...333
  hypothetical: NO
  anti-sense: NO
aagcaaggaaagcgcatgaaagtcggtgtttatggggcgagcggtcgtatagggaaattacttttagaagaattaaaaggggggtataagggattagagttatctagcgtgtttgtcaggcaaaaatgcgaaaccgattttagctttttttcgcacgcccccttagtaaccaatgatttaaaagcgtttgtgaaagcctgcgaatgcgtggttgatttttctttacctaaaggcgtggatcatttgctagacgttcttttagaatgccctaaaattttaggtttcggcacgaccggttttagaaaaagaaacgtcttgaaaaaatgcaaaaat

SEQ ID NO: 1918 - DNA (genomic), 477 bp, Helicobacter pylori; double-stranded, circular
  misc_feature (B) LOCATION 1...477
  hypothetical: NO
  anti-sense: NO
aaaaagaaacgtcttgaaaaaatgcaaaaattagccttaaaagcgccgcttttgcacgcgcacaacatgtctatagggattatgatgctcaaccaattagcctttttaacttctttgaaattgaaagatgcggatattgaaattgtagaaacgcaccacaatctcaaaaaagacgccccgagcggcacggcgttgagtttgtatgaaacttgcactaaggctagggggtatgatgaaaaaaacgccctcatcactcacagagaaggtttgcgctctaaagaaagcattggtatagccactttaagggggggcgatgtcgccgggaagcacacgatagggttttatttagagggcgaatacatagagcttagccatacggcgactaaccgatctatttttgctaaaggggctttagaagtggccctgtggcttaaggataaagccgctaaaaaatatgaaattagcgaaatgtttggt

SEQ ID NO: 1919 - DNA (genomic), 765 bp, Helicobacter pylori; double-stranded, circular
  misc_feature (B) LOCATION 1...765
  hypothetical: NO
  anti-sense: NO
atgaaagtcggtgtttatggggcgagcggtcgtatagggaaattacttttagaagaattaaaaggggggtataagggattagagttatctagcgtgtttgtcaggcaaaaatgcgaaaccgattttagctctttttcgcacgcccctttagtaaccaatgatttaaaagcgtttgtgaaagcctgcgaatgcgtggttgatttttctttacctaaaggcgtggatcatttgctagacgttcttttagaatgccctaaaattttagtttctggcacgaccggtttagaaaaagaaacgctagaaaaaatgcaaaaattagccttaaaagcgccgcttttgcacgcgcacaacatgtctatagggattatgatgctcaaccaattagcctttttaacttctttgaaattgaaagatgcggatattgaaattgtagaaacgcaccacaatctcaaaaaagacgccccgagcggcacggcgttgagtttgtatgaaacttgcactaaggctagggggtatgatgaaaaaaacgccctcatcactcacagagaaggtttgcgctctaaagaaagcattggtatagccactttaagggggggcgatgtcgccgggaagcacacgatagggttttatttagagggcgaatacatagagcttagccatacggcgactaaccgatctatttttgctaaaggggctttagaagtggccctgtggcttaaggataaagccgctaaaaaatatgaaattagcgaaatgtttggttga

SEQ ID NO: 1920 - DNA (genomic), 336 bp, Helicobacter pylori; double-stranded, circular
  misc_feature (B) LOCATION 1...336
  hypothetical: NO
  anti-sense: NO
cgagcgaataagggggagggaatggaaaaattagtgattggctctagggggagcgaattggccttatggcaagcgaatcacattaaagaacgcttgaaaaaagaatgctctatggaaagcgaaattcgaatcgttaaaaccacaggcgataagattttagatgcacctttaaataagattggcggtaaggggctattcactaaggaattagaagaattgcttttaaaaggcgcaattgatttggcggtgcattctttaaaagatgtgccggtcgtgtttgaaaaggggttagacttggcatgcatcaccaaaagggctgatgtgagggacactttt

SEQ ID NO: 1921 - DNA (genomic), 618 bp, Helicobacter pylori; double-stranded, circular
  misc_feature (B) LOCATION 1...618
  hypothetical: NO
  anti-sense: NO
tgtgagggacactttttgagcgtgaaattccctgatttgatgagcttacctaaaggggccaaggttggcacgacttctttaaggcgctccatgcagattaaattcaaacgaaaagatctagacacagaaagtttaagggggaatgtccaaacccgtttgaaaaagcttgaatgcggtgaatttgacgctatcattttggctgaagcggggttgtgccgcttaaacgttcaaggggcgaaataccgcaaggcttttagcgtaaaagaaatgattcctagcatgggtcagggggctttaggggtagaaatgctcaaaaaccacaagcattttattacgcttcaaaaactcaacaatgaagaaagcgcgttttgttgccatttagaaagggaatttatcaaagggcttaatggggggtgtcagatccctattggcgtgcatgcgaatttaatgggcgatgaggttaaaatccgggcggttttgggcttgcctaatgggaaagaagtcattgctaaagaaaagcaaggggataaaactaaagcgtttgatttggttcaagagcttttagaagaatttttacaaagtggggcgaaagagattttagaaaaggcgcagttgttt

SEQ ID NO: 1922 - DNA (genomic), 921 bp, Helicobacter pylori; double-stranded, circular
  misc_feature (B) LOCATION 1...921
  hypothetical: NO
  anti-sense: NO
atggaaaaattagtgattggctctagggggagcgaattggccttatggcaagcgaatcacattaaagaacgcttgaaaaaagaatgctctatggaaagcgaaattcgaatcgttaaaaccacaggcgataagattttagatgcacctttaaataagattggcggtaaggggctattcactaaggaattagaagaattgcttttaaaaggcgcaattgatttggcggtgcattctttaaaagatgtgccggtcgtgtttgaaaaggggttagacttggcatgcatcaccaaaagggctgatgtgagggacacttttttgagcgtgaaattccctgatttgatgagcttacctaaaggggccaaggttggcacgacttctttaaggcgctccatgcagatcaaattcaaacgaaaagatctagacacagaaagtttaagggggaatgtccaaacccgtttgaaaaagcttgaatgcggtgaatttgacgctatcattttggctgaagcggggttgtgccgcttaaacgttcaaggggcgaaataccgcaaggcttttagcgtaaaagaaatgattcctagcatgggtcagggggctttaggggtagaaatgctcaaaaaccacaagcattttattacgcttcaaaaactcaacaatgaagaaagcgcgttttgttgccatttagaaagggaatttatcaaagggcttaatggggggtgtcagatccctattggcgtgcatgcgaatttaatgggcgatgaggttaaaatccgggcggttttgggcttgcctaatgggaaagaagtcattgctaaagaaaagcaaggggataaaactaaagcgtttgatttggttcaagagcttttagaagaatttttacaaagtggggcgaaagagattttagaaaaggcgcagttgttttaa

SEQ ID NO: 1923 - DNA (genomic), 1335 bp, Helicobacter pylori; double-stranded, circular
  misc_feature (B) LOCATION 1...1335
  hypothetical: NO
  anti-sense: NO
gactttttaatggagttagaaactcatttgtcaaaatatttcaccctagcctttacgcataaaagcatgagcttagaaatgcgagaaaaactcgctattaattcgcccataatgcttaaagaacttttacaaaccattaaaacccactgccccaatatcaaagagtgcatggtgctatccacatgcaatcgctttgaaatttatgcgagcctaaagcacggcgctaatactcatgagcaaaaaagcgcgttattaaagattttggctcaaaataaaaaaatgagcgtgtctgatttagaaaaatgcgttttaatcaatactgatgaaagcgcggtccatcatgtctttagcgtgtgcagcagtttggatagcttggtggttggggaaactcaaatcacagggcagatgaaaaacgcctataaattcgcctttgaagagaaattttgctccaaagatttaacccgattgctccattttgctttcaaatgcgccgctaaagtgcgcaatctaaccggcatttccaagcaaggggtctccatctcttcagtagccgttaaagaagtgcttagtatttttgaaaaagaaaggattaaggataaaaaagcccttgtgatagggcttggcgagatggctcaattggtcatcaagcaccttttaaacaagcaatttgaagtgcttattttagggcgtaatgcggctaaatttgaagattttgtcaaggaattagaagagcctaaaaaagtgggctttcaaaatgtagaaaatttaaacgcttatatcaatgaatacgaactgcttttttgtgccacttcttcgccgaattttatcgtgcgaaattccatgttaaaagaaacgattttcaggcgtttttggtttgatttagccgtgccacgaaatattgaaaagccgacgctaaatcatattttcttatacagcgtggatgatttagagcctatggtgaaagaaaatgtgggaaacaggcaagaaagccgaacgaaagcttatgagattgtagggcttgccacaatggagttttaccaatggatccaaagtttagaagtagagcctttgattaaggatttaagggaattggctaggatttcagcccaaaaggaattgcaaaaggcgctcaaaaaacgctatgtgcctaaagaatacgaaggcaatattgaaaagatcttgcacaacgctttcaacacctttttgcaccacccgaccatcgctttaaaaaagaacgctcaaaaagaagaatccgatgtgcttgtgggcgcgattaaaaacttgtttaatttagacaaatctaacgctaaaccatgtccagaatttgaatctcta

SEQ ID NO: 1924 - DNA (genomic), 1350 bp, Helicobacter pylori; double-stranded, circular
  misc_feature (B) LOCATION 1...1350
  hypothetical: NO
  anti-sense: NO
atggagttagaaactcatttgtcaaaatatttcaccctagcctttacgcataaaagcatgagcttagaaatgcgagaaaaactcgctattaattcgcccataatgcttaaagaacttttacaaaccattaaaacccactgccccaatatcaaagagtgcatggtgctatccacatgcaatcgctttgaaatttatgcgagcctaaagcacggcgctaatactcatgagcaaaaaagcgcgttattaaagattttggctcaaaataaaaaaatgagcgtgtctgatttagaaaaatgcgttttaatcaatactgatgaaagcgcggtccatcatgtctttagcgtgtgcagcagtttggatagcttggtggttggggaaactcaaatcacagggcagatgaaaaacgcctataaattcgcctttgaagagaaattttgctccaaagatttaacccgattgctccattttgctttcaaatgcgccgctaaagtgcgcaatctaaccggcatttccaagcaaggggtctccatctcttcagtagccgttaaagaagcgcttagtatttttgaaaaagaaaggattaaggataaaaaagcccttgtgatagggcttggcgagatggctcaattggtcatcaagcaccttttaaacaagcaatttgaagtgcttattttagggcgtaatgcggctaaatttgaagattttgtcaaggaattagaagagcctaaaaaagtgggctttcaaaatgtagaaaatttaaacgcttatatcaatgaatacgaactgcttttttgtgccacttcttcgccgaattttatcgtgcgaaattccatgttaaaagaaacgattttcaggcgtttttggtttgatttagccgtgccacgaaatattgaaaagccgacgctaaatcatattttcttatacagcgtggatgatttagagcctatggtgaaagaaaatgtgggaaacaggcaagaaagccgaacgaaagcttatgagattgtagggcttgccacaatggagttttaccaatggatccaaagtttagaagtagagcctttgattaaggatttaagggaattggctaggatttcagcccaaaaggaattgcaaaaggcgctcaaaaaacgctatgtgcctaaagaatacgaaggcaatattgaaaagatcttgcacaacgctttcaacacctttttgcaccacccgaccatcgctttaaaaaagaacgctcaaaaagaagaatccgatgtgcttgtgggcgcgattaaaaacttgtttaatttagacaaatctaacgctaaccatgcccagaatttgaatctctataaatgcgaatattacgaggaataa

SEQ ID NO: 1925 - DNA (genomic), 492 bp, Helicobacter pylori; double-stranded, circular
  misc_feature (B) LOCATION 1...492
  hypothetical: NO
  anti-sense: NO
atgatgcgagagatccttactaaccgctttttcccaagcctttttaaaaaaaggcttgatttttctaacagagtggttttagggctgggatctaatcttaaaaaccctttaaaaatattaaaaagttgttttttatattttaaaaatcatagtaaaatcgggaaaattttttcttcacccatttatatcaatccgccttttggttacactaatcaacctaacttttataacgctacgattatccttaaaacatctttaggtttgcgccatttttttgctctagtgttttatatagaaaggcgttttgggcgtgcaaggaagcgcgattttaaagatgctccaagaactttagatattgatattatcgctttcaatcaagtcattttgaggcagaatgatttgactttacctcaccctaaatggagtgaaagagactcggtgttagtgcctttaactttacaacaaatcctttttaaaagagaagagtggtga

SEQ ID NO: 1926 - DNA (genomic), 501 bp, Helicobacter pylori; double-stranded, circular
  misc_feature (B) LOCATION 1...501
  hypothetical: NO
  anti-sense: NO
ggccgagcttttatgatgcgagagatccttactaaccgctttttcccaagcctttttaaaaaaaggcttgatttttctaacagagtggttttagggctgggatctaatcttaaaaaccctttaaaaatattaaaaagttgttttttatattttaaaaatcatagtaaaatcgggaaaattttttcttcacccatttatatcaatccgccttttggttacactaatcaacctaacttttataacgctacgattatccttaaaacatctttaggtttgcgccatttttttgctctagtgttttatatagaaaggcgttttgggcgtgcaaggaagcgcgattttaaagatgctccaagaactttagatattgatattatcgctttcaatcaagtcattttgaggcagaatgatttgactttacctcaccctaaatggagtgaaagagactcggtgttagtgcctttaactttacaacaaatcctttttaaaagagaagagtgg

SEQ ID NO: 1927 - DNA (genomic), 966 bp, Helicobacter pylori; double-stranded, circular
  misc_feature (B) LOCATION 1...966
  hypothetical: NO
  anti-sense: NO
gtgttagtagatagtttcaatagggttattgattatattagggtgtctgtaaccaaacaatgtaatttcaggtgtcagtattgcatgcctaccacgccattagatttttttgatgatgaagaattattgcctttggataatgttttagaatttcttaaaatcgccattgatgaaggcgttaaaaaaatcagaatcacgggtggggagccattgttacgcaagggtttagatgaatttatcgctaaactacacgcttacaataaggaagtggcgttagttttaagcactaatggtttttcactcaaaaaaatggctaagggtttaaaagatgccgggttatcacgggtgaatgtttcattagattctttaaaaagcgatagggttttaaaaatctctcaaaaagacgcccttaaaaatacgctagaagggattgaagagtctttaaaggtgggtttaaaactcaaattaaacacggttgtgatgaaaggcgtcaatgatgatgaaatcttagagcttttagagtatgcaaaaaacagaagcatacaaatccgctacattgaatttatggaaaacacgcatgctaaaagtttggttaaaggcttgaaagagaaagaaattttagatttgatcgctcaaaaatataagatcatgggcatggaaaaacccaaacaagggtcttctaaaatctacacgctagaaaatggctatcaatttggcattatcgctccgcatagcgatgacttttgccaatcttgtaatcgtatccgtttggcttctgatggcaagatttgcccatgcttatactatcaagacgccatagacgctaaagaagcgatcatcaataaagatacaaaaatgatgaaaaggcttttaaaacaatctatcatcaataaaccagaaaaaaacatgtggaatgataaaaatggcggaactcccacaagggcgttttactatacaggggggtag

SEQ ID NO: 1928 - DNA (genomic), 975 bp, Helicobacter pylori; double-stranded, circular
  misc_feature (B) LOCATION 1...975
  hypothetical: NO
  anti-sense: NO
gggataaagggagtgttagtagatagtttcaatagggttattgattatattagggtgtctgtaaccaaacaatgtaatttcaggtgtcagtattgcatgcctaccacgccattagatttttttgatgatgaagaattattgcctttggataatgttttagaatttcttaaaatcgccattgatgaaggcgttaaaaaaatcagaatcacgggtggggagccattgttacgcaagggtttagatgaatttatcgctaaactacacgcttacaataaggaagtggcgttagttttaagcactaatggtttttcactcaaaaaaatggctaagggtttaaaagatgccgggttatcacgggtgaatgtttcattagattctttaaaaagcgatagggttttaaaaatctctcaaaaagacgcccttaaaaatacgctagaagggattgaagagtctttaaaggtgggtttaaaactcaaattaaacacggttgtgatgaaaggcgtcaatgatgatgaaatcttagagcttttagagtatgcaaaaaacagaagcatacaaatccgctacattgaatttatggaaaacacgcatgctaaaagtttggttaaaggcttgaaagagaaagaaattttagatttgatcgctcaaaaatataagatcatgggcatggaaaaacccaaacaagggtcttctaaaatctacacgctagaaaatggctatcaatttggcattatcgctccgcatagcgatgacttttgccaatcttgtaatcgtatccgtttggcttctgatggcaagatttgcccatgcttatactatcaagacgccatagacgctaaagaagcgatcatcaataaagatacaaaaatgatgaaaaggcttttaaaacaatctatcatcaataaaccagaaaaaaacatgtggaatgataaaaatggcggaactcccacaagggcgttttactatacagggggg

SEQ ID NO: 1929 - DNA (genomic), 672 bp, Helicobacter pylori; double-stranded, circular
  misc_feature (B) LOCATION 1...672
  hypothetical: NO
  anti-sense: NO
atgataaacaatgacttaacaacatcaaaatggataaatcttttgaaaaaccctatcattaataacattccttgcgttttattagctgggggcaaaagctctcgtttcatcatcaataatattccaatcaataaggctctcatgcctttaaaatcgtatcctagccttttagaataccaatacacacgccttttaaaactcttcaaacaagtcattatcagcgctaaaaaatcttacgaactaaacgctccctatcttttagaaaaagagggcggccttttttcacccctttttggcattcataacgcttttttaacgctgcaaaccccttatattttttttatcgccatagatacgcctttagtgtcctttgaaagcattaaaattctttgtgggattcaaaactttagcgtagtctatgctaaaagccccacaaaagaacattatttgatttctttgtggcatcaaagtatccttaacgcccttaattacactcttaaaacgcaaaattatcgcttgagcgatcttatcaaaaacgcctcttcaaccgctatccattttgataaagaagaagaatttttaaacctcaacaccctaaaagactatgaattagccgttcaaattttaaaagagggatcaaatggccgaagaagaaaagaccgaactccctag

SEQ ID NO: 1930 - DNA (genomic), 675 bp, Helicobacter pylori; double-stranded, circular
  misc_feature (B) LOCATION 1...675
  hypothetical: NO
  anti-sense: NO
tgtaacatgataaacaatgacttaacaacatcaaaatggataaatcttttgaaaaaccctatcattaataacattccttgcgttttattagctgggggcaaaagctctcgtttcatcatcaataatattccaatcaataaggctctcatgcctttaaaatcgtatcctagccttttagaataccaatacacacgccttttaaaactcttcaaacaagtcattatcagcgctaaaaaatcttacgaactaaacgctccctatcttttagaaaaagagggcggccttttttcacccctttttggcattcataacgcttttttaacgctgcaaaccccttatattttttttatcgccatagatacgcctttagtgtcctttgaaagcattaaaattctttgtgggattcaaaactttagcgtagtctatgctaaaagccccacaaaagaacattatttgatttctttgtggcatcaaagtatccttaacgcccttaattacactcttaaaacgcaaaattatcgcttgagcgatcttatcaaaaacgcctcttcaaccgctatccattttgataaagaagaagaatttttaaacctcaacaccctaaaagactatgaattagccgttcaaattttaaaagagggatcaaatggccgaagaagaaaagaccgaactccc

SEQ ID NO: 1931 - DNA (genomic), 207 bp, Helicobacter pylori; double-stranded, circular
  misc_feature (B) LOCATION 1...207
  hypothetical: NO
  anti-sense: NO
aagaggcaagttttcattaaagaatacagaactttagagcctttaaaaagcctagaaatccgtttgagtgaagcccccattgacaaacacaatgattttttataccataagaccacttatgcccctttttatcaaaacgctcgagcgctcattaaaaaaggcgttatttttgatgaaatcttttataacctaggatttggaactcac

SEQ ID NO: 1932 - DNA (genomic), 171 bp, Helicobacter pylori; double-stranded, circular
  misc_feature (B) LOCATION 1...171
  hypothetical: NO
  anti-sense: NO
ttgagtgaagcccccattgacaaacacaatgattttttataccataagaccacttatgcccctttttatcaaaacgctcgagcgctcattaagaaggcgttatttttgatgaaatcttttataaccaggatttggaactcactgagggcgctaggagtaatcttattttag

SEQ ID NO: 1933 - DNA (genomic), 249 bp, Helicobacter pylori; double-stranded, circular
  misc_feature (B) LOCATION 1...249
  hypothetical: NO
  anti-sense: NO
gatttggaactcactgagggcgctaggagtaatcttattttaggaatccacaacgggcttttaaccccttatttcagcgtgggcgcattaaccgggacgggcgttgtggggttgttaaaaaaaggtcttgttgagcatgcccctttaaaattacagaacttgacaagcgaggctaaaatctattgtattaacgcgctatacggcttagtggaggtgggaataataggttacccaatggagcaaaaaagt

SEQ ID NO: 1934 - DNA (genomic), 1206 bp, Helicobacter pylori; double-stranded, circular
  misc_feature (B) LOCATION 1...1206
  hypothetical: NO
  anti-sense: NO
atgatttttggggattttaaatatcaaaaaagcgttaaaaaactcacagccactaaccttaacgagcttaaaaacgccctggattttatctctcaaaatagggggaaggggtattttgtggggtatcttttgtatgaagcgcgcttagcgtttttagatgaaaattttcaaagccaaaccccttttttgtattttgaacaatttttagaaagaaaaaaataccctttagagcctttaaaagagcatgcgttttaccctaaaatccacagctctttagatcaaaaaacttatttcaagcagtttaaggccgttaaagagcatctcaaaaacggcgatacctatcaagtgaatttgacaatggatttattgttaaacactaaagccaaaccaaagcgcgtttttaaggaagtgatacacaaccaaaacacgccttttaaggcttttatagaaaatgagtttgggagcgttttaagcttttcgccggaattgttttttgaattagagtttttagacacagcgattaagattatcacaaaacccatgaaaggcacgatcgctcgctcaaacaaccccttgatagatgaaaaaaaccgattgtttttgcaaaatgatgacaaaaatagaagcgaaaatgtgatgatcgtggatttattgcgtaacgatttgagccgcttggccttaaaaaatagcgtgaaagtcaatcaattgtttgaaatcatcagtttgccgagcgtgtatcaaatgataagcgagattgaagctcaattgcccctaaaaacaagcttgtttgagatttttaaggcgttgttcccttgcggctctgtgaccggatgccctaaaatcaaaaccatgcaaatcattgaaagtttagaaaaacgccctaggggggtgtattgtggggcgataggcatggttggaggaaaaaaagccctttttagcgtgcctatccgcactttagaaaaaagagcgcatgaagattttttgcatttaggggtagggagtggggtaacttataaaagtaaagcttcaaaggaatatgaagagagctttttaaaatccttttttgtgatgcccaaaatagaatttgagatcgtggaaacgatgagagttatcaaaagggatcaaaaattagagattaacaataaaaacgcccataaagaacgcttaatgcatagcgcccaatattttaactttaaatacagatga

SEQ ID NO: 1935 - DNA (genomic), 1260 bp, Helicobacter pylori; double-stranded, circular
  misc_feature (B) LOCATION 1...1260
  hypothetical: NO
  anti-sense: NO
atgatttttggggattttaaatatcaaaaaagcgttaaaaaactcacagccactaaccttaacgagcttaaaaacgccctggattttatctctcaaaatagggggaaggggtattttgtggggtatcttttgtatgaagcgcgcttagcgtttttagatgaaaattttcaaagccaaaccccttttttgtattttgaacaatttttagaaagaaaaaaataccttgtagagcatctaaaagagcatgcgttttaccctaaaatccacagctctttagatcaaaaaacttatttcaagcagtttaaggccgttaaagagcatctcaaaaacggcgatacctatcaagtgaatttgacaatggatttattgttaaacactaaggccaaaccaaagcgcgtttttaaggaagtgatacacaaccaaaacacgccttttaaggcttttatagaaaatgagtttgggagcgttttaagcttttcgccggaattgttttttgaattagagtttttagacacagcgattaagattatcacaaaacccatgaaaggcacgatcgctcgctcaaacaaccccttgatagatgaaaaaaaccgattgtttttgcaaaatgatgacaaaaatagaagcgaaaatgtgatgatcgtggatttattgcgtaacgatttgagccgcttggccttaaaaaatagcgtgaaagtcaatcaattgtttgaaatcatcagtttgccgagcgtgtatcaaatgataagcgagattgaagctcaattgcccctaaaaacaagcttgtttgagatttttaaggcgttgttcccttgcggctctgtgaccggatgccctaaaatcaaaaccatgcaaatcattgaaagtttagaaaaacgccctaggggggtgtattgtggggcgataggcatggttggaggaaaaaaagccctttttagcgtgcctatccgcactttagaaaaaagagcgcatgaagattttttgcatttaggggtagggagtggggtaacttataaaagtaaagcttcaaaggaatatgaagagagctttttaaaatccttttttgtgatgcccaaaatagaatttgagatcgtggaaacgatgagagttatcaaaagggatcaaaaattagagattaacaataaaaacgcccataaagaacgcttaatgcatagcgcccaatattttaactttaatacagatgaaaatcttttagactttgaattagaaggagaaggggttttaagggttttaattcaa

SEQ ID NO: 1936 - DNA (genomic), 1704 bp, Helicobacter pylori; double-stranded, circular
  misc_feature (B) LOCATION 1...1704
  hypothetical: NO
  anti-sense: NO
atgatttttggggattttaaatatcaaaaaagcgttaaaaaactcacagccactaaccttaacgagcttaaaaacgccctggattttatctctcaaaatagggggaaggggtattttgtggggtatcttttgtatgaagcgcgcttagcgtttttagatgaaaattttcaaagccaaaccccttttttgtattttgaacaatttttagaaagaaaaaaataccctttagagcctttaaaagagcatgcgttttaccctaaaatccacagctctttagatcaaaaaacttatttcaagcagtttaaggccgttaaagagcatctcaaaaacggcgatacctatcaagtgaatttgacaatggatttattgttaaacactaaagccaaaccaaagcgcgtttttaaggaagtgatacacaaccaaaacacgccttttaaggcttttatagaaaatgagtttgggagcgttttaagcttttcgccggaattgttttttgaattagagtttttagacacagcgattaagattatcacaaaacccatgaaaggcacgatcgctcgctcaaacaaccccttgatagatgaaaaaaaccgattgtttttgcaaaatgatgacaaaaatagaagcgaaaatgtgatgatcgtggatttattgcgtaacgatttgagccgcttggccttaaaaaatagcgtgaaagtcaatcaattgtttgaaatcatcagtttgccgagcgtgtatcaaatgataagcgagattgaagctcaattgcccctaaaaacaagcttgtttgagatttttaaggcgttgttcccttgcggctctgtgaccggatgccctaaaatcaaaaccatgcaaatcattgaaagtttagaaaaacgccctaggggggtgtattgtggggcgataggcatggttggaggaaaaaaagccctttttagcgtgcctatccgcactttagaaaaaagagcgcatgaagattttttgcatttaggggtagggagtggggtaacttataaaagtaaagcttcaaaggaatatgaagagagctttttaaaatccttttttgtgatgcccaaaatagaatttgagatcgtggaaacgatgagagttatcaaaagggatcaaaaattagagattaacaataaaaacgcccataaagaacgcttaatgcatagcgcccaatattttaactttaaatacgatgaaaatcttttagactttgaattagaaaaagaaggggttttaagggttttactcaataaaaggggcaagctcattaaagaatacagaaccttagagcctttaaaaagcctagaaatccgtttgagtgaagcccccattgacaaacacgatgattttttataccataagaccgcttatgcccctttttatcaaaacgctcgagcgctcattaaaaaaggcgttatttttgatgaaatcttttataaccaggatttggaactcactgagggcgctaggagtaatcttattttagaaatccacaacaggcttttaaccccttatttcagcgtgggcgcattaaccgggacgggcgttgtggggttgttaaaaaaaggtcttgttgagcatgcccctttaaaattacaagacttgcaaagagcggctaaaatctattgtattaacgcgctatacggcttagtggaggtgggaataataggttacccaatggagcaaaaaagttaa

SEQ ID NO: 1937 - DNA (genomic), 933 bp, Helicobacter pylori; double-stranded, circular
  misc_feature (B) LOCATION 1...933
  hypothetical: NO
  anti-sense: NO
ttgaatatgggagggcctaacagcctttatgaagtgggggtgtttttaaaaaacatgtttgatgacccctttatccttaccattaaaaataatttcatgcgtaaaatggtgggtaaaatgatcgtcaatagccgcatagaaaaatccaaaaaaatctatgaaaaattaggaggcaaatcccctttaacgcctatcacattcgcccttacagagcgtttgaacgaattggatccttctcgtttttacacctatgcgatgcgttatacccccccttatgcgtctatggttttgcaagatttagccttaaaagaaatagaaagcctggtgtttttttccatgtatccgcaatattctagcacgaccaccctttctagcttcaatgacgcttttaacgccctaaaatctttagaaactttccgccccaaggtgcgagtgatagaacgcttttatgctgacaaaaagcttaatgaaatcattttaaacacgattttaagcgccctaaacaactgcaaaagccaggattttgtcctaatcttttccgtccatggattgcctaaaagcattgttgatgccggcgatacttaccagcaagaatgcgaacaccatgtgagtttgttaaaagagttgatgcagcaaaaaaatatcccttttaaagaagttttactctcttaccaatccaagctagggcctatgaaatggctagagccaagcactgaagagctgatagaaaagcaccgcaagtctaatatcattatctaccctttagctttcacgattgacaattctgaaacgctttatgaattagacatgcaataccgcttgatggcagagcgcttggcggttaaagagtatttggtttgcccatgcttaaacgattccatagagtttgcaaaatttatcattgaattagtgaaaaaccttaaaagtgagtga

SEQ ID NO: 1938 - DNA (genomic), 975 bp, Helicobacter pylori; double-stranded, circular
  misc_feature (B) LOCATION 1...975
  hypothetical: NO
  anti-sense: NO
tttagaaatagcgccacaaaatcccccaaagaagcggttgttcttttgaatatgggagggcctaacagcctttatgaagtgggggtgtttttaaaaaacatgtttgatgacccctttatccttaccattaaaaataatttcatgcgtaaaatggtgggtaaaatgatcgtcaatagccgcatagaaaaatccaaaaaaatctatgaaaaattaggaggcaaatcccctttaacgcctatcacattcgcccttacagagcgtttgaacgaattggatccttctcgtttttacacctatgcgatgcgttatacccccccttatgcgtctatggttttgcaagatttagccttaaaagaaatagaaagcctggtgtttttttccatgtatccgcaatattctagcacgaccaccctttctagcttcaatgacgcttttaacgccctaaaatctttagaaactttccgccccaaggtgcgagtgatagaacgcttttatgctgacaaaaagcttaatgaaatcattttaaacacgattttaagcgccctaaacaactgcaaaagccaggattttgtcctaatcttttccgtccatggattgcctaaaagcattgttgatgccggcgatacttaccagcaagaatgcgaacaccatgtgagtttgttaaaagagttgatgcagcaaaaaaatatcccttttaaagaagttttactctcttaccaatccaagctagggcctatgaaatggctagagccaagcactgaagagctgatagaaaagcaccgcaagtctaatatcattatctaccctttagctttcacgattgacaattctgaaacgctttatgaattagacatgcaataccgcttgatggcagagcgcttggcggttaaagagtatttggtttgcccatgcttaaacgattccatagagtttgcaaaatttatcattgaattagtgaaaaaccttaaaagtgag

SEQ ID NO: 1939 - DNA (genomic), 1002 bp, Helicobacter pylori; double-stranded, circular
  misc_feature (B) LOCATION 1...1002
  hypothetical: NO
  anti-sense: NO
ttgatcaatgaaaagcttaataatttagaaaatagcgccacaaaatcccccaaagaagcggttgttcttttgaatatgggagggcctaacagcctttatgaagtgggggtgtttttaaaaaacatgtttgatgacccctttatccttaccattaaaaataatttcatgcgtaaaatggtgggtaaaatgatcgtcaatagccgcatagaaaaatccaaaaaaatctatgaaaaattaggaggcaaatcccctttaacgcctatcacattcgcccttacagagcgtttgaacgaattggatccttctcgtttttacacctatgcgatgcgttatacccccccttatgcgtctatggttttgcaagatttagccttaaaagaaatagaaagcctggtgtttttttccatgtatccgcaatattctagcacgaccaccctttctagcttcaatgacgcttttaacgccctaaaatctttagaaactttccgccccaaggtgcgagtgatagaacgcttttatgctgacaaaaagcttaatgaaatcattttaaacacgattttaagcgccctaaacaactgcaaaagccaggattttgtcctaatcttttccgtccatggattgcctaaaagcattgttgatgccggcgatacttaccagcaagaatgcgaacaccatgtgagtttgttaaaagagttgatgcagcaaaaaaatatcccttttaaagaagttttactctcttaccaatccaagctagggcctatgaaatggctagagccaagcactgaagagctgatagaaaagcaccgcaagtctaatatcattatctaccctttagctttcacgattgacaattctgaaacgctttatgaattagacatgcaataccgcttgatggcagagcgcttggcggttaaagagtatttggtttgcccatgcttaaacgattccatagagtttgcaaaatttatcattgaattagtgaaaaaccttaaaagtgagtga

SEQ ID NO: 1940 - DNA (genomic), 459 bp, Helicobacter pylori; double-stranded, circular
  misc_feature (B) LOCATION 1...459
  hypothetical: NO
  anti-sense: NO
atgaatttagaagtggctctaaaggcgtttgaaacgctattgccatgcaataaacaagaagttttaaaaaacctaaagcccctagatttaatcggccgttgcgagcttttaagccctaacattttaatagatgtggggcataacccccatagcgctaaagccttaaaagaagaaatcaaacgcatctttaacgctccaatcgttttgatttataattgctatcaagataaagacgcttttttggtgctagaaattttaaagtctgtggttaaaaaggttttgattttagaattgcataatgaaagaattatccaattagaaaaacttaaagggattttagaaactttagggttagaacacgccttgtttgaagaactgaaagaaaatgaaaattatttggtgtatggctcatttctggtagccaacgctttttatgaacgctatccaaagaagagggat

SEQ ID NO: 1941 - DNA (genomic), 1170 bp, Helicobacter pylori; double-stranded, circular
  misc_feature (B) LOCATION 1...1170
  hypothetical: NO
  anti-sense: NO
atgaaaaatagtcatgggttaaaggcgtttttagaaacaaagcctaaggaataccataagttcgaccctagccgtttcattcaaatttataaggattttaaaaacgctttttttgagattcaagccaaagtcattcatgtggtagggactaatggtaagggcagcacagggcggtttttaacccttttattagccgatcaagggtttaaagtgttgcatttcacctcccctcatgtttttgaattcagggagcgcttttatttgaatggctctgttgttaaagaaagcgttttagaaaacgcccaccagcaattgcaatcgcacgctttcagtaacgcttgctcgtattttgaatacgctaccttattagctgtcatgctcgctaaagattgcgattatttggttttagaagcagggcttgggggggagtttgacagcacgaacgctttggaaaaaaccctaagcgttttcacccccattgattacgatcataaggaatttttaggggatagtttagaaagcattgcgactactaaattaaaagcgatgggctctcttaatatcatcgctccccaacaagaactggttttaaatgtggctcaaaaaatcgctaaagacaaacacgcgcaattgattgtggttcaaaatgaaatttcaaaaggagtgagcgattatattgaacgccaccatttagcccattttttagcgatgaatttagaagtggctctaaaggcgtttgaaacgctattgccatgcaataaacaagaagttttaaaaaacctaaagcccctagatttaatcggccgttgcgagcttttaagccctaacattttaatagatgtggggcataacccccatagcgctaaagccttaaaagaagaaatcaaacgcatctttaacgctccaatcgttttgatttataattgctatcaagataaagacgcttttttggtgctagaaattttaaagtctgtggttaaaaaggttttgattttagaattgcataatgaaagaattatccaattagaaaaacttaaagggattttagaaactttagggttagaacacgccttgtttgaagaactgaaagaaaatgaaaattatttggtgtatggctcatttctggtagccaacgctttttatgaacgctatccaaagaagagggattga

SEQ ID NO: 1942 - DNA (genomic), 1206 bp, Helicobacter pylori; double-stranded, circular
  misc_feature (B) LOCATION 1...1206
  hypothetical: NO
  anti-sense: NO
ttgtggctcaaatcgcttatgaggggaaattcaataatgaaaaatagtcatgggttaaaggcgtttttagaaacaaagcctaaggaataccataagttcgaccctagccgtttcattcaaatttataaggattttaaaaacgctttttttgagattcaagccaaagtcattcatgtggtagggactaatggtaagggcagcacagggcggtttttaacccttttattagccgatcaagggtttaaagtgttgcatttcacctcccctcatgtttttgaattcagggagcgcttttatttgaatggctctgttgttaaagaaagcgttttagaaaacgcccaccagcaattgcaatcgcacgctttcagtaacgcttgctcgtattttgaatacgctaccttattagctgtcatgctcgctaaagattgcgattatttggttttagaagcagggcttgggggggagtttgacagcacgaacgctttggaaaaaaccctaagcgttttcacccccattgattacgatcataaggaatttttaggggatagtttagaaagcattgcgactactaaattaaaagcgatgggctctcttaatatcatcgctccccaacaagaactggttttaaatgtggctcaaaaaatcgctaaagacaaacacgcgcaattgattgtggttcaaaatgaaatttcaaaaggagtgagcgattatattgaacgccaccatttagcccattttttagcgatgaatttagaagtggctctaaaggcgtttgaaacgctattgccatgcaataaacaagaagttttaaaaaacctaaagcccctagatttaatcggccgttgcgagcttttaagccctaacattttaatagatgtggggcataacccccatagcgctaaagccttaaaagaagaaatcaaacgcatctttaacgctccaatcgttttgatttataattgctatcaagataaagacgcttttttggtgctagaaattttaaagtctgtggttaaaaaggttttgattttagaattgcataatgaaagaattatccaattagaaaaacttaaagggattttagaaactttagggttagaacacgccttgtttgaagaactgaaagaaaatgaaaattatttggtgtatggctcatttctggtagccaacgctttttatgaacgctatccaaagaagagggattga

SEQ ID NO: 1943 - DNA (genomic), 1209 bp, Helicobacter pylori; double-stranded, circular
  misc_feature (B) LOCATION 1...1209
  hypothetical: NO
  anti-sense: NO
ctaaatttgtggctcaaatcgcttatgaggggaaattcaataatgaaaaatagtcatgggttaaaggcgtttttagaaacaaagcctaaggaataccataagttcgaccctagccgtttcattcaaatttataaggattttaaaaacgctttttttgagattcaagccaaagtcattcatgtggtagggactaatggtaagggcagcacagggcggtttttaacccttttattagccgatcaagggtttaaagtgttgcatttcacctcccctcatgtttttgaattcagggagcgcttttatttgaatggctctgttgttaaagaaagcgttttagaaaacgcccaccagcaattgcaatcgcacgctttcagtaacgcttgctcgtattttgaatacgctaccttattagctgtcatgctcgctaaagattgcgattatttggttttagaagcagggcttgggggggagtttgacagcacgaacgctttggaaaaaaccctaagcgttttcacccccattgattacgatcataaggaatttttaggggatagtttagaaagcattgcgactactaaattaaaagcgatgggctctcttaatatcatcgctccccaacaagaactggttttaaatgtggctcaaaaaatcgctaaagacaaacacgcgcaattgattgtggttcaaaatgaaatttcaaaaggagtgagcgattatattgaacgccaccatttagcccattttttagcgatgaatttagaagtggctctaaaggcgtttgaaacgctattgccatgcaataaacaagaagttttaaaaaacctaaagcccctagatttaatcggccgttgcgagcttttaagccctaacattttaatagatgtggggcataacccccatagcgctaaagccttaaaagaagaaatcaaacgcatctttaacgctccaatcgttttgatttataattgctatcaagataaagacgcttttttggtgctagaaattttaaagtctgtggttaaaaaggttttgattttagaattgcataatgaaagaattatccaattagaaaaacttaaagggattttagaaactttagggttagaacacgccttgtttgaagaactgaaagaaaatgaaaattatttggtgtatggctcatttctggtagccaacgctttttatgaacgctatccaaagaagagggat

SEQ ID NO: 1944 - DNA (genomic), 822 bp, Helicobacter pylori; double-stranded, circular
  misc_feature (B) LOCATION 1...822
  hypothetical: NO
  anti-sense: NO
atggagataaaaacctttttagaatgcgccttaaaagaagatttagggcatggggatttgtttgaaagggtgttagaaaaggattttaaagccacagcctttgtgagggctaaacaagagggcgtgttttcaggcgaaaaatacgctttagagttgcttcaaatgaccggcattgaatgcgttcaaaacattaaggataaagagcgtttcaagcctaaagacaccttaatggagattaggggggattttagcatgcttttaaagattgaacgcaccctattaaatctgttgcaacacagcagcgggatcgccactttaacgagccgttttgtagaagctttaaattctcccaaagtgcgtttgttggacacacgaaaaaccagaccccttttaaggatctttgaaaaatattccgtgcttaatgggggggcgagcaaccaccgcttagggctagatgacgctttaatgcttaaagacacgcatttaaagcatgtgaaagatctaaagagctttttaacgcatgccagaaaaaacttgcctttcacggctaaaattgaaattgaatgtgagagctttgaagaggccaaaaacgccatgagcgcgggagcggatattgtgatgtgcgataacatgagcgttggggagactaaagaaattgccgcttacagagaggcgcattacccctttgtcttattggaagcgagcgggaatatctcgctagagagcatcaacgcttacgccaaaagcggcgtggatgccattagcgtaggggctttaatccatcaagccacttttattgacatgcacatgaaaatggcttaa

SEQ ID NO: 1945 - DNA (genomic), 837 bp, Helicobacter pylori; double-stranded, circular
  misc_feature (B) LOCATION 1...837
  hypothetical: NO
  anti-sense: NO
aatgatggagttatcctaatggagataaaaacctttttagaatgcgccttaaaagaagatttagggcatggggatttgtttgaaagggtgttagaaaaggattttaaagccacagcctttgtgagggctaaacaagagggcgtgttttcaggcgaaaaatacgctttagagttgcttcaaatgaccggcattgaatgcgttcaaaacattaaggataaagagcgtttcaagcctaaagacaccttaatggagattaggggggattttagcatgcttttaaagattgaacgcaccctattaaatctgttgcaacacagcagcgggatcgccactttaacgagccgttttgtagaagctttaaattctcccaaagtgcgtttgttggacacacgaaaaaccagaccccttttaaggatctttgaaaaatattccgtgcttaatgggggggcgagcaaccaccgcttagggctagatgacgctttaatgcttaaagacacgcatttaaagcatgtgaaagatctaaagagctttttaacgcatgccagaaaaaacttgcctttcacggctaaaattgaaattgaatgtgagagctttgaagaggccaaaaacgccatgagcgcgggagcggatattgtgatgtgcgataacatgagcgttggggagactaaagaaattgccgcttacagagaggcgcattacccctttgtcttattggaagcgagcgggaatatctcgctagagagcatcaacgcttacgccaaaagcggcgtggatgccattagcgtaggggctttaatccatcaagccacttttattgacatgcacatgaaaatggct

SEQ ID NO: 1946 - DNA (genomic), 210 bp, Helicobacter pylori; double-stranded, circular
  misc_feature (B) LOCATION 1...210
  hypothetical: NO
  anti-sense: NO
atggaaaaatttttcaaccaattttttgaaaacatcggcgaagacaagaatcgagaaggtttgaaagagacgcctaaaagggttcaagaattatggaaattcttgtataaaggctataaagaagatcctagagtggctttaaaaagcgcgtattttcaaggcgtttgcgatgaaatgatagtggctcaaaacatttcatcttgccttttt

SEQ ID NO: 1947 - DNA (genomic), 543 bp, Helicobacter pylori; double-stranded, circular
  misc_feature (B) LOCATION 1...543
  hypothetical: NO
  anti-sense: NO
atggaaaaatttttcaaccaattttttgaaaacatcggcgaagacaagaatcgagaaggtttgaaagagacgcctaaaagggttcaagaattatggaaattcttgtataaaggctataaagaagatcctagagtggctttaaaaagcgcgtattttcaaggcgtttgcgatgaaatgatagtggctcaaaacattgaattttactccacttgcgagcaccatttgctccctttttttgggaatattagcgtgggatatatccctaaggaaaagattgtaggcattagcgcgatcgctaaactcattgaaatttatagcaaacgcctgcaaatccaagaaaggctgaccactcaaattgcagaaacttttgatgaaatcatagagccaaggggcgtgatcgtggtttgtgaagccaagcacttgtgcatgagcatgcaaggggtgcaaaagcaaaatgcgatcattaaaacaagtgtgttaagaggcctcttcaaaaaagaccctaaaaccagagctgaatttatgcaactcttaaaatcttag

SEQ ID NO: 1948 - DNA (genomic), 540 bp, Helicobacter pylori; double-stranded, circular
  misc_feature (B) LOCATION 1...540
  hypothetical: NO
  anti-sense: NO
atggaaaaatttttcaaccaattttttgaaaacatcggcgaagacaagaatcgagaaggtttgaaagagacgcctaaaagggttcaagaattatggaaattcttgtataaaggctataaagaagatcctagagtggctttaaaaagcgcgtattttcaaggcgtttgcgatgaaatgatagtggctcaaaacattgaattttactccacttgcgagcaccatttgctccctttttttgggaatattagcgtgggatatatccctaaggaaaagattgtaggcattagcgcgatcgctaaactcattgaaatttatagcaaacgcctgcaaatccaagaaaggctgaccactcaaattgcagaaacttttgatgaaatcatagagccaaggggcgtgatcgtggtttgtgaagccaagcacttgtgcatgagcatgcaaggggtgcaaaagcaaaatgcgatcattaaaacaagtgtgttaagaggcctcttcaaaaaagaccctaaaaccagagctgaatttatgcaactcttaaaatct

SEQ ID NO: 1949 - DNA (genomic), 237 bp, Helicobacter pylori; double-stranded, circular
  misc_feature (B) LOCATION 1...237
  hypothetical: NO
  anti-sense: NO
gactctttttattcattcaatcagcatgcattcaatcagcatgcattcaatcggcatgccaaaacttaccacctctttgcccatatccagcagcaaatcgctatttatcttgtccaatttttaaaacaaaaacattacgctaaagttttggatctcggatcagagagtggggctgtttttaacgctttagagcaacaaaatattgtgattgaaattttatcgctttggataattcca

SEQ ID NO: 1950 - DNA (genomic), 426 bp, Helicobacter pylori; double-stranded, circular
  misc_feature (B) LOCATION 1...426
  hypothetical: NO
  anti-sense: NO
aattttatcgctttggataattccatgaacatgctcaaattgcaccccacgcattctatcaacattcaaaaaatctctttagagcatgcaaattttgaagaacatgttttttgcgattacgatctggttgtgtcctcttcatctttgcaatgggctagggatttaaaaagcgttttagaaaaaatcgctctttctagtaaggaggccgctttagctatccatacggattttagtttgcatgaagtgcatgagtttttaggcacgccttcgcctttaagggatctcaaaacgctcaaatccttgatcaaaaacgcctttaaacattttcaaatagaattagaaaacaagcgcttcgccctttatttcaaccgcaaacaagactgcttgaattaccttaaaaaatgcgatcttttgggggttcagcgc

SEQ ID NO: 1951 - DNA (genomic), 741 bp, Helicobacter pylori; double-stranded, circular
  misc_feature (B) LOCATION 1...741
  hypothetical: NO
  anti-sense: NO
gtgttggactctttttattcattcaatcagcatgcattcaatcagcatgcattcaatcggcatgccaaaacttaccacctctttgcccatatccagcagcaaatcgctatttatcttgtccaatttttaaaacaaaaacattacgctaaagttttggatctcggatcagggagtggggctgtttttaacgctttagagcaacaaaatattgtgattgaaaattttatcgctttggataattccatgaacatgctcaaattgcaccccacgcattctatcaacattcaaaaaatctctttagagcatgcaaattttgaagaacatgttttttgcgattacgatctggttgtgtcctcttcatctttgcaatgggctagggatttaaaaagcgttttagaaaaaatcgctctttctagtaaggaggccgctttagctatccatacggattttagtttgcatgaagtgcatgagtttttaggcacgccttcgcctttaagggatctcaaaacgctcaaatccttgatcaaaaacgcctttaaacattttcaaatagaattagaaaacaagcgcttcgccctttatttcaaccgcaaacaagactgcttgaattaccttaaaaaatgcggtcttttggggggttcaacgctgagtttcaagcaaaaaaaacattttttccaaaacatggcgtttgaaaaattgagctatgaagtgttactcttttctgggatcaggcgctcttaa

SEQ ID NO: 1952 - DNA (genomic), 171 bp, Helicobacter pylori; double-stranded, circular
  misc_feature (B) LOCATION 1...171
  hypothetical: NO
  anti-sense: NO
gcgctgcgcattttaaagcaagaggccataagcgttgggggcgattttgccacgccaagagattgcattttggctaaagagcctttttatgatggggtgttgattgcgagtgctaagcaattagaacgccttattgtgaagtgccattcccaaccctttggcttaaacatt

SEQ ID NO: 1953 - DNA (genomic), 939 bp, Helicobacter pylori; double-stranded, circular
  misc_feature (B) LOCATION 1...939
  hypothetical: NO
  anti-sense: NO
ttggctaaagagcctttttatgatggggtgttgattgcgagtgctaagcaattagaacgccttattgtgaagtgccattcccaaccctttgggcttaaacatttagcgcaagaattaaaaagccacctcaaagccaaaaagcctaacgccccacagatcatggcaatcttgaatctcacgccggatagtttctatgaaaagagccggtttgatagcaaaaaagcgcttgaagaaatctatcaatggctagaaaagggtatcacgctcattgatataggcgcggccagttcaaggccacagagtgaaatcattgatcccaaagtagagcaagatcgcttgaaagaaattttattagagatcaaatcccaaaaactctaccaacgcgcccaatttagcatagacacctaccatgccacaaccgcccaaatggctttggagcattatttttctatccttaatgacgtgagcggttttaatagcattgaaatgctagaagtcgcaagagattaccagcccacttgcattttaatgcacgctcaaaaaacccccaaagacatgcaagaaaatgtcttttaccacaatttatttgatgaaatggatcgcttctttaaggaaaaactagaggttttagaaaaatacacgcttcaagatattattttagatattgggtttggattcgctaaattaaaagagcataatttagccttaatcaagcatttaagccactttctcaaattcaaaaaacccttattggtgggagcgagtcgtaaaaacacgatcgggcttatcaccgggcgtgaagttcaagaccggctcgccggcactttgagtttgcatttaatggcgttgcaaaatggagcgagtattttaagagcgcatgacattgatgagcatatcgatctcatcaaggtgtttaagagtttggaagaaacggattga

SEQ ID NO: 1954 - DNA (genomic), 1143 bp, Helicobacter pylori; double-stranded, circular
  misc_feature (B) LOCATION 1...1143
  hypothetical: NO
  anti-sense: NO
atgattgtaaaacgccttaaccctgatgcgctcaaaagcgctctgcaaaaaataggcccagaaaagatcgcgcaaacccacatgcgccaaaaaggcgttagctttgtttttgaaatccaacacctgcccttaagcgctgcgctcattttaaagcaagaggccataagcgttgggggcgattttgccacgccaagagattgcattttggctaaagagcctttttatgatggggtgttgattgcgagtgctaagcaattagaacgccttattgtgaagtgccattcccaaccctttgggcttaaacatttagcgcaagaattaaaaagccacctcaaagccaaaaagcctaacgccccacagatcatggcaatcttgaatctcacgccggatagtttctatgaaaagagccggtttgatagcaaaaaagcgcttgaagaaatctatcaatggctagaaaagggtatcacgctcattgatataggcgcggccagttcaaggccacagagtgaaatcattgatcccaaagtagagcaagatcgcttgaaagaaattttattagagatcaaatcccaaaaactctaccaacgcgcccaatttagcatagacacctaccatgccacaaccgcccaaatggctttggagcattatttttctatccttaatgacgtgagcggttttaatagcattgaaatgctagaagtcgcaagagattaccagcccacttgcattttaatgcacgctcaaaaaacccccaaagacatgcaagaaaatgtcttttaccacaatttatttgatgaaatggatcgcttctttaaggaaaaactagaggttttagaaaaatacacgcttcaagatattattttagatattgggtttggattcgctaaattaaaagagcataatttagccttaatcaagcatttaagccactttctcaaattcaaaaaacccttattggtgggagcgagtcgtaaaaacacgatcgggcttatcaccgggcgtgaagttcaagaccggctcgccggcactttgagtttgcatttaatggcgttgcaaaatggagcgagtattttaagagcgcatgacattgatgagcatatcgatctcatcaaggtgtttaagagtttggaagaaacggattga

SEQ ID NO: 1955 - DNA (genomic), 1038 bp, Helicobacter pylori; double-stranded, circular
  misc_feature (B) LOCATION 1...1038
  hypothetical: NO
  anti-sense: NO
atgatattatacattcatatccccttttgtgaaaataaatgcggttattgcgctttcaattcctatgaaaacaagcatgggttaaaagaagaatacattcaagcgttgtgcctggatttaaagcatgcgttaagccaaactgacgaaccaattgaaagtatttttattggcggcggcacgcccaacactttgagcgtgaaggcttttgaaaggatttttgaaagcattcatcaacatgcgagcttgagcatggattgtgaaatcaccactgaagctaaccctgaattgatttctaaagcttggtgtcaaggcttaaaagatttagggatcaaccgcttgagtttaggggtgcaaagttttagggaggataaattgttgtttttagagcgccagcattccaaaaatatcgcccctgtgatagaaattatttttaaaagcgggattgaaaatatcagcattgatttgatttataacaccccactagacaatgaaacctccttaaaagaagaattgaaactcgctaaagaactccccataaaccacttgagcgcttatgctttgagtattgaaaaaaacacgaatttagaaaaaaacgccaaaaaaccctcaagcgtggattttgacaatgtggtgagagaggttttagagggcttttttttcaagcaatacgaagtgtctaattacgctagaaattatcaagtcaaacacaacttagcttactggggggctaaagattatttagggtgtggggctggggctgtgggctgcgtggcgaatgagcgcttttatgcgaaaaaactcatagaaaactacattaaagaccccctaaaacgccaagttgagacgcttaataaacaagacaagtgcttagaaaagctgtttttaggcttgaggtgtgaattgggggttgagcttagcttgttagatgaaaataaagtaaagtttttgattgaagagaataaggctttcattaaaaataaccgattgatagcgagcgattttttcatggccgatgaaatggctttgtggctgttgtga

SEQ ID NO: 1956 - DNA (genomic), 1059 bp, Helicobacter pylori; double-stranded, circular
  misc_feature (B) LOCATION 1...1059
  hypothetical: NO
  anti-sense: NO
atgaaaatgggagaaataaatatgatattatacattcatatccccttttgtgaaaataaatgcggttattgcgctttcaattcctatgaaaacaagcatgggttaaaagaagaatacattcaagcgttgtgcctggatttaaagcatgcgttaagccaaactgacgaaccaattgaaagtatttttattggcggcggcacgcccaacactttgagcgtgaaggcttttgaaaggatttttgaaagcattcatcaacatgcgagcttgagcatggattgtgaaatcaccactgaagctaaccctgaattgatttctaaagcttggtgtcaaggcttaaaagatttagggatcaaccgcttgagtttaggggtgcaaagttttagggaggataaattgttgtttttagagcgccagcattccaaaaatatcgcccctgtgatagaaattatttttaaaagcgggattgaaaatatcagcattgatttgatttataacaccccactagacaatgaaacctccttaaaagaagaattgaaactcgctaaagaactccccataaaccacttgagcgcttatgctttgagtattgaaaaaaacacgaatttagaaaaaaacgccaaaaaaccctcaagcgtggattttgacaatgtggtgagagaggttttagagggcttttttttcaagcaatacgaagtgtctaattacgctagaaattatcaagtcaaacacaacttagcttactggggggctaaagattatttagggtgtggggctggggctgtgggctgcgtggcgaatgagcgcttttatgcgaaaaaactcatagaaaactacattaaagaccccctaaaacgccaagttgagacgcttaataaacaagacaagtgcttagaaaagctgtttttaggcttgaggtgtgaattgggggttgagcttagcttgttagatgaaaataaagtaaagtttttgattgaagagaataaggctttcattaaaaataaccgattgatagcgagcgattttttcatggccgatgaaatggctttgtggctgttgtga

SEQ ID NO: 1957 - DNA (genomic), 1092 bp, Helicobacter pylori; double-stranded, circular
  misc_feature (B) LOCATION 1...1092
  hypothetical: NO
  anti-sense: NO
tacaattacaagtttaagctttgcttaaaaaatgaaatgaaaatgggaggaataaatatgatattatacattcatatccccttttgtgaaaataaatgcggttattgcgctttcaattcctatgaaaacaagcatgggttaaaagaagaatacattcaagcgttgtgcctggatttaaagcatgcgttaagccaaactgacgaaccaattgaaagtatttttattggcggcggcacgcccaacactttgagcgtgaaggcttttgaaaggatttttgaaagcattcatcaacatgcgagcttgagcatggattgtgaaatcaccactgaagctaaccctgaattgatttctaaagcttggtgtcaaggcttaaaagatttagggatcaaccgcttgagtttaggggtgcaaagttttagggaggataaattgttgtttttagagcgccagcattccaaaaatatcgcccctgtgatagaaattatttttaaaagcgggattgaaaatatcagcattgatttgatttataacaccccactagacaatgaaacctccttaaaagaagaattgaaactcgctaaagaactccccataaaccacttgagcgcttatgctttgagtattgaaaaaaacacgaatttagaaaaaaacgccaaaaaaccctcaagcgtggattttgacaatgtggtgagagaggttttagagggcttttttttcaagcaatacgaagtgtctaattacgctagaaattatcaagtcaaacacaacttagcttactggggggctaaagattatttagggtgtggggctggggctgtgggctgcgtggcgaatgagcgcttttatgcgaaaaaactcatagaaaactacattaaagaccccctaaaacgccaagttgagacgcttaataaacaagacaagtgcttagaaaagctgtttttaggcttgaggtgtgaattgggggttgagcttagcttgttagatgaaaataaagtaaagtttttgattgaagagaataaggctttcattaaaaataaccgattgatagcgagcgattttttcatggccgatgaaatggctttgtggctgttg

SEQ ID NO: 1958 - DNA (genomic), 654 bp, Helicobacter pylori; double-stranded, circular
  misc_feature (B) LOCATION 1...654
  hypothetical: NO
  anti-sense: NO
gtgcattctcaaagaatcgccccttataagactctcatcttaaatgaattgcactactatcctttagaatcggatttaaccccttttaacgccctgattttcacttctaaaaatgcggtgttttccttgctagaaaccctaaacaacagccccaaactcaaaatgttacaaaacattcctgcttacgctttgagcgaacccaccgcaaaaactctacaagatcaccattttaaaaccgcctttatagggaaaaaagcccatggcaaagagttcgccaaagaaatccttcccttattggaaaaaaaaagcgttttgtatctcagggcaaaagagattgcttcttctttagatactattcttttagagcatggcattaatcttcaacaagccgttgtttatgaaaacaagctcaaacatttgactttaagcgaacaaaacgccctgaaaccccaagaaaagagcgttcttattttcaccgccataagccatgcaaaagcctttttacactattttgaatttttaaagagttacaccgctatcagcattggcaacacgaccgcccattatttacaagaacaaggcattcaaagctataccgcccaaaagccctccttagaatcgtgtttagaactggctttaaatttgaaaagttaa

SEQ ID NO: 1959 - DNA (genomic), 672 bp, Helicobacter pylori; double-stranded, circular
  misc_feature (B) LOCATION 1...672
  hypothetical: NO
  anti-sense: NO
atgagggagattgtatgggtgcattctcaaagaatcgccccttataagactctcatcttaaatgaattgcactactatcctttagaatcggatttaaccccttttaacgccctgattttcacttctaaaaatgcggtgttttccttgctagaaaccctaaacaacagccccaaactcaaaatgttacaaaacattcctgcttacgctttgagcgaacccaccgcaaaaactctacaagatcaccattttaaaaccgcctttatagggaaaaaagcccatggcaaagagttcgccaaagaaatccttcccttattggaaaaaaaaagcgttttgtatctcagggcaaaagagattgcttcttctttagatactattcttttagagcatggcattaatcttcaacaagccgttgtttatgaaaacaagctcaaacatttgactttaagcgaacaaaacgccctgaaaccccaagaaaagagcgttcttattttcaccgccataagccatgcaaaagcctttttacactattttgaatttttaaagagttacaccgctatcagcattggcaacacgaccgcccattatttacaagaacaaggcattcaaagctataccgcccaaaagccctccttagaatcgtgtttagaactggctttaaatttgaaaagttaa

SEQ ID NO: 1960 - DNA (genomic), 681 bp, Helicobacter pylori; double-stranded, circular
  misc_feature (B) LOCATION 1...681
  hypothetical: NO
  anti-sense: NO
aaaaaactaggcatgagggagattgtatgggtgcattctcaaagaatcgccccttataagactctcatcttaaatgaattgcactactatcctttagaatcggatttaaccccttttaacgccctgattttcacttctaaaaatgcggtgttttccttgctagaaaccctaaacaacagccccaaactcaaaatgttacaaaacattcctgcttacgctttgagcgaacccaccgcaaaaactctacaagatcaccattttaaaaccgcctttatagggaaaaaagcccatggcaaagagttcgccaaagaaatccttcccttattggaaaaaaaaagcgttttgtatctcagggcaaaagagattgcttcttctttagatactattcttttagagcatggcattaatcttcaacaagccgttgtttatgaaaacaagctcaaacatttgactttaagcgaacaaaacgccctgaaaccccaagaaaagagcgttcttattttcaccgccataagccatgcaaaagcctttttacactattttgaatttttaaagagttacaccgctatcagcattggcaacacgaccgcccattatttacaagaacaaggcattcaaagctataccgcccaaaagccctccttagaatcgtgtttagaactggctttaaatttgaaaagt

SEQ ID NO: 1961 - DNA (genomic), 654 bp, Helicobacter pylori; double-stranded, circular
  misc_feature (B) LOCATION 1...654
  hypothetical: NO
  anti-sense: NO
atgtttgatgcgaattgtttgaaactcatgtttgtggctggttcgcaagatttctaccatataaaaggcgataggacaaacgcgcttttagacactttagaattagctttacaatctaaaatcacagcgtttcaattccgccaaaaaggcgatttagccttacaagatcctgttgaaatcaaacgattagccctagagtgtcaaaaattatgcaaaaaatacggcacgccttttattattaatgatgaggtgcgactcgcgctagaattaaaggctgatggcgtgcatgtggggcaagaagacatggctatagaagaggtagtaactttatgccaaaagcgcctttttatcggtttgagcgtcaatactttagagcaagccctaaaagcgcgccatttagatcatatagcctatttaggggtaggccctattttccccacaccctctaaaaaagacgctaaagaagttgtaggcgtcaatcttttaaaaaaaatacacgatagcggggtagaaaaacccctgatagcgattgggggcatcacgacagataacgcttcaaaattgcaaaaattcagtggtatcgcagtcattagcgcgatcacgcaagccaaagataaagccttagcggttgaaaaacttttaaaaaatgcatga

SEQ ID NO: 1962 - DNA (genomic), 672 bp, Helicobacter pylori; double-stranded, circular
  misc_feature (B) LOCATION 1...672
  hypothetical: NO
  anti-sense: NO
atttgtggagcatcaaaaagcatgtttgatgcgaattgtttgaaactcatgtttgtggctggttcgcaagatttctaccatataaaaggcgataggacaaacgcgcttttagacactttagaattagctttacaatctaaaatcacagcgtttcaattccgccaaaaaggcgatttagccttacaagatcctgttgaaatcaaacgattagccctagagtgtcaaaaattatgcaaaaaatacggcacgccttttattattaatgatgaggtgcgactcgcgctagaattaaaggctgatggcgtgcatgtggggcaagaagacatggctatagaagaggtagtaactttatgccaaaagcgcctttttatcggtttgagcgtcaatactttagagcaagccctaaaagcgcgccatttagatcatatagcctatttaggggtaggccctattttccccacaccctctaaaaaagacgctaaagaagttgtaggcgtcaatcttttaaaaaaaatacacgatagcggggtagaaaaacccctgatagcgattgggggcatcacgacagataacgcttcaaaattgcaaaaattcagtggtatcgcagtcattagcgcgatcacgcaagccaaagataaagccttagcggttgaaaaacttttaaaaaatgca

SEQ ID NO: 1963 - DNA (genomic), 207 bp, Helicobacter pylori; double-stranded, circular
  misc_feature (B) LOCATION 1...207
  hypothetical: NO
  anti-sense: NO
acgcttttgcatcaaatttcaaaaacagcgccgctcaatggattttcttgtaaaataaaagaaagtttaaggaggttcgttatgttgaaagaattacgccaaaaacgccccttagtgcataatatcaccaattatgtggtggcgcaatttgtggctaatggtttgttagccttaggggtatcgcctttaatgagcgatgcgattgct

SEQ ID NO: 1964 - DNA (genomic), 321 bp, Helicobacter pylori; double-stranded, circular
  misc_feature (B) LOCATION 1...321
  hypothetical: NO
  anti-sense: NO
tgggtatttcttcgcgaaagtaaggggttagattccaagcattccgctacgcctatagaaattgtcaaacgagcggctcaaaagtattctgtgatagcggtgatgacgggtaaaacagattacgtgagcgatgggaaaaaagttttgagtattactggggggagcgagtatttggctgcaattacaggggctgggtgtttacatgccgcagcgtgcgcgagctttttgagtttgaaaaaagaccccttagattctatggtgcaactttgcgctttctataaacaagccgctttcacgtgcgcaaaaaaaagcgttagaaaa

SEQ ID NO: 1965 - DNA (genomic), 759 bp, Helicobacter pylori; double-stranded, circular
  misc_feature (B) LOCATION 1...759
  hypothetical: NO
  anti-sense: NO
atgttgaaagaattacgccaaaaacgccccttagtgcataatatcaccaattatgtggtggcgcaatttgtggctaatggtttgttagccttaggggtatcgcctttaatgagcgatgcgattgctgaaatgcccgatttagcaaaaatttctgacgcgctcgctattaatattggcaccctcaatgaacgcaccattttatgcgctaaagaggctatcaaacgttacaaggctttgaataaacccatcgtgttagatcctgtggggtgttcagcgagcgctttgcgctatgacacaagcttagagcttttagaaagcaaaggaatcagcacgcttaggggcaatgctgccgaattaggctctttagtgggtatttcttgcgaaagtaaggggttagattccaagcattccgctacgcctatagaaattgtcaaacgagcggctcaaaagtattctgtgatagcggtgatgacgggtaaaacagattacgtgagcgatgggaaaaaagttttgagtattactggggggagcgagtatttggctgcaattacaggggctgggtgtttacatgccgcagcgtgcgcgagctttttgagtttgaaaaaagaccccttagattctatggtgcaactttgcgctttctataaacaagccgctttcagtgcgcaaaaaaaagcgttagaaaataacggctctaatggttcgttcttgttttattttttagacgctctaaggcttgcccatagagttagaaaatag

SEQ ID NO: 1966 - DNA (genomic), 834 bp, Helicobacter pylori; double-stranded, circular
  misc_feature (B) LOCATION 1...834
  hypothetical: NO
  anti-sense: NO
ttgcatcaaatttcaaaaacagcgccgctcaatggattttcttgtaaaataaaagaaagtttaaggaggttcgttatgttgaaagaattacgccaaaaacgccccttagtgcataatatcaccaattatgtggtggcgcaatttgtggctaatggtttgttagccttaggggtatcgcctttaatgagcgatgcgattgctgaaatgcccgatttagcaaaaatttctgacgcgctcgctattaatattggcaccctcaatgaacgcaccattttatgcgctaaagaggctatcaaacgttacaaggctttgaataaacccatcgtgttagatcctgtggggtgttcagcgagcgctttgcgctatgacacaagcttagagcttttagaaagcaaaggaatcagcacgcttaggggcaatgctgccgaattaggctctttagtgggtatttcttgcgaaagtaaggggttagattccaagcattccgctacgcctatagaaattgtcaaacgagcggctcaaaagtattctgtgatagcggtgatgacgggtaaaacagattacgtgagcgatgggaaaaaagttttgagtattactggggggagcgagtatttggctgcaattacaggggctgggtgtttacatgccgcagcgtgcgcgagctttttgagtttgaaaaaagaccccttagattctatggtgcaactttgcgctttctataaacaagccgctttcagtgcgcaaaaaaaagcgttagaaaataacggctctaatggttcgttcttgttttattttttagacgctctaaggcttgcccatagagttagaaaatag

SEQ ID NO: 1967 - DNA (genomic), 855 bp, Helicobacter pylori; double-stranded, circular
  misc_feature (B) LOCATION 1...855
  hypothetical: NO
  anti-sense: NO
ttgcatcaaatttcaaaaacagcgccgctcaatggattttcttgtaaaataaaagaaagtttaaggaggttcgttatgttgaaagaattacgccaaaaacgccccttagtgcataatatcaccaattatgtggtggcgcaatttgtggctaatggtttgttagccttaggggtatcgcctttaatgagcgatgcgattgctgaaatgcccgatttagcaaaaatttctgacgcgctcgctattaatattggcaccctcaatgaacgcaccattttatgcgctaaagaggctatcaaacgttacaaggctttgaataaacccatcgtgttagatcctgtggggtgttcagcgagcgctttgcgctatgacacaagcttagagcttttagaaagcaaaggaatcagcacgcttaggggcaatgctgccgaattaggctctttagtgggtatttcttgcgaaagtaaggggttagattccaagcattccgctacgcctatagaaattgtcaaacgagcggctcaaaagtattctgtgatagcggtgatgacgggtaaaacagattacgtgagcgatgggaaaaaagttttgagtattactggggggagcgagtatttggctgcaattacaggggctgggtgtttacatgccgcagcgtgcgcgagctttttgagtttgaaaaaagaccccttagattctatggtgcaactttgcgctttctataaacaagccgctttcagtgcgcaaaaaaaagcgttagaaaataacggctctaatggttcgttcttgttttattttttagacgctctaagcttgcccatagagttagaaaatagccttattaaggaagagttgtga

SEQ ID NO: 1968 - DNA (genomic), 990 bp, Helicobacter pylori; double-stranded, circular
  misc_feature (B) LOCATION 1...990
  hypothetical: NO
  anti-sense: NO
atgacgactaaaagagtgaatactgccacaaacaagataatgacattaaacactttcttggatacatgttttcttttcttcatcagtattcttttttacctaagtataccaatttatcctaacaaagtggtggttgtcccgcaaggttcgctcaaaaaagtgtttttttctttgaaagagcaaggcgtggatattaacgctttagatttgcttttgttgcgcctaatgggcatgcctaaaaaaggctatattgacatgggcgatggggctttaaggaagggggattttttagtccgtttgatcaaagcgaaaacggcgcaaaaaagcgttactttaatccctggagaaacccgctattttttcacgcaaattttgagcgagacttaccaactagaaacaagcgatctcaatgaagcttatgaaagcatcgctccacgattaaacggcgctgtgatagaagatggggtgatatggccagacacttatcatttacctttaggggaggacgcttttaaaatcatgcaaactttgattggtcaatccatgaaaaaacacgaagccttaagcaaacaatggcttggatactaccataaagaagagtggtttgaaaaaatcattctcgcttccattgtgcaaaaagaagccgctaatgttgaagaaatgcccctgattgcgagcgtgatttttaaccgcttgaaaaaaggcatgcctttacaaatggatggggctttgaattatcaggaattttcacacgctaaagtaaccaaagagcgcattaaaaccgataacaccccctacaatacctataaatttaagggcttgcctaaaaatcctgtagggagcgtgagcttagaagcggttagagccgtggttttccctaaaaaaacggatttcttgtattttgtgaaaatgccggataaaaaacatgctttcagcgcaacttataaggagcatttaaaaaacattaatatttctaataatcatttttaa

SEQ ID NO: 1969 - DNA (genomic), 987 bp, Helicobacter pylori; double-stranded, circular
  misc_feature (B) LOCATION 1...987
  hypothetical: NO
  anti-sense: NO
atgacgactaaaagagtgaatactgccacaaacaagataatgacattaaacactttcttggatacatgttttcttttcttcatcagtattcttttttacctaagtataccaatttatcctaacaaagtggtggttgtcccgcaaggttcgctcaaaaaagtgtttttttctttgaaagagcaaggcgtggatattaacgctttagatttgcttttgttgcgcctaatgggcatgcctaaaaaaggctatattgacatgggcgatggggctttaaggaagggggattttttagtccgtttgatcaaagcgaaaacggcgcaaaaaagcgttactttaatccctggagaaacccgctattttttcacgcaaattttgagcgagacttaccaactagaaacaagcgatctcaatgaagcttatgaaagcatcgctccacgattaaacggcgctgtgatagaagatggggtgatatggccagacacttatcatttacctttaggggaggacgcttttaaaatcatgcaaactttgattggtcaatccatgaaaaaacacgaagccttaagcaaacaatggcttggatactaccataaagaagagtggtttgaaaaaatcattctcgcttccattgtgcaaaaagaagccgctaatgttgaagaaatgcccctgattgcgagcgtgatttttaaccgcttgaaaaaaggcatgcctttacaaatggatggggctttgaattatcaggaattttcacacgctaaagtaaccaaagagcgcattaaaaccgataacaccccctacaatacctataaatttaagggcttgcctaaaaatcctgtagggagcgtgagcttagaagcggttagagccgtggttttccctaaaaaaacggatttcttgtattttgtgaaaatgccggataaaaaacatgctttcagcgcaacttataaggagcatttaaaaaacattaatatttctaataatcatttt

SEQ ID NO: 1970 - DNA (genomic), 132 bp, Helicobacter pylori; double-stranded, circular
  misc_feature (B) LOCATION 1...132
  hypothetical: NO
  anti-sense: NO
ggggttgaaaagattctaaaagtcatgggcaatcaagggcatatttttaatttagggcatgggatgttgccggatttgcccagagaaaacgccaagtatttagtgcaattagtgcatgctaaaaccaggcga

SEQ ID NO: 1971 - DNA (genomic), 879 bp, Helicobacter pylori; double-stranded, circular
  misc_feature (B) LOCATION 1...879
  hypothetical: NO
  anti-sense: NO
ggatttatgatgattttcattgacgcatgttttagaaaggaaacgccttacacacccatttggatgatgaggcaagcggggcgttaccttagcgaataccaagagagccgtaaaaaagcggggagcctcttggaattgtgtaaaaatagcgatttagccacagaagttaccctacagccggtagagattttaggcgtggatgcggctattttgtttagcgatattttagtagtgcctttggaaatgggcttgaatttggagtttatccccaaaaaggggccgcattttttagagacgattacggatttaaaaagcgtggaaagcctaaaagtaggggtttataaacaactaaactatgtctatgatacgatttctcaaacgcgccaaaagctttctaaagagaaagcgctaatcggtttttgcggatcgccttggactttagcgacttacatgatagaaggcgaggggagcaaatcgtatgccaaaagcaagaaaatgctttatagcgagcctgaagttttaaaagcgcttttagaaaagttaagccttgaattgatagagtatttgagccttcaaatccaagcaggggtcaatgcagtgatgatctttgactcatgggctagcgctttagaaaaagaagcgtatttggaattcagttgggattatttgaaaaaaatctctaaagagcttaaaaaacgctatgcgcacatcccagttatccttttccctaaagggattggcgcttatttggatagcatagatggggaatttgatttgtttggcttggatgggggcacgcctttaactgcggcaaaaaaaaaattagcggtaattatttttttgcaaggaatttacaacccacccgcctttatgataaaa

SEQ ID NO: 1972 - DNA (genomic), 876 bp, Helicobacter pylori; double-stranded, circular
  misc_feature (B) LOCATION 1...876
  hypothetical: NO
  anti-sense: NO
ggatttatgatgattttcattgacgcatgttttagaaaggaaacgccttacacacccatttggatgatgaggcaagcggggcgttaccttagcgaataccaagagagccgtaaaaaagcggggagcctcttggaattgtgtaaaaatagcgatttagccacagaagttaccctacagccggtagagattttaggcgtggatgcggctattttgtttagcgatattttagtagtgcctttggaaatgggcttgaatttggagtttatccccaaaaaggggccgcattttttagagacgattacggatttaaaaagcgtggaaagcctaaaagtaggggtttataaacaactaaactatgtctatgatacgatttctcaaacgcgccaaaagctttctaaagagaaagcgctaatcggtttttgcggatcgccttggactttagcgacttacatgatagaaggcgaggggagcaaatcgtatgccaaaagcaagaaaatgctttatagcgagcctgaagttttaaaagcgcttttagaaaagttaagccttgaattgatagagtatttgagccttcaaatccaagcaggggtcaatgcagtgatgatctttgactcatgggctagcgctttagaaaaagaagcgtatttggaattcagttgggattatttgaaaaaaatctctaaagagcttaaaaaacgctatgcgcacatcccagttatccttttccctaaagggattggcgcttatttggatagcatagatggggaatttgatttgtttggcttggatgggggcacgcctttaactgcggcaaaaaaaaaattagcggtaattatttttttgcaaggaatttacaacccacccgcctttatgata

SEQ ID NO: 1973 - DNA (genomic), 1020 bp, Helicobacter pylori; double-stranded, circular
  misc_feature (B) LOCATION 1...1020
  hypothetical: NO
  anti-sense: NO
atgattttcattgacgcatgttttagaaaggaaacgccttacacacccatttggatgatgaggcaagcggggcgttaccttagcgaataccaagagagccgtaaaaaagcggggagcttcttggaattgtgtaaaaatagcgatttagccacagaagttaccctacagccggtagagattttaggcgtggatgcggctattttgtttagcgatattttagtagtgcctttggaaatgggcttgaatttggagtttatccccaaaaaggggccgcattttttagagacgattacggatttaaaaagcgtggaaagcctaaaagtaggggtttataaacaactaaactatgtctatgatacgatttctcaaacgcgccaaaagctttctaaagagaaagcgctaatcggtttttgcggatcgccttggactttagcgacttacatgatagaaggcgaggggagcaaatcgtatgccaaaagcaagaaaatgctttatagcgagcctgaagttttaaaagcgcttttagaaaagttaagccttgaattgatagagtatttgagccttcaaatccaagcaggggtcaatgcagtgatgatctttgactcatgggctagcgctttagaaaaagaagcgtatttggaattcagttgggattatttgaaaaaaatctctaaagagcttaaaaaacgctatgcgcacatcccagttatccttttccctaaagggattggcgcttatttggatagcatagatggggaatttgatgtgtttggcgtggattggggcacgcctttaactgcggcaaaaaagattttaggcggtaagtatgttttgcaagggaatttagagcccacccgcctttatgataaaaacgctttagaagaaggggttgaaaagattctaaaagtcatgggcaatcaagggcatatttttaatttagggcatgggatgttgccggatttgcccagagaaaacgccaagtatttagtgcaattagtgcatgctaaaaccaggcgatag

SEQ ID NO: 1974 - DNA (genomic), 336 bp, Helicobacter pylori; double-stranded, circular
  misc_feature (B) LOCATION 1...336
  hypothetical: NO
  anti-sense: NO
atgcctggcgtgtatcaaatgagtatagagcctcttttaaaagaatgcgaagaattagtgggtttaggcataaaagccgttttattgtttggcattcctaaacataaggacgctacaggaagccatgcgttaaataaggatcacattgtcgcaaaagctacgagagaaattaaaaaacgatttaaggatttgatcgttatagcggatttgtgtttttgcgaatacaccgaccatgggcattgcgggattttagaaaacgcttctgtgtctaacgataaaacgctaaagattttaaatcttcaagggcttattttgctgaaagcggtgtggatattc

SEQ ID NO: 1975 - DNA (genomic), 972 bp, Helicobacter pylori; double-stranded, circular
  misc_feature (B) LOCATION 1...972
  hypothetical: NO
  anti-sense: NO
atgttcaaacgattgagaagattacgaagcagcgaaaatttaagagcgatggtgagagaaacacgtttaaatattaatgatttcatcgctcccttatttgtcatagaaagcgatagcggtattaaaaacgaaatcagctccatgcctggcgtgtatcaaatgagtatagagcctcttttaaaagaatgcgaagaattagtgggtttaggcataaaagccgttttattgtttggcattcctaaacataaggacgctacaggaagccatgcgttaaataaggatcacattgtcgcaaaagctacgagagaaattaaaaaacgatttaaggatttgatcgttatagcggatttgtgtttttgcgaatacaccgaccatgggcattgcgggattttagaaaacgcttctgtgtctaacgataaaacgctaaagattttaaatcttcaagggcttattttggctgaaagcggtgtggatattctagctccaagcaacatgatggatggcaatgttttaagcttgagaaaagcactggataaggccgggtattttcacacgcccatcatgagttattccactaaatttgcgagcagttattacgggccttttagagatgtagccaattctccgccgagttttggcgatcgcaaaagctatcaaatggattacgctaaccaaaaagaagcgcttttagaaagcttggaagatgaaaaacagggtgcggatattttaatggtgaagccggctttagcgtatctggatattgttaaagaaatcagagatcacactttgctccctttagcgctctataatgtgagtggggaatacgccatgctcaaactcgctcaaaaacacaacctgatcaactatgaaagcgttttattagaaacgatgacttgttttaaaagagcgggagcggatatgattattagctatcatgctaaagaagtggctaacttattacaaaggaattga

SEQ ID NO: 1976 - DNA (genomic), 990 bp, Helicobacter pylori; double-stranded, circular
  misc_feature (B) LOCATION 1...990
  hypothetical: NO
  anti-sense: NO
agaaaaacaaaaagagagaacatgttcaaacgattgagaagattacgaagcagcgaaaatttaagagcgatggtgagagaaacacgtttaaatattaatgatttcatcgctcccttatttgtcatagaaagcgatagcggtattaaaaacgaaatcagctccatgcctggcgtgtatcaaatgagtatagagcctcttttaaaagaatgcgaagaattagtgggtttaggcataaaagccgttttattgtttggcattcctaaacataaggacgctacaggaagccatgcgttaaataaggatcacattgtcgcaaaagctacgagagaaattaaaaaacgatttaaggatttgatcgttatagcggatttgtgtttttgcgaatacaccgaccatgggcattgcgggattttagaaaacgcttctgtgtctaacgataaaacgctaaagattttaaatcttcaagggcttattttggctgaaagcggtgtggatattctagctccaagcaacatgatggatggcaatgttttaagcttgagaaaagcactggataaggccgggtattttcacacgcccatcatgagttattccactaaatttgcgagcagttattacgggccttttagagatgtagccaattctccgccgagttttggcgatcgcaaaagctatcaaatggattacgctaaccaaaaagaagcgcttttagaaagcttggaagatgaaaaacagggtgcggatattttaatggtgaagccggctttagcgtatctggatattgttaaagaaatcagagatcacactttgctccctttagcgctctataatgtgagtggggaatacgccatgctcaaactcgctcaaaaacacaacctgatcaactatgaaagcgttttattagaaacgatgacttgttttaaaagagcgggagcggatatgattattagctatcatgctaaagaagtggctaacttattacaaaggaat

SEQ ID NO: 1977 - DNA (genomic), 1017 bp, Helicobacter pylori; double-stranded, circular
  misc_feature (B) LOCATION 1...1017
  hypothetical: NO
  anti-sense: NO
atggacggctatgggtttaaaatgcaagacttgggccaaaaaactcaagttatccaacacatctttgccggggatgatgtgagcgctttagaagtcaaagaaaatgaatgcgttaaaatcrtgactggagcgatggtgccaaagggaatagaaacgattgttcccatagaatgcatgctagagagtcataaagatttcgccctagctcctaaagattttaaaattcacgctaatatccgtcaaaagggcgagaacgcttctttaaacagcgttttagtccctaaaaatacccgtttgaattatggccatatcgcgctcattgcctctcaagggttcaaagaaatcaaagcgtttagaaaattaaaaatcgctctctttagtagcggcgatgaattagtgcctttagggcaaaacgccctagagtgccaggtttatgatgttaattcagtgggtgtttttaacatgcttaaaaactacaacacgcattttctaggggttttaaaagatgataaaaatttacagcttaaaatacttgaattgcaaggctatgatgtcatcctttcaagtgcgggggtgagcgtaggggataaagacttttttaaagacgctttgaaagaaagaaacgcccttttttattacgaaaaagtcaatctcaaacctggaaagccggtaactttagcccaactcaatcaaagcattattataggcttaccgggtaatcctttaagttgcttactggttttacgagttttgattctacccttattggagcgcttatccttaaataaagattttaaattaaaaccctttaaggctcaaatcaatgcccctttaaagcttaataacaaacggacgcatttaatcttaggcaactattcaaaccaccaattcattccttacaacaaccgctatgaatcaggagcgattcaagcccttgcgcaagtggattctatcrctttaattgatgaaggagtgggattggttcagggcgaaattgaaattttaaggtttgaaaat

SEQ ID NO: 1978 - DNA (genomic), 1074 bp, Helicobacter pylori; double-stranded, circular
  misc_feature (B) LOCATION 1...1074
  hypothetical: NO
  anti-sense: NO
ttggcagaggatattatttgcgttcacgctttgcctaaattcaatcaaagcgctatggacggctatgggtttaaaatgcaagacttgggccaaaaaactcaagttatccaacacatctttgccggggatgatgtgagcgctttagaagtcaaagaaaatgaatgcgttaaaatcatgactggagcgatggtgccaaagggaatagaaacgatcgttcccatagaatgcatgctagagagtcataaagatttcgccctagctcctaaagattttaaaattcacgctaatatccgtcaaaagggcgagaacgcttctttaaacagcgttttagtccctaaaaatacccgtttgaattatggccatatcgcgctcattgcctctcaagggttcaaagaaatcaaagcgtttagaaaattaaaaatcgctctctttagtagcggcgatgaattagtgcctttagggcaaaacgccctagagtgccaggtttatgatgttaattcagtgggtgtttttaacatgcttaaaaactacaacacgcattttctaggggttttaaaagatgataaaaatttacagcttaaaatacttgaattgcaaggctatgatgtcatcctttcaagtgcgggggtgagcgtaggggataaagacttttttaaagacgctttgaaagaaagaaacgcccttttttattacgaaaaagtcaatctcaaacctggaaagccggtaactttagcccaactcaatcaaagcattattataggcttaccgggtaatcctttaagttgcttactggttttacgagttttgattctacccttattggagcgcttatccttaaataaagattttaaattaaaaccctttaaggctcaaatcaatgcccctttaaagcttaataacaaacggacgcatttaatcttaggcaactattcaaaccaccaattcattccttacaacaaccgctatgaatcaggagcgattcaagcccttgcgcaagtggattctatcgctttaattgatgaaggagtgggattggttcagggcgaaattgaaattttaaggtttgaaaattaa

SEQ ID NO: 1979 - DNA (genomic), 1086 bp, Helicobacter pylori; double-stranded, circular
  misc_feature (B) LOCATION 1...1086
  hypothetical: NO
  anti-sense: NO
agcgcagggcgcattttggcagaggatattatttgcgttcacgctttgcctaaattcaatcaaagcgctatggacggctatgggtttaaaatgcaagacttgggccaaaaaactcaagttatccaacacatctttgccggggatgatgtgagcgctttagaagtcaaagaaaatgaatgcgttaaaatcatgactggagcgatggtgccaaagggaatagaaacgatcgttcccatagaatgcatgctagagagtcataaagatttcgccctagctcctaaagattttaaaattcacgctaatatccgtcaaaagggcgagaacgcttctttaaacagcgttttagtccctaaaaatacccgtttgaattatggccatatcgcgctcattgcctctcaagggttcaaagaaatcaaagcgtttagaaaattaaaaatcgctctctttagtagcggcgatgaattagtgcctttagggcaaaacgccctagagtgccaggtttatgatgttaattcagtgggtgtttttaacatgcttaaaaactacaacacgcattttctaggggttttaaaagatgataaaaatttacagcttaaaatacttgaattgcaaggctatgatgtcatcctttcaagtgcgggggtgagcgtaggggataaagacttttttaaagacgctttgaaagaaagaaacgcccttttttattacgaaaaagtcaatctcaaacctggaaagccggtaactttagcccaactcaatcaaagcattattataggcttaccgggtaatcctttaagttgcttactggttttacgagttttgattctacccttattggagcgcttatccttaaataaagattttaaattaaaaccctttaaggctcaaatcaatgcccctttaaagcttaataacaaacggacgcatttaatcttaggcaactattcaaaccaccaattcattccttacaacaaccgctatgaatcaggagcgattcaagcccttgcgcaagtggattctatcgctttaattgatgaaggagtgggattggttcagggcgaaattgaaattttaaggtttgaaaat

SEQ ID NO: 1980 - DNA (genomic), 1173 bp, Helicobacter pylori; double-stranded, circular
  misc_feature (B) LOCATION 1...1173
  hypothetical: NO
  anti-sense: NO
atgattagttttaaagaagctctaaaaatccattctaacattcccctaaaacccttagaagtagaggttgtctctttgtttgaaagcgcagggcgcattttggcagaggatattatttgcgttcacgctttgcctaaattcaatcaaagcgctatggacggctatgggtttaaaatgcaagacttgggccaaaaaactcaagttatccaacacatctttgccggggatgatgtgagcgctttagaagtcaaagaaaatgaatgcgttaaaatcatgactggagcgatggtgccaaagggaatagaaacgatcgttcccatagaatgcatgctagagagtcataaagatttcgccctagctcctaaagattttaaaattcacgctaatatccgtcaaaagggcgagaacgcttctttaaacagcgttttagtccctaaaaatacccgtttgaattatggccatatcgcgctcattgcctctcaagggttcaaagaaatcaaagcgtttagaaaattaaaaatcgctctctttagtagcggcgatgaattagtgcctttagggcaaaacgccctagagtgccaggtttatgatgttaattcagtgggtgtttttaacatgcttaaaaactacaacacgcattttctaggggttttaaaagatgataaaaatttacagcttaaaatacttgaattgcaaggctatgatgtcatcctttcaagtgcgggggtgagcgtaggggataaagacttttttaaagacgctttgaaagaaagaaacgcccttttttattacgaaaaagtcaatctcaaacctggaaagccggtaactttagcccaactcaatcaaagcattattataggcttaccgggtaatcctttaagttgcttactggttttacgagttttgattctacccttattggagcgcttatccttaaataaagattttaaattaaaaccctttaaggctcaaatcaatgcccctttaaagcttaataacaaacggacgcatttaatcttaggcaactattcaaaccaccaattcattccttacaacaaccgctatgaatcaggagcgattcaagcccttgcgcaagtggattctatcgctttaattgatgaaggagtgggattggttcagggcgaaattgaaattttaaggtttgaaaattaa

SEQ ID NO: 1981 - DNA (genomic), 639 bp, Helicobacter pylori; double-stranded, circular
  misc_feature (B) LOCATION 1...639
  hypothetical: NO
  anti-sense: NO
atgaaaaaatgtgaaaaaagggtttttgatagtttgccttccacgcaaacctatcttttagaaaaacttaaaagtaataaactcaaagcccctgttttagtcttggctaaaaaccaaagcgctgggataggcagtagggggaatatttgggagatcgtggaaagtgctttgactttttcgctcgctttaaacgcaagcgatttgcctaaagatttacccatgcaagcgagcgctttgtatttggggtttttattcaaagaagttttaaaagagctaggctctcaaacctggcttaaatggcctaacgatctgtatttaggggatcaaaaaatagggggcgtgatggttaatgtttataagggcatgcgggtgtgtgggattggcgtgaatagggtttcaacaaaatgggcatgtttggatattggcgcgagcgatgattggattatagagagctttttaaaaaaaatagaagaaaatcttttttggggggaagttttaagtaagtatgcgttagaatttcatagaagcaactcttttaacttccataatgattggggcgaagcggtgagtttgaaagatgcggaattgttagaagacggccgtatttgtattaaaggtaagatttatgataggatgtga

SEQ ID NO: 1982 - DNA (genomic), 699 bp, Helicobacter pylori; double-stranded, circular
  misc_feature (B) LOCATION 1...699
  hypothetical: NO
  anti-sense: NO
aaagcctttgaaagcgaaggattatttgaatggcaggcgtttgaaagtgggcggtattctaacatgaaaaaatgtgaaaaaagggtttttgatagtttgccttccacgcaaacctatcttttagaaaaacttaaaagtaataaactcaaagcccctgttttagtcttggctaaaaaccaaagcgctgggataggcagtagggggaatatttgggagatcgtggaaagtgctttgactttttcgctcgctttaaacgcaagcgatttgcctaaagatttacccatgcaagcgagcgctttgtatttggggtttttattcaaagaagttttaaaagagctaggctctcaaacctggcttaaatggcctaacgatctgtatttaggggatcaaaaaatagggggcgtgatggttaatgtttataagggcatgcgggtgtgtgggattggcgtgaatagggtttcaacaaaatgggcatgtttggatattggcgcgagcgatgattggattatagagagctttttaaaaaaaatagaagaaaatcttttttggggggaagttttaagtaagtatgcgttagaatttcatagaagcaactcttttaacttccataatgattggggcgaagcggtgagtttgaaagatgcggaattgttagaagacggccgtatttgtattaaaggtaagatttatgataggatg

SEQ ID NO: 1983 - DNA (genomic), 168 bp, Helicobacter pylori; double-stranded, circular
  misc_feature (B) LOCATION 1...168
  hypothetical: NO
  anti-sense: NO
atgcaagagatttttttatgttctatttccaatgtgcgcagtggggattgcaaggaagattgcgcttattgcacgcaaagctcgcaccaccaaggagcgatcaagcgctataaatttaaagatgaaaaagtggttttacaagaggctagggactttaagggagattag

SEQ ID NO: 1984 - DNA (genomic), 189 bp, Helicobacter pylori; double-stranded, circular
  misc_feature (B) LOCATION 1...189
  hypothetical: NO
  anti-sense: NO
aacaaaggaatgattatgcaagagatttttttatgttctatttccaatgtgcgcagtggggattgcaaggaagattgcgcttattgcacgcaaagctcgcaccaccaaggagcgatcaagcgctataaatttaaagatgaaaaagtggttttacaagaggctagggctttaagggagattaggggactt

SEQ ID NO: 1985 - DNA (genomic), 579 bp, Helicobacter pylori; double-stranded, circular
  misc_feature (B) LOCATION 1...579
  hypothetical: NO
  anti-sense: NO
ttgcatctgatcgcatgttgcgggcgcgcggatttggagcaattagagtttttaagagatgcgggcatccatagctataaccacaatttagagacttcgcaaaattttttccctaaaatttgcaccacacacacatgggaagaaaggtttatcacatgcgaaaacgctttaagggcggggttaggcttgtgcagtggggggatttttgggcttaatgagagctgggaagatcggattgaaatgcttagggcgttagcttcactttccccacacaccacgccgattaattttttcattaaaaacccggtattacccattgatgcagagactttaagcgcggatgaagccctagaatgcgtgcttttagctaaagagtttttgcctaacgctaggcttatggtggctggggggcgtgaagtggtgtttaaggataacgataaacaggaagccaagctttttgaatacggcatcaatgcggtggtgttaggggactatttgaccaccaaaggcaaagcccctaaaaaagatatagaaaaactgctctcttacggcttgacaatggcgacaagctgtcattaa

SEQ ID NO: 1986 - DNA (genomic), 681 bp, Helicobacter pylori; double-stranded, circular
  misc_feature (B) LOCATION 1...681
  hypothetical: NO
  anti-sense: NO
gggactttagggttttgtctggttacttcagggcgcgaattagacgatgaaaaatgcgaatacatcgctaaattagcaaaagccatcaacaaagaagaattaggcttgcatctgatcgcatgttgcgggcgcgcggatttggagcaattagagtttttaagagatgcgggcatccatagctataaccacaatttagagacttcgcaaaattttttccctaaaatttgcaccacacacacatgggaagaaaggtttatcacatgcgaaaacgctttaagggcggggttaggcttgtgcagtggggggatttttgggcttaatgagagctgggaagatcggattgaaatgcttagggcgttagcttcactttccccacacaccacgccgattaattttttcattaaaaacccggtattacccattgatgcagagactttaagcgcggatgaagccctagaatgcgtgcttttagctaaagagtttttgcctaacgctaggcttatggtggctggggggcgtgaagtggtgtttaaggataacgataaacaggaagccaagctttttgaatacggcatcaatgcggtggtgttaggggactatttgaccaccaaaggcaaagcccctaaaaaagatatagaaaaactgctctcttacggcttgacaatggcgacaagctgtcat

SEQ ID NO: 1987 - DNA (genomic), 855 bp, Helicobacter pylori; double-stranded, circular
  misc_feature (B) LOCATION 1...855
  hypothetical: NO
  anti-sense: NO
atgattatgcaagagatttttttatgttctatttccaatgtgcgcagtggggattgcaaggaagattgcgcttattgcacgcaaagctcgcaccaccaaggagcgatcaagcgctataaatttaaagatgaaaaagtggttttacaagaggctagggctttaagggagttaggggctttagggttttgtctggttacttcagggcgcgaattagacgatgaaaaatgcgaatacatcgctaaattagcaaaagccatcaacaaagaagaattaggcttgcatctgatcgcatgttgcgggcgcgcggatttggagcaattagagtttttaagagatgcgggcatccatagctataaccacaatttagagacttcgcaaaattttttccctaaaatttgcaccacacacacatgggaagaaaggtttatcacatgcgaaaacgctttaagggcggggttaggcttgtgcagtggggggatttttgggcttaatgagagctgggaagatcggattgaaatgcttagggcgttagcttcactttccccacacaccacgccgattaattttttcattaaaaacccggtattacccattgatgcagagactttaagcgcggatgaagccctagaatgcgtgcttttagctaaagagtttttgcctaacgctaggcttatggtggctggggggcgtgaagtggtgtttaaggataacgataaacaggaagccaagctttttgaatacggcatcaatgcggtggtgttaggggactatttgaccaccaaaggcaaagcccctaaaaaagatatagaaaaactgctctcttacggcttgacaatggcgacaagctgtcattaa

SEQ ID NO: 1988 - DNA (genomic), 222 bp, Helicobacter pylori; double-stranded, circular
  misc_feature (B) LOCATION 1...222
  hypothetical: NO
  anti-sense: NO
atggtagaagtgcgattctttggacccataaaagaagaaaattttttcatcaaagcgaatggtttgaaagaattaagggcgattttacaagaaaaagagggcttaaaagagtggttgggcgtttgcgcgatagcccttaatgatcacttaatagacaatttggatatgcccttaaaagatggcgatgtgatcagtttattaccaccggtttgtgggggctag

SEQ ID NO: 1989 - DNA (genomic), 243 bp, Helicobacter pylori; double-stranded, circular
  misc_feature (B) LOCATION 1...243
  hypothetical: NO
  anti-sense: NO
aaggcgcaatatagaggtaagataatggtagaagtgcgattctttggacccataaaagaagaaaattttttcatcaaagcgaatggtttgaaagaattaagggcgattttacaagaaaaagagggcttaaaagagtggttgggcgtttggccgatagcccttaatgatcacttaatagacaatttggatatgcccttaaaagatggcgatgtgatcagtttattaccaccggtttgtgggggc

SEQ ID NO: 1990 - DNA (genomic), 321 bp, Helicobacter pylori; double-stranded, circular
  misc_feature (B) LOCATION 1...321
  hypothetical: NO
  anti-sense: NO
atgagtcactatattgaattaactgaagaaaattttgaaagcaccattaaaaaaggggttgcgttagtggatttttgggcaccatggtgtggtccttgtaagatgctatcccctgtgattgatgaattagctagcgaatatgaaggtaaggctaagatttgtaaagttaataccgatgagcaagaagaattgagcgcgaaatttggtattaggagcattcctacgcttttattcacaaaagatggcgaagttgtccatcagttggtgggcgtgcaaactaaagtcgctttaaaagagcaattgaacaagcttttaggctag

SEQ ID NO: 1991 - DNA (genomic), 321 bp, Helicobacter pylori; double-stranded, circular
  misc_feature (B) LOCATION 1...321
  hypothetical: NO
  anti-sense: NO
ccaatgagtcactatattgaattaactgaagaaaattttgaaagcaccattaaaaaaggggttgcgttagtggatttttgggcaccatggtgtggtccttgtaagatgctatcccctgtgattgatgaattagctagcgaatatgaaggtaaggctaagatttgtaaagttaataccgatgagcaagaagaattgagcgcgaaatttggtattaggagcattcctacgcttttattcacaaaagatggcgaagttgtccatcagttggtgggcgtgcaaactaaagtcgctttaaaagagcaattgaacaagcttttaggc

SEQ ID NO: 1992 - DNA (genomic), 198 bp, Helicobacter pylori; double-stranded, circular
  misc_feature (B) LOCATION 1...198
  hypothetical: NO
  anti-sense: NO
gtggccatgatagattgcgcgattattggaggtggtcctgcaggtttgagtgcggggctttatgccactagaggcggtgttaaaaacgccgttttatttgaaaaaggaatgcctggggggcaaatcactggcagtagtgagattgaaaattatccgggcgttaaggaagtggtgagcggattggatttcatgcaacca

SEQ ID NO: 1993 - DNA (genomic), 936 bp, Helicobacter pylori; double-stranded, circular
  misc_feature (B) LOCATION 1...936
  hypothetical: NO
  anti-sense: NO
atgatagattgcgcgattattggaggtggtcctgcaggtttgagtgcggggctttatgccactagaggcggtgttaaaaacgccgttttatttgaaaaaggaatgcctggggggcaaatcactggcagtagtgagattgaaaattatccgggcgttaaggaagtggtgagcggattggatttcatgcaaccatggcaggagcaatgctttcgctttggtttaaagcatgagatgaccgccattcaaagggtttctaaaaaaggttctcattttgttattttggcagaagatggcaagacttttgaagctaagagcgtgatcatcgctaccggtggtagccctaaacgcacaggtatcaagggcgagtcagaatattggggtaaaggcgttagcacttgtgcaacatgcgatggcttcttttacaaaaataaggaagtagcggtgcttggtggaggcgataccgccgtagaagaggcgatttatctagccaatatctgcaaaaaagtctatctcatccacagaagagatggttttaggtgtgcgcctatcactttagagcatgctaaaaacaatagtaagattgagtttttaaccccttatgtggtggaagaaatcaagggcgatgcttctggcgtgtcttctttaagcattaaaaacacagccactaacgaaaaaagagaattagtcgtgccggggctttttatttttgtgggttatgatgtgaataacgccgtgttgaagcaagaagataactccatgctatgcgaatgcgatgaatacggctctattgtcgtggatttttccatgaagacgaatgttcagggcttgtttgcggcaggagatattcgcatttttgcccccaagcaagtggtttgtgcggcaagcgatggtgctacggcagccttaagcgtgatttcttatttagaacaccattaa

SEQ ID NO: 1994 - DNA (genomic), 978 bp, Helicobacter pylori; double-stranded, circular
  misc_feature (B) LOCATION 1...978
  hypothetical: NO
  anti-sense: NO
agtcgctttaaaagagcaattgaacaagcttttaggctagtggccatgatagattgcgcgattattggaggtggtcctgcaggtttgagtgcggggctttatgccactagaggcggtgttaaaaacgccgttttatttgaaaaaggaatgcctggggggcaaatcactggcagtagtgagattgaaaattatccgggcgttaaggaagtggtgagcggattggatttcatgcaaccatggcaggagcaatgctttcgctttggtttaaagcatgagatgaccgccattcaaagggtttctaaaaaaggttctcattttgttattttggcagaagatggcaagacttttgaagctaagagcgtgatcatcgctaccggtggtagccctaaacgcacaggtatcaagggcgagtcagaatattggggtaaaggcgttagcacttgtgcaacatgcgatggcttcttttacaaaaataaggaagtagcggtgcttggtggaggcgataccgccgtagaagaggcgatttatctagccaatatctgcaaaaaagtctatctcatccacagaagagatggttttaggtgtgcgcctatcactttagagcatgctaaaaacaatagtaagattgagtttttaaccccttatgtggtggaagaaatcaagggcgatgcttctggcgtgtcttctttaagcattaaaaacacagccactaacgaaaaaagagaattagtcgtgccggggctttttatttttgtgggttatgatgtgaataacgccgtgttgaagcaagaagataactccatgctatgcgaatgcgatgaatacggctctattgtcgtggatttttccatgaagacgaatgttcagggcttgtttgcggcaggagatattcgcatttttgcccccaagcaagtggtttgtgcggcaagcgatggtgctacggcagccttaagcgtgatttcttatttagaacaccat

SEQ ID NO: 1995 - DNA (genomic), 150 bp, Helicobacter pylori; double-stranded, circular
  misc_feature (B) LOCATION 1...150
  hypothetical: NO
  anti-sense: NO
ttgatcatcaatcttcctggtaagccaaaaagtattagagaatgtttagaggcggtttttccggcaattccttattgcgtggatttgattttagggaattacatgcaagtgaatgaaaaaaacattcaagcgtttcgccccaaacaatag

SEQ ID NO: 1996 - DNA (genomic), 183 bp, Helicobacter pylori; double-stranded, circular
  misc_feature (B) LOCATION 1...183
  hypothetical: NO
  anti-sense: NO
aatacgtgcctacagcgattctatggccagagcgctggcattaggaataagagtttgatcatcaatcttcctggtaagccaaaaagtattagagaatgtttagaggcggtttttccggcaattccttattgcgtggatttgattttagggaattacatgcaagtgaatgaaaaaaaaattaag

SEQ ID NO: 1997 - DNA (genomic), 183 bp, Helicobacter pylori; double-stranded, circular
  misc_feature (B) LOCATION 1...183
  hypothetical: NO
  anti-sense: NO
aacgacaaatcatccattcacatggattgtttaaaccattctaaagcctctagttctaaagcccgcttaaaacaactcaatcccggtattgaagtagaaacctttgaagaacgctttaaggcccataacgctcttcctctcatagagccttacgattttatcatagacgccacggacaatgtt

SEQ ID NO: 1998 - DNA (genomic), 198 bp, Helicobacter pylori; double-stranded, circular
  misc_feature (B) LOCATION 1...198
  hypothetical: NO
  anti-sense: NO
ttgttaagccggctagacaaagagcgttatttgcgccatatcatgctagaagatgtgggcgaagaaggccaattgaagcttttaaaatctagcgttttagtcattggagccggtgggcttggatcagcggtgtggatgtatctgtgcactgctgggataggaaaaataggattgtggatttgcttcaggagatatgag

SEQ ID NO: 1999 - DNA (genomic), 615 bp, Helicobacter pylori; double-stranded, circular
  misc_feature (B) LOCATION 1...615
  hypothetical: NO
  anti-sense: NO
ttgttaagccggctagacaaagagcgttatttgcgccatatcatgctagaagatgtgggcgaagaaggccaattgaagcttttaaaatctagcgttttagtcattggagccggtgggcttggatcagcggttttgatgtatctgtgcactgctgggataggaaaaatagggattgtggattttgcttcaggagatatgagtaatttgaaacgacaaatcatccattcacaggattgtttaaaccattctaaagcctctagtgcgaaagcccgcttaaaacaactcaatgccggtattgaagtagaaacctttgaagaacgctttaaggcccataacgctcttcctctcatagagccttacgattttatcatagacgccacggacaattttaacgctaaatttttgatcaatgacgcttgcgtgttggcccaaaaaccctattcgcatgccggggttttaaaatacagggggcaaagcatgagcgttttaccccatagcgcatgcttagcgtgtgtttttgataagccccctaaaaagggattcaatcctacttcaagggctttggggggtcttgcccggggttttagggtgtatccaagcgagcgaatgccttaa

SEQ ID NO: 2000 - DNA (genomic), 615 bp, Helicobacter pylori; double-stranded, circular
  misc_feature (B) LOCATION 1...615
  hypothetical: NO
  anti-sense: NO
ttgttaagccggctagacaaagagcgttatttgcgccatatcatgctagaagatgtgggcgaagaaggccaattgaagcttttaaaatctagcgttttagtcattggagccggtgggcttggatcagcggttttgatgtatctgtgcactgctgggataggaaaaataggcattgtggattttgattcagtagatatgagtaatttgaaacgacaaatcatccattcacaggattgtttaaaccattctaaagcctctagtgcgaaagcccgcttaaaacaactcaatgccggtattgaagtagaaacctttgaagaacgctttaaggcccataacgctcttcctctcatagagccttacgattttatcatagacgccacggacaattttaacgctaaatttttgatcaatgacgcttgcgtgttggcccaaaaaccctattcgcatgccggggttttaaaatacagggggcaaagcatgagcgttttaccccatagcgcatgcttagcgtgtgtttttgataagccccctaaaaagggattcaatcctacttcaagggctttggggggtcttgcccggggttttagggtgtatccaagcgagcgaatgccttaa

SEQ ID NO: 2001 - DNA (genomic), 414 bp, Helicobacter pylori; double-stranded, circular
  misc_feature (B) LOCATION 1...414
  hypothetical: NO
  anti-sense: NO
agaaccactgaaagaatcgctctcgcaagcggtcgtattagcatgaataaagatgcttatgacgctattatcaatcatggcgtcaaaaagggtccggtgttacagaccgctattattgctgggatcatggcggctaaaaagacaagcgagctcattcctatgtgccatccaatcatgctcaatggggtggatattgacattttagaagaaaaagagacttgcagctttaaactctatgccagagtcaaaactcaagctaaaacgggcgtggaaatggaagcgctaatgagtgtgagcatagggcttttaaccatttatgacatggtgaaagtcattgataagagcatgacaattagcggtgtgatgttggaacataagagtggaggcaaaagcggggattataacgctaaaaaa

SEQ ID NO: 2002 - DNA (genomic), 477 bp, Helicobacter pylori; double-stranded, circular
  misc_feature (B) LOCATION 1...477
  hypothetical: NO
  anti-sense: NO
atgccgctcactcatttgaacgaagaaaatcagcctaaaatggtggatataggggataaagaaaccactgaaagaatcgctctcgcaagcggtcgtattagcatgaataaagaggcttatgacgctattatcaatcatggcgtcaaaaagggtccggtgttacagaccgctattattgctgggatcatggcggctaaaaagacaagcgagctcattcctatgtgccatccaatcatgctcaatggggtggatattgacattttagaagaaaaagagacttgcagctttaaactctatgccagagtcaaaactcaagctaaaacgggcgtggaaatggaagcgctaatgagtgtgagcatagggcttttaaccatttatgacatggtgaaagtcattgataagagcatgacaattagcggtgtgatgttggaacataagagtggaggcaaaagcggggattataacgctaaaaaatag

SEQ ID NO: 2003 - DNA (genomic), 375 bp, Helicobacter pylori; double-stranded, circular
  misc_feature (B) LOCATION 1...375
  hypothetical: NO
  anti-sense: NO
agagtttttaacatgaattttcaagaaaatctggccgctttggatttagaatacctttggcacccttgctcgcaaatgcaagagcatcaaaatttccccattatccccattaaaaaggctcaagggatttacctctatgattttaacgataacgcttacatggatttaatcagctcatggtgggtgaatctttttgggcataataacgcctacatcagccaacagcttaaaaatcaaattgataatttagagcatgtccttttggcctcttttagccataagcccatcattacgctctctcaaggctttgccagctcaccggtatggataaatgcttttatgcggataacggctcatcttgtattgaaatcgctt

SEQ ID NO: 2004 - DNA (genomic), 1047 bp, Helicobacter pylori; double-stranded, circular
  misc_feature (B) LOCATION 1...1047
  hypothetical: NO
  anti-sense: NO
gcccatcattacgctctctcaaggctttgccagctcaccggtatggataaatgcttttatgcggataacggctcatcttgtattgaaatcgctttgaaaatgagctatcacgcccattttttaaaaaaccaaacgcgccgcaaaaagctttttttatcactttataattcctatcatggcgagactttgggagcgttaagcgtgggcgatgtgaaactttataaagacacttacacccccttattgctcaaaaatctcatcacgcccgtgcctaaaaacgacagcgagatagaaaatagtttgaacgctttaaagcgtttgttggataagcatggtgaagaaatttgcgcctttattgcagagccgcttttgcaatgcgcggggaatatgcatatttatagcgcgaaatatttaaaacaagccgttttatggtgcaagcaaaaaaacatccacattatttttgatgaaatcgctaccgggtttgggcgcacagggagcatgtttgcttatgagcaatgcggaattaagcctgattttttatgcttgtctaaagggattagcggggggtatttgcctttaagcgcgctattaacgcataatgaaatctataaccaattttacgccccctatgaagaaaataaagcgtttttgcattcgcacagctacacaggaaacgccctggcatgcgcatgcgcgaacgccacgctagatatttttgaaaaagaaaatgttattgaaaaaaacaaggctttgagcgagtttatttttagtgcgctccaaaacgcgttaaaacccttgatagagcggcaagtggtgtctgatttaaggcatttgggcatggtctttgcctttgaagtttttcttcaaaccaaagagcgtttgagtttagcggtttttaaaaaagctctaaaaaaaggcttgttactgcgccccttaaacaacacgatctatctcatgcctccttatattatcacgcatgaagaaatcaaaaaggcgattgcggggttagtggaagcgattgatgaattaaaaaaggctgaaaacaaa

SEQ ID NO: 2005 - DNA (genomic), 1320 bp, Helicobacter pylori; double-stranded, circular
  misc_feature (B) LOCATION 1...1320
  hypothetical: NO
  anti-sense: NO
atgaattttcaagaaaatctggccgctttggatttagaatacctttggcacccttgctcgcaaatgcaagagcatcaaaatttccccattatccccattaaaaaggctcaagggatttacctctatgattttaacgataacgcttacatggatttaatcagctcatggtgggtgaatctttttgggcataataacgcctacatcagccaacagcttaaaaatcaaattgataatttagagcatgtccttttggcctcttttagccataagcccatcattacgctctctcaaaggctttgccagctcaccggtatggataaatgcttttatgcggataacggctcatcttgtattgaaatcgctttgaaaatgagctatcacgcccattttttaaaaaaccaaacgcgccgcaaaaagctttttttatcactttctaattcctatcatggcgagactttgggagcgttaagcgtgggcgatgtgaaactttataaagacacttacacccccttattgctcaaaaatctcatcacgcccgtgcctaaaaacgacagcgagatagaaaatagtttgaacgctttaaagcgtttgttggataagcatggtgaagaaatttgcgcctttattgcagagccgcttttgcaatgcgcggggaatatgcatatttatagcgcgaaatatttaaaacaagccgttttatggtgcaagcaaaaaaacatccacattatttttgatgaaatcgctaccgggtttgggcgcacagggagcatgtttgcttatgagcaatgcggaattaagcctgattttttatgcttgtctaaagggattagcggggggtatttgcctttaagcgcgctattaacgcataatgaaatctataaccaattttacgccccctatgaagaaaataaagcgtttttgcattcgcacagctacacaggaaacgccctggcatgcgcatgcgcgaacgccacgctagatatttttgaaaaagaaaatgttattgaaaaaaacaaggctttgagcgagtttatttttagtgcgctccaaaacgcgttaaaacccttgatagagcggcaagtggtgtctgatttaaggcatttgggcatggtctttgcctttgaagtttttcttcaaaccaaagagcgtttgagtttagcggtttttaaaaaagctctaaaaaaaggcttgttactgcgccccttaaacaacacgatctatctcatgcctccttatattatcacgcatgaagaaatcaaaaaggcgattgcggggttagtggaagcgattgatgaattaaaaaaggctgaaaacaaatag

SEQ ID NO: 2006 - DNA (genomic), 225 bp, Helicobacter pylori; double-stranded, circular
  misc_feature (B) LOCATION 1...225
  hypothetical: NO
  anti-sense: NO
gtggctctcactttgggggctagagggggggtgtatttgtgtggggggattatcccacgattcattgattattttaaaacttcgccctttagagcgcgttttgaaacgaaagggcgcatgggagcgtttctcgcttccatccctgtgcatgtcgtgatgaaaaaaactcccggacttgatggggcgggcattgcgttagaaaattatttactgcatgatagaata

SEQ ID NO: 2007 - DNA (genomic), 1011 bp, Helicobacter pylori; double-stranded, circular
  misc_feature (B) LOCATION 1...1011
  hypothetical: NO
  anti-sense: NO
atgccaaaaactgaaacttacccaagactattagccgatattggcggcacaaatgcgcgttttggtttggaagtcgccccacgacagattgaatgcgttgaagtcttgaggtgcgaagattttgagagcttgagtgatgcggtgcgattttacctttctaaatgcaaagaaagccttaaactgcaccctatttatggctcttttgctgtggctacgcccattatgggggattttgtccaaatgacgaacaaccactggactttttctattgaaacgacacggcaatgtttgaatttaaaaaaactgcttgtcatcaatgattttgtcgcgcaagcctatgccattagcgcgatgcaagaaaacgatctagcccaaataggcgggattaagtgtgaaatcaacgctcctaaagcgattttagggccaggaaccgggcttggggtaagcactcttatccaaaacagcgatggctctttgaaagtcttgcccggcgaaggtgggcatgtgagctttgccccttttgatgatttagaaattttagtgtggcaatacgcccgctctaaattcaaccatgtgagcgcggaaaggtttttgagcggtagcggcctggtgttgatttatgaagccctgtctaaacgcaaaggcttagaaaaagtggcgaagttgagcaaggctgaattaaccccacaaatcattagcgaacgcgctttgaatggggattaccctatatgccgattgaccttggacactttttgctccatgcttggcacgctcgctgctgatgtggctctcactttgggggctagagggggggtgtatttgtgtggggggattatcccacgattcattgattattttaaaacttcgccctttagagcgcgttttgaaacgaaagggcgcatgggagcgtttctcgcttccatccctgtgcatgtcgtgatgaaaaaaactcccggacttgatggggcgggcattgcgttagaaaattatttactgcatgatagaatatag

SEQ ID NO: 2008 - DNA (genomic), 1080 bp, Helicobacter pylori; double-stranded, circular
  misc_feature (B) LOCATION 1...1080
  hypothetical: NO
  anti-sense: NO
aagaaaacgccccctattctctgccgattgctcggattttacattctaaaaaagttaccacagaggtgttttatgccaaaaactgaaacttacccaagactattagccgatattggcggcacaaatgcgcgttttggtttggaagtcgccccacgacagattgaatgcgttgaagtcttgaggtgcgaagattttgagagcttgagtgatgcggtgcgattttacctttctaaatgcaaagaaagccttaaactgcaccctatttatggctcttttgctgtggctacgcccattatgggggattttgtccaaatgacgaacaaccactggactttttctattgaaacgacacggcaatgtttgaatttaaaaaaactgcttgtcatcaatgattttgtcgcgcaagcctatgccattagcgcgatgcaagaaaacgatctagcccaaataggcgggattaagtgtgaaatcaacgctcctaaagcgattttagggccaggaaccgggcttggggtaagcactcttatccaaaacagcgatggctctttgaaagtcttgcccgacgaaggtgggcatgtgagctttgccccttttgatgatttagaaattttagtgtggcaatacgcccgctctaaattcaaccatgtgagcgcggaaaggtttttgagcggtagcggcctggtgttgatttatgaagccctgtctaaacgcaaaggcttagaaaaagtggcgaagttgagcaaggctgaattaaccccacaaatcattagcgaacgcgctttgaatggggattaccctatatgccgattgaccttggacactttttgctccatgcttggcacgctcgctgctgatgtggctctcactttgggggctagagggggggtgtatttgtgtggggggattatcccacgattcattgattattttaaaacttcgccctttagagcgcgttttgaaacgaaagggcgcatgggagcgtttctcgcttccatccctgtgcatgtcgtgatgaaaaaaactcccggacttgatggggcgggcattgcgttagaaaattatttactgcatgatagaata

SEQ ID NO: 2009 - DNA (genomic), 159 bp, Helicobacter pylori; double-stranded, circular
  misc_feature (B) LOCATION 1...159
  hypothetical: NO
  anti-sense: NO
atgctggattttgatttggttctttttggcgcgactggggatttagccatgcgaaagctctttgtttcgctttatgaaatttatatttcatttatggttttaaaaacgattctaggattatcgcatcggggcgtaaggagctatccaatgaagagtttt

SEQ ID NO: 2010 - DNA (genomic), 756 bp, Helicobacter pylori; double-stranded, circular
  misc_feature (B) LOCATION 1...756
  hypothetical: NO
  anti-sense: NO
atgctggattttgatttggttctttttggcgcgactggggatttagccatgcgaaagctctttgtttcgctttatgaaatttatattcattatggttttaaaaacgattctaggattatcgcatcggggcgtaaggagctatccaatgaagagtttttagcgcttctttgtgaaaaaacacaactgcattcaagagaaaagggtgaggaatttttaacccatatcagttatttgcgcgtccgtttggataaccctaaagactttgaagaattgagtaaaatcgccacaaacaataagcccttgattttctacttttctatctcccctagtttttttgcaacgaccgctcaaaatttagcccaaaacgcgctcaatcacgctaacactcgtttgattctagaaaagcctttagggcatgatttaaagacttgtaaagagattttccaaagcattagcgctttttttaaagaagaacaaatttttagaatcgatcattatttagggaaaaagggcgttcaaaatatccttgaattgcgcctgaataaccctatcttaaacattttatgggatcaaatcagcgcggttgaaatctgcgtgtatgagactttaggggtggaagaaaggggcgaattttacgataaaatcggggctttaagggatatggttcaaaaccatctcttgcaagttttatcccttatcgctacagatttacccaacgatttaaaagatttgaggcaagaaaaatcaaagttttaa

SEQ ID NO: 2011 - DNA (genomic), 780 bp, Helicobacter pylori; double-stranded, circular
  misc_feature (B) LOCATION 1...780
  hypothetical: NO
  anti-sense: NO
cttaaaaacactctaaaagggttattgatgctggattttgatttggttctttttggcgcgactggggatttagccatgcgaaagctctttgtttcgctttatgaaatttatattcattatggttttaaaaacgattctaggattatcgcatcggggcgtaaggagctatccaatgaagagtttttagcgcttctttgtgaaaaaacacaactgcattcaagagaaaagggtgaggaatttttaacccatatcagttatttgcgcgtccgtttggataaccctaaagactttgaagaattgagtaaaatcgccacaaacaataagcccttgattttctacttttctatctcccctagtttttttgcaacgaccgctcaaaatttagcccaaaacgcgctcaatcacgctaacactcgtttgattctagaaaagcctttagggcatgatttaaagacttgtaaagagattttccaaagcattagcgctttttttaaagaagaacaaatttttagaatcgatcattatttagggaaaaagggcgttcaaaatatccttgaattgcgcctgaataaccctatcttaaacattttatgggatcaaatcagcgcggttgaaatctgcgtgtatgagactttaggggtggaagaaaggggcgaattttacgataaaatcggggctttaagggatatggttcaaaaccatctcttgcaagttttatcccttatcgctacagatttacccaacgatttaaaagatttgaggcaagaaaaatcaaagttt

SEQ ID NO: 2012 - DNA (genomic), 1053 bp, Helicobacter pylori; double-stranded, circular
  misc_feature (B) LOCATION 1...1053
  hypothetical: NO
  anti-sense: NO
atgagagttccatctaaaggttttgctattttttctaaagacgggcatttcaagccccatgactttagtcgccatgctgtaggccctaaagatgtgctgattgacattctttatgcagggatttgccatagcgatattcatagcgcttatagcgaatggaaagaaggcatttatcctatggttcctgggcatgaaattgctggggtgatcaaagaagtgggtaaggaagttaagaaatttaaggttggcgatgtggtgggcgtgggctgttttgtcaattcatgcaaaacatgtaagccctgtaaagaacaccaagagcaattttgcgccaaccacaaaacggtattcacttatgattgtttggattatttccatgacaatgaaccccacatgggcggatactctaataatattgtcgtggatgaaaactatgtgattagcgtggataaaaacgctcctttagaaaaagtagccccactattgtgcgcaggcatcaccacttattcgcccttaaaattttctaaggttactaaaggcacaaaagtgggtgtcgctgggtttggcgggctaggaagcatggcggtcaaatacgctgtggctatgggggctgaagtgagcgtttttgcaagaaacgatcataaaaagcaggacgctttaaatatgggggttaaacatttctatacagaccctaaacaatgcaaagaagaattggattttatcatttcaaccattcctacccattatgatctaaaagactacctcaagctcttaacttatagcggcgaattagctcttgtgggactccctcctgtagaagtcgctccagcgctcaatgtttttgaatttatccatttgggcaatcgtaaggtttatggctcattgattgggggcattaaagaaacccaagagatgatggatttttctatcaaacacaatatttaccctgaagtggatttgattttaggcaaggatattgacaccgcttatcacaatctaacccatgggaaagcgaaattccgctatgtgattgacatgaaaaaatcgtttgattaa

SEQ ID NO: 2013 - DNA (genomic), 1071 bp, Helicobacter pylori; double-stranded, circular
  misc_feature (B) LOCATION 1...1071
  hypothetical: NO
  anti-sense: NO
atgaaacaaggagtttttatgagagttccatctaaaggttttgctattttttctaaagacgggcatttcaagccccatgactttagtcgccatgctgtaggccctaaagatgtgctgattgacattctttatgcagggatttgccatagcgatattcatagcgcttatagcgaatggaaagaaggcatttatcctatggttcctgggcatgaaattgctggggtgatcaaagaagtgggtaaggaagttaagaaatttaaggttggcgatgtggtgggcgtgggctgttttgtcaattcatgcaaaacatgtaagccctgtaaagaacaccaagagcaattttgcgccaaccacaaaacggtattcacttatgattgtttggattatttccatgacaatgaaccccacatgggcggatactctaataatattgtcgtggatgaaaactatgtgattagcgtggataaaaacgctcctttagaaaaagtagccccactattgtgcgcaggcatcaccacttattcgcccttaaaattttctaaggttactaaaggcacaaaagtgggtgtcgctgggtttggcgggctaggaagcatggcggtcaaatacgctgtggctatgggggctgaagtgagcgtttttgcaagaaacgatcataaaaagcaggacgctttaaatatgggggttaaacatttctatacagaccctaaacaatgcaaagaagaattggattttatcatttcaaccattcctacccattatgatctaaaagactacctcaagctcttaacttatagcggcgaattagctcttgtgggactccctcctgtagaagtcgctccagcgctcaatgtttttgaatttatccatttgggcaatcgtaaggtttatggctcattgattgggggcattaaagaaacccaagagatgatggatttttctatcaaacacaatatttaccctgaagtggatttgattttaggcaaggatattgacaccgcttatcacaatctaacccatgggaaagcgaaattccgctatgtgattgacatgaaaaaatcgtttgattaa

SEQ ID NO: 2014 - DNA (genomic), 1092 bp, Helicobacter pylori; double-stranded, circular
  misc_feature (B) LOCATION 1...1092
  hypothetical: NO
  anti-sense: NO
aaacgatacaatagcggtattttaatgaaacaaggagtttttatgagagttccatctaaaggttttgctattttttctaaagacgggcatttcaagccccatgactttagtcgccatgctgtaggccctaaagatgtgctgattgacattctttatgcagggatttgccatagcgatattcatagcgcttatagcgaatggaaagaaggcatttatcctatggttcctgggcatgaaattgctggggtgatcaaagaagtgggtaaggaagttaagaaatttaaggttggcgatgtggtgggcgtgggctgttttgtcaattcatgcaaaacatgtaagccctgtaaagaacaccaagagcaattttgcgccaaccacaaaacggtattcacttatgattgtttggattatttccatgacaatgaaccccacatgggcggatactctaataatattgtcgtggatgaaaactatgtgattagcgtggataaaaacgctcctttagaaaaagtagccccactattgtgcgcaggcatcaccacttattcgcccttaaaattttctaaggttactaaaggcacaaaagtgggtgtcgctgggtttggcgggctaggaagcatggcggtcaaatacgctgtggctatgggggctgaagtgagcgtttttgcaagaaacgatcataaaaagcaggacgctttaaatatgggggttaaacatttctatacagaccctaaacaatgcaaagaagaattggattttatcatttcaaccattcctacccattatgatctaaaagactacctcaagctcttaacttatagcggcgaattagctcttgtgggactccctcctgtagaagtcgctccagcgctcaatgtttttgaatttatccatttgggcaatcgtaaggtttatggctcattgattgggggcattaaagaaacccaagagatgatggatttttctatcaaacacaatatttaccctgaagtggatttgattttaggcaaggatattgacaccgcttatcacaatctaacccatgggaaagcgaaattccgctatgtgattgacatgaaaaaatcgtttgat

SEQ ID NO: 2015 - DNA (genomic), 684 bp, Helicobacter pylori; double-stranded, circular
  misc_feature (B) LOCATION 1...684
  hypothetical: NO
  anti-sense: NO
atgggttatcaattgtttgaatttgaaaatttagaagattgccacaaggctttaatagagcgttttaaagaattttttaacgccgccttaaaaaagcatcatcaagtttctgtcgctttttctgggggtcgttcgcccattagcttgttgcaaaaattgagcgttttagatctcaaatggcatgagtgtttaatcagcttggtagatgaacgcattatagaggctagccatgaggacagcaacgctaaattattgcatgactacttgttgcaaaataacgccttaaaagcttctttcaccccgcttttgcctgaaaagatttctggcgatacaaacgaacttttagattttgctaaccagcatttcaaacagccccatttagccattttgggcatggggactgacgggcatacggctagcctttttcctgaaacgagcgcttttttaaacgaagaaaaagaaaatatcgttttgactaaacctactaacgctccttatgaacgcttgagcatgtctatcaacgccttagaaaattgcgaaaaacttttcttgagtattagcggagtagaaaaaagaggggttttagaaaaggctttaaaagaaaacgccccctattctctgccgattgctcggattttacattctaaaaaagttaccacagaggtgttttatgccaaaaactga

SEQ ID NO: 2016 - DNA (genomic), 708 bp, Helicobacter pylori; double-stranded, circular
  misc_feature (B) LOCATION 1...708
  hypothetical: NO
  anti-sense: NO
aaccactctatcaataaaagggatttcatgggttatcaattgtttgaatttgaaaatttagaagattgccacaaggctttaatagagcgttttaaagaattttttaacgccgccttaaaaaagcatcatcaagtttctgtcgctttttctgggggtcgttcgcccattagcttgttgcaaaaattgagcgttttagatctcaaatggcatgagtgtttaatcagcttggtagatgaacgcattatagaggctagccatgaggacagcaacgctaaattattgcatgactacttgttgcaaaataacgccttaaaagcttctttcaccccgcttttgcctgaaaagatttctggcgatacaaacgaacttttagattttgctaaccagcatttcaaacagccccatttagccattttgggcatggggactgacgggcatacggctagcctttttcctgaaacgagcgcttttttaaacgaagaaaaagaaaatatcgttttgactaaacctactaacgctccttatgaacgcttgagcatgtctatcaacgccttagaaaattgcgaaaaacttttcttgagtattagcggagtagaaaaaagaggggttttagaaaaggctttaaaagaaaacgccccctattctctgccgattgctcggattttacattctaaaaaagttaccacagaggtgttttatgccaaaaac

SEQ ID NO: 2017 - DNA (genomic), 144 bp, Helicobacter pylori; double-stranded, circular
  misc_feature (B) LOCATION 1...144
  hypothetical: NO
  anti-sense: NO
tacaaaataacctacaataattttgcccaccagttggaattagaagcgccatgggtttttattgacacgctcatagagggttttatcaataacgctacgccttatattcctatgaaagccacaatctcaacgaatcagaatttt

SEQ ID NO: 2018 - DNA (genomic), 252 bp, Helicobacter pylori; double-stranded, circular
  misc_feature (B) LOCATION 1...252
  hypothetical: NO
  anti-sense: NO
ttggatacgcccaaatttaaaggcgtgcctttctaccttaagcacgctaaaaaaatgccccgcaatcaagcgagtgtgaaaatccattttaatgcagtcaatacgctggaatttttcctctctcaagataaaatcaccctcaccctaaaagatcatcaaaacccccttattttagaaacccacaacaaacaagaatttttacagccctacgctaattgcccctatgatgtgatacaaaataacctacaataa

SEQ ID NO: 2019 - DNA (genomic), 396 bp, Helicobacter pylori; double-stranded, circular
  misc_feature (B) LOCATION 1...396
  hypothetical: NO
  anti-sense: NO
ttggatacgcccaaatttaaaggcgtgcctttctaccttaagcacgctaaaaaaatgccccgcaatcaagcgagtgtgaaaatccattttaatgcagtcaatacgctggaatttttcctctctcaagataaaatcaccctcaccctaaaagatcatcaaaacccccttattttagaaacccacaacaaacaagaatttttacagccctacgctaaattgctctatgatgcgataccaaataaccactataatttcgcccaccagttggaattagaagcgtcatgggtttttattgacacgctcatagagggttttatcaataacgctacgcccttatattcctatgaaagccacaatctcaacgaatcagaatttttaaaaccactctatcaataa

SEQ ID NO: 2020 - DNA (genomic), 489 bp, Helicobacter pylori; double-stranded, circular
  misc_feature (B) LOCATION 1...489
  hypothetical: NO
  anti-sense: NO
aatcggggctttaagggatatggttcaaaaccatctcttgcaagttttatcccttatcgctacagatttacccaacgatttaaaagatttgaggcaagaaaaatcaaagttttaaagaccttacaaccccctaaagatttcacaaaacaggttattcgggcccaatatcaaggctatagagatgaaaataaggtccataaagagagccagacagagacttttgtcgctattaaagcctttttggatacgcccaaatttaaaggcgtgcctttctaccttaagcacgctaaaaaaatgccccgcaatcaagcgagtgtgaaaatccattttaatgcagtcaatacgctggaatttttcctctctcaagataaaatcaccctcaccctaaaagatcatcaaaacccccttattttagaaacccacaacaaacaagaatttttacagccctacgctaattgcccctatgatgtgatacaaaataacctacaa

SEQ ID NO: 2021 - DNA (genomic), 636 bp, Helicobacter pylori; double-stranded, circular
  misc_feature (B) LOCATION 1...636
  hypothetical: NO
  anti-sense: NO
aatcggggctttaagggatatggttcaaaaccatctcttgcaagttttatcccttatcgctacagatttacccaacgatttaaaagatttgaggcaagaaaaatcaaagttttaaagaccttacaaccccctaaagatttcacaaaacaggttattcgggcccaatatcaaggctatagagatgaaaataaggtccataaagagagccagacagagacttttgtcgctattaaagcctttttggatacgcccaaatttaaaggcgtgcctttctaccttaagcacgctaaaaaaatgccccgcaatcaagcgagtgtgaaaatccattttaatgcagtcaatacgctggaatttttcctctctcaagataaaatcaccctcaccctaaaagatcatcaaaacccccttattttagaaacccacaacaaacaagaatttttacagccctacgctaaattgctctatgatgcgataccaaataaccactataatttcgcccaccagttggaattagaagcgtcatgggtttttattgacacgctcatagagggttttatcaataacgctacgcccttatattcctatgaaagccacaatctcaacgaatcagaatttttaaaaccactctatcaataa

SEQ ID NO: 2022 - DNA (genomic), 195 bp, Helicobacter pylori; double-stranded, circular
  misc_feature (B) LOCATION 1...195
  hypothetical: NO
  anti-sense: NO
atggaaagcaatggcaaacgcatcagcaaaaaaggcgaaatcatcccctacgacacatgccctgttgtttggggcgatatgggtattaacgctcagcacgcctttttccagctcttgcatcaaggcacgcatttaatccccattgattttatcgcctctttggataaaaagcctaacgctaaaggccacccatga

SEQ ID NO: 2023 - DNA (genomic), 225 bp, Helicobacter pylori; double-stranded, circular
  misc_feature (B) LOCATION 1...225
  hypothetical: NO
  anti-sense: NO
ggcaatttccctaaattcatccagcaactggatatggaaagcaatggcaaacgcatcagcaaaaaaggcgaaatcatcccctacgacacatgccctgttgtttggggcgatatgggtattaacgctcagcacgcctttttccagctcttgcatcaaggcacgcatttaatccccattgattttatcgcctctttggataaaaagcctaacgctaaaggccaccca

SEQ ID NO: 2024 - DNA (genomic), 339 bp, Helicobacter pylori; double-stranded, circular
  misc_feature (B) LOCATION 1...339
  hypothetical: NO
  anti-sense: NO
aaaaaaaaaaaaaacgatgaaaagcatatcgctaagcactttgtagcggtatccaccaataaagaagccgtgcaacaatttggcattgacgagcataacatgtttggattttgggattttgtaggggggcgttatagcttgtggtcggctattggcttatccattatgatctatttagggaagaaaaattttaacgcccttttgaaaggggcgtatttaatggatgagcattttagaaacgccccttttgaaagcaatttacccgttttaatgggattaatcggcgtgtggtatatcaattttttccaatccaaaggccacttgatcgccccttacgac

SEQ ID NO: 2025 - DNA (genomic), 393 bp, Helicobacter pylori; double-stranded, circular
  misc_feature (B) LOCATION 1...393
  hypothetical: NO
  anti-sense: NO
ggggtattgatgctaacccaattaaaaacttatccaaaattactcaaacattatgaagaaattaaagaagtgcacatgcgcgattggttttctaaagacaaagagcgagcgagccgctatttcgtgcaattggaaagcttgagcttggactattccaaaaaccgcctgaacgataccaccttaaagcttctttttgaattagcgaaggattgctctttaaaagaaaagattgaagcgatgtttaagggcgaaaaaatcaacaccaccgaaaaaagggccgttttacacaccgccttaagaagcttgaatgacgcagaaatcttactagacaacatggaagtgttaaaaagcgtgagaagcgttttaaaacgcatgcgagcctttgcgatagcg

SEQ ID NO: 2026 - DNA (genomic), 399 bp, Helicobacter pylori; double-stranded, circular
  misc_feature (B) LOCATION 1...399
  hypothetical: NO
  anti-sense: NO
atgagattttattcagcatgttttagcacagcgcaagccttcatgaaaggcaaaagctatgaagaagcgcttggggaattgctttctaaaggtttagacaaagatgaagccaaagacttggcccaccacagggtgttttttggcaaccgcccctctaatatccttttattagaaaagatttcaccaagcaatattggggcgttggtggctctttatgagcataaggtctttgtgcaaggggtcatttgggatattaacagctttgatcaatggggcgtggagcttgggaaggaattagccgtgccgattttacaagaattagaagggcataaaagcaacgcttattttgacagctccactaggcatttaatagaattgtataagaactataaccaatag

SEQ ID NO: 2027 - DNA (genomic), 405 bp, Helicobacter pylori; double-stranded, circular
  misc_feature (B) LOCATION 1...405
  hypothetical: NO
  anti-sense: NO
aggccacccatgagattttattcagcatgttttagcacagcgcaagccttcatgaaaggcaaaagctatgaagaagcgcttggggaattgctttctaaaggtttagacaaagatgaagccaaagacttggcccaccacagggtgttttttggcaaccgcccctctaatatccttttattagaaaagatttcaccaagcaatattggggcgttggtggctctttatgagcataaggtctttgtgcaaggggtcatttgggatattaacagctttgatcaatggggcgtggagcttgggaaggaattagccgtgccgattttacaagaattagaagggcataaaagcaacgcttattttgacagctccactaggcatttaatagaattgtataagaactataaccaa

SEQ ID NO: 2028 - DNA (genomic), 1029 bp, Helicobacter pylori; double-stranded, circular
  misc_feature (B) LOCATION 1...1029
  hypothetical: NO
  anti-sense: NO
atgctaacccaattaaaaacttatccaaaattactcaaacattatgaagaaattaaagaagtgcacatgcgcgattggttttctaaagacaaagagcgagcgagccgctatttcgtgcaattggaaagcttgagcttggactattccaaaaaccgcctgaacgataccaccttaaagcttctttttgaattagcgaaggattgctctttaaaagaaaagattgaagcgatgtttaagggcgaaaaaatcaacaccaccgaaaaaagggccgttttacacaccgccttaagaagcttgaatgacgcagaaatcttactagacaacatggaagtgttaaaaagcgtgagaagcgttttaaaacgcatgcgagcctttagcgatagcgtgaggagcggtaaaagattaggctataccaatcaagtgatcaccgatattgtcaatatcggtattggggggtcagatttaggcgctttaatggtttgcaccgccctaaaacgctacggccacccaagattaaaaatgcattttgtgtctaatgtggatggcacgcagattttagacgttttggaaaaaatcaacccggccagcacgctttttatcgtggcttctaagactttttccactcaagaaaccttaaccaacgccctaaccgctagaaaatggtttgtagaaaggagcggcgatgaaaagcatatcgctaagcactttgtagcggtatccaccaataaagaagccgtgcaacaatttggcattgacgagcataacatgtttgaattttgggattttgtaggggggcgttatagcttgtggtcggctattggcttatccattatgatctatttagggaagaaaaattttaacgcccttttgaaaggggcgtatttaatggatgagcattttagaaacgccccttttgaaagcaatttacccgttttaatgggattaatcggcgtgtggtatatcaattttttccaatccaaaagccacttgatcgccccttacgatcagtatttgaggcaatttccctaa

SEQ ID NO: 2029 - DNA (genomic), 1638 bp, Helicobacter pylori; double-stranded, circular
  misc_feature (B) LOCATION 1...1638
  hypothetical: NO
  anti-sense: NO
atgctaacccaattaaaaacttatccaaaattactcaaacattatgaagaaattaaagaagtgcacatgcgcgattggttttctaaagacaaagagcgagcgagccgctatttcgtgcaattggaaagcttgagcttggactattccaaaaaccgcctgaacgataccaccttaaagcttctttttgaattagcgaaggattgctctttaaaagaaaagattgaagcgatgtttaagggcgaaaaaatcaacaccaccgaaaaaagggccgttttacacaccgccttaagaagcttgaatgacgcagaaatcttactagacaacatggaagtgttaaaaagcgtgagaagcgttttaaaacgcatgcgagcctttagcgatagcgtgaggagcggtaaaagattaggctataccaatcaagtgatcaccgatattgtcaatatcggtattggggggtcagatttaggcgctttaatggtttgcaccgccctaaaacgctacggccacccaagattaaaaatgcattttgtgtctaatgtggatggcacgcagattttagacgttttggaaaaaatcaacccggccagcacgctttttatcgtggcttctaagactttttccactcaagaaaccttaaccaacgccctaaccgctagaaaatggtttgtagaaaggagcggcgatgaaaagcatatcgctaagcactttgtagcggtatccaccaataaagaagccgtgcaacaatttggcattgacgagcataacatgtttgaattttgggattttgtaggggggcgttatagcttgtggtcggctattggcttatccattatgatctatttagggaagaaaaattttaacgcccttttgaaaggggcgtatttaatggatgagcattttagaaacgccccttttgaaagcaatttacccgttttaatgggattaatcggcgtgtggtatatcaattttttccaatccaaaagccacttgatcgccccttacgatcagtatttgaggcatttccctaaattcatccagcaactggatatggaaagcaatggcaaacgcatcagcaaaaaaggcgaaatcatcccctacgacacatgccctgttgtttggggcgatatgggtattaacgctcagcacgcctttttccagctcttgcatcaaggcacgcatttaatccccattgattttatcgcctctttggataaaaagcctaacgctaaaggccaccatgagattttattcagcaatgttttagcacaagcgcaagccttcatgaaaggcaaaagctatgaagaagcgcttggggaattgctttctaaaggtttagacaaagatgaagccaaagacttggcccaccacagggtgttttttggcaaccgcccctctaatatccttttattagaaaagatttcaccaagcaatattggggcgttggtggctctttatgagcataaggtctttgtgcaaggggtcatttgggatattaacagctttgatcaatggggcgtggagcttgggaaggaattagccgtgccgattttacaagaattagaagggcataaaagcaacgcttattttgacagctccactaggcatttaatagaattgtataagaactataaccaatag

SEQ ID NO: 2030 - DNA (genomic), 786 bp, Helicobacter pylori; double-stranded, circular
  misc_feature (B) LOCATION 1...786
  hypothetical: NO
  anti-sense: NO
ggcatgcaaaaaagagtggtgatcttattattggattcttttggtataggggctagtgaagacgctaaggattttggcgatttgggggcgaacactttaggcaatatcgctaaggcttgtttcaataacctggctgattctaacgatcgcaatggggttttgaaactgcccaatttagagggtttgggcttaggcttgagcgctttaaaagccgcaaatgaattgcccttaggctttcaattgaaacccaatttaataggggcttacgcttacgctaaagaactttctagcgctaaggatacgatttctgggcattgggagatgatgggcgcacccgttctttttgaatgggggtattttaaagacaaaaatgactcgtttcctaaagaaattttagatgaaatcatgcacaaaactaagattaagggctatttagggaattgccacgcatcagggacagaaatcattaaagatttaggcgaaaagcatttagaaactttataccccattttttacacttcagcggattcggtgtttcaaatcgctgcgcatgaagaaaggtttgggcttgatcatttatacgccctttgtgaagaagcgtttcaaattctagagcctttaaagatcgccagagtgatcgcaagaccttttattggcaccaatagagagaatttcaaacgcaccgctaaccgcaaagactatgcgataaagccccataaaaaattgctttttgaaacattcattgaagaaaaacaaggcgaagtcatcagcattgggaaaaatcgc

SEQ ID NO: 2031 - DNA (genomic), 1242 bp, Helicobacter pylori; double-stranded, circular
  misc_feature (B) LOCATION 1...1242
  hypothetical: NO
  anti-sense: NO
atgcaaaaaagagtggtgatcttattattggattcttttggtataggggctagtgaagacgctaaggattttggcgatttgggggcgaacactttaggcaatatcgctaaggcttgtttcaataacctggctgattctaacgatcgcaatggggttttgaaactgcccaatttagagggtttgggcttaggcttgagcgctttaaaagccgcaaatgaattgcccttaggctttcaattgaaacccaatttaataggggcttacgcttacgctaaagaactttctagcgctaaggatacgatttctgggcattgggagatgatgggcgcacccgttctttttgaatgggggtattttaaagacaaaaatgactcgtttcctaaagaaattttagatgaaatcatgcacaaaactaagattaagggctatttagggaattgccacgcatcagggacagaaatcattaaagatttaggcgaaaagcatttagaaactttataccccattttttacacttcagcggattcggtgtttcaaatcgctgcgcatgaagaaaggtttgggcttgatcatttatacgccctttgtgaagaagcgtttcaaattctagagcctttaaagatcgccagagtgatcgcaagaccttttattggcaccaatagagagaatttcaaacgcaccgctaaccgcaaagactatgcgataaagccccataaaaaattgctttttgaaacattcattgaagaaaaacaaggcgaagtcatcagcattggaaaaatcgctgatatttacgcccatgtggggatcactcaaaaattcaaagccggtagtttaatggaattatgcgatgttactttagatcaagtcaaaaacgccccaaacaacagcttgatttttacgaattttgtgcattttgatagcgattatgggcatcggcgcgatgttagcgggtacgctaacgctttagagtattttgatgcacgcttaaaagaggttttagacaatttaagggaaaacgatttgctcattctttgcgccgatcatgggtgtgatcccagctttaaaggcaccgatcacacacgagaatacattcctgttttgttctaccataaagatttacaaccagcctttttaggcaagagcgagacttttgcggatattgggcagagtatcgcttattttttgggattaagccccttagattatggcaaaaacttattaaactttaaaggacaaccatga

SEQ ID NO: 2032 - DNA (genomic), 345 bp, Helicobacter pylori; double-stranded, circular
  misc_feature (B) LOCATION 1...345
  hypothetical: NO
  anti-sense: NO
gaagtcaagctttttgaatttggcgagcaattaagggattctgtctatattgaagatgtgatccaagcgaatgtgaaagcgatgaaggctcaaaaaagcggggtttataatgtgggttattcacaagccagaagctataatgaaatcgttagcattttaaaagagcatttaggggattttaaagtgagctatattaaaaacccttatacttttttccaaaagcacacccaagcgcacattgaacccactattttggatttagattacacccctttatacgatttagaaagcggtattaaagattatttgccccatatccatgcgatttttaaagaacaacacgca

SEQ ID NO: 2033 - DNA (genomic), 342 bp, Helicobacter pylori; double-stranded, circular
  misc_feature (B) LOCATION 1...342
  hypothetical: NO
  anti-sense: NO
gtcaagctttttgaatttggcgagcaattaagggattctgtctatattgaagatgtgatccaagcgaatgtgaaagcgatgaaggctcaaaaaagcggggtttataatgtgggttattcacaagccagaagctataatgaaatcgttagcattttaaaagagcatttaggggattttaaagtgagctatattaaaaacccttatacttttttccaaaagcacacccaagcgcacattgaacccactattttggatttagattacacccctttatacgatttagaaagcggtattaaagattatttgccccatatccatgcgatttttaaagaacaacacgca

SEQ ID NO: 2034 - DNA (genomic), 540 bp, Helicobacter pylori; double-stranded, circular
  misc_feature (B) LOCATION 1...540
  hypothetical: NO
  anti-sense: NO
tggccatgggaacaacttagccgactaacgcatattatggatttggataaattccgcactaacacgctctctagtaataaccgcccgagttctttagggcattttaagaatttgatcggtttcaagggcgaagtgatcatcgctgatattaataatcctttagatttaaggcgtttagaaaagttgcattttgattatttgttccaccaagcggctgtctctgatacaaccatgctcaatcaagaattagtgatgaagaccaattatcaggcttttttaaaccttttagaaatcgctcgatcaaaaaaggctaaggtgatttacgcttcttcagcgggcgtttatggcaataccaaagcccccaatatagtaggctcaaacgaaagccctgaaaacgtttatggcttttccaagctttgcatggacgaatttgttctctctcattcaagcgataatgttgtgggcttaaggtattttaatgtctatgggtctagggaattttataaaaaaaaaaacgcttccatggattgcaactcgctt

SEQ ID NO: 2035 - DNA (genomic), 537 bp, Helicobacter pylori; double-stranded, circular
  misc_feature (B) LOCATION 1...537
  hypothetical: NO
  anti-sense: NO
ccatgggaacaacttagccgactaacgcatattatggatttggataaattccgcactaacacgctctctagtaataaccgcccgagttctttagggcattttaagaatttgatcggtttcaagggcgaagtgatcatcgctgatattaataatcctttagatttaaggcgtttagaaaagttgcattttgattatttgttccaccaagcggctgtctctgatacaaccatgctcaatcaagaattagtgatgaagaccaattatcaggcttttttaaaccttttagaaatcgctcgatcaaaaaaggctaaggtgatttacgcttcttcagcgggcgtttatggcaataccaaagcccccaatatagtaggctcaaacgaaagccctgaaaacgtttatggcttttccaagctttgcatggacgaatttgttctctctcattcaagcgataatgttgtgggcttaaggtattttaatgtctatgggtctagggaattttataaaaaaaaaaacgcttccatggattgcaactcgctt

SEQ ID NO: 2036 - DNA (genomic), 990 bp, Helicobacter pylori; double-stranded, circular
  misc_feature (B) LOCATION 1...990
  hypothetical: NO
  anti-sense: NO
atgcgttatattgatgatggattggaaaatcaaaccattttaatcaccggtggggctggttttgtgggcagtaatttggccttttattttcaagagaaccaccctaaggctaaagtagtggttttggataaattccgcagtaacacgctctctagtaataaccgcccgagttctttagggcattttaagaatttgatcggtttcaagggcgaagtgatcatcgctgatattaataatcctttagatttaaggcgtttagaaaagttgcattttgattatttgttccaccaagcggctgtctctgatacaaccatgctcaatcaagaattagtgatgaagaccaattatcaggcttttttaaaccttttagaaatcgctcgatcaaaaaaggctaaggtgatttacgcttcttcagcgggcgtttatggcaataccaaagcccccaatatagtaggctcaaacgaaagccctgaaaacgtttatggcttttccaagctttgcatggacgaatttgttctctctcattcaagcgataatgttgtgggcttaaggtattttaatgtctatgggtctagggaattttataaagaaaaaaccgcttccatggttttgcaactcgctttaagcgcaatggcgtttaaggaagtcaagctttttgaatttggcgagcaattaagggattttgtctatattgaagatgtgatccaagcgaatgtgaaagcgatgaaggctcaaaaaagcggggtttataatgtgggttattcacaagccagaagctataatgaaatcgttagcattttaaaagagcatttaggggattttaaagtgagctatattaaaaacccttatacttttttccaaaagcacacccaagcgcacattgaacccactattttggatttagattacacccctttatacgatttagaaagcggtattaaagattatttgccccatatccatgcgatttttaaagaacaacacgcatga

SEQ ID NO: 2037 - DNA (genomic), 579 bp, Helicobacter pylori; double-stranded, circular
  misc_feature (B) LOCATION 1...579
  hypothetical: NO
  anti-sense: NO
atgattgatgatttgattcaaaaagaatttttagcccataaggaagcgttagaaaaaagtttagaaagtttgcaagatgcgttaaagcaaagcgttcatcttttgatagaaactttagaaaatcaagggaaaatccttatttgcggtaatggggggagcgcgagcgatgcgcaacattttgccgctgaattgaccgggcgctataaactagaaaggaaaggcttgagcgtgataagtttaagcaccgatacctcagctctcaccgccattgcgaacgattatggttatgaagaagtgttcgccagacaagtggaagcgctagggaataaagaagatattttaatagggatttctacaagcggtaattccaaaaatgtcctaaaagcttatgaaaaagccaaagatttagggatgaaaacgcttagtttagcggggcgtgatggggggaaaatgaagcctttaagcgatatagctttgattgtccctagtggtgataccccacgaatccaagaaatgcacattcttatgatccatattttatgcgattgcattgaaaggcatttcgctcgtaaaaattag

SEQ ID NO: 2038 - DNA (genomic), 624 bp, Helicobacter pylori; double-stranded, circular
  misc_feature (B) LOCATION 1...624
  hypothetical: NO
  anti-sense: NO
aaaaaattaaaaggacacataatgattgatgatttgattcaaaaagaatttttagcccataaggaagcgttagaaaaaagtttagaaagtttgcaagatgcgttaaagcaaagcgttcatcttttgatagaaactttagaaaatcaagggaaaatccttatttgcggtaatggggagagcgcgagcgatgcgcaacattttgccgctgaattgaccgggcgctataaactagaaaggaaaggcttgagcgtgataagtttaagcaccgatacctcagctctcaccgccattgcgaacgattatggttatgaagaagtgttcgccagacaagtggaagcgctagggaataaagaagatattttaatagggatttctacaagcggtaattccaaaaatgtcctaaaagcttatgaaaaagccaaagatttagggatgaaaacgcttagtttagcggggcgtgatggggggaaaatgaagcctctaagcgatatagctttgattgtccctagtggtgataccccacgaatccaagaaatgcacattcttatgatccatattttatgcgattgcattgaaaggcatttcgctcgtaaaaattggctttattgtttcattgatcttttt

SEQ ID NO: 2039 - DNA (genomic), 195 bp, Helicobacter pylori; double-stranded, circular
  misc_feature (B) LOCATION 1...195
  hypothetical: NO
  anti-sense: NO
gtgagcgtgagtaagctagtcaattctttaaaaggcgttagcagtcgtttgactagacaacaccatttcaaaagcgttgaggctagtttgtgggggaagcatttatggtcgcctagttatttcgctgggagttgtgggggcacgcctttagagatgattaagcaatacatacaagaacaagaaacaccgcattaa

SEQ ID NO: 2040 - DNA (genomic), 192 bp, Helicobacter pylori; double-stranded, circular
  misc_feature (B) LOCATION 1...192
  hypothetical: NO
  anti-sense: NO
gtgagcgtgagtaagctagtcaattctttaaaaggcgttagcagtcgtttgactagacaacaccatttcaaaagcgttgaggctagtttgtgggggaagcatttatggtcgcctagttatttcgctgggagttgtgggggcacgcctttagagatgattaagcaatacatacaagaacaagaaacaccgcat

SEQ ID NO: 2041 - DNA (genomic), 267 bp, Helicobacter pylori; double-stranded, circular
  misc_feature (B) LOCATION 1...267
  hypothetical: NO
  anti-sense: NO
gaccaagcaaatttttatcggcggcgtcgcctagggggtgatgctcctattagcacgcaaagcatgacctttagtaaaaccgctgatattgaaagcactaaaaatcaaattgaccgactcaaactcgccggggctgatttagtgagggtggcggtgagtaatgaaaaggacgccctagccttaaaagaattgaaaaaagtgtctcctttgcccttaatctcgggatattcttttcattataaattcgctctcattgccgctcaaagc

SEQ ID NO: 2042 - DNA (genomic), 357 bp, Helicobacter pylori; double-stranded, circular
  misc_feature (B) LOCATION 1...357
  hypothetical: NO
  anti-sense: NO
tacgccaaacttttagaagatttggattttactgattttaagatttctttgaaagcgagcgatgtggtgcgcaccatagaagcttacaggatgctacggcctcttgtgatctatcctttccatttgggggttactgaagcggggaatctttttagctccagtatcaaatccgccatggctttaggggggcttttaatggagggcattggggatacgatgcgcgtatccatcacaggggaattagaaaatgaaatcaaagtggctagagcgattttacgccatagcgggcgtttgaaagaggggattaattggatttcttgccccacttgcgggaggattgaagccaatttagtggat

SEQ ID NO: 2043 - DNA (genomic), 354 bp, Helicobacter pylori; double-stranded, circular
  misc_feature (B) LOCATION 1...354
  hypothetical: NO
  anti-sense: NO
tacgccaaacttttagaagatttggattttactgattttaagatttctttgaaagcgagcgatgtggtgcgcaccatagaagcttacaggatgctacggcctcttgtgatctatcctttccatttgggggttactgaagcggggaatctttttagctccagtatcaaatccgccatggctttaggggggcttttaatggagggcattggggatacgatgcgcgtatccatcacaggggaattagaaaatgaaatcaaagtggctagagcgattttacgccatagcgggcgtttgaaagaggggattaattggatttcttgccccacttgcgggaggattgaagccaatttagtg

SEQ ID NO: 2044 - DNA (genomic), 1047 bp, Helicobacter pylori; double-stranded, circular
  misc_feature (B) LOCATION 1...1047
  hypothetical: NO
  anti-sense: NO
atgctagaaaatagagttaagaccaagcaaatttttatcggtggcgtcgccatagggggtgatgctcctattagcacgcaaagcatgacctttagtaaaaccgctgatattgaaagcactaaaaatcaaattgaccgattcaaactcgccggggctgatttagtgagggtggcggtgagtaatgaaaaggacgccctagccttaaaagaattgaaaaaagtgtctcctttgcccttaatcgctgatattcatttccattataaattcgctctcattgccgctcaaagcgtggatgcgatcaggattaaccccggaaacatcggctctaaagacaagatcaaagcggtggttgatgcttgtaaagaaaaaaacattcctataagaattggcgtgaatgccgggagcttagaaaagcagtttgatcaaaaatacgggccaaccccaaaaggcatggtagaaagcgctttgtataacgccaaacttttagaagatttggattttactgattttaagatttctttgaaagcgagcgatgtggtgcgcaccatagaagcttacaggatgctacggcctcttgtgatctatcctttccatttgggggttactgaagcggggaatctttttagctccagtatcaaatccgccatggctttaggggggcttttaatggagggcattggggatacgatgcgcgtatccatcacaggggaattagaaaatgaaatcaaagtggctagagcgattttacgccatagcgggcgtttgaaagaggggattaattggatttcttgccccacttgcgggaggattgaagccaatttagtggatatggcgagcaaggtagaaaaacgcttaagccacattaaaacccctttagacattagcgtgatgggttgcgtggtgaacgctttaggtgaagccaagcatgcagacatggcgatcgcttttgggaatcgtagcggtttgatcattaaagagggtaaagtcattcacaaattggctgaaaaggatttgtttgaaacttttgtcatagaagtggaaatttag

SEQ ID NO: 2045 - DNA (genomic), 822 bp, Helicobacter pylori; double-stranded, circular
  misc_feature (B) LOCATION 1...822
  hypothetical: NO
  anti-sense: NO
atgattaaaaaatgcctttttcctgccgctggctatggcacgcgctttttgccgatcactaaaaccatccctaaagaaatgctgcccattgtggataagcctttaatccaatacgctgtggaagaagcgatggaagcgggttgtgaagtgatggcgatcgttacaggcaggaataaacgaagtttagaagattattttgacacgagctatgaaatagagcatcaaatccaaggcaccaacaaagaaaacgccttaaaaagcattcgtaacattatagaaaaatgctgtttttcctatgtgcgccaaaagcaaatgaaaggcttagggcatgcgattttaaccggggaagccctgataggcaatgagccttttgcggtgattttagccgatgacttatgcataagccatgagtatccaagcgtgttaaagcaaatgacttcattgtatcaaaaataccaatgctccattgtagccattgaagaagtggtgctagaagaagtttcaaaatacggcgtgatcaggggcgaatggttagaagagagggtgtatgagattaaagacatggtagaaaaaccaagccaagaagacgccccaagcaatttagccgtgatagggcgctacattttaactccggatatttttgatattttgcgtgagactaaaccgggtaaaaacaatgaaatccaaatcacagacgctttactcactcaagccaaaagaaaacgcatcatcgcttaccaattcaaaggcaagcgatacgattgcgggagcgtggaaggctatattgaagcgagtaacgcctattataaaaaacgcttataa

SEQ ID NO: 2046 - DNA (genomic), 681 bp, Helicobacter pylori; double-stranded, circular
  misc_feature (B) LOCATION 1...681
  hypothetical: NO
  anti-sense: NO
atgcgttttgtctatcaccctttagccaaagagcctactttaaaaatagaaggcgagagttatatccatttataccgctcaaggcgcatcaaaagcgcgagtcgtttggatttaaggaatttaaaagacggctttttatacacctatgagcatgcagaaatcgctaaaaaacacgcccttttaaggctagtgggcgtgcaaccattagagattatggctaataaaaaaacgcatttgattttaagcgtgattgaaatcaaaaacattgaaaaaatcctaccctttttaaaccagttaggcgtgagcaagttgagtttgttctatgcggattttagccagcgtaatgaaaagatagatagcgccaaattagagcgcttccaaaagattttgatccattcttgcgagcaatgcggccgcagcgttttaatggaattggaagcgttttcaaacactaaagaggcgttaaaagcctaccctaaggcgagcgttttagattttaacggcgaaaccttgcccgcaagcgcggattttgaaaagggcgttatcatagggcctgaagggggctttagcgaacaagaaagagggtattttaaagagcgtgaaatttatcgcatcccgttagatatggtgctaaagtctgagagcgcatgcgtgtttgtggcgagtatcgcgcaaatttag

SEQ ID NO: 2047 - DNA (genomic), 678 bp, Helicobacter pylori; double-stranded, circular
  misc_feature (B) LOCATION 1...678
  hypothetical: NO
  anti-sense: NO
atgcgttttgtctatcaccctttagccaaagagcctactttaaaaatagaaggcgagagttatatccatttataccgctcaaggcgcatcaaaagcgcgagtcgtttggatttaaggaatttaaaagacggctttttatacacctatgagcatgcagaaatcgctaaaaaacacgcccttttaaggctagtgggcgtgcaaccattagagattatggctaataaaaaaacgcatttgattttaagcgtgattgaaatcaaaaacattgaaaaaatcctaccctttttaaaccagttaggcgtgagcaagttgagtttgttctatgcggattttagccagcgtaatgaaaagatagatagcgccaaattagagcgcttccaaaagattttgatccattcttgcgagcaatgcggccgcagcgttttaatggaattggaagcgttttcaaacactaaagaggcgttaaaagcctaccctaaggcgagcgttttagattttaacggcgaaaccttgcccgcaagcgcggattttgaaaagggcgttatcatagggcctgaagggggctttagcgaacaagaaagagggtattttaaagagcgtgaaatttatcgcatcccgttagatatggtgctaaagtctgagagcgcatgcgtgtttgtggcgagtatcgcgcaaatt

SEQ ID NO: 2048 - DNA (genomic), 657 bp, Helicobacter pylori; double-stranded, circular
  misc_feature (B) LOCATION 1...657
  hypothetical: NO
  anti-sense: NO
gtgaaaagcgtttttagcgaagaaaaagaaacgcctgttactaaagaaaacggctcttatttgatcgcttatgaccccctagatgggagttcagtgatggaggcgaatttcttagtaggcacgattataggggtttatgaaaaggattataaggcgcaaaatttagttgcaagcctttatgtggtttttgggcataaaatagaattggtggtggctttagaagaagtttatcgttacgctttttatcaaaacaagtttcattttatagaaaccatcgttttagaaaataagggtaaaatcatcgctagcggaggcaatcaaaaggatttttcyttgggcttaaaaaaggctttagaagggttttttgcagaaaattaccgcttgcgatactcaggatctatggtggctgatgtccatcatgtgttggttaaaaagggcggaatgttttcctacccgcaaaagaaattgcgaaagctttttgaagtctttcctttagccttgatggttgaaaaagctaaaggggaagcgttttattttgataagggggttaaaaagcgtttgctagatcaaagcgtagaaagctaccatgaaaaaagcgaatgctatttagccagcccgcatgaagctcagattttagaaaaacatttaaagggagaa

SEQ ID NO: 2049 - DNA (genomic), 873 bp, Helicobacter pylori; double-stranded, circular
  misc_feature (B) LOCATION 1...873
  hypothetical: NO
  anti-sense: NO
atggattacaaacgttttaaaggcaagcatgcgaacatcgttatagaaatcatcagtcttttagaaaaaggggttaaaaaagcccaagagattttagaaaagccggacgctgggagttacactcagttagaaaacagcagcggggatacgcctattaaagcggatttagccctagataagtttttagaggaaacttttttgagtttagagaatgtgaaaagcgtttttagcgaagaaaaagaaacgcctgttactaaagaaaacggctcttatttgatcgcttatgaccccctagatgggagttcagtgatggaggcgaatttcttagtaggcacgattataggggtttatgaaaaggattataaggcgcaaaatttagttgcaagcctttatgtggtttttgggcataaaatagaattggtggtggctttagaagaagtttatcgttacgctttttatcaaaacaagtttcattttatagaaaccatcgttttagaaaataagggtaaaatcatcgctagcggaggcaatcaaaaggatttttctttgggcttaaaaaaggctttagaagggttttttgcagaaaattaccgcttgcgatactcaggatctatggtggctgatgtccatcatgtgttggttaaaaagggcggaatgttttcctacccgcaaaagaaattgcgaaagctttttgaagtctttcctttagccttgatggttgaaaaagctaaaggggaagcgttttattttgataagggggttaaaaagcgtttgctagatcaaagcgtagaaagctaccatgaaaaaagcgaatgctatttagccagcccgcatgaagctcagattttagaaaaacatttaaagggagaatga

SEQ ID NO: 2050 - DNA (genomic), 891 bp, Helicobacter pylori; double-stranded, circular
  misc_feature (B) LOCATION 1...891
  hypothetical: NO
  anti-sense: NO
tcaaatcataaaagggtttttatggattacaaacgttttaaaggcaagcatgcgaacatcgttatagaaatcatcagtcttttagaaaaaggggttaaaaaagcccaagagattttagaaaagccggacgctgggagttacactcagttagaaaacagcagcggggatacgcctattaaagcggatttagccctagataagtttttagaggaaacttttttgagtttagagaatgtgaaaagcgtttttagcgaagaaaaagaaacgcctgttactaaagaaaacggctcttatttgatcgcttatgaccccctagatgggagttcagtgatggaggcgaatttcttagtaggcacgattataggggtttatgaaaaggattataaggcgcaaaatttagttgcaagcctttatgtggtttttgggcataaaatagaattggtggtggctttagaagaagtttatcgttacgctttttatcaaaacaagtttcattttatagaaaccatcgttttagaaaataagggtaaaatcatcgctagcggaggcaatcaaaaggatttttctttgggcttaaaaaaggctttagaagggttttttgcagaaaattaccgcttgcgatactcaggatctatggtggctgatgtccatcatgtgttggttaaaaagggcggaatgttttcctacccgcaaaagaaattgcgaaagctttttgaagtctttcctttagccttgatggttgaaaaagctaaaggggaagcgttttattttgataagggggttaaaaagcgtttgctagatcaaagcgtagaaagctaccatgaaaaaagcgaatgctatttagccagcccgcatgaagctcagattttagaaaaacatttaaagggagaa

SEQ ID NO: 2051 - DNA (genomic), 270 bp, Helicobacter pylori; double-stranded, circular
  misc_feature (B) LOCATION 1...270
  hypothetical: NO
  anti-sense: NO
ttgaaagtagctccgagccttttgagcgctgattttatgcatttagccaaagagatagagagcgtgagtaacgctgattttttgcatgtggatgtgatggatgggcattatgtgcctaatttaaccatgggacctgtgatcttagagaatgttactcaaatgagccaagtgcctttagacgtgcatttaatggtagaaaacgcgagcttttttgtagaattattcgctcctttaaacccgcaaatcatcagcatccatgtcagaaaatga

SEQ ID NO: 2052 - DNA (genomic), 276 bp, Helicobacter pylori; double-stranded, circular
  misc_feature (B) LOCATION 1...276
  hypothetical: NO
  anti-sense: NO
ggaagtattttgaaagtagctccgagccttttgagcgctgattttatgcatttagccaaagagatagagagcgtgagtaacgctgattttttgcatgtggatgtgatggatgggcattatgtgcctaatttaaccatgggacctgtgatcttagagaatgttactcaaatgagccaagtgcctttagacgtgcatttaatggtagaaaacgcgagcttttttgtagaattattcgctcctttaaacccgcaaatcatcagcatccatgtcagaaaa

SEQ ID NO: 2053 - DNA (genomic), 486 bp, Helicobacter pylori; double-stranded, circular
  misc_feature (B) LOCATION 1...486
  hypothetical: NO
  anti-sense: NO
aaattgaatatcactgatgacacacgcattagagagagcttgcccaccatccaattttgtattgacaataaggctaaagatattattttagtgagccatttgggccgccctaaaggggttgaagaaaaattgagcttgaagccctttttaaaacgccttgaaagactcttaaatcatgaagtggttttttctcaaaatatcgcgcaactcaagcaagccttaaacgaaaacgcgcccacaaggatttttcttttagaaaacatccgctttttaaaaggcgaagaagaaaatgatgaaaatctggctaaagatttagcgagcttgtgcgatgtgtttgtgaatgacgcttttggcacgagccacagaaaacatgccagcacttatggcaccgccaaattcgctcccataaaagtgagcgggtttttgcttaaaaaagaaattgattcgttttatcaagcgtttaaccaccctttacgccctttattg

SEQ ID NO: 2054 - DNA (genomic), 489 bp, Helicobacter pylori; double-stranded, circular
  misc_feature (B) LOCATION 1...489
  hypothetical: NO
  anti-sense: NO
aaattgaatatcactgatgacacacgcattagagagagcttgcccaccatccaattttgtattgacaataaggctaaagatattattttagtgagccatttgggccgccctaaaggggttgaagaaaaattgagcttgaagccctttttaaaacgccttgaaagactcttaaatcatgaagtggttttttctcaaaatatcgcgcaactcaagcaagccttaaacgaaaacgcgcccacaaggatttttcttttagaaaacatccgctttttaaaaggcgaagaagaaaatgatgaaaatctggctaaagatttagcgagcttgtgcgatgtgtttgtgaatgacgcttttggcacgagccacagaaaacatgccagcacttatggcaccgccaaattcgctcccataaaagtgagcgggtttttgcttaaaaaagaaattgattcgttttatcaagcgtttaaccaccctttacgccctttattgttg

SEQ ID NO: 2055 - DNA (genomic), 504 bp, Helicobacter pylori; double-stranded, circular
  misc_feature (B) LOCATION 1...504
  hypothetical: NO
  anti-sense: NO
tttaaccaccctttacgccctttattgttgattgtggggggggctaaggtcagctccaaactcactttattaaaaaacattttagatctcattgacaagctcatcattgccggggcgatgagcaacaccttcttaaaagccttaggctatgatgtgcaggattcttctgtggaagacgccctaatcaatgacgccctagaattattgcaaagcgcgaaagaaaaaaaagtcaaagtctatttgcctatagacgccgtaaccactgatgacattcttaaccccaaacacatcaaaatttcacccgtccaagacattgagcctaaacacaaaatcgctgatatagggcctgcgagcctgaaattattttctgaggtcatagagagcgcgcccaccattttatggaatggccccttaggcgtgcatgaaaagcaagaattcgctagaggcacaacctttttagcccacaagatcgctaacacttacgctttctcgctcattgggggg

SEQ ID NO: 2056 - DNA (genomic), 501 bp, Helicobacter pylori; double-stranded, circular
  misc_feature (B) LOCATION 1...501
  hypothetical: NO
  anti-sense: NO
aaccaccctttacgccctttattgttgattgtggggggggctaaggtcagctccaaactcactttattaaaaaacattttagatctcattgacaagctcatcattgccggggcgatgagcaacaccttcttaaaagccttaggctatgatgtgcaggattcttctgtggaagacgccctaatcaatgacgccctagaattattgcaaagcgcgaaagaaaaaaaagtcaaagtctatttgcctatagacgccgtaaccactgatgacattcttaaccccaaacacatcaaaatttcacccgtccaagacattgagcctaaacacaaaatcgctgatatagggcctgcgagcctgaaattattttctgaggtcatagagagcgcgcccaccattttatggaatggccccttaggcgtgcatgaaaagcaagaattcgctagaggcacaacctttttagcccacaagatcgctaacacttacgctttctcgctcattgggggg

SEQ ID NO: 2057 - DNA (genomic), 1116 bp, Helicobacter pylori; double-stranded, circular
  misc_feature (B) LOCATION 1...1116
  hypothetical: NO
  anti-sense: NO
gtgcctttagatgaaaatttgaatatcactgatgacacacgcattagagagagcttgcccaccatccaattttgtattgacaataaggctaaagatattattttagtgagccatttgggccgccctaaaggggttgaagaaaaattgagcttgaagccctttttaaaacgccttgaaagactcttaaatcatgaagtggttttttctcaaaatatcgcgcaactcaagcaagccttaaacgaaaacgcgcccacaaggatttttcttttagaaaacatccgctttttaaaaggcgaagaagaaaatgatgaaaatctggctaaagatttagcgagcttgtgcgatgtgtttgtgaatgacgcttttggcacgagccacagaaaacatgccagcacttatggcaccgccaaattcgctcccataaaagtgagcgggtttttgcttaaaaaagaaattgattcgttttatcaagcgtttaaccaccctttacgccctttattgttgattgtggggggggctaaggtcagctccaaactcactttattaaaaaacattttagatctcattgacaagctcatcattgccggggcgatgagcaacaccttcttaaaagccttaggctatgatgtgcaggattcttctgtggaagacgccctaatcaatgacgccctagaattattgcaaagcgcgaaagaaaaaaaagtcaaagtctatttgcctatagacgccgtaaccactgatgacattcttaaccccaaacacatcaaaatttcacccgtccaagacattgagcctaaacacaaaatcgctgatatagggcctgcgagcctgaaattattttctgaggtcatagagagcgcgcccaccattttatggaatggccccttaggcgtgcatgaaaagcaagaattcgctagaggcacaacctttttagcccacaagatcgctaacacttacgctttctcgctcattggggggggcgacaccattgatgcgatcaatcgcgcgggcgaaaaggataacatgagctttatctctaccggtgggggggcgagcttggaactattagagggcaaaattttaccttgttttgaggttttggacaaacgccattaa

SEQ ID NO: 2058 - DNA (genomic), 1209 bp, Helicobacter pylori; double-stranded, circular
  misc_feature (B) LOCATION 1...1209
  hypothetical: NO
  anti-sense: NO
atgttagctaaaatgtcgtttatgcaaaacgttaaaaacattcaagaggtggatgtcaatcataaaagggtgcttattagagtggattttaacgtgcctttagatgaaaatttgaatatcactgatgacacacgcattagagagagcttgcccaccatccaattttgtattgacaataaggctaaagatattattttagtgagccatttgggccgccctaaaggggttgaagaaaaattgagcttgaagccctttttaaaacgccttgaaagactcttaaatcatgaagtggttttttctcaaaatatcgcgcaactcaagcaagccttaaacgaaaacgcgcccacaaggatttttcttttagaaaacatccgctttttaaaaggcgaagaagaaaatgatgaaaatctggctaaagatttagcgagcttgtgcgatgtgtttgtgaatgacgcttttggcacgagccacagaaaacatgccagcacttatggcaccgccaaattcgctcccataaaagtgagcgggtttttgcttaaaaaagaaattgattcgttttatcaagcgtttaaccaccctttacgccctttattgttgattgtggggggggctaaggtcagctccaaactcactttattaaaaaacattttagatctcattgacaagctcatcattgccggggcgatgagcaacaccttcttaaaagccttaggctatgatgtgcaggattcttctgtggaagacgccctaatcaatgacgccctagaattattgcaaagcgcgaaagaaaaaaaagtcaaagtctatttgcctatagacgccgtaaccactgatgacattcttaaccccaaacacatcaaaatttcacccgtccaagacattgagcctaaacacaaaatcgctgatatagggcctgcgagcctgaaattattttctgaggtcatagagagcgcgcccaccattttatggaatggccccttaggcgtgcatgaaaagcaagaattcgctagaggcacaacctttttagcccacaagatcgctaacacttacgctttctcgctcattggggggggcgacaccattgatgcgatcaatcgcgcgggcgaaaaggataacatgagctttatctctaccggtgggggggcgagcttggaactattagagggcaaaattttaccttgttttgaggttttggacaaacgccattaa

SEQ ID NO: 2059 - DNA (genomic), 153 bp, Helicobacter pylori; double-stranded, circular
  misc_feature (B) LOCATION 1...153
  hypothetical: NO
  anti-sense: NO
tttctcaacgcctcttgcacgaataacgctaacgctcccttgctcaaaatcttagatgaagcctttaaagtagaaaacgcgcttttaaccaccatccacagctacactgacgatcaaaaccttttagacaccaagcacaagggtatcgcgcgc

SEQ ID NO: 2060 - DNA (genomic), 348 bp, Helicobacter pylori; double-stranded, circular
  misc_feature (B) LOCATION 1...348
  hypothetical: NO
  anti-sense: NO
aggagaaacatgccaatcaaaatcgctgtcaatgggactgggcgcatcggtttgtgcgctataagagtcgccagtcaaagaaaagacgtggaaatcgtagccgtcaattctaccgctgaattagaaactcttttgcatttgatacgccatgatagcgtgcatgggcattttgaggccagattaaacgccaatagaaccctaaatatcgggcatagtaaaaatattttagtgttgagcgagcgagacattaacaagcttgatttttctgtcgctaacgcagaaatcatcatagaatgcaccgggaaattcaattccctagaagttcaagcgctcatcttaaaaacagcg

SEQ ID NO: 2061 - DNA (genomic), 693 bp, Helicobacter pylori; double-stranded, circular
  misc_feature (B) LOCATION 1...693
  hypothetical: NO
  anti-sense: NO
atgccaatcaaaatcgctatcaatgggactgggcgcatcggtttgtgcgctataagagtcgccagtcaaagaaaagacgtggaaatcgtagccgtcaattctaccgctgaattagaaactcttttgcatttgatacgccatgatagcgtgcatgggcattttgaagccaaattaaacgccaatagaaccctaaatatcgggcatagtaaaaatattttagtgttgagcgagcgagacattaacaagcttgatttttctgtcgctaacgcagaaatcatcatagaatgcaccgggaaattcaattccctagaagcttcaagcgctcatcttaaaaacagcgtgaaaaaagtcatcatctccgcccccgcgcaaaacgcccccacctttgtctatggggtgaatcacactaattaccataacgaaagcgtgatttctaacgcctcttgcacgactaacgctaccgctcccttactcaaaatcttagatgaagcctttaaagtagaaaacgcgcttttaaccaccatccacagctacactaacgatcaaaaccttttagacaccaagcacaaggatatccgccgcgctagagcggccagccttaacctcatccccacaagcaccggcgtgagcaaagccatttcgctagtcttaccgcatttaggccctaagattacaggccttgcgattagagtg

SEQ ID NO: 2062 - DNA (genomic), 822 bp, Helicobacter pylori; double-stranded, circular
  misc_feature (B) LOCATION 1...822
  hypothetical: NO
  anti-sense: NO
atgccaatcaaaatcgctatcaatgggactgggcgcatcggtttgtgcgctataagagtcgccagtcaaagaaaagacgtggaaatcgtagccatcaattctaccgctgaattagaaactcttttgcatttgatacgccatgatagcgtgcatgggcattttgaagccaaattaaacgccaatagaaccctaaatatcgggcatagtaaaaatattttagtgttgagcgagcgagacattaacaagcttgatttttctgtcgctaacgcagaaatcatcatagaatgcaccgggaaattcaattccctagaagcttcaagcgctcatcttaaaaacagcgtgaaaaaagtcatcatctccgcccccgcgcaaaacgcccccacctttgtctatggggtgaatcacactaattaccataacgaaagcgtgatttctaacgcctcttgcacgactaacgctaccgctcccttactcaaaatcttagatgaagcctttaaagtagaaaacgcgcttttaaccaccatccacagctacactaacgatcaaaaccttttagacaccaagcacaaggatatccgccgcgctagagcggccagccttaacctcatccccacaagcaccggcgtgagcaaagccatttcgctagtcttaccgcatttaggccctaagattacaggccttgcgattagagtgcctacccctaatgtgagcttggtggatttgtctttaaattttaaaaaagttgtgagtaaagcaagcgttcagcatgcgcttaaagacgccagtaagcatgcctttaaagggattgtaagcgttgattga

SEQ ID NO: 2063 - DNA (genomic), 1017 bp, Helicobacter pylori; double-stranded, circular
  misc_feature (B) LOCATION 1...1017
  hypothetical: NO
  anti-sense: NO
atgatcactggctctcacaaccccaaagaatacaacggctttaaaatcacgctcaatcaaaacccgttttatggcaaggacattcaggctttaaaaaacacgcttttaaacgcaaagcatgaaataaagcccctaaaagaaacgccagagaaagtcaatgccctagaagcgtatcatcgctatttgatcaaggattttaagcatttaaaaaatcttaaatacaaaatcgccctggattttggtaatggcgtgggggcgttaggattagagccgattttaaaggctttaaacattgattttagcagcctttatagcgatcctgatggggattttcctaaccaccacccagaccctagcgaagcgaaaaacttaaaagacttagaaaaacacatgcgagaaaacgctattttaataggctttgcttttgatggcgatgcggataggattgcgatgctaagctctcatcatatctatgcgggcgatgaattagcgattttattcgctaaacgcttgcatgctcaaggcatcaccccttttgtgatcggcgaagtcaaatgctctcaagtgatgtataacgcaatcaatacttttggtaagacgctcatgtataaaaccgggcatagcaatttaaaaatcaagctcaaagaaactaatgcgcattttgcggctgaaatgagcgggcatatcttttttaaagaacgctattttggctatgatgacgctctttacgcatgtttaagggctttggagttattgcttgaacaaagtccaagcgacttggaaaacaccattaaaaacctcccctattcctacaccacgcctgaagaaaaaatcgccgtgagcgaagaagaaaaatttgaaatcattcgcaacttacaagaagcgcttaaaaacccgccaagccatttccctacaatcaaagaaatcatcagcattgatggcgtgagagtggtttttgaacatggctttgggcttattcgcgcaagcaacacccaccccctatttagtcagccgctt

SEQ ID NO: 2064 - DNA (genomic), 1380 bp, Helicobacter pylori; double-stranded, circular
  misc_feature (B) LOCATION 1...1380
  hypothetical: NO
  anti-sense: NO
atggacattagcatttttagagaatacgatattagaggcatttaccccaccactttagatgaaaatacggcttttagtatcggcgtggagttgggaaaaatcatgcgagaatacgataaaagcgtgtttgtagggcatgacgcaagggtgcatgggcgttttttgtttgaagttttgagcgcggggctgcaatcaagcggcttgaaagtgtatgatttagggctaatccccacaccggtagcgtattttgcggcctttaatgaaatagacaatatccaatgccctaattccatcatgatcactggctctcacaaccccaaagaatacaacggctttaaaatcacgctcaatcaaaacccgttttatggcaaggacattcaggctttaaaaaacacgcttttaaacgcaaagcatgaaataaagcccctaaaagaaacgccagagaaagtcaatgccctagaagcgtatcatcgctatttgatcaaggattttaagcatttaaaaaatcttaaatacaaaatcgccctggattttggtaatggcgtgggggcgttaggattagagccgattttaaaggctttaaacattgattttagcagcctttatagcgatcctgatggggattttcctaaccaccacccagaccctagcgaagcgaaaaacttaaaagacttagaaaaacacatgcgagaaaacgctattttaataggctttgcttttgatggcgatgcggataggattgcgatgctaagctctcatcatatctatgcgggcgatgaattagcgattttattcgctaaacgcttgcatgctcaaggcatcaccccttttgtgatcggcgaagtcaaatgctctcaagtgatgtataacgcaatcaatacttttggtaagacgctcatgtataaaaccgggcatagcaatttaaaaatcaagctcaaagaaactaatgcgcattttgcggctgaaatgagcgggcatatcttttttaaagaacgctattttggctatgatgacgctctttacgcatgtttaagggctttggagttattgcttgaacaaagtccaagcgacttggaaaacaccattaaaaacctcccctattcctacaccacgcctgaagaaaaaatcgccgtgagcgaagaagaaaaatttgaaatcattcgcaacttacaagaagcgcttaaaaacccgccaagccatttccctacaatcaaagaaatcatcagcattgatggcgtgagagtggtttttgaacatggctttgggcttattcgcgcaagcaacaccaccccctatttagtcagccgctttgaaggcaaggatgaaacaacagcgttagaatataaaagggcgttgcttgggctattagaaaaactttaa

SEQ ID NO: 2065 - DNA (genomic), 1404 bp, Helicobacter pylori; double-stranded, circular
  misc_feature (B) LOCATION 1...1404
  hypothetical: NO
  anti-sense: NO
atttattcaaaaacaaggagtcatgacatggacattagcatttttagagaatacgatattagaggcatttaccccaccactttagatgaaaatacggcttttagtatcggcgtggagttgggaaaaatcatgcgagaatacgataaaagcgtgtttgtagggcatgacgcaagggtgcatgggcgttttttgtttgaagttttgagcgcggggctgcaatcaagcggcttgaaagtgtatgatttagggctaatccccacaccggtagcgtattttgcggcctttaatgaaatagacaatatccaatgccctaattccatcatgatcactggctctcacaaccccaaagaatacaacggctttaaaatcacgctcaatcaaaacccgttttatggcaaggacattcaggctttaaaaaacacgcttttaaacgcaaagcatgaaataaagcccctaaaagaaacgccagagaaagtcaatgccctagaagcgtatcatcgctatttgatcaaggattttaagcatttaaaaaatcttaaatacaaaatcgccctggattttggtaatggcgtgggggcgttaggattagagccgattttaaaggctttaaacattgattttagcagcctttatagcgatcctgatggggattttcctaaccaccacccagaccctagcgaagcgaaaaacttaaaagacttagaaaaacacatgcgagaaaacgctattttaataggctttgcttttgatggcgatgcggataggattgcgatgctaagctctcatcatatctatgcgggcgatgaattagcgattttattcgctaaacgcttgcatgctcaaggcatcaccccttttgtgatcggcgaagtcaaatgctctcaagtgatgtataacgcaatcaatacttttggtaagacgctcatgtataaaaccgggcatagcaatttaaaaatcaagctcaaagaaactaatgcgcattttgcggctgaaatgagcgggcatatcttttttaaagaacgctattttggctatgatgacgctctttacgcatgtttaagggctttggagttattgcttgaacaaagtccaagcgacttggaaaacaccattaaaaacctcccctattcctacaccacgcctgaagaaaaaatcgccgtgagcgaagaagaaaaatttgaaatcattcgcaacttacaagaagcgcttaaaaacccgccaagccatttccctacaatcaaagaaatcatcagcattgatggcgtgagagtggtttttgaacatggctttgggcttattcgcgcaagcaacaccaccccctatttagtcagccgctttgaaggcaaggatgaaacaacagcgttagaatataaaagggcgttgcttgggctattagaaaaactt

SEQ ID NO: 2066 - DNA (genomic), 174 bp, Helicobacter pylori; double-stranded, circular
  misc_feature (B) LOCATION 1...174
  hypothetical: NO
  anti-sense: NO
tttaagatcgctttcatcgcagaagtgcgcaaggtggctaatgaagataagagccaatttgatttgaggaagtttttttctccggcccaattagcgcttaaaaatgtggtcaaagagcgcatgaaacttttggcagcgctaataaaatttaatcaacaagggaagagtgtaaca

SEQ ID NO: 2067 - DNA (genomic), 579 bp, Helicobacter pylori; double-stranded, circular
  misc_feature (B) LOCATION 1...579
  hypothetical: NO
  anti-sense: NO
tgcgaacgctacccacacactcctgtagccttacacctagaccatggcacgacttttgaaagttgcgaaaaagccgtgaaagcgggtttcacttctgtgatgattgacgcgtctcatcatgcgtttgaagaaaatttggaattgacttctaaagtggtcaaaatggcgcataacgctggagtgagcgtggaagcggagttggggcgtttaatggggattgaagacaatatttcagtggatgaaaaggacgcggtgttagtgaatcctaaagaagcggagcggtttgtcaaagaatctcaagtggattacttagccccagccattgggacaagccatggagcgtttaagtttaagggtgagccaaaattggattttgaacgcttgcaagaagtcaaaaggctcactaatatccctctagttttgcatggagcgagcgcgataccagatgatgtgaggaaatcttatttggacgctggaggcgatttgaaaggttctaagggcgtgccttttgaatttctacaagaatctataaaaggagggatcaatttggtcaataccggcacggatttaacgttttct

SEQ ID NO: 2068 - DNA (genomic), 576 bp, Helicobacter pylori; double-stranded, circular
  misc_feature (B) LOCATION 1...576
  hypothetical: NO
  anti-sense: NO
gaacgctacccacacactcctgtagccttacacctagaccatggcacgacttttgaaagttgcgaaaaagccgtgaaagcgggtttcacttctgtgatgattgacgcgtctcatcatgcgtttgaagaaaatttggaattgacttctaaagtggtcaaaatggcgcataacgctggagtgagcgtggaagcggagttggggcgtttaatggggattgaagacaatatttcagtggatgaaaaggacgcggtgttagtgaatcctaaagaagcggagcggtttgtcaaagaatctcaagtggattacttagccccagccattgggacaagccatggagcgtttaagtttaagggtgagccaaaattggattttgaacgcttgcaagaagtcaaaaggctcactaatatccctctagttttgcatggagcgagcgcgataccagatgatgtgaggaaatcttatttggacgctggaggcgatttgaaaggttctaagggcgtgccttttgaatttctacaagaatctataaaaggagggatcaatttggtcaataccggcacggatttaacgttttct

SEQ ID NO: 2069 - DNA (genomic), 645 bp, Helicobacter pylori; double-stranded, circular
  misc_feature (B) LOCATION 1...645
  hypothetical: NO
  anti-sense: NO
gtgaaagcgggtttcacttctgtgatgattgacgcgtctcatcatgcgtttgaagaaaatttggaattgacttctaaagtggtcaaaatggcgcataacgctggagtgagcgtggaagcggagttggggcgtttaatggggattgaagacaatatttcagtggatgaaaaggacgcggtgttagtgaatcctaaagaagcggagcggtttgtcaaagaatctcaagtggattacttagccccagccattgggacaagccatggagcgtttaagtttaagggtgagccaaaattggattttgaacgcttgcaagaagtcaaaaggctcactaatatccctctagttttgcatggagcgagcgcgataccagatgatgtgaggaaatcttatttggacgctggaggcgatttgaaaggttctaagggcgtgccttttgaatttctacaagaatctataaaaggggggatcaataaggtcaataccgatacggatttaaggatcgctttcatcgcagaagtgcgcaaggtggctaatgaagataagagccaatttgatttgaggaagtttttttctccggcccaattagcgcttaaaaatgtggtcaaagagcgcatgaaacttttgggcagcgctaataaaatttaa

SEQ ID NO: 2070 - DNA (genomic), 924 bp, Helicobacter pylori; double-stranded, circular
  misc_feature (B) LOCATION 1...924
  hypothetical: NO
  anti-sense: NO
atgttagttaaaggcaatgaaatcttattgaaagcccataaagaaggttatggggtgggggcgtttaatttcgtgaattttgaaatgctaaacgctatttttgaagcaggaaacgaagaaaattccccgcttttcattcaagcgagtgaaggggcgatcaaatacatggggattgatatggcggtgggcatggtgaaaatcatgtgcgaacgctacccacacattcctgtagccttacacctagatcatggcacgacttttgaaagttgcgaaaaagccgtgaaagcgggtttcacttctgtgatgattgacgcgtctcatcatgcgtttgaagaaaatttggaattgacttctaaagtggtcaaaatggcgcataacgctggagtgagcgtggaagcggagttggggcgtttaatggggattgaagacaatatttcagtggatgaaaaggacgcggtgttagtgaatcctaaagaagcggagcggtttgtcaaagaatctcaagtggattacttagccccagccattgggacaagccatggagcgtttaagtttaagggtgagccaaaattggattttgaacgcttgcaagaagtcaaaaggctcactaatatccctctagttttgcatggagcgagcgcgataccagatgatgtgaggaaatcttatttggacgctggaggcgatttgaaaggttctaagggcgtgccttttgaatttctacaagaatctataaaaggggggatcaataaggtcaataccgatacggatttaaggatcgctttcatcgcagaagtgcgcaaggtggctaatgaagataagagccaatttgatttgaggaagtttttttctccggcccaattagcgcttaaaaatgtggtcaaagagcgcatgaaacttttgggcagcgctaataaaatttaa

SEQ ID NO: 2071 - DNA (genomic), 924 bp, Helicobacter pylori; double-stranded, circular; identical to SEQ ID NO: 2070
  misc_feature (B) LOCATION 1...924
  hypothetical: NO
  anti-sense: NO

SEQ ID NO: 2072 - DNA (genomic), 873 bp, Helicobacter pylori; double-stranded, circular
  misc_feature (B) LOCATION 1...873
  hypothetical: NO
  anti-sense: NO
atgccagtaaaaattttgtgcgatgcgtttttaacaagcggtttagggcatgtgaggcgttgtgaaaaaatcctttcttttatagaaaaattaggggttgaagcgagcctttatttacacaagcaagataatataagtgcttttttagagggcgttggcggtaatgatttgttgattacagacagctatcgtttaaattcaaaagatttttaccttttaaaagaaaaagctaaaagcctaatggtcatagaagatgaagagcatgctaaggagttttaccctaaaaacaccaagatcatgaatttcacgctgaacgccttaaaacactaccatcatttatcaaaagattatcagtattatttgggggtggggttttaccctattgatgctcgttttgtttatgagcgccctatcaatacagaaaataaagaagtgctgatcactctaggggggagcgagcaaaaaacgctcaaagagatagtcaaaattttagaaaataagaatgtgaatttgcacatcatttcatcttatatccctaaaaattctccaaaaaacacgcgctattacagccctttaaaccctttggagttcagttctttgatgaaatcttgcgcttatgctattagcgctgctggtcaaaccctctatgaattagccctttctcaaacgccctctcttatccttcccatcgcttctaatcagatcattcaaagcaaagaatttgaaagcttgggtattttcaaacaaacgagtttaaaaactctggctaaagattttgaaaatttacaaattcaaaaaaaccaagcctgggcaaaaaccctgacctttgggagtgagctagagggcgcattgagggagtttttagaaatttga

SEQ ID NO: 2073 - DNA (genomic), 924 bp, Helicobacter pylori; double-stranded, circular
  misc_feature (B) LOCATION 1...924
  hypothetical: NO
  anti-sense: NO
cactttagaagatttagaattagccaagctcaaatacagccgtttgaaaaacgcatgccagtaaaaattttgtgcgatgcgtttttaacaagcggtttagggcatgtgaggcgttgtgaaaaaatcctttcttttatagaaaaattaggggttgaagcgagcctttatttacacaagcaagataatataagtgcttttttagagggcgttggcggtaatgatttgttgattacagacagctatcgtttaaattcaaaagatttttaccttttaaaagaaaaagctaaaagcctaatggtcatagaagatgaagagcatgctaaggagttttaccctaaaaacaccaagatcatgaatttcacgctgaacgccttaaaacactaccatcatttatcaaaagattatcagtattatttgggggtggggttttaccctattgatgctcgttttgtttatgagcgccctatcaatacagaaaataaagaagtgctgatcactctaggggggagcgagcaaaaaacgctcaaagagatagtcaaaattttagaaaataagaatgtgaatttgcacatcatttcatcttatatccctaaaaattctccaaaaaacacgcgctattacagccctttaaaccctttggagttcagttctttgatgaaatcttgcgcttatgctattagcgctgctggtcaaaccctctatgaattagccctttctcaaacgccctctcttatccttcccatcgcttctaatcagatcattcaaagcaaagaatttgaaagcttgggtattttcaaacaaacgagtttaaaaactctggctaaagattttgaaaatttacaaattcaaaaaaaccaagcctgggcaaaaaccctgacctttgggagtgagctagagggcgcattgagggagtttttagaaatt

SEQ ID NO: 2074 - DNA (genomic), 273 bp, Helicobacter pylori; double-stranded, circular
  misc_feature (B) LOCATION 1...273
  hypothetical: NO
  anti-sense: NO
cgcttcgcctatcgttcttttagccttgaaaacggcgttcaaatggcttttaaagagcattcaaacacgcgcacgcaagatctaaaaacgctctatcatgacgcagggttgctttatatggggaaggctcaagccttcaaagaaatgcggcctatttttagcccaaattctatcgctttagaattatcgcccctagaagtccaagatattgacactttagaagatttagaattagccaagctcaaatacagccgtttgaaaaacgcatgccag

SEQ ID NO: 2075 - DNA (genomic), 297 bp, Helicobacter pylori; double-stranded, circular
  misc_feature (B) LOCATION 1...297
  hypothetical: NO
  anti-sense: NO
aagcttagcatgagagcgatcgctattgttttagccagaagttccagtaaaaggattaagaataaaaatatgattgattttttcaataaacccatgctcgcttaccctattgaaacagcactaaattccaagctctttgaaaaagtgtttatctctagcgatagcatggagtatgtcaatttagccaaaaattatggggcgagttttttgaatttacgccctaaaaatttagcagacgagcagggccacgactttagaagtgatggcctatcacatgaaagaattagaattaaaaga

SEQ ID NO: 2076 - DNA (genomic), 690 bp, Helicobacter pylori; double-stranded, circular
  misc_feature (B) LOCATION 1...690
  hypothetical: NO
  anti-sense: NO
atgagagcgatcgctattgttttagccagaagttccagtaaaaggattaagaataaaaatatgattgattttttcaataaacccatgctcgcttaccctattgaaacagcactaaattccaagctctttgaaaaagtgtttatctctagcgatagcatggagtatgtcaatttagccaaaaattatggggcgagttttttgaatttacgccctaaaaatttagcagacgacagggccacgactttagaagtgatggcctatcacatgaaagaattagaattaaaagatgaagacattgcgtgttgtttgtatggcgtttcagtatttttacaagaaaagcatttacaaaacgcttttgaaactttaaaacaaaatcaaaatacggattatgttttcacatgctctccctttagcgcttcgccctatcgttcttttagccttgaaaacggcgttcaaatggcttttaaagagcattcaaacacgcgcacgcaagatctaaaaacgctctatcatgacgcagggttgctttatatggggaaggctcaagccttcaaagaaatgcggcctatttttagcccaaattctatcgctttagaattatcgcccctagaagtccaagatattgacactttagaagatttagaattagccaagctcaaatacagccgtttgaaaaacgcatgccagtaa

SEQ ID NO: 2077 - DNA (genomic), 285 bp, Helicobacter pylori; double-stranded, circular
  misc_feature (B) LOCATION 1...285
  hypothetical: NO
  anti-sense: NO
tattccttataccatggcaaatgcgcgctagaatgcgcgaaattagacattgacatgctcaccgtgcatttaagcagcgctaaaagcgcgctaaccattttaatgcaacgcctgaacgctcttaaaaaacgccccttaatcatgggcgtgagcgctttaacgagctttagcgaagaggaatttttgatggtgtataacgcccctttaaaaactcaagcaatcacattaagcgctataggcaaagagagcgggattgatggggtggtgtgtcggtgtttgaaagtt

SEQ ID NO: 2078 - DNA (genomic), 480 bp, Helicobacter pylori; double-stranded, circular
  misc_feature (B) LOCATION 1...480
  hypothetical: NO
  anti-sense: NO
atgcaattatgtgtcgcattagatttagaaaaaaaagaggacaatctttctttattgcaagaattaaagggcttagatttatgggctaaagtggggcttagatcttttataagagacggggcgacttttttagatgaaatcagaaagattgatgggaattttaagatttttttggatttgaagctctatgatattccttataccatggcaaatgccgcgctagaatgcgcgaaattagacattgacatgctcaccgtgcatttaagcagcgctaaaagcgcgctaaccattttaatgcaacgcctgaacgctcttaaaaaacgccccttaatcatgggcgtgagcgctttaacgagctttagcgaagaggaatttttgatggtgtataacgcccctttaaaaactcaagcaatcacattaagcgctataggcaaagagagcgggattgatggggtggtgtgtcggtgtttgaaagtttag

SEQ ID NO: 2079 - DNA (genomic), 225 bp, Helicobacter pylori; double-stranded, circular
  misc_feature (B) LOCATION 1...225
  hypothetical: NO
  anti-sense: NO
gtgtcggtgtttgaaagtttagcgattaaagaggctttaggtaagggctttttgactttaacccctggcataaggctggataaaaacgataaagaagatcaagaaagggtggcgaacgctaaagaagccaaacaaaatttaagcgattttatcgtggtaggccgccccatttatcaagctaaagagcctagagaagtggttttagagcttttaaaggattgttaa

SEQ ID NO: 2080 - DNA (genomic), 231 bp, Helicobacter pylori; double-stranded, circular
  misc_feature (B) LOCATION 1...231
  hypothetical: NO
  anti-sense: NO
tggggtggtgtgtcggtgtttgaaagtttagcgattaaagaggctttaggtaagggctttttgactttaacccctggcataaggctggataaaaacgataaagaagatcaagaaagggtggcgaacgctaaagaagccaaacaaaatttaagcgatttaatcgtggtaggccgccccatttatcaagctaaagagcctagagaaatggttttagagcttttaaaggattgt

SEQ ID NO: 2081 - DNA (genomic), 435 bp, Helicobacter pylori; double-stranded, circular
  misc_feature (B) LOCATION 1...435
  hypothetical: NO
  anti-sense: NO
ggtattctaacgagactatatcagatagttttaaggaaaataaggaacagaatggaagtttcacgcaaaaagatttataaccctaattctacagaaagtgtgaatgaaagaaagatttttgggggcaatcctacaagcatgtttgatttgaataagatcaagtatcaatgggcggatcatttgtggaaaacgatgctcgctaacacctggtttgctgaagaagtgagcatgaacgatgacaaaagggattatttgaaattgagcgcagaagagaagatcggctatgacagagccttagcgcaactcattttcatggatagcttgcaagccaataatttgattgacaatatcaatccctttatcaccggtcctgagtcaatttgtgtttggtgcgtcaagcttatgaagaagccctacacagccatgcgtatgcgg

SEQ ID NO: 2082 - DNA (genomic), 543 bp, Helicobacter pylori; double-stranded, circular
  misc_feature (B) LOCATION 1...543
  hypothetical: NO
  anti-sense: NO
atggaagtttcacgcaaaaagatttataaccctaattctacagaaagtgtgaatgaaagaaagatttttgggggcaatcctacaagcatgtttgatttgaataagatcaagtatcaatgggcggatcatttgtggaaaacgatgctcgctaacacctggtttgctgaagaagtgagcatgaacgatgacaaaagggattatttgaaattgagcgcagaagaaaagatcggctatgacagagccttagcgcaactcattttcatggatagcttgcaagccaataatttgattgacaatatcaatccctttatcaccagtcctgagatcaatttgtgtttggtgcgtcaagcttatgaagaagccctacacagccatgcgtatgcggtgatggtagaaagcattagcgccaatactgaagaaatttatgacatgtggcgtaacgatatgcaattaaaaagcaagaacgaattatatcgcacaagtgtatatggaattagccaaaaaccccacagaagaaaacatcctcaaagcgctttttgctaa

SEQ ID NO: 2083 - DNA (genomic), 546 bp, Helicobacter pylori; double-stranded, circular
  misc_feature (B) LOCATION 1...546
  hypothetical: NO
  anti-sense: NO
gtgtatatggaattagccaaaaaccccacagaagaaaacatcctcaaagcgctttttgctaaccagattttagaggggatttatttttatagcgggtttagctatttttacactctggctaggagcggtaagatgctaggctcagcgcaaatgattcgttttatccaaagagatgaggtaacgcatttgattttattccaaaacatgatcaacgctttaaggaacgaaagagcggatctattcacgccacaattgattaatgaagtcatagagatgtttaaaaaagcggtagaaattgaagcctcatggggggattatatcacgcaaggcaagattttaggactcacttcaagcttgattgagcaatacatccagtttttagcggatagccgtttgagtaaggtgggtatcgctaaagtttatggcgtccagcaccccattaaatgggtagagagcttttcaagcttcaatgagcaacgctccaatttctttgaagctagggtgagcaattacgccaaagggagcgtgagttttgatgacttttaa

SEQ ID NO: 2084 - DNA (genomic), 699 bp, Helicobacter pylori; double-stranded, circular
  misc_feature (B) LOCATION 1...699
  hypothetical: NO
  anti-sense: NO
gtcaatttgtgtttggtgcgtcaagcttatgaagaagccctacacagccatgcgtatgcggtgatggtagaaggcattagcgccaatactgaagaaatttatgacatgtggcgtaacgatatgcaattaaaaagcaagaacgattatatcgcacaagtgtatatggaattagccaaaaaccccacagaagaaaacatcctcaaagcgctttttgctaaccagattttagaggggatttatttttatagcgggtttagctatttttacactctggctaggagcggtaagatgctaggctcagcgcaaatgattcgttttatccaaagagatgaggtaacgcatttgattttattccaaaacatgatcaacgctttaaggaacgaaagagcggatctattcacgccacaattgattaatgaagtcatagagatgtttaaaaaagcggtagaaattgaagcctcatggggggattatatcacgcaaggcaagattttaggactcacttcaagcttgattgagcaatacatccagtttttagcggatagccgtttgagtaaggtgggtatcgctaaagtttatggcgtccagcaccccattaaatgggtagagagcttttcaagcttcaatgagcaacgctccaatttctttgaagctagggtgagcaattacgccaaagggagcgtgagttttgatgacttt

SEQ ID NO: 2085 - DNA (genomic), 906 bp, Helicobacter pylori; double-stranded, circular
  misc_feature (B) LOCATION 1...906
  hypothetical: NO
  anti-sense: NO
atgtttgatttgaataagatcaagtatcaatgggcggatcatttgtggaatacgatgctcgctaacacttggtttgctgaagaagtgagcatgaacgatgacaaaagggattatttgaaattgagcgcagaagaaaagatcggctatgacagagccttagcgcaactcattttcatggatagcttgcaagccaataatttgattgacaatatcaatccctttatcaccagtcctgagatcaatttgtgtttggtgcgtcaagcttatgaagaagccctacacagccatgcgtatgcggtgatggtagaaagcattagcgccaatactgaagaaatttatgacatgtggcgtaacgatatgcaattaaaaagcaagaacgattatatcgcacaagtgtatatggaattagccaaaaaccccacagaagaaaacatcctcaaagcgctttttgctaaccagattttagaggggatttatttttatagcgggtttagctatttttacactctggctaggagcggtaagatgctaggctcagcgcaaatgattcgttttatccaaagagatgaggtaacgcatttgattttattccaaaacatgatcaacgctttaaggaacgaaagagcggatctattcacgccacaattgattaatgaagtcatagagatgtttaaaaaagcggtagaaattgaagcctcatggggggattatatcacgcaaggcaagattttaggactcacttcaagcttgattgagcaatacatccagtttttagcggatagccgtttgagtaaggtgggtatcgctaaagtttatggcgtccagcaccccattaaatgggtagagagcttttcaagcttcaatgagcaacgctccaatttctttgaagctagggtgagcaattag

SEQ ID NO: 2086 - DNA (genomic), 1026 bp, Helicobacter pylori; double-stranded, circular
  misc_feature (B) LOCATION 1...1026
  hypothetical: NO
  anti-sense: NO
atggaagtttcacgcaaaaagatttataaccctaattctacagaaagtgtgaatgaaagaaagatttttgggggcaatcctacaagcatgtttgatttgaataagatcaagtatcaatgggcggatcatttgtggaaaacgatgctcgctaacacctggtttgctgaagaagtgagcatgaacgatgacaaaagggattatttgaaattgagcgcagaagaaaagatcggctatgacagagccttagcgcaactcattttcatggatagcttgcaagccaataatttgattgacaatatcaatccctttatcaccagtcctgagatcaatttgtgtttggtgcgtcaagcttatgaagaagccctacacagccatgcgtatgcggtgatggtagaaagcattagcgccaatactgaagaaatttatgacatgtggcgtaacgatatgcaattaaaaagcaagaacgattatatcgcacaagtgtatatggaattagccaaaaaccccacagaagaaaacatcctcaaagcgctttttgctaaccagattttagaggggatttatttttatagcgggtttagctatttttacactctggctaggagcggtaagatgctaggctcagcgcaaatgattcgttttatccaaagagatgaggtaacgcatttgattttattccaaaacatgatcaacgctttaaggaacgaaagagcggatctattcacgccacaattgattaatgaagtcatagagatgtttaaaaaagcggtagaaattgaagcctcatggggggattatatcacgcaaggcaagattttaggactcacttcaagcttgattgagcaatacatccagtttttagcggatagccgtttgagtaaggtgggtatcgctaaagtttatggcgtccagcaccccattaaatgggtagagagcttttcaagcttcaatgagcaacgctccaatttctttgaagctagggtgagcaattacgccaaagggagcgtgagttttgatgacttttaa

SEQ ID NO: 2087 - DNA (genomic), 375 bp, Helicobacter pylori; double-stranded, circular
  misc_feature (B) LOCATION 1...375
  hypothetical: NO
  anti-sense: NO
ttgatgaccaaaagcttaaaactcattcaaaaaggggttaaaaacctctatgaaacccttaaaaatagggctttagagcatcaagacacgctaatggtgggcagaagccatggggtgtttggcgaacccatcacctttggtttagttttagctctttttgctgatgaaatcaaacggcatttaaaagccctggatttaacgatggaatttatcrgcgtwggggcgatcagtggggctatggggaatttcgcgcacgcccctttagaattagaagaattagcgtgcggatttttaggcttaaaaaccgctaatatcagcaatcaagtcattcaaagagaccgctacgcaggcttgcatgcgatctggctcttttag

SEQ ID NO: 2088 - DNA (genomic), 1323 bp, Helicobacter pylori; double-stranded, circular
  misc_feature (B) LOCATION 1...1323
  hypothetical: NO
  anti-sense: NO
gtgttagaacgctatgcgaatgaagaaatgaaagccctatggaatgagcaaaccaaatttgaaacttatttggaagtggaaaaagctgtcgttagggcgtggaataagcttgggcaaatccaagatagcgattgtgaaaaaatctgcttaaaagcggcattcaatcttgaacgcatcaaagaaattgaaaaaaccactaagcatgatttaatcgctttcactacttgcgtggctgaaagcttgggcgaagaatcccgcttctttcattatgggatcacttctagcgattgcattgatacggctatggcgttattgatgaccaaaagcttaaaactcattcaaaaaggcgttaaaaacctctatgaaacccttaaaaatagggctttagagcatcaagacacgctaatggtgggcagaagccatggggtgtttggcgaacccatcacctttggtctagttttagctctttttgctgatgaaatcaaacggcatttaaaagccctggatttaacgatggaatttatcagcgtaggggcgatcagtggggctatggggaatttcgcgcacgcccctttagaattagaagaattagcgtgcggatttttaggcttaaaaaccgctaatatcagcaatcaagtcattcaaagagaccgctacgctaggcttgcatgcgatctggctcttttagcgagcagttgtgaaaaaatcgctgtcaatatccgccatttgcaacgcagtgaagtctatgaagtggaagaagctttttcagcagggcaaaagggaagctctgcgatgcctcataaaagaaaccccatcttgagcgagaatatcaccgggctttgcagggtgattcgctcttttactacccccatgctagaaaatgtcgccttatggcatgaaagggacatgagccatagctctgtggagcgttttgcgctgcctgatctgtttatcaccagcgatttcatgctcagccgtttgaatagcgtgattgaaaatctggtggtttatcctaaaaacatgcttaaaaatttagctttgagtggggggctagtcttttcgcaacgggtgttattggaattgcctaaaaaaggtttgagcagagaagaaagctattctatcgtgcaagaaaatgcgatgaaaatatgggaggttttgcaacaaggcgcttttaaaaacgctgatgaaaatttatttttaaacgccctacttaacgatgaacgcttgaaaaaatatttgaatgagagcgaaatcagagcatgttttgattacagctattacactaaaaatgtgggggcgatttttaaaagggtgtttggataa

SEQ ID NO: 2089 - DNA (genomic), 1329 bp, Helicobacter pylori; double-stranded, circular
  misc_feature (B) LOCATION 1...1329
  hypothetical: NO
  anti-sense: NO
ggattgtcggtgttagaacgctatgcgaatgaagaaatgaaagccctatggaatgagcaaaccaaatttgaaacttatttggaagtggaaaaagctgtcgttagggcgtggaataagcttgggcaaattcaagatagcgattgtgaaaaaatctgcttaaaagcggcattcaatcttgaacgcatcaaagaaattgaaaaaaccactaagcatgatttaatcgctttcactacttgcgtggctgaaagcttgggcgaagaatcccgcttctttcattatgggatcacttctagcgattgcattgatacggctatggcgttattgatgaccaaaagcttaaaactcattcaaaaaggcgttaaaaacctctatgaaacccttaaaaatagggctttagagcatcaagacacgctaatggtgggcagaagccatggggtgtttggcgaacccatcacctttggtctagttttagctctttttgctgatgaaatcaaacggcatttaaaagccctggatttaacgatggaatttatcagcgtatgggcgatcagtgggggtctcgggaatttcgcgcacgcccctttagaattagaagaattagcgtgcggatttttaggcttaaaaaccgctaatatcagcaatcaagtcattcaaagagaccgctacgctaggcttgcatgcgatctggctcttttagcgagcagttgtgaaaaaatcgctgtcaatatccgccatttgcaacgcagtgaagtctatgaagtggaagaagctttttcagcagggcaaaagggaagctctgcgatgcctcataaaagaaaccccatcttgagcgagaatatcaccgggctttgcagggtgattcgctcttttactacccccatgctagaaaatgtcgccttatggcatgaaagggacatgagccatagctctgtggagcgttttgcgctgcctgatctgtttatcaccagcgatttcatgctcagccgtttgaatagcgtgattgaaaatctggtggtttatcctaaaaacatgcttaaaaatttagctttgagtggggggctagtcttttcgcaacgggtgttattggaattgcctaaaaaaggtttgagcagagaagaaagctattctatcgtgcaagaaaatgcgatgaaaatatgggaggttttgcaacaaggcgcttttaaaaacgctgatgaaaatttatttttaaacgccctacttaacgatgaacgcttgaaaaaatatttgaatgagagcgaaatcagagcatgttttgattacagctattacactaaaaatgtgggggcgatttttaaaagggtgtttgga

SEQ ID NO: 2090 - DNA (genomic), 231 bp, Helicobacter pylori; double-stranded, circular
  misc_feature (B) LOCATION 1...231
  hypothetical: NO
  anti-sense: NO
gtgctgttgaatgtcaattctgtgggggttatgggggataatcgcacttatgaaaacgctatttgtttaagagcggtaaatgcgagcgatggcatgacagcgagcttttcatttttagagcattcttttttagaaaaggtttctaaccgcatcactaatgaagtgaatggtattaatagggtggtgtatgatattacctctaaaccaccaggaacgattgaatgggaatga

SEQ ID NO: 2091 - DNA (genomic), 240 bp, Helicobacter pylori; double-stranded, circular
  misc_feature (B) LOCATION 1...240
  hypothetical: NO
  anti-sense: NO
caagctttttgcgtgctgttgaatgtcaattctgtgggggttatgggggataatcgcacttatgaaaacgctatttgtttaagagcggtaaatgcgagcgatggcatgacagcgagcttttcatttttagagcattcttttttagaaaaggtttctaaccgcatcactaatgaagtgaatggtattaatagggtggtgtatgatattacctctaaaccaccaggaacgattgaatgggaa

SEQ ID NO: 2092 - DNA (genomic), 633 bp, Helicobacter pylori; double-stranded, circular
  misc_feature (B) LOCATION 1...633
  hypothetical: NO
  anti-sense: NO
gtgtttgaaaaagaagccaaaaaacaccatttaaaaggcaagattgaatttttagcccaaggcactttataccctgatgtgattgaatccgtgagcgttaaagggccttcaaaagtgatcaaaacgcaccataatgtgggcggactgcctgaatggatggactttaaactcatagagcctttaagggaattgtttaaagatgaggtgcgtttgttgggtaaagaattgggcgttagtcaggattttttaatgcgccacccctttccagggcctgggcttgcaataaggattttaggcgagattaacgaaaataagatcaaacgcttgcaagaagcggatgctatttttatagaggagcttaaaaaagccaatttgtatgacaaggtttggcaagctttttgcgtgctgttgaatgtcaattctgtgggggttatgggggataatcgcacttatgaaaacgctatttgtttaagagcggtaaatgcgagcgatggcatgacagcgagcttttcatttttagagcattcttttttagaaaaggtttctaaccgcatcactaatgaagtgaatggtattaatagggtggtgtatgatattacctctaaaccaccaggaacgattgaatgggaatga

SEQ ID NO: 2093 - DNA (genomic), 867 bp, Helicobacter pylori; double-stranded, circular
  misc_feature (B) LOCATION 1...867
  hypothetical: NO
  anti-sense: NO
atgattttagtattagattttgggagccaatacacgcagctgatcgctagaagattgagagagagtgggatttatgcagagatagtccctttttttgaaagcgtagaaaacattcaaaaaaaagcccctaaaggtttgattttgagtggggggccagcgagcgtgtatgctaaagacgcttacaagcccagtgaaaaaatctttgatttgaatttaccaattttagggatttgctacggcatgcagtatctggtggatttttttgggggggtagtggcctatgcgaatgagcaagaatttggtaaggctattttagaaatcgttcaaaattctgtgatttttgaaggcgtgaagattaaaagccttgtgtggatgagccacatggataaagtcatagaattgccaaaaggctttactacccttgcaaaaagccctaattcgccctattgcgcgattgaaagcgataagatttttggcttgcaattccacccagaagtcattcaaagcgaagaagggggtaagattttagaaaattttgcccttttagtttgcggctgtgaaaaaacttgggggatgcagcatttcgctcaaagagaaatagtgcggttgaaagaaaaaatcgctaacgctaaggtgttgtgcgcggtgagtgggggcgtggattctacggtggtcgctacgctattgcacagagccattaaggataatttgatcgctgtttttgtggatcatggcttgttgcgtaaaaatgaaaaagaaaaagtccaagcgatgtttaaagacttgcaaatccctttgaacacgatagacgctaaagaagtctttttgtctaaattaaagggcgtgagcgagcctgaattgaagtga

SEQ ID NO: 2094 - DNA (genomic), 867 bp, Helicobacter pylori; double-stranded, circular
  misc_feature (B) LOCATION 1...867
  hypothetical: NO
  anti-sense: NO
gagatgattttagtattagattttgggagccaatacacgcagctgatcgctagaagattgagagagagtgggatttatgcagagatagtccctttttttgaaagcgtagaaaacattcaaaaaaaagcccctaaaggtttgattttgagtggggggccagcgagcgtgtatgctaaagacgcttacaagcccagtgaaaaaatctttgatttgaatttaccaattttagggatttgctacggcatgcagtatctggtggatttttttgggggggtagtggcctatgcgaatgagcaagaatttggtaaggctattttagaaatcgttcaaaattctgtgatttttgaaggcgtgaagattaaaagccttgtgtggatgagccacatggataaagtcatagaattgccaaaaggctttactacccttgcaaaaagccctaattcgccctattgcgcgattgaaagcgataagatttttggcttgcaattccacccagaagtcattcaaagcgaagaagggggtaagattttagaaaattttgcccttttagtttgcggctgtgaaaaaacttgggggatgcagcatttcgctcaaagagaaatagtgcggttgaaagaaaaaatcgctaacgctaaggtgttgtgcgcggtgagtgggggcgtggattctacggtggtcgctacgctattgcacagagccattaaggataatttgatcgctgtttttgtggatcatggcttgttgcgtaaaaatgaaaaagaaaaagtccaagcgatgtttaaagacttgcaaatccctttgaacacgatagacgctaaagaagtctttttgtctaaattaaagggcgtgagcgagcctgaattgaag

SEQ ID NO: 2095 - DNA (genomic), 1527 bp, Helicobacter pylori; double-stranded, circular
  misc_feature (B) LOCATION 1...1527
  hypothetical: NO
  anti-sense: NO
atgattttagtattagattttgggagccaatacacgcagctgatcgctagaagattgagagagagtgggatttatgcagagatagtccctttttttgaaagcgtagaaaacattcaaaaaaaagcccctaaaggtttgattttgagtggggggccagcgagcgtgtatgctaaagacgcttacaagcccagtgaaaaaatctttgatttgaatttaccaattttagggatttgctacggcatgcagtatctggtggatttttttgggggggtagtggcctatgcgaatgagcaagaatttggtaaggctattttagaaatcgttcaaaattctgtgatttttgaaggcgtgaagattaaaagccttgtgtggatgagccacatggataaagtcatagaattgccaaaaggctttactacccttgcaaaaagccctaattcgccctattgcgcgattgaaagcgataagatttttggcttgcaattccacccagaagtcattcaaagcgaagaagggggtaagattttagaaaattttgcccttttagtttgcggctgtgaaaaaacttgggggatgcagcatttcgctcaaagagaaatagtgcggttgaaagaaaaaatcgctaacgctaaggtgttgtgcgcggtgagtgggggcgtggattctacggtggtcgctacgctattgcacagagccattaaggataatttgatcgctgtttttgtggatcatggcttgttgcgtaaaaatgaaaaagaaaaagtccaagcgatgtttaaagacttgcaaatccctttgaacacgatagacgctaaagaagtctttttgtctaaattaaagggcgtgagcgagcctgaattgaagcgaaaaatcatcggcgagacctttattgaagtgtttgaaaaagaagccaaaaaacaccatttaaaaggcaagattgaatttttagcccaaggcactttataccctgatgtgattgaatccgtgagcgttaaagggccttcaaaagtgatcaaaacgcaccataatgtgggcggactgcctgaatggatggactttaaactcatagagcctttaagggaattgtttaaagatgaggtgcgtttgttgggtaaagaattgggcgttagtcaggattttttaatgcgccacccctttccagggcctgggcttgcaataaggattttaggcgagattaacgaaaataagatcaaacgcttgcaagaagcggatgctatttttatagaggagcttaaaaaagccaatttgtatgacaaggtttggcaagctttttgcgtgctgttgaatgtcaattctgtgggggttatgggggataatcgcacttatgaaaacgctatttgtttaagagcggtaaatgcgagcgatggcatgacagcgagcttttcatttttagagcattcttttttagaaaaggtttctaaccgcatcactaatgaagtgaatggtattaatagggtggtgtatgatattacctctaaaccaccaggaacgattgaatgggaatga

SEQ ID NO: 2096 - DNA (genomic), 1302 bp, Helicobacter pylori; double-stranded, circular
  misc_feature (B) LOCATION 1...1302
  hypothetical: NO
  anti-sense: NO
atgctttctgtaatcatactagccgctggcaaaggcactcgcatgcactctagcctacctaagactttacacacgatttgcggggagcctatgctgttttacattttagaagtggctttttcaatcagtaatgatgtgcatcttgtcttacaccaccaacaagaacgcattaaagaagcggtgtcaaagcgttttaagggcgtgatttttcacgctcaaatcgtggaaaaatattcagggacaggtggggctatcatgcaagaaaataaaacgcctattcccactcaacatgagcgggttttgattttgaatgcggacatgcccttaatcactaaagacgctctcacccccttattagaaagccataataacgccataggcttactgcatttagctgaccctaaaggttatgggcgcgttattttagaaaaccatcaagttaaaaagattgtagaagaaaaggacgctaatgatgaagaaaaaaccattaaaagcgtgaatgctggcgtgtatttttttgaaagaaagtttttagaaagatacttgcccaaactccatgaccaaaacgcccaaaaagaatactatctcacggatttgatcgctctgggtattaaggggaatgaaaaaattgacgctatttttttagaagaagagtgttttttaggggtgaatagccaaacagaaagagcgaaagctgaagaaatcatgctagaaagactgcgaaaaaacgccatggatttgggggtagtgatgcaattgcctagtagtatttacttagaaaaaggcgtgagttttaagggggagtgcgttttagagcaaggggtgcgtttgattgggaattgcttgatagaaaacgcgcgcattaaagcttatagcgtgatagaagagagccaaatcattaatagcagtgtggggccgtttgcccatgcgcgccctaaaagcgtgatttgtgatagccatgtggggaattttgtagagactaaaaacgctaaacttcaaggcactaaagcagggcatttgagctatttaggggattgtgagatagggaaaaacacaaatgtaggggctggcgtgatcacttgcaattacgatggtaaaaagaaacaccaaacgatcatcggtgaaaatgtctttatagggagcgatagccaactagtcgctcctataaatatcggctctaatgtcttaatcggcagcggcaccaccatcactaaagacattcctagcgggtcgttgagcctttcacgcacccctcaaaccaacattgaaaacgggtattttaagttttttaagaagccttaa

SEQ ID NO: 2097 - DNA (genomic), 1308 bp, Helicobacter pylori; double-stranded, circular
  misc_feature (B) LOCATION 1...1308
  hypothetical: NO
  anti-sense: NO
aggattttaatgctttctgtaatcatactagccactggcaaaggcactcgcatgcactttagcctacctaagactttacacacgatttgcggggagcctatgctgttttacattttagaagtggctttttcaatcagtaatgatgtgcatcttgtcttacaccaccaacaagaacgcattaaagaagcggtgtcaaagcgttttaagggcgtgatttttcacgctcaaatcgtggaaaaatattcagggacaggtggggctatcatgcaagaaaataaaacgcctattcccactcaacatgagcgggttttgattttgaatgcggacatgcccttaatcactaaagacgctctcacccccttattagaaagccataataacgccataggcttactgcatttagctgaccctaaaggttatgggcgcgttattttagaaaaccatcaagttaaaaagattgtagaagaaaaggacgctaatgatgaagaaaaaaccattaaaagcgtgaatgctggcgtgtatttttttgaaagaaagtttttagaaagatacttgcccaaactccatgaccaaaacgcccaaaaagaatactatctcacggatttgatcgctctgggtattaaggggaatgaaaaaattgacgctatttttttagaagaagagtgttttttaggggtgaatagccaaacagaaagagcgaaagctgaagaaatcatgctagaaagactgcgaaaaaacgccatggatttgggggtagtgatgcaattgcctagtagtatttacttagaaaaaggcgtgagttttaagggggagtgcgttttagagcaaggggtgcgtttgattgggaattgcttgatagaaaacgcgcgcattaaagcttatagcgtgatagaagagagccaaatcattaatagcagtgtggggccgtttgcccatgcgcgccctaaaagcgtgatttgtgatagccatgtggggaattttgtagagactaaaaacgctaaacttcaaggcactaaagcagggcatttgagctatttaggggattgtgagatagggaaaaacacaaatgtaggggctggcgtgatcacttgcaattacgatggtaaaaagaaacaccaaacgatcatcggtgaaaatgtctttatagggagcgatagccaactagtcgctcctataaatatcggctctaatgtcttaatcggcagcggcaccaccatcactaaagacattcctagcgggtcgttgagcctttcacgcacccctcaaaccaacattgaaaacgggtattttaagttttttaagaagcct

SEQ ID NO: 2098 - DNA (genomic), 333 bp, Helicobacter pylori; double-stranded, circular
  misc_feature (B) LOCATION 1...333
  hypothetical: NO
  anti-sense: NO
aaacccagggttgaaaacgaaattttaggcttaaacttccctaaccatttaggcttgcccgccggctttgataaaaacgctttccatgctcagggcgttaatcactttagggtttggctatttggaagcaggcacattactaatatcgcgcaaagcgggaatgaaaaaccaaggcttttcaggcacattgaagaagagtccttacaaaatgcgatggggttcaataattacggggcgattttgggggtaagagcgttcaatcgcttcgccccctataaaacccctattggcatcaatttaggcaaaaacaaacacatagagcagcgcatgccc

SEQ ID NO: 2099 - DNA (genomic), 432 bp, Helicobacter pylori; double-stranded, circular
  misc_feature (B) LOCATION 1...432
  hypothetical: NO
  anti-sense: NO
aacccctattggcatcaatttaggcaaaaacaaacacatagagcagcgcatgccctagaagattatcaggcggttttaaatcaatgtttaaacattggcgattattacaccttcaacctttcttcgcccaacacccctaatttaagggatttgcaaaataaggtatttgtgaatgagcttttttgcatggctaaagaaatgactcataagcctttatttttaaagatcgccccggatttagaaatagatagcatgctagaggttgtcaatagcgctattgaagccggagcaaatgggattattgcgactaacacgaccattgataaaagcctggtgtttgcccctaaagaaatggggggcttgagcgggaaatgcttgactaaaaaaagccgtgaaattttcaaagaattggctaaagccttttttaataaa

SEQ ID NO: 2100 - DNA (genomic), 429 bp, Helicobacter pylori; double-stranded, circular
  misc_feature (B) LOCATION 1...429
  hypothetical: NO
  anti-sense: NO
aacccctattggcatcaatttaggcaaaaacaaacacatagagcagcgcatgccctagaagattatcaggcggttttaaatcaatgtttaaacattggcgattattacaccttcaacctttcttcgcccaacacccctaatttaagggatttgcaaaataaggtatttgtgaatgagcttttttgcatggctaaagaaatgactcataagcctttatttttaaagatcgccccggatttagaaatagatagcatgctagaggttgtcaatagcgctattgaagccggagcaaatgggattattgcgactaacacgaccattgataaaagcctggtgtttgcccctaaagaaatggggggcttgagcgggaaatgcttgactaaaaaaagccgtgaaattttcaaagaattggctaaagccttttttaat

SEQ ID NO: 2101 - DNA (genomic), 630 bp, Helicobacter pylori; double-stranded, circular
  misc_feature (B) LOCATION 1...630
  hypothetical: NO
  anti-sense: NO
atgctcagggcgttaatcgcttttgggtttggctatttggaagcaggcacattgactaatatcgcgcaaagcgggaatgaaaaaccaaggcttttcaggcacattgaagaagagtccttacaaaatgcgatggggttcaataattacggggcgattttgggggtaagagcgttcaatcgcttcgccccctataaaacccctattggcatcaatttaggcaaaaacaaacacatagagcaagcgcatgccctagaagattatcaggcggttttaaatcaatgtttaaacattggcgattattacaccttcaacctttcttcgcccaacacccctaatttaagggatttgcaaaataaggtatttgtgaatgagcttttttgcatggctaaagaaatgactcataagcctttatttttaaagatcgccccggatttagaaatagatagcatgctagaggttgtcaatagcgctattgaagccggagcaaatgggattattgcgactaacacgaccattgataaaagcctggtgtttgcccctaaagaaatggggggcttgagcgggaaatgcttgactaaaaaaagccgtgaaattttcaaagaattggctaaagccttttttaataaaagc

SEQ ID NO: 2102 - DNA (genomic), 231 bp, Helicobacter pylori; double-stranded, circular
  misc_feature (B) LOCATION 1...231
  hypothetical: NO
  anti-sense: NO
ggagtgtcagcgatgaaggcacgtggttttaagacaaagatgcgtggttttaagattttttcagggagcgctccccctgcatttggcaaagaagtgtcaaagcatttaggctttcccttatccaaagcggtgataggcaaattcagcgatggcgaaatcaatatccaaatcagcgaatcggtgcgcggtaaagatatttttatcatccagcctacttgcgtgcctgatcaa

SEQ ID NO: 2103 - DNA (genomic), 831 bp, Helicobacter pylori; double-stranded, circular
  misc_feature (B) LOCATION 1...831
  hypothetical: NO
  anti-sense: NO
gcaaattcagcgatggcgaaatcaatatccaaatcagcgaatcggtgcgcggtaaagatatttttatcatccagcctacttgcgtgcctgatcaatgacaatttaatggaattgttagtcatggtggatgctttaaggcgcagttcggccaattctatcacagcggtgttgccgtattttggctatgccagacaggacagaaaagcggctccacgagtgcctatcacggctaaaatggtcgctaatttgatgcaagaagtggggattgaaaggatcatcacgatggatttgcatgccgggcaaatccaaggcttttttgatgtgccggtggataatttatacggatctatcgtttttagagactatatccgctctaaagcgctcaaaaaccctataatcgccagccctgatgtgggtggggttacaagagccaggtatttcgccaatcaaatggggttagatttgatcatcgtggataagcgccgtgaaaaagctaatgaaagcgaagtgatgaatattatcggctcagccaaggagcgcgatgtgattttagtggatgacatgattgataccgcaggcacgatctgtaaagccgctttggctttaaaagaacaaggggcaacttctgtcatggcgttaggcacgcatgcggttttgagcgggaatgcgatcaagcgcattaaagaaagcgcgttagatgaagtggtggtaactaactctatccctttagttcaaaaatgcgataaaatcacgaccttaagcgtagcgtccttatttgcggaagtgatcagaaggatttatcataacgaaagcgtccaatcgcttttcact

SEQ ID NO: 2104 - DNA (genomic), 966 bp, Helicobacter pylori; double-stranded, circular
  misc_feature (B) LOCATION 1...966
  hypothetical: NO
  anti-sense: NO
gtgtcagcgatgaaggcacgtggttttaagacaaagatgcgtggttttaagattttttcagggagcgctcaccctgcatttggcaaagaagtgtcaaagcatttaggctttcccttatccaaagcggtgataggcaaattcagcgatggcgaaatcaatatccaaatcagcgaatcggtgcgcggtaaagatatttttatcatccagcctacttgcgtgcctgtcaatgacaatttaatggaattgttagtcatggtggatgctttaaggcgcagttcggccaattctatcacagcggtgttgccgtattttggctatgccagacaggacagaaaagcggctccacgagtgcctatcacggctaaaatggtcgctaatttgatgcaagaagtggggattgaaaggatcatcacgatggatttgcatgccgggcaaatccaaggcttttttgatgtgccggtggataatttatacggatctatcgtttttagagactatatccgctctaaagcgctcaaaaaccctataatcgccagccctgatgtgggtggggttacaagagccaggtatttcgccaatcaaatggggttagatttgatcatcgtggataagcgccgtgaaaaagctaatgaaagcgaagtgatgaatattatcggctcagccaaggagcgcgatgtgattttagtggatgacatgattgataccgcaggcacgatctgtaaagccgctttggctttaaaagaacaaggggcaacttctgtcatggcgttaggcacgcatgcggttttgagcgggaatgcgatcaagcgcattaaagaaagcgcgttagatgaagtggtggtaactaactctatccctttagttcaaaaatgcgataaaatcacgaccttaagcgtagcgtccttatttgcggaagtgatcagaaggatttatcataacgaaagcgtccaatcgcttttcacttaa

SEQ ID NO: 2105 - DNA (genomic), 174 bp, Helicobacter pylori; double-stranded, circular
  misc_feature (B) LOCATION 1...174
  hypothetical: NO
  anti-sense: NO
atgtggttagatcacatcgctaaagagatcagaagtttagtggaaaacgatattgaagtgggtattgtgattggtggaggcaatatcattaggggggttagcgcggctctaggggggatcattaggcgcaccagtggggattatatgggcatgttagccaccgtgattawgcgg

SEQ ID NO: 2106 - DNA (genomic), 177 bp, Helicobacter pylori; double-stranded, circular
  misc_feature (B) LOCATION 1...177
  hypothetical: NO
  anti-sense: NO
aaattggacactttaagctataacgatgccttgataggggatattgaagtgatggatgataccgctatttctttagctaaagacaataagctccctattgtggtgtgtaacatgttcaaaaaagggaatttgttgcaagtgattaagcaccaacaaggcgtgttttctatggtaaaa

SEQ ID NO: 2107 - DNA (genomic), 594 bp, Helicobacter pylori; double-stranded, circular
  misc_feature (B) LOCATION 1...594
  hypothetical: NO
  anti-sense: NO
gttacaatcaaaagctttattaatggattaagaagggatcatgcaggcaaagataaaaaacaagcgggttttggtgaaattttctggggaagcgttagctggggacaaccagtttggattgacattcatgtgttagatcacatcgctaaagagatcagaagtttagtggaaaacgatattgaagtgggtattgtgattggtggaggcaatatcattaggggggttagcgcggctcaaggggggatcattaggcgcaccagtggggattatatgggcatgttagccaccgtgattaatgcggtagccatgcaagaagctttagagcatatcggtttagacacaagagtgcagagtgccattgaaatcaaagagatttgtgaaagttatatttataggaaagcgatcaggcatttagaaaagggtagggtggtgatttttggcgctggcacaggaaacccgtttttcaccaccgatacggccgctactttaagagcgattgaaattggatcggatctaatcattaaagcgactaaagtggatggcatctatgacaaagaccctaacaaattcaaagacgctaaaaattggacactt

SEQ ID NO: 2108 - DNA (genomic), 723 bp, Helicobacter pylori; double-stranded, circular
  misc_feature (B) LOCATION 1...723
  hypothetical: NO
  anti-sense: NO
atgcaggcaaagataaaaaacaagcgggttttggtgaaattttctggggaagcgttagctggggacaaccagtttgggattgacattcatgtgttagatcacatcgctaaagagatcagaagtttagtggaaaacgatattgaagtgggtattgtgattggtggaggcaatatcattaggggggttagcgcggctcaaggggggatcattaggcgcaccagtggggattatatgggcatgttagccaccgtgattaatgcggtagccatgcaagaagctttagagcatatcggtttagacacaagagtgcagagtgccattgaaatcaaagagatttgtgaaagttatatttataggaaagcgatcaggcatttagaaaagggtagggtggtgatttttggcgctggcacaggaaacccgtttttcaccaccgatacggccgctactttaagagcgattgaaattggatcggatctaatcattaaagcgactaaagtggatggcatctatgacaaagaccctaacaaattcaaagacgctaaaaaattggacactttaagctataacgatgccttgataggggatattgaagtgatggatgataccgctatttctttagctaaagacaataagctccctattgtggtgtgtaacatgttcaaaaaagggaatttgttgcaagtgattaagcaccaacaaggcgtgttttctatggtaaaataa

SEQ ID NO: 2109 - DNA (genomic), 723 bp, Helicobacter pylori; double-stranded, circular; identical to SEQ ID NO: 2108
  misc_feature (B) LOCATION 1...723
  hypothetical: NO
  anti-sense: NO

SEQ ID NO: 2110 - DNA (genomic), 330 bp, Helicobacter pylori; double-stranded, circular
  misc_feature (B) LOCATION 1...330
  hypothetical: NO
  anti-sense: NO
atgcaagatttacccccatgccctaaacgcaacgacgcctacacctaccatgatggcacgcagttcgtttgctctagctgtttgtatgaatggaatggaaatgaaattagtaatgaagaattgatcgttaaagattgccataataatcttttacaaaatggggactcggtcattctcattaaagatttaaaggttaaaggctcatctttggtgcttaaaaaaggcactaaaatcaaaaatatcaagcttgtcaatagcgatcacaatgtggattgtaaagtggaagggcagagcttgtctttaaaatctgaattccttaaaaaagcttag

SEQ ID NO: 2111 - DNA (genomic), 327 bp, Helicobacter pylori; double-stranded, circular
  misc_feature (B) LOCATION 1...327
  hypothetical: NO
  anti-sense: NO
atgcaagatttacccccatgccctaaacgcaacgacgcctacacctaccatgatggcacgcagttcgtttgctctagctgtttgtatgaatggaatggaaatgaaattagtaatgaagaattgatcgttaaagattgccataataatcttttacaaaatggggactcggtcattctcattaaagatttaaaggttaaaggctcatctttggtgcttaaaaaaggcactaaaatcaaaaatatcaagcttgtcaatagcgatcacaatgtggattgtaaagtggaagggcagagcttgtctttaaaatctgaattccttaaaaaagct

SEQ ID NO: 2112 - DNA (genomic), 363 bp, Helicobacter pylori; double-stranded, circular
  misc_feature (B) LOCATION 1...363
  hypothetical: NO
  anti-sense: NO
tatcatcgcactaataccacgataaggataattatcatgcaagatttacccccatgccctaaacgcaacgacgcctacacctaccatgatggcacgcagttcgtttgctctagctgtttgtatgaatggaatggaaatgaaattagtaatgaagaattgatcgttaaagattgccataataatcttttacaaaatggggactcggtcattctcattaaagatttaaaggttaaaggctcatctttggtgcttaaaaaaggcactaaaatcaaaaatatcaagcttgtcaatagcgatcacaatgtggattgtaaagtggaagggcagagcttgtctttaaaatctgaattccttaaaaaagct

SEQ ID NO: 2113 - DNA (genomic), 312 bp, Helicobacter pylori; double-stranded, circular
  misc_feature (B) LOCATION 1...312
  hypothetical: NO
  anti-sense: NO
ttaattagctcgatcagcgttggggtgaaaaaggaagaatgcctttttgtagaagagttggccaaacaaggattaacgccagactatatcacgattgatattgcgcatggccattcaaattctgtcattgaaatgatccaacgcatcaaaacgcgtttgcccgaaacttttgtgattgccgggaatgtgggcacgccagaagcggtccgtgaattagagaacgccggtgctgacgcacgaaagttggcatcgggcctgggaaggtgtgtatcactaaaatcaaaacaggctttggcacgggtggctggcaac

SEQ ID NO: 2114 - DNA (genomic), 309 bp, Helicobacter pylori; double-stranded, circular
  misc_feature (B) LOCATION 1...309
  hypothetical: NO
  anti-sense: NO
attagctcgatcagcgttggggtgaaaaaggaagaatgcctttttgtagaagagttggccaaacaaggattaacgccagactatatcacgattgatattgcgcatggccattcaaattctgtcattgaaatgatccaacgcatcaaaacgcgtttgcccgaaacttttgtgattgccgggaatgtgggcacgccagaagcggtccgtgaattagagaacgccggtgctgacgcacgaaagttggcatcgggcctgggaaggtgtgtatcactaaaatcaaaacaggctttggcacgggtggctggcaac

SEQ ID NO: 2115 - DNA (genomic), 384 bp, Helicobacter pylori; double-stranded, circular
  misc_feature (B) LOCATION 1...384
  hypothetical: NO
  anti-sense: NO
agcgcaagaaaacccattattgcagatggcggcattcgcacgcatggggatattgcaaaatcaatacgctttggcgcgacaatggtgatgattggctcgctttttgcagggcatgaagaatcatctggagaaacaaaaatagaaaatggtatcgcatataaagaatatttcggttcggcatcagagtttcaaaaaggtgaaaagaaaaatatagaaggtaagaaaatttggatccagcataaaggctcgttaaaaaacacgctgattgaaatgcatcaagatttgcaatcttcaatctcctatgcaggcgggagagaccttgaagcgatccgaaaagtggattatgtgattgtgaaaaattcaattttcaatggggacacaatc

SEQ ID NO: 2116 - DNA (genomic), 969 bp, Helicobacter pylori; double-stranded, circular
  misc_feature (B) LOCATION 1...969
  hypothetical: NO
  anti-sense: NO
ttgattacgaagaatgtccaactcattcctaataaatgcatcgtgaatagccgttcagagtgcgatacgaccgttattctaggcaaacatgcgtttaaaatgcccatagtcccagccaacatgcaaacaatcatcaacgaatcgatcgcagaatttttggcagaaaatggctatttctatatcatgcaccgctttaatggatcggcaagaatcccgtttgtcaaaaaaatgaaagaacgccaattaattagctcgatcagcgttggggtgaaaaaggaagaatgtctttttgtagaagagttggccaaacaaggattaacgccagactatatcacgattgatattgcgcatggccattcaaattctgtcattgaaatgatccaacgcatcaaaacgcgtttgcccgaaacttttgtgattgccgggaatgtgggcacgccagaagcggtccgtgaattagagaacgccggtgctgacgctacgaaagttggcatcgggcctgggaaggtgtgtatcactaaaatcaaaacaggctttggcacgggtggctggcaactagcggctcttaggtggtgcgctaaagcggcaagaaaacccattattgcagatggcggcattcgcacgcatggggatattgcaaaatcaatacgctttggcgcgacaatggtgatgattggctcgctttttgcagggcatgaagaatcatctggagaaacaaaaatagaaaatggtatcgcatataaagaatatttcggttcggcatcagagtttcaaaaaggtgaaaagaaaaatatagaaggtaagaaaatttggatccagcataaaggctcgttaaaaaacacgctgattgaaatgcatcaagatttgcaatcttcaatctcctatgcaggcgggagagaccttgaagcgatccgaaaagtggattatgtgattgtgaaaaattcaattttcaatggggacacaatctaa

SEQ ID NO: 2117 - DNA (genomic), 231 bp, Helicobacter pylori; double-stranded, circular
  misc_feature (B) LOCATION 1...231
  hypothetical: NO
  anti-sense: NO
agtgataggcatcacgaagcctattccactcgtgtgggtaatgggcctttccctagcgaagacactacacccatgggcgatcatttaaggactaagggcgtagagtttggcacgacaaccaagcgcccaaggcgttgcgggtggctggatttggtggctttaaaatacgcttgcgctttgaatggttgcacgcaattagcctttaatgaaattagacgttttagacgggat

SEQ ID NO: 2118 - DNA (genomic), 285 bp, Helicobacter pylori; double-stranded, circular
  misc_feature (B) LOCATION 1...285
  hypothetical: NO
  anti-sense: NO
caagcttttaaaccatccaatctactttgttttaaggataatattttatggcagatgtcgttgtggggatccagtggggaggatgaggggaagggaaaaattgttgataggatcgctaaagattatgactttgtggtgcgctatcaaggcgggcataatgctgggcataccattgtgcataagggggttaagcattctttgcatttaatgccctcaggggttttataccccaaatgcaagaacatcatttctagcgcagtggtcgcgagcatggccgttggagaa

SEQ ID NO: 2119 - DNA (genomic), 360 bp, Helicobacter pylori; double-stranded, circular
  misc_feature (B) LOCATION 1...360
  hypothetical: NO
  anti-sense: NO
cctttaatgaaattagacgttttagacgggattgatgcgattaaggtgtgcgtggcttatgaaagaaagggcgaaagattggaggctttccctagcgatttgaaagattgcacgccaatctatcaaacttttaaaggctgggaaaaaagcgtgggcgtgagaaaattagacgatttagagccaaacgctagagagtatatccgttttattgaaaaagaagtgggggtgaaaattggccttatttctacaagtcctgaaagagaaagacacgatttttctatgaaaaaattcgcttctgtgttggtgcaattaaaaacccttgcgttagaaaaaataggcgaaagcttgaaagcaagcgtt

SEQ ID NO: 2120 - DNA (genomic), 537 bp, Helicobacter pylori; double-stranded, circular
  misc_feature (B) LOCATION 1...537
  hypothetical: NO
  anti-sense: NO
cttgccctatcatgccaaaaagacgcttttaaagaaaaatctcaaaacatcggcacgactaaaaaaggcataggcccttgctatgaggataaaatggccagaagcgggataagaatgggggatttattagacgataaaatcttagaagaaaagctaaacgctcatttcaaagccattgagccttttaaaaaagcgtatgatttaggcgagaattatgaaaaagatttgatggggtattttaaaacttacgctccaaaaatttgcccctttatcaaagacacgacaagcatgctgatagaagcgaaccaaaagggtgaaaaaatcctgctagaaggggcgcaaggcacgcttttagacattgatttagggacttacccttttgtaacaagctctaacaccacgagcgctagcgcttgcgtgagcaccggcttaaaccctaaagcgatcaatgaagtgataggcatcacgaagcctattccactcgtgtgggtaatgggcctttccctagcgaagacactacacccatgggcgatcatt

SEQ ID NO: 2121 - DNA (genomic), 534 bp, Helicobacter pylori; double-stranded, circular
  misc_feature (B) LOCATION 1...534
  hypothetical: NO
  anti-sense: NO
gccctatcatgccaaaaagacgcttttaaagaaaaatctcaaaacatcggcacgactaaaaaaggcataggcccttgctatgaggataaaatggccagaagcgggataagaatgggggatttattagacgataaaatcttagaagaaaagctaaacgctcatttcaaagccattgagccttttaaaaaagcgtatgatttaggcgagaattatgaaaaagatttgatggggtattttaaaacttacgctccaaaaatttgcccctttatcaaagacacgacaagcatgctgatagaagcgaaccaaaagggtgaaaaaatcctgctagaaggggcgcaaggcacgcttttagacattgatttagggacttacccttttgtaacaagctctaacaccacgagcgctagcgcttgcgtgagcaccggcttaaaccctaaagcgatcaatgaagtgataggcatcacgaagcctattccactcgtgtgggtaatgggcctttccctagcgaagacactacacccatgggcgatcatt

SEQ ID NO: 2122 - DNA (genomic), 1236 bp, Helicobacter pylori; double-stranded, circular
  misc_feature (B) LOCATION 1...1236
  hypothetical: NO
  anti-sense: NO
atggcagatgtcgttgtggggatccagtggggagatgaggggaagggaaaaattgttgataggatcgctaaagattatgactttgtggtgcgctatcaaggcgggcataatgctgggcataccattgtgcataagggggttaagcattctttgcatttaatgccctcaggggttttataccccaaatgcaagaacatcatttctagcgcagtggtcgtgagcgttaaggatttgtgcgaagaaatcagcgcgtttgaggatttagaaaatcgtttgtttatcagcgacagagcccatgtgatcttgccctatcatgccaaaaaagacgcttttaaagaaaaatctcaaaacatcggcacgactaaaaaaggcataggcccttgctatgaggataaaatggccagaagcgggataagaatgggggatttattagacgataaaatcttagaagaaaagctaaacgctcatttcaaagccattgagccttttaaaaaagcgtatgatttaggcgagaattatgaaaaagatttgatggggtattttaaaacttacgctccaaaaatttgcccctttatcaaagacacgacaagcatgctgatagaagcgaaccaaaagggtgaaaaaatcctgctagaaggggcgcaaggcacgcttttagacattgatttagggacttacccttttgtaacaagctctaacaccacgagcgctagcgcttgcgtgagcaccggcttaaaccctaaagcgatcaatgaagtgataggcatcacgaaagcctattccactcgtgtgggtaatgggcctttccctagcgaagacactacacccatgggcgatcatttaaggactaagggcgtagagtttggcacgacaaccaagcgcccaaggcgttgcgggtggctggatttggtggctttaaaatacgcttgcgctttgaatggttgcacgcaattagctttaatgaaattagacgttttagacgggattgatgcgattaaggtgtgcgtggcttatgaaagaaagggcgaaagattggaggctttccctagcgatttgaaagattgcacgccaatctatcaaacttttaaaggctgggaaaaaagcgtgggcgtgagaaaattagacgatttagagccaaacgctagagagtatatccgttttattgaaaaagaagtgggggtgaaaattggccttatttctacaagtcctgaaagagaagacacgatttttctatga

SEQ ID NO: 2123 - DNA (genomic), 621 bp, Helicobacter pylori; double-stranded, circular
  misc_feature (B) LOCATION 1...621
  hypothetical: NO
  anti-sense: NO
atgaataacgattttaatttactcatcctttcaggccctagcggagcgggtaaaagcacccttacaaagtatttgcaagaaaaaatcccaaaaacccatttttccctttccaccaccacgaggaagcccagagagggcgaagttgatggcttgcattataattttgtcagcgaagaagaattcaagcaaggcatagaaaaagggcagtttttagaatgggcgatcgtgcataaccactactatggcacttctaaaatccctgtagaaaaagccttaaaagagggcaaaatcgtcatttttgatattgatgtgcaagggcatgagatccttaaaaagcattaccctaacgcatgctcagtctttattagcaccaaaaaccaagagattttaaaagagcgcttgcttttaagggggacggattctaaagagacgatagaaaagcgcttgatcaacgcttataaagaaatgcagtgcttggagagctttgattacctcatcatcaatgaagatttagaaaaatccaaagaaatcatcttaagcatcgcaaaaactttagtccatcgcttaaaagcgtttaattttgaaaaaatatgcaaggcttggaaaaacgaatccttatga

SEQ ID NO: 2124 - DNA (genomic), 633 bp, Helicobacter pylori; double-stranded, circular
  misc_feature (B) LOCATION 1...633
  hypothetical: NO
  anti-sense: NO
aggataaaaaacctaatgaataacgattttaatttactcatcctttcaggccctagcggagcgggtaaaagcacccttacaaagtatttgcaagaaaaaatcccaaaaacccatttttccctttccaccaccacgaggaagcccagagagggcgaagttgatggcttgcattataattttgtcagcgaagaagaattcaagcaaggcatagaaaaagggcagtttttagaatgggcgatcgtgcataaccactactatggcacttctaaaatccctgtagaaaaagccttaaaagagggcaaaatcgtcatttttgatattgatgtgcaagggcatgagatccttaaaaagcattaccctaacgcatgctcagtctttattagcaccaaaaaccaagagattttaaaagagcgcttgcttttaagggggacggattctaaagagacgatagaaaagcgcttgatcaacgcttataaagaaatgcagtgcttggagagctttgattacctcatcatcaatgaagatttagaaaaatccaaagaaatcatcttaagcatcgcaaaaactttagtccatcgcttaaaagcgtttaattttgaaaaaatatgcaaggcttggaaaaacgaatcctta

SEQ ID NO: 2125 - DNA (genomic), 672 bp, Helicobacter pylori; double-stranded, circular
  misc_feature (B) LOCATION 1...672
  hypothetical: NO
  anti-sense: NO
ttggggcagaattttgtagacaatgcgtttgaaaacacgcgcttggtgcgtttcatggaagtttctagggcgttacaaatccccgtgcttttagataaagtgaatagcattgccacgctcaaactcatcaaagcctttaacgatttaggagcgaaattacaagcccaaacgcccttaagccatttgatcttagatgaaagcgtgtatgaagattatgaacctcgatttaaaatcgcccctcctttaagggataaggaaggtcaaaacgccctaaaagaagccctaaagaataacgaaatcgccatgctcacaagccttcatgcttctaaaaattctaacgcacagctttttgaagaaagcgcgtttgggtgtgagagcatagaggacgcttttagcgtggcttacacttttttggttcaaaaaaaggttatcagcttccaacagctcattaaagtcatgacgattaaccaagcgaagtttttaaaactcaatgcaggcgaggttaaagaaaaccaattagccaatttgatgatcgtggatttaaacgctcaaacaagagtgagtaatcaaaattcgcccttttatggtttggaattgtatggcgaagtgcaaagaatgattttaaaagggcaaaccacatttattaaggagaatgcatgcaagaaatcatag

SEQ ID NO: 2126 - DNA (genomic), 777 bp, Helicobacter pylori; double-stranded, circular
  misc_feature (B) LOCATION 1...777
  hypothetical: NO
  anti-sense: NO
cgcttttttagaactcatcagccactacgccaaatcctacaacttgccccttttaatttctttggaaaatcttttgaagccctaaatagcggggcattagcctatgaattggggcagaattttgtagacaatgcgtttgaaaacacgcgcttggtgcgtttcatggaagtttctagggcgttacaaatccccgtgcttttagataaagtgaatagcattgccacgctcaaactcatcaaagcctttaacgatttaggagcgaaattacaagcccaaacgcccttaagccatttgatcttagatgaaagcgtgtatgaagattatgaacctcgatttaaaatcgcccctcctttaagggataaggaaggtcaaaacgccctaaaagaagccctaaagaataacgaaatcgccatgctcacaagccttcatgcttctaaaaattctaacgcacagctttttgaagaaagcgcgtttgggtgtgagagcatagaggacgcttttagcgtggcttacacttttttggttcaaaaaaaggttatcagcttccaacagctcattaaagtcatgacgattaaccaagcgaagtttttaaaactcaatgcaggcgaggttaaagaaaaccaattagccaatttgatgatcgtggatttaaacgctcaaacaagagtgagtaatcaaaattcgcccttttatggtttggaattgtatggcgaagtgcaaagaatgattttaaaagggcaaaccacatttattaaggagaatgcatgcaagaaatca

SEQ ID NO: 2127 - DNA (genomic), 168 bp, Helicobacter pylori; double-stranded, circular
  misc_feature (B) LOCATION 1...168
  hypothetical: NO
  anti-sense: NO
aaatatcatggcaatcaaaaacaaccaactagccgacatcgcccgcttaaaaataaagggggggaaattttaatcgcgccatctgacgcttttttagaactcatcagccactacgccaaatcctacaacttgccccttttaatttctttggaaaatcttttgaagccc

SEQ ID NO: 2128 - DNA (genomic), 348 bp, Helicobacter pylori; double-stranded, circular
  misc_feature (B) LOCATION 1...348
  hypothetical: NO
  anti-sense: NO
gagggtttgatgctgttaaaaaacgcttcgttttatgatgatgaggttttaaaaagagcggacatccgcttaaaagattcccttattatagagattgaagaaaacttaagccctaccaacaacgaagaagtggttgagtgcgaggatttgttcgtgctgccaagcttcattgatttgagcgttacgaatttggaaggttatgaaaatttaaaacaaaaggcttttaaagggggggtggggttactcaacgtttttaatggcgatcaaagcggcattaaaaatatcatggcaatcaaaaacaaccaactagccgacatcgcccgcttaaaaataaagggggggaaattt

SEQ ID NO: 2129 - DNA (genomic), 441 bp, Helicobacter pylori; double-stranded, circular
  misc_feature (B) LOCATION 1...441
  hypothetical: NO
  anti-sense: NO
atgctgttaaaaaacgcttcgttttatgatgatgaggttttaaaaagagcggacatccgcttaaaagattcccttattatagagattgaagaaaacttaagccctaccaacaacgaagaagtggttgagtgcgaggatttgttcgtgctgccaagcttcattgatttgagcgttacgaatttggaaggttatgaaaatttaaaacaaaaggcttttaaagggggggtggggttactcaacgtttttaatggcgatcaaagcggcattaaaaatatcatggcaatcaaaaacaaccaactagccgacatcgccacgcttaaaaataaagggggggaaattttaatcgcgccatctgacgcttttttagaactcatcagccactacgccaaatcctacaacttgccccttttaatttctttggaaaatcttttgaagccctaa

SEQ ID NO: 2130 - DNA (genomic), 759 bp, Helicobacter pylori; double-stranded, circular
  misc_feature (B) LOCATION 1...759
  hypothetical: NO
  anti-sense: NO
tggggtgatgggggcgatgtgtattttgaagtggataacaataccgacactttagcgagttttagaggcactaaacaccataaggctaaaaacggggctccaggaggcacacgaaattgcgcgggtaaaaagggcgaagacaagatcattgtcgtgccgccaggaacgcaggtttttgtaggtgatgagttgtggcttgatttagtggaacctaaagaaagggtgttagccttaaaaggaggcaagggggggttagggaatgcgcattttaaaagcgcgactaaacaacaacccacttacgcgcaaaaaggcttggagggggttgaaaaatgcgtgcgtttggaattaaagctcatcgctgatatagggttagtgggcttccctaatgcgggtaaatccacgctcatttccaccatctctaacgctaagcctaaaatcgctaactatgaatttacgactctagtgcctaatttaggggttgtgagcgtggatgaaaaaagcgaatttttaatggcggatattcctggcattattgaaggggctagcgagggaaaaggcttagggattagctttttaaagcacattgaacgcaccaaagttctagcctttgttttagacgcttctaggctggatctgggcattaaagagcaatacaaacgcttgagattggagttagagaaattttcacccactctagctaacaagccttttggggtgttgctcaataaatgcgagttcgagaaactttatggggtgact

SEQ ID NO: 2131 - DNA (genomic), 1083 bp, Helicobacter pylori; double-stranded, circular
  misc_feature (B) LOCATION 1...1083
  hypothetical: NO
  anti-sense: NO
gtgtttgtagatagcgtggaaatcatcatcgcttcgggtaagggggggcctggaatggtgagttttaggcgagaaaaatttgtcatcaagggaggccctgatgggggtgatgggggtgatgggggcgatgtgtattttgaagtggataacaataccgacactttagcgagttttagaggcactaaacaccataaggctaaaaacggggctccaggaggcacacgaaattgcgcgggtaaaaagggcgaagacaagatcattgtcgtgccgccaggaacgcaggtttttgtaggtgatgagttgtggcttgatttagtggaacctaaagaaagggtgttagccttaaaaggaggcaagggggggttagggaatgcgcattttaaaagcgcgactaaacaacaacccacttacgcgcaaaaaggcttggagggggttgaaaaatgcgtgcgtttggaattaaagctcatcgctgatatagggttagtgggcttccctaatgcgggtaaatccacgctcatttccaccatctctaacgctaagcctaaaatcgctaactatgaatttacgactctagtgcctaatttaggggttgtgagcgtggatgaaaaaagcgaatttttaatggcggatattcctggcattattgaaggggctagcgagggaaaaggcttagggattagctttttaaagcacattgaacgcaccaaagttctagcctttgttttagacgcttctaggctggatctgggcattaaagagcaatacaaacgcttgagattggagttagagaaattttcacccactctagctaacaagccttttggggtgttgctcaataaatgcgatgttgtagaaaacattaatgagatgactaaggatttttgcgcctttttaaatttagaagcgcaaaaattaaacgcgtttgatttagagccgtatttaggttttttacaccccaatttaaccagcgattttgaaaacaaccctaatgaacaatcagcgctctttgtcttacccctttcagcagttagcgctcttaacacgcatgcgcttaaatttgtgttgttgaaagcgttacaatga

SEQ ID NO: 2132 - DNA (genomic), 213 bp, Helicobacter pylori; double-stranded, circular
  misc_feature (B) LOCATION 1...213
  hypothetical: NO
  anti-sense: NO
aaaaatgctgtttttcatatgtgcgccaaaaagcaaatgaaaggcttagggcatgcgattttaaccggggaagccctgataggcaatgagccttttgcggtgattttagccgatgacttatgcataagccatgagtatccaagcgtgttaaagcaaatgacttcattgtatcaaaaataccattgctccattgtggccattgaagaagtgtat

SEQ ID NO: 2133 - DNA (genomic), 381 bp, Helicobacter pylori; double-stranded, circular
  misc_feature (B) LOCATION 1...381
  hypothetical: NO
  anti-sense: NO
ctcaaaggacaaaccatgattaaaaaatgcctttttcctgccgctggatatggcacgcgctttttgctgatcactaacacgatccttatagagatgctgcccattgtggataagcttttaatccaatacgctgtggaagaagcgatggaagcgggttgtgaagttgatggcgatcgttacagggcaaggaataaacgaagtttagaagattattttgacacgagttatgaaatagagcatcaaatccaaggcaccaacaaagaaaacgccttaaaaagcattcgtaacataatagaaaaatgctgtttttcatatgtgcgccaaaaagcaaatgaaaggcttagggcatgcgattttaaccggggaagccctgataggcaa

SEQ ID NO: 2134 - DNA (genomic), 954 bp, Helicobacter pylori; double-stranded, circular
  misc_feature (B) LOCATION 1...954
  hypothetical: NO
  anti-sense: NO
atgattaaaaaatgcctttttcctgccgctggctatggcacgcgctttttgccgatcactaaaaccatccctaaagaaatgctgcccattgtggataagcctttaatccaatacgctgtggaagaagcgatggaagcgggttgtgaagtgatggcgatcgttacaggcaggaataaacgaagtttagaagattattttgacacgagctatgaaatagagcatcaaatccaaggcaccaacaaagaaaacgccttaaaaagcattcgtaacattatagaaaaatgctgtttttcctatgtgcgccaaaagcaaatgaaaggcttagggcatgcgattttaaccggggaagccctgataggcaatgagccttttgcggtgattttagccgatgacttatgcataagccatgagtatccaagcgtgttaaagcaaatgacttcattgtatcaaaaataccaatgctccattgtagccattgaagaagtggtgctagaagaagtttcaaaatacggcgtgatcaggggcgaatggttagaagagagggtgtatgagattaaagacatggtagaaaaaccaagccaagaagacgccccaagcaatttagccgtgatagggcgctacattttaactccggatatttttgatattttgcgtgagactaaaccgggtaaaaacaatgaaatccaaatcacagacgctttactcactcaagccaaaagaaaacgcatcatcgcttaccaattcaaaggcaagcgatacgattgcgggagcgtggaaggctatattgaagcgagtaacgcctattataaaaacgcttataaatcttatcaacatgggcaatttgacttattacgcttacatgtatttgatcctctttgtatgcctgttgcctgtgttattggtggggcttgcttggaggcttactcgcccccccttaaagcaaaatattcctaa

SEQ ID NO: 2135 - DNA (genomic), 306 bp, Helicobacter pylori; double-stranded, circular
  misc_feature (B) LOCATION 1...306
  hypothetical: NO
  anti-sense: NO
atgaaagaaagtattaaatacttgctagaaagcgtggggctagtgcttttaatgagcgtgaatccgggctttggcgggcagaagtttttagatctagtgctagaaaagtgcttgaaagttaaagaactgatcaaacgctacaaccctagctgtcttttagaagtggatgggggcgtgaatgataaaaatatctttgaactccaacaagcgggcgtggatgtggtggtttcagggagttatatttttgaatccaaagatygtaagctggctattgaaggcttacagaatgtcagacaacctcttgca

SEQ ID NO: 2136 - DNA (genomic), 399 bp, Helicobacter pylori; double-stranded, circular
  misc_feature (B) LOCATION 1...399
  hypothetical: NO
  anti-sense: NO
atgtcagaaaatgaaaaacacccccatagggtgttgcaactcattaaaagttcaggcatcacgccaggcattgtcctaaacccccacacgcatgaagaaagtattaaatacttgctagaaagcgtggggctagtgcttttaatgagcgtgaatccgggctttggcgggcagaagtttttagatctagtgctagaaaagtgcttgaaagttaaagaactgatcaaacgctacaaccctagctgtcttttagaagtggatgggggcgtgaatgataaaaatatctttgaactccaacaagcgggcgtggatgtggtggtttcagggagttatatttttgaatccaaagatcgtaagctggctattgaaggcttacagaatgtcagacaacctcttgcataa

SEQ ID NO: 2137 - DNA (genomic), 417 bp, Helicobacter pylori; double-stranded, circular
  misc_feature (B) LOCATION 1...417
  hypothetical: NO
  anti-sense: NO
acccgcaaatcatcagcatccatgtcagaaaatgaaaaacacccccatagggtgttgcaactcattaaaagttcaggcatcacgccaggcattgtcctaaacccccacacgcatgaagaaagtattaaatacttgctagaaagcgtggggctagtgcttttaatgagcgtgaatccgggctttggcgggcagaagtttttagatctagtgctagaaaagtgcttgaaagttaaagaactgatcaaacgctacaaccctagctgtcttttagaagtggatgggggcgtgaatgataaaaatatctttgaactccaacaagcgggcgtggatgtggtggtttcagggagttatatttttgaatccaaagatcgtaagctggctattgaaggcttacagaatgtcagacaacctcttgca

SEQ ID NO: 2138 - DNA (genomic), 213 bp, Helicobacter pylori; double-stranded, circular
  misc_feature (B) LOCATION 1...213
  hypothetical: NO
  anti-sense: NO
gcggggcaacacatgcaaattttagaaaatattgaagaactgcgccattatttagaaagcgttacgcattctttagagattagccctaaaaatccgcttctcattgacaagtttttagaaaaagcggtggaattagatgtggatgccatttgcgataaaaaagaggtctatatgccggtattttacagcatattgaagaagccggaatccatt

SEQ ID NO: 2139 - DNA (genomic), 231 bp, Helicobacter pylori; double-stranded, circular
  misc_feature (B) LOCATION 1...231
  hypothetical: NO
  anti-sense: NO
atctctgaaggccgccccaatatcatggatttgatgatgaatggggaaatcagcatggctatcaacaccagcgatcacaaatctcaagatgacgccaaactcattcgcgcttctgtgcttaaaaaccatgtgagttatttcacgactttaagtgcgatagaagtcttacttttagcgttagaagaaagttctcaagaagacgaattactagccttacaggattatttgaag

SEQ ID NO: 2140 - DNA (genomic), 663 bp, Helicobacter pylori; double-stranded, circular
  misc_feature (B) LOCATION 1...663
  hypothetical: NO
  anti-sense: NO
ccttccactctaagccctgaaattttagatgaaattgagcgagtgagcgcgaaaatcgctctgcatttaggcgtagtggggctattgaatatccaatttgccgtgtatcaaaattcgctgtatttgattgaagtcaatcctagagccagcaggaccgtgccttttttgagcaaggctttaggcgttcctttagcgaaagtggcgactagggttatggtgttagaagatttgaaagaagccctgaagttttatgataaaaaaaatatcgtagaatattctaaaggcgtttataagcctaaaatgccccattttgtggctttaaaagaagcggttttcccttttaataaactttatggatcggatttgattttagggcctgagatgaaaagcaccggcgaagtcatggggattgctagatctttagggcttgcattttttaaggctcaaacggcttgctttaaccccattaaaaataaggggcttatttttgtctctattaaagataaggataaagaagaagcgtgcgttttaatgaaacgattggttgaattgggttttgaattgttcaccacagaaggcacgcataaagctttggaaaaagccggggtgaagtctttaaaggtgcttaaatctctgaaggccgccccaatatcatggatttga

SEQ ID NO: 2141 - DNA (genomic), 657 bp, Helicobacter pylori; double-stranded, circular
  misc_feature (B) LOCATION 1...657
  hypothetical: NO
  anti-sense: NO
tccactctaagccctgaaattttagatgaaattgagcgagtgagcgcgaaaatcgctctgcatttaggcgtagtggggctattgaatatccaatttgccgtgtatcaaaattcgctgtatttgattgaagtcaatcctagagccagcaggaccgtgccttttttgagcaaggctttaggcgttcctttagcgaaagtggcgactagggttatggtgttagaagatttgaaagaagccctgaagttttatgataaaaaaaatatcgtagaatattctaaaggcgtttataagcctaaaatgccccattttgtggctttaaaagaagcggttttcccttttaataaactttatggatcggatttgattttagggcctgagatgaaaagcaccggcgaagtcatggggattgctagatctttagggcttgcattttttaaggctcaaacggcttgctttaaccccattaaaaataaggggcttatttttgtctctattaaagataaggataaagaagaagcgtgcgttttaatgaaacgattggttgaattgggttttgaattgttcaccacagaaggcacgcataaagctttggaaaaagccggggtgaagtctttaaaggtgcttaaatctctgaaggccgccccaatatcatggatt

SEQ ID NO: 2142 - DNA (genomic), 882 bp, Helicobacter pylori; double-stranded, circular
  misc_feature (B) LOCATION 1...882
  hypothetical: NO
  anti-sense: NO
ggctcaggccctattgtgatcgggcaagcttgtgagtttgactattcagggactcaaagttgtaaaaccttaaaatctttaggttatagagtgatcttaatcaattctaacccggccaccgtgatgactgaccctgaattttctcatcaaacctatatccagcccatcaccccagaaaatatcgccgctatcatcaaaaaagaaaagattgacgccattttacccacaatgggcgggcaaaccgctttgaatgcggtcatgcaaatgcaccaaaggggcatgttagaaggcgtggagcttttgggggctaagattgaagcgattaaaaaaggcgaagacaggcaggccttcaaagaagcgatgttaaaaatcgggatggatttgcctaaagggcgttacgcttatagcgagttagtagccctagaagccattagtgaaattggctttccagccattattagagcgagtttcacgctggctggtggggggagtggggtcgcttataatattgaagagtttcatgaattggctaaaaacgccctagacgcttcacccattaatgaaattttgattgaagagtccttattagggtggaaagaatacgaaatggaagtcatacgagacggcaaggacaattgcatcattgtgtgctgtattgaaaacattgatcccatgggcgttcataccggcgatagcatcaccatcgctccaagtctcaccttaaccgataaagaataccaacgcatgcgcgatgcgagctttgcgattttgagagaaattggcgtggatacgggcgggagtaatgtgcagtttgcgatccacccagagactttaagaatggtcgtgattgaaatgaacccacgagtgagccgtagctcgctt

SEQ ID NO: 2143 - DNA (genomic), 879 bp, Helicobacter pylori; double-stranded, circular
  misc_feature (B) LOCATION 1...879
  hypothetical: NO
  anti-sense: NO
tcaggccctattgtgatcgggcaagcttgtgagtttgactattcagggactcaaagttgtaaaaccttaaaatctttaggttatagagtgatcttaatcaattctaacccggccaccgtgatgactgaccctgaattttctcatcaaacctatatccagcccatcaccccagaaaatatcgccgctatcatcaaaaaagaaaagattgacgccattttacccacaatgggcgggcaaaccgctttgaatgcggtcatgcaaatgcaccaaaggggcatgttagaaggcgtggagcttttgggggctaagattgaagcgattaaaaaaggcgaagacaggcaggccttcaaagaagcgatgttaaaaatcgggatggatttgcctaaagggcgttacgcttatagcgagttagtagccctagaagccattagtgaaattggctttccagccattattagagcgagtttcacgctggctggtggggggagtggggtcgcttataatattgaagagtttcatgaattggctaaaaacgccctagacgcttcacccattaatgaaattttgattgaagagtccttattagggtggaaagaatacgaaatggaagtcatacgagacggcaaggacaattgcatcattgtgtgctgtattgaaaacattgatcccatgggcgttcataccggcgatagcatcaccatcgctccaagtctcaccttaaccgataaagaataccaacgcatgcgcgatgcgagctttgcgattttgagagaaattggcgtggatacgggcgggagtaatgtgcagtttgcgatccacccagagactttaagaatggtcgtgattgaaatgaacccacgagtgagccgtagctcgctt

SEQ ID NO: 2144 - DNA (genomic), 924 bp, Helicobacter pylori; double-stranded, circular
  misc_feature (B) LOCATION 1...924
  hypothetical: NO
  anti-sense: NO
atgcctaaacgcaccgatatttccaacattctactgataggctcaggccctattgtgatcgggcaagcttgtgagtttgactattcagggactcaaagttgtaaaaccttaaaatctttaggttatagagtgatcttaatcaattctaacccggccaccgtgatgactgaccctgaattttctcatcaaacctatatccagcccatcaccccagaaaatatcgccgctatcatcaaaaaagaaaagattgacgccattttacccacaatgggcgggcaaaccgctttgaatgcggtcatgcaaatgcaccaaaggggcatgttagaaggcgtggagcttttgggggctaagattgaagcgattaaaaaaggcgaagacaggcaggccttcaaagaagcgatgttaaaaatcgggatggatttgcctaaagggcgttacgcttatagcgagttagaagccctagaagccattagtgaaattggctttccagccattattagagcgagtttcacgctggctggtggggggagtggggtcgcttataatattgaagagtttcaagaattggctaaaaacgccctagacgcttcacccattaatgaaattttgattgaagagtccttattagggtggaaagaatacgaaatggaagtcatacgagacggcaaggacaattgcatcattgtgtgctgtattgaaaacattgatcccatgggcgttcataccggcgatagcatcaccatcgctccaagtctcaccttaaccgataaagaataccaacgcatgcgcgatgcgagctttgcgattttgagagaaattggcgtggatacgggcgggagtaatgtgcagtttgcgatccacccagagactttaagaatggtcgtgattgaaatgaacccacgagtgagccgtagctcgctttag

SEQ ID NO: 2145 - DNA (genomic), 1125 bp, Helicobacter pylori; double-stranded, circular
  misc_feature (B) LOCATION 1...1125
  hypothetical: NO
  anti-sense: NO
ctcgctttagcgtcaaaagcgaccgggtttcccattgcaaaagtggctaccatgcttgcggtgggttttagcttagatgaaattaaaaacgatattaccaacaccccagcgagctttgagcctagtttggattatatcgtggtgaaaatccctcgctttgcgtttgaaaaatttgccggtgtttctagcactttagggacttccatgaaaagcattggagaagtgatggcgataggggggaatttcttagaagccttacaaaaagcgttatgctctttggaaaacaattggctagggtttgaatcgttaagcaaagatttagaggcgataaaaaaggaaatccgccggcccaatcccaaacgcttgctctatattgctgatgcgttcaggttgggcgtttctgtggatgaagtgtttgaattatgccagattgacaggtggtttttatctcaaattcaaaaactagtcaaagcagaagagggcatcaattctagcgttttaacggacgccaaaaaattgagagggcttaaaaatttaggctttagcgatgccaggattgccactaaaatcaaagaaaatgaaaatttagaggtcagcccttttgaagtggaattagctagatctaatttacaaatcgcgccccattttgaagaagtggacacttgcgcggcggagtttttatcgctcacgccttatttgtattccacctatgcccctaaccctttgccccctattggaaacaaacaagaaaaacaagaaaagaaaatcctaatcataggctctgggcctaaccgcatcggtcaaggcattgaatttgattattgttgcgtgcatgcgagctttgctttaaaagatttgaacattaaaagcgtcatgctcaattgcaatccagaaaccgtaagcacggattatgatactagtgatacgctctattttgaacccatacattttgaatgtgtgaagagtatcattcaaagggagcgagtggatggcattatcgtgcattttgggggacaaacccctttaaaactcgctaaagatttagccaaaatgcaagcccccattattggcacgccttttaaggtgattgatattgcagaagacagagaaaaatttccctctttt

SEQ ID NO: 2146 - DNA (genomic), 2301 bp, Helicobacter pylori; double-stranded, circular
  misc_feature (B) LOCATION 1...2301
  hypothetical: NO
  anti-sense: NO
gtggctaccatgcttgcggtgggttttagcttagatgaaattaaaaacgatattaccaacaccccagcgagctttgagcctagtttggattatatcgtggtgaaaatccctcgctttgcgtttgaaaaatttgccggtgtttctagcactttagggacttccatgaaaagcattggagaagtgatggcgataggggggaatttcttagaagccttacaaaaagcgttatgctctttggaaaacaattggctagggtttgaatcgttaagcaaagatttagaggcgataaaaaaggaaatccgccggcccaatcccaaacgcttgctctatattgctgatgcgttcaggttgggcgtttctgtggatgaagtgtttgaattatgccagattgacaggtggtttttatctcaaattcaaaaactagtcaaagcagaagagggcatcaattctagcgttttaacggacgccaaaaaattgagagggcttaaaaatttaggctttagcgatgccaggattgccactaaaatcaaagaaaatgaaaatttagaggtcagcccttttgaagtggaattagctagatctaatttacaaatcgcgccccattttgaagaagtggacacttgcgcggcggagtttttatcgctcacgccttatttgtattccacctatgcccctaaccctttgccccctattggaaacaaacaagaaaaacaagaaaagaaaatcctaatcataggctctgggcctaaccgcatcggtcaaggcattgaatttgattattgttgcgtgcatgcgagctttgctttaaaagatttgaacattaaaagcgtcatgctcaattgcaatccagaaaccgtaagcacggattatgatactagtgatacgctctattttgaacccatacattttgaatgtgtgaagagtatcattcaaagggagcgagtggatggcattatcgtgcattttgggggacaaacccctttaaaactcgctaaagatttagccaaaatgcaagcccccattattggcacgccttttaaggtgattgatattgcagaagacagagaaaaattttccctctttttaaaagagcttgacattaagcagcctgaaaacggcatggctaagagcgttgatgaagcttatagcatcgctaatgcgattggtttccctatcattgtgcgccctagttatgtgctaggcgggcaacacatgcaaattttagaaaatattgaagaactgcgccattatttagaaagcgttacgcattctttagagattagccctaaaaatccgcttctcattgacaagtttttagaaaaagcggtggaattagatgtggatgccatttgcgataaaaaagaggtctatattgccggtattttacagcatattgaagaagccggaatccattcaggcgattcggcgtgctttatcccttccactctaagccctgaaattttagatgaaattgagcgagtgagcgcgaaaatcgctctgcatttaggcgtagtggggctattgaatatccaatttgccgtgtatcaaaattcgctgtatttgattgaagtcaatcctagagccagcaggaccgtgccttttttgagcaaggctttaggcgttcctttagcgaaagtggcgactagggttatggtgttagaagatttgaaagaagccctgaagttttatgataaaaaaaatatcgtagaatattctaaaggcgtttataagcctaaaatgccccattttgtggctttaaaagaagcggttttcccttttaataaactttatggatcggatttgattttagggcctgagatgaaaagcaccggcgaagtcatggggattgctagatctttagggcttgcattttttaaggctcaaacggcttgctttaaccccattaaaaataaggggcttatttttgtctctattaaagataaggataaagaagaagcgtgcgttttaatgaaacgattggttgaattgggttttgaattgtgcaccacagaaggcacgcataaagctttggaaaaagccggggtgaagtctttaaaggtgcttaaaatctctgaaggccgccccaatatcatggatttgatgatgaatggggaaatcagcatggctatcaacaccagcgatcacaaatctcaagatgacgccaaactcattcgcgcttctgtgcttaaaaaccatgtgagttatttcacgactttaagtgcgatagaagtcttacttttagcgttagaagaaagttctcaagaagacgaattactagccttacaggattatttgaagtaa

SEQ ID NO: 2147 - DNA (genomic), 3258 bp, Helicobacter pylori; double-stranded, circular
  misc_feature (B) LOCATION 1...3258
  hypothetical: NO
  anti-sense: NO
atgcctaaacgcaccgatatttccaacattctactgataggctcaggccctattgtgatcgggcaagcttgtgagtttgactattcagggactcaaagttgtaaaaccttaaaatctttaggttatagagtgatcttaatcaattctaacccggccaccgtgatgactgaccctgaattttctcatcaaacctatatccagcccatcaccccagaaaatatcgccgctatcatcaaaaaagaaaagattgacgccattttacccacaatgggcgggcaaaccgctttgaatgcggtcatgcaaatgcaccaaaggggcatgttagaaggcgtggagcttttgggggctaagattgaagcgattaaaaaaggcgaagacaggcaggccttcaaagaagcgatgttaaaaatcgggatggatttgcctaaagggcgttacgcttatagcgagttagaagccctagaagccattagtgaaattggctttccagccattattagagcgagtttcacgctggctggtggggggagtggggtcgcttataatattgaagagtttcaagaattggctaaaaacgccctagacgcttcacccattaatgaaattttgattgaagagtccttattagggtggaaagaatacgaaatggaagtcatacgagacggcaaggacaattgcatcattgtgtgctgtattgaaaacattgatcccatgggcgttcataccggcgatagcatcaccatcgctccaagtctcaccttaaccgataaagaataccaacgcatgcgcgatgcgagctttgcgattttgagagaaattggcgtggatacgggcgggagtaatgtgcagtttgcgatccacccagagactttaagaatggtcgtgattgaaatgaacccacgagtgagccgtagctccgctttagcgtcaaaagcgaccgggtttcccattgcaaaagtggctaccatgcttgcggtgggttttagcttagatgaaattaaaaacgatattaccaacaccccagcgagctttgagcctagtttggattatatcgtggtgaaaatccctcgctttgcgtttgaaaaatttgccggtgtttctagcactttagggacttccatgaaaagcattggagaagtgatggcgataggggggaatttcttagaagccttacaaaaagcgttatgctctttggaaaacaattggctagggtttgaatcgttaagcaaagatttagaggcgataaaaaaggaaatccgccggcccaatcccaaacgcttgctctatattgctgatgcgttcaggttgggcgtttctgtggatgaagtgtttgaattatgccagattgacaggtggtttttatctcaaattcaaaaactagtcaaagcagaagagggcatcaattctagcgttttaacggacgccaaaaaattgagagggcttaaaaatttaggctttagcgatgccaggattgccactaaaatcaaagaaaatgaaaatttagaggtcagcccttttgaagtggaattagctagatctaatttacaaatcgcgccccattttgaagaagtggacacttgcgcggcggagtttttatcgctcacgccttatttgtattccacctatgcccctaaccctttgccccctattggaaacaaacaagaaaaacaagaaaagaaaatcctaatcataggctctgggcctaaccgcatcggtcaaggcattgaatttgattattgttgcgtgcatgcgagctttgctttaaaagatttgaacattaaaagcgtcatgctcaattgcaatccagaaaccgtaagcacggattatgatactagtgatacgctctattttgaacccatacattttgaatgtgtgaagagtatcattcaaagggagcgagtggatggcattatcgtgcattttgggggacaaacccctttaaaactcgctaaagatttagccaaaatgcaagcccccattattggcacgccttttaaggtgattgatattgcagaagacagagaaaaattttccctctttttaaaagagcttgacattaagcagcctgaaaacggcatggctaagagcgttgatgaagcttatagcatcgctaatgcgattggtttccctatcattgtgcgccctagttatgtgctaggcgggcaacacatgcaaattttagaaaatattgaagaactgcgccattatttagaaagcgttacgcattctttagagattagccctaaaaatccgcttctcattgacaagtttttagaaaaagcggtggaattagatgtggatgccatttgcgataaaaaagaggtctatattgccggtattttacagcatattgaagaagccggaatccattcaggcgattcggcgtgctttatcccttccactctaagccctgaaattttagatgaaattgagcgagtgagcgcgaaaatcgctctgcatttaggcgtagtggggctattgaatatccaatttgccgtgtatcaaaattcgctgtatttgattgaagtcaatcctagagccagcaggaccgtgccttttttgagcaaggctttaggcgttcctttagcgaaagtggcgactagggttatggtgttagaagatttgaaagaagccctgaagttttatgataaaaaaaatatcgtagaatattctaaaggcgtttataagcctaaaatgccccattttgtggctttaaaagaagcggttttcccttttaataaactttatggatcggatttgattttagggcctgagatgaaaagcaccggcgaagtcatggggattgctagatctttagggcttgcattttttaaggctcaaacggcttgctttaaccccattaaaaataaggggcttatttttgtctctattaaagataaggataaagaagaagcgtgcgttttaatgaaacgattggttgaattgggttttgaattgtgcaccacagaaggcacgcataaagctttggaaaaagccggggtgaagtctttaaaggtgcttaaaatctctgaaggccgccccaatatcatggatttgatgatgaatggggaaatcagcatggctatcaacaccagcgatcacaaatctcaagatgacgccaaactcattcgcgcttctgtgcttaaaaaccatgtgagttatttcacgactttaagtgcgatagaagtcttacttttagcgttagaagaaagttctcaagaagacgaattactagccttacaggattatttgaagtaa

SEQ ID NO: 2148 - DNA (genomic), 1011 bp, Helicobacter pylori; double-stranded, circular
  misc_feature (B) LOCATION 1...1011
  hypothetical: NO
  anti-sense: NO
atgccaactgataacgatttaaaaacttctattgtggaattgttgcgcgatttagacgcgcttttagtggctcatttttatcaaaaagatgagattgtagagttagcccattatacaggcgatagcttggagttagctaaaatcgcaagccaaagcgataaaaacctcatcgtgttttgcggggtgcatttcatgggcgaaagcgtgaaggccctagcctttaacaaacaagtgatcatgcccaaactctcatgctgctctatggcgaggatgatagacagccattactacgatagaagcgtccatttattaaaagaatacggcgttaaagaattttaccctatcacttatatcaattctaacgctgaagtgaaagccaaagtcgctaaagatgacggcgtggtctgcaccagcaggaacgcttctaaaatcttcaatcacgccttaaaacaaaataaaaaaatcttttttttaccggataaatgcttgggggaaaatctggccctagaaaacggcttaaaaagcgcgattttaggcataaacagcccagaagaaattaaaaacgctgatgtggtttgttacaacggcttttgttcggtgcatcagcttttcaaattagaagacattgaattttaccgccaaaaatacccggatattttaatcgctgtccatccagagtgcgagcctagcgtggtttctaatgctgattttagcggatcaacgagtcaaatcatagaatttgtggaaaagttaagcccccatcaaaaagtcgccataggcactgaaagccatttggtcaaccgcttgaaagccaagcgtaaccatcaaaacactttcattctttctagcacgctcgccttttgccccaccatgaacgaaacgactttaaaggatttgtttgaagtcttaaaggcttataaaaaccacagggcttacaatgcgattgaattaaaagatgaggtggcgcgtttggccaaactcgctttaactaaaatgatggagttatcctaa

SEQ ID NO: 2149 - DNA (genomic), 1017 bp, Helicobacter pylori; double-stranded, circular
  misc_feature (B) LOCATION 1...1017
  hypothetical: NO
  anti-sense: NO
gggaatttcatgccaactgataacgatttaaaaacttctattgtggaattgttgcgcgatttagacgcgcttttagtggctcatttttatcaaaaagatgagattgtagagttagcccattatacaggcgatagcttggagttagctaaaatcgcaagccaaagcgataaaaacctcatcgtgttttgcggggtgcatttcatgggcgaaagcgtgaaggccctagcctttaacaaacaagtgatcatgcccaaactctcatgctgctctatggcgaggatgatagacagccattactacgatagaagcgtccatttattaaaagaatacggcgttaaagaattttaccctatcacttatatcaattctaacgctgaagtgaaagccaaagtcgctaaagatgacggcgtggtctgcaccagcaggaacgcttctaaaatcttcaatcacgccttaaaacaaaataaaaaaatcttttttttaccggataaatgcttgggggaaaatctggccctagaaaacggcttaaaaagcgcgattttaggcataaacagcccagaagaaattaaaaacgctgatgtggtttgttacaacggcttttgttcggtgcatcagcttttcaaattagaagacattgaattttaccgccaaaaatacccggatattttaatcgctgtccatccagagtgcgagcctagcgtggtttctaatgctgattttagcggatcaacgagtcaaatcatagaatttgtggaaaagttaagcccccatcaaaaagtcgccataggcactgaaagccatttggtcaaccgcttgaaagccaagcgtaaccatcaaaacactttcattctttctagcacgctcgccttttgccccaccatgaacgaaacgactttaaaggatttgtttgaagtcttaaaggcttataaaaaccacagggcttacaatgcgattgaattaaaagatgaggtggcgcgtttggccaaactcgctttaactaaaatgatggagttatcc

SEQ ID NO: 2150 - DNA (genomic), 273 bp, Helicobacter pylori; double-stranded, circular
  misc_feature (B) LOCATION 1...273
  hypothetical: NO
  anti-sense: NO
tgtgtgaggacatcatcactagcgggaaaatccgctatggaatgcgctaaagttttagaagaaaaaggcgctcaaatcgtggcttttggtgctttaactaatcggggtatgtgcaagcgcgctcattctcatttaaaagcccaagaaggcgcgtgtttgcctatccatttgcccctttttgctttaaaaaattttgtttttgacatgcacaagcctagttcttgccctttatgcgctactagcgttgctataaagccaggaaatcgtggcaac

SEQ ID NO: 2151 - DNA (genomic), 309 bp, Helicobacter pylori; double-stranded, circular
  misc_feature (B) LOCATION 1...309
  hypothetical: NO
  anti-sense: NO
tttcattccaattattatttgcaacccgctaaagttttagaagaccccaaactagccgaacaattagcgctagaattagccaaacaaatccaagaagctcatttgaatattgaatgcgtgtgctcgccggctattggggggattttggctgggtatgagcttgcaagggttttgggcgtgcgttttatcttcaccgaaagggtggataataccatgacattaaggcgcggttttgaagtcaaaaaaaacgaaaaaatcttagtgtgtgaggacatcatcactagcgggaaaatccgctatggaatgcgc

SEQ ID NO: 2152 - DNA (genomic), 306 bp, Helicobacter pylori; double-stranded, circular
  misc_feature (B) LOCATION 1...306
  hypothetical: NO
  anti-sense: NO
cattccaattattatttgcaacccgctaaagttttagaagaccccaaactagccgaacaattagcgctagaattagccaaacaaatccaagaagctcatttgaatattgaatgcgtgtgctcgccggctattggggggattttggctgggtatgagcttgcaagggttttgggcgtgcgttttatcttcaccgaaagggtggataataccatgacattaaggcgcggttttgaagtcaaaaaaaacgaaaaaatcttagtgtgtgaggacatcatcactagcgggaaaatccgctatggaatgcgc

SEQ ID NO: 2153 - DNA (genomic), 606 bp, Helicobacter pylori; double-stranded, circular
  misc_feature (B) LOCATION 1...606
  hypothetical: NO
  anti-sense: NO
atggatattaaggcatgttatcaaaacgctcaagcgctattagaggggcatttcttgctcagtagcgggtttcattccaattattatttgcaatccgctaaagttttagaagatcccaaactagccgaacaattagcgctagaattagccaaacaaatccaagaagctcatttgaatattgaatgcgtgtgctcgccggctattggggggattttggctgggtatgagcttgcaagggctttgggcgtgcgttttatcttcaccgaaagggtggataataccatgacattaaggcgtggttttgaagtcaaaaaaaacgaaaaaattttagtgtgtgaggacatcatcactacgggaaaatccgctatggaatgcgctaaagttttagaagaaaaaggcgctcaaatcgtggcttttggtgctttagctaatcggggtatttgcaagcgcgctcattctcatttaaaagcccaagagggcgcgtgtttgcctagccatttgcccctttttgctttagaagattttgtttttgacatgcacaagcctagttcttgccctttatgcgctactagcgttgctataaagccaggaagtcgtggcaactaa

SEQ ID NO: 2154 - DNA (genomic), 186 bp, Helicobacter pylori; double-stranded, circular
  misc_feature (B) LOCATION 1...186
  hypothetical: NO
  anti-sense: NO
ggcagttttaggggggctgatgataatgaaagggtgtttcataaccgcatgcggttgtttttagatccgttggttgaaatccaaaacttctacaaggccaagcatttgcataaaattatcaatggtgaaagaagcattgaagaaatcgtgaatgaaatgcaaaaatatattttgtcttttgcaaat

SEQ ID NO: 2155 - DNA (genomic), 282 bp, Helicobacter pylori; double-stranded, circular
  misc_feature (B) LOCATION 1...282
  hypothetical: NO
  anti-sense: NO
attaaggtgaggagcgtcaaaaagactgagcgaggcttattgattgagaaattcacttctcaaggcgaattagtgcctttagaaattgtggtagaaacgatcctttcagagattaaaagctctagtaaagggatcattttaattgatggctatcccaggagcgtggagcaaatgcaagctttggataaggaattgaacgctccaaatgaagtgattttaaaaagcgtgattgaagtagaagtgagcgaaaacaccgctaaagaaagggttttagggcagttt

SEQ ID NO: 2156 - DNA (genomic), 279 bp, Helicobacter pylori; double-stranded, circular
  misc_feature (B) LOCATION 1...279
  hypothetical: NO
  anti-sense: NO
aaggtgaggagcgtcaaaaagactgagcgaggcttattgattgagaaattcacttctcaaggcgaattagtgcctttagaaattgtggtagaaacgatcctttcagagattaaaagctctagtaaagggatcattttaattgatggctatcccaggagcgtggagcaaatgcaagctttggataaggaattgaacgctccaaatgaagtgattttaaaaagcgtgattgaagtagaagtgagcgaaaacaccgctaaagaaagggttttagggcagttt

SEQ ID NO: 2157 - DNA (genomic), 399 bp, Helicobacter pylori; double-stranded, circular
  misc_feature (B) LOCATION 1...399
  hypothetical: NO
  anti-sense: NO
atgaaacaactatttttgattattggagccccagggagtggtaaaaccactgacgcagagcttatcgctaagaataacagcgaaacaatcgctcatttttctactggggatttactcagggctgagagcgctaaaaagactgagcgaggcttattgattgagaaattcacttctcaaggcgaattagtgcctttagaaattgtggtagaaacgatcctttcagcgattaaaagctctagtaaagggatcattttaattgatggctatcccaggagcgtggagcaaatgcaagctttggataaggaattgaacgctccaaatgaagtgattttaaaaagcgtgattgaagtagaagtgagcgaaaacaccgctaaagaaagggttttagggcagttttag

SEQ ID NO: 2158 - DNA (genomic), 576 bp, Helicobacter pylori; double-stranded, circular
  misc_feature (B) LOCATION 1...576
  hypothetical: NO
  anti-sense: NO
atgaaacaactatttttgattattggagccccagggagtggtaaaaccactgacgcagagcttatcgctaagaataacagcgaaacaatcgctcatttttctactggggatttactcagggctgagagcgctaaaaagactgagcgaggcttattgattgagaaattcacttctcaaggcgaattagtgcctttagaaattgtggtagaaacgatcctttcagcgattaaaagctctagtaaagggatcattttaattgatggctatcccaggagcgtggagcaaatgcaagctttggataaggaattgaacgctcaaaatgaagtgatcttaaaaagcgtgattgaagtagaagtgagcgaaaacaccgctaaagaaagggttttagggcgctctaggggggctgatgataatgaaagggtgtttcataaccgcatgcgggtgtttttagatccgttggttgaaatccaaaacttctacaaggccaagcatttgcataaaattatcaatggtgaaagaagcattgaagaaatcgtgaatgaaatgcaaaaatatattttgtcttttgcaaattaa

SEQ ID NO: 2159 - DNA (genomic), 576 bp, Helicobacter pylori; double-stranded, circular
  misc_feature (B) LOCATION 1...576
  hypothetical: NO
  anti-sense: NO
atgaaacaactatttttgattattggagccccagggagtggtaaaaccactgacgcagagcttatcgctaagaataacagcgaaacaatcgctcatttttctactggggatttactcagggctgagagcgctaaaaagactgagcgaggcttattgattgagaaattcacttctcaaggcgaattagtgcctttagaaattgtggtagaaacgatcctttcagcgattaaaagctctagtaaagggatcattttaattgatggctatcccaggagcgtggagcaaatgcaagctttggataaggaattgaacgctccaaatgaagtgatcttaaaaagcgtgattgaagtagaagtgagcgaaaacaccgctaaagaaagggttttagggcgctctaggggggctgatgataatgaaagggtgtttcataaccgcatgcgggtgtttttagatccgttggttgaaatccaaaacttctacaaggccaagcatttgcataaaattatcaatggtgaaagaagcattgaagaaatcgtgaatgaaatgcaaaaatatattttgtcttttgcaaattaa

SEQ ID NO: 2160 - DNA (genomic), 438 bp, Helicobacter pylori; double-stranded, circular
  misc_feature (B) LOCATION 1...438
  hypothetical: NO
  anti-sense: NO
atgactttagatgacttattaggggggagtttggacccgcattgtttttgcaaacccttaatcaaaaccaaaaaagaccaagaaaggctcttatcccttgctttaaaagcccaccctaaaatctcttttggawwggacagtgccccgcatttcatttctaaaaagcatagcgctaacatcccggcgggcatcttttctgcccctattttgttgcctgcgttgtgcgaactttttgaaaaacacaacgctttagaaaatttgcaagcctttatcagtgataacgctaaaaaaatctacgcgctagacaatttacccagtaaaaaagcgcatttgtctaaaaaaccctttatagtccctacgcacacgctttgcttgaatgaaaaaatcgctatcttaagagggggcgaaacgctatcttggaaccttcaagaaatcgcc

SEQ ID NO: 2161 - DNA (genomic), 1020 bp, Helicobacter pylori; double-stranded, circular
  misc_feature (B) LOCATION 1...1020
  hypothetical: NO
  anti-sense: NO
atggaaatcacgctttttgaccccatagacgcccacttgcatgtgcgagaaaacgcgcttttaaaagcggtgttggaatattctagcgaaccttttagcgccgcagtgatcatgcccaatctcagtaagcctttgattgacactccaatcaccctagaatatgaagaagaaattttaaaaaattcttcaaacttcaagcctttaatgagtttgtattttaacgatggtttgactttagaagaattgcaacgagctaaaaacaaaggcattaaatttttaaaactctaccccaaaggcatgaccacaaacgcgcaaaatggcacttcggatttgttgggtgaaaagactttggaggttttagaaaacgcccaaaaattaggctttattttatgcgtccatgcagaacaagctgggttttgtttggataaagaatttttatgccatagcgttttagaaactttcgccctttcattccctaaactcaaaatcattatagagcatttgagcgattggcgcagtatcgctttgattgaaaagcatgacaacctctatgcgactttgaccttacaccatatcagcatgactttagatgacttattaggggggagtttggacccgcattgtttttgcaaacccttaatcaaaaccaaaaaagaccaagaaaggctcttatcccttgctttaaaagcccaccctaaaatctcttttggatcggacagtgccccgcatttcatttctaaaaagcatagcgctaacatcccggcgggcatcttttctgcccctattttgttgcctgcgttgtgcgaactttttgaaaaacacaacgctttagaaaatttgcaagcctttatcagtgataacgctaaaaaaatctacgcgctagacaatttacccagtaaaaaagcgcatttgtctaaaaaaccctttatagtccctacgcacacgctttgcttgaatgaaaaaatcgctatcttaagagggggcgaaacgctatcttggaaccttcaagaaatcgcctaa

SEQ ID NO: 2162 - DNA (genomic), 1113 bp, Helicobacter pylori; double-stranded, circular
  misc_feature (B) LOCATION 1...1113
  hypothetical: NO
  anti-sense: NO
agaccattcagatcgcttataaggattacccacgccccaaaactaaaaccctcattcgcattagagtgcgttattacttgggaggcaattaacagcatggaaatcacgctttttgaccccatagacgcccacttgcatgtgcgagaaaacgcgcttttaaaagcggtgttggaatattctagcgaaccttttagcgccgcagtgatcatgcccaatctcagtaagcctttgattgacactccaatcaccctagaatatgaagaagaaattttaaaaaattcttcaaacttcaagcctttaatgagtttgtattttaacgatggtttgactttagaagaattgcaacgagctaaaaacaaaggcattaaatttttaaaactctaccccaaaggcatgaccacaaacgcgcaaaatggcacttcggatttgttgggtgaaaagactttggaggttttagaaaacgcccaaaaattaggctttattttatgcgtccatgcagaacaagctgggttttgtttggataaagaatttttatgccatagcgttttagaaactttcgccctttcattccctaaactcaaaatcattatagagcatttgagcgattggcgcagtatcgctttgattgaaaagcatgacaacctctatgcgactttgaccttacaccatatcagcatgactttagatgacttattaggggggagtttggacccgcattgtttttgcaaacccttaatcaaaaccaaaaaagaccaagaaaggctcttatcccttgctttaaaagcccaccctaaaatctcttttggatcggacagtgccccgcatttcatttctaaaaagcatagcgctaacatcccggcgggcatcttttctgcccctattttgttgcctgcgttgtgcgaactttttgaaaaacacaacgctttagaaaatttgcaagcctttatcagtgataacgctaaaaaaatctacgcgctagacaatttacccagtaaaaaagcgcatttgtctaaaaaaccctttatagtccctacgcacacgctttgcttgaatgaaaaaatcgctatcttaagagggggcgaaacgctatcttggaaccttcaagaaatcgcc

SEQ ID NO: 2163 - DNA (genomic), 348 bp, Helicobacter pylori; double-stranded, circular
  misc_feature (B) LOCATION 1...348
  hypothetical: NO
  anti-sense: NO
ttgatcgctttgagagtaacggcttggaargtggyggccatgaaacgcttgcatttgagcgtgaaagacgctgaaaactttgatgcgatcctcagagagagacccttttttaaagatttgatagagtttatggtgagtggtccggtggtggttatggttttagaaggcaaagatgcggtggctaaaaacagagagcttatgggagcgactgatcccaaactcgcccaaaaaggtactatcagagcggattttgctgagagcattgacgctaatgcggtgcatgggagcgatagcttggaaaacgcgcacaatgaaatcgctttcttttttgccgctagagagttttaa

SEQ ID NO: 2164 - DNA (genomic), 414 bp, Helicobacter pylori; double-stranded, circular
  misc_feature (B) LOCATION 1...414
  hypothetical: NO
  anti-sense: NO
ttgaaacaaagaacgctgtctattattaaaccggatgcacttaagaaaaaagtggtaggcaaaatcattgatcgctttgagagtaacggcttggaagtggtggccatgaaacgcttgcatttgagcgtgaaagacgctgaaaacttttatgcgatccacagagagagacccttttttaaagatttgatagagtttatggtgagtggtccggtggtggttatggttttagaaggcaaagatgcggtggctaaaaacagagagcttatgggagcgactgatcccaaactcgcccaaaaaggtactatcagagcggattttgctgagagcattgacgctaatgcggtgcatgggagcgatagcttggaaaacgcgcacaatgaaatcgctttcttttttgccgctagagagttttaa

SEQ ID NO: 2165 - DNA (genomic), 435 bp, Helicobacter pylori; double-stranded, circular
  misc_feature (B) LOCATION 1...435
  hypothetical: NO
  anti-sense: NO
tcaacaattcacaaggagtttaaattgaaacaaagaacgctgtctattattaaaccggatgcacttaagaaaaaagtggtaggcaaaaccattgatcgctttgagagtaacggcttggaagtggtggccatgaaacgcttgcatttgagcgtgaaagacgctgaaaacttttatgcgatcctcagagagagacccttttttaaagatttgatagagtttatggtgagtggtccggtggtggttatggttttagaaggcaaagatgcggtggctaaaaacagagagcttatgggagcgactgatcccaaactcgcccaaaaaggtactatcagagcggattttgctgagagcattgacgctaatgcggtgcatgggagcgatagcttggaaaacgcgcacaatgaaatcgctttcttttttgccgctagagagttt

SEQ ID NO: 2166 - DNA (genomic), 882 bp, Helicobacter pylori; double-stranded, circular
  misc_feature (B) LOCATION 1...882
  hypothetical: NO
  anti-sense: NO
atgttagaatttattttaaaaattcaagccaaagactctaaaggcctagtgagcgccattagcgccactatcgccaacaagggctacaatatcgtcaaaaacgatgaatttgttgatcccttaaaacagcgctttttcatgcggctaaaaatccaaaaagaaatgaagcccttgaatactgaaattaaagagcaagaagaacgatccttaaaaaccgctctttttaaagccttagaaaactttagcgaactattgattgaagtcatcttaacgcataaaaaaaacattattttactcgctactaaagagagccattgcttgggggatttgcttttaagggtgtatgggggggaattgaacgctcaaattttaggcgttatttctaatcacgagattttacgccctttagtggaaaaatttgacatcccttatttttacgcgccttgtgttgatcaaattttgcatgaaaaagaagttttagcaaccattaaagatctggaattaaaacacaaagtgagcgcggatctgctcgttttagccaaatacatgcgcattttaagccatgattttacgaagcgctatgaaaatcagatcttaaatatccatcatagtttcttgcccgcattcattggggctaacccttaccagcaagcgtttgaaaggggcgtgaaagtcatcggggccacggcgcattttgtgaatgaaagccttgatgctgggccgattattttacaagacactctgcccattaaccacaattacagcgtggaaaaaatgcgcctagcgggtaaggatatagaaaaactggttttggctagggctttaaaactcgttttagaagacagagtctttgtgcatgaaaacaaaacggtggtgttttga

SEQ ID NO: 2167 - DNA (genomic), 888 bp, Helicobacter pylori; double-stranded, circular
  misc_feature (B) LOCATION 1...888
  hypothetical: NO
  anti-sense: NO
atgaagatgttagaatttattttaaaaattcaagccaaagactctaaaggcctagtgagcgccattagcgccactatcgccaacaagggctacaatatcgtcaaaaacgatgaatttgttgatcccttaaaacagcgctttttcatgcggctaaaaatccaaaaagaaatgaagcccttgaatactgaaattaaagagcaagaagaacgatccttaaaaaccgctctttttaaagccttagaaaactttagcgaactattgattgaagtcatcttaacgcataaaaaaaacattattttactcgctactaaagagagccattgcttgggggatttgcttttaagggtgtatgggggggaattgaacgctcaaattttaggcgttatttctaatcacgagattttacgccctttagtggaaaaatttgacatcccttatttttacgcgccttgtgttgatcaaattttgcatgaaaaagaagttttagcaaccattaaagatctggaattaaaacacaaagtgagcgcggatctgctcgttttagccaaatacatgcgcattttaagccatgattttacgaagcgctatgaaaatcagatcttaaatatccatcatagtttcttgcccgcattcattggggctaacccttaccagcaagcgtttgaaaggggcgtgaaagtcatcggggccacggcgcattttgtgaatgaaagccttgatgctgggccgattattttacaagacactctgcccattaaccacaattacagcgtggaaaaaatgcgcctagcgggtaaggatatagaaaaactggttttggctagggctttaaaactcgttttagaagacagagtctttgtgcatgaaaacaaaacggtggtgttttga

SEQ ID NO: 2168 - DNA (genomic), 885 bp, Helicobacter pylori; double-stranded, circular
  misc_feature (B) LOCATION 1...885
  hypothetical: NO
  anti-sense: NO
aaaagccacgcaatcggttacaagcatcatcacgcaagcgtttggctatcaattattgatgagatgaagatgttagaatttattttaaaaattcaagccaaagactctaaaggcctagtgagcgccattagcgccactatcgccaacaagggctacaatatcgtcaaaaacgatgaatttgttgatcccttaaaacagcgctttttcatgcggctaaaaatccaaaaagaaatgaagcccttgaatactgaaattaaagagcaagaagaacgatccttaaaaaccgctctttttaaagccttagaaaactttagcgaactattgattgaagtcatcttaacgcataaaaaaaacattattttactcgctactaaagagagccattgcttgggggatttgcttttaagggtgtatgggggggaattgaacgctcaaattttaggcgttatttctaatcacgagattttacgccctttagtggaaaaatttgacatcccttatttttacgcgccttgtgttgatcaaattttgcatgaaaaagaagttttagcaaccattaaagatctggaattaaaacacaaagtgagcgcggatctgctcgttttagccaaatacatgcgcattttaagccatgattttacgaagcgctatgaaaatcagatcttaaatatccatcatagtttcttgcccgcattcattggggctaacccttaccagcaagcgtttgaaaggggcgtgaaagtcatcggggccacggcgcattttgtgaatgaaagccttgatgctgggccgattattttacaagacactctgcccattaaccacaattacagcgtggaaaaaatgcgcctagcgggtaaggatatagaaaaactggttttgggc

SEQ ID NO: 2169 - DNA (genomic), 546 bp, Helicobacter pylori; double-stranded, circular
  misc_feature (B) LOCATION 1...546
  hypothetical: NO
  anti-sense: NO
aaaatgtatgtggtgttagaaggcgttgatggcgcgggcaaaagcactcaagtaggattgttaaaagaccggtttaaaaacgccctttttaccaaagagccaggggggacgagaatgggcgagagtttaaggcgtatcgctttaaatgaaaacatcagcgaattggctagagcgtttttattcttaagcgatagggctgagcatatagaaagcgtgataaaaccggcattgaaagaaaaaaagctcatcattagcgacaggagtttgatttctggcatggcttatagccaattttcaagcttaggattaaacctgctcgccactcaaagcgtcttacctgaaaaaatcattctgttactcataaataaagagaacttaaaacagcgcttaagccttaaaagtttagacaaaatagaaaaccaaggcatagaaaaattgctcaccatccagcaaaagctcaagacccacgcttatgcgttacaagaaaaattcgggtgcgaagttttggaattagacgctcaaaaaagcgctaaaaacttgcacgag

SEQ ID NO: 2170 - DNA (genomic), 576 bp, Helicobacter pylori; double-stranded, circular
  misc_feature (B) LOCATION 1...576
  hypothetical: NO
  anti-sense: NO
atgtatgtggtgttagaaggcgttgatggcgcgggcaaaagcactcaagtaggattgttaaaagaccggtttaaaaacgccctttttaccaaagagccaggggggacgagaatgggcgagagtttaaggcgtatcgctttaaatgaaaacatcagcgaattggctagagcgtttttattcttaagcgatagggctgagcatatagaaagcgtgataaaaccggcattgaaagaaaaaaagctcatcattagcgacaggagtttgatttctggcatggcttatagccaattttcaagcttaggattaaacctgctcgccactcaaagcgtcttacctgaaaaaatcattctgttactcataaataaagagaacttaaaacagcgcttaagccttaaaagtttagacaaaatagaaaaccaaggcatagaaaaattgctcaccatccagcaaaagctcaaaacccacgcttatgcgttacaagaaaaattcgggtgcgaagttttggaattagacgctcaaaaaagcgctaaaaacttgcacgaaaaaatcgccacctttattgaatgcgttgtttaa

SEQ ID NO: 2171 - DNA (genomic), 615 bp, Helicobacter pylori; double-stranded, circular
  misc_feature (B) LOCATION 1...615
  hypothetical: NO
  anti-sense: NO
agcatgcgagtgtttgccttacagctagagtcttttgaagaaactctcatgcaatccctattcaactccatacccaagcaaagcgtggtggtgttgcctgaatacgtgatcaaccctcttttccaccataacatgggattggatgtgaatgagattaacgcgcagtctgcgcgagcgattgggtttttgtcgcctaaatgcgaagaaatagacttgatcgtttcagccccggtgcttttagaagaacattctaaaatctataaaaaaatcgccctcatttctaaagaaaatatccagtattacacgcaacaacgcctgattccctatcctcactgggatgaagagagcttttttgacaatgagaaaagcgcttttaaagaattgatcgtgtttgaaagagacggcttaagaatcgcccctttgtttggctttgaagcgcactttgacgaaacatgggttcaggccaaaaaccagggcgtggatgtggtgcttttaagcagcgcggccacttttgaatccaatgaaaggtggcggcttttgtgccagatgcgcgctttttgcgcccttgcgtggtggttagggctaataggatcggagcgtatcgccagatccttg

SEQ ID NO: 2172 - DNA (genomic), 798 bp, Helicobacter pylori; double-stranded, circular
  misc_feature (B) LOCATION 1...798
  hypothetical: NO
  anti-sense: NO
atgcgagtgtttgccttacagctagagtcttttgaagaaactctcatgcaatccctattcaactccatacccaagcaaagcgtggtggtgttgcctgaatacgtgatcaacccctttttccaccataacatgggattggatgtgaatgagattaacgcgcagtctgcgcgagcgattgggtttttgtcgcacaaatgcgaagaactagacttgatcgtttcagccccggtgcttttagaagaacattctaaaatctataaaaaaatcgccctcatttctaaagaaaatatccagtattacacgcaacaacgcctgattccctatcctcactgggatgaagagagcttttttgacaatgagaaaagcgcttttaaagaattgctcgtgtttgaaagagacggcttaagaatcgcccctttgtttggctttgaagcgcattttgatgaaatatgggttcaggctaaaaatcagggcgtggatgtggtgcttttaagcagcgtggccacttttgaatccaatgaaaggtggcggcttttgtgccagatgcgcgctttttgcgcttcttgcgtggtggttagggctaataggatcggagcgtatcgccagatccttgtagaaggagatcaaaaaaacgaattcttgtggaaattttatggggatagttttgtggctttgcctaatggtgctattgaagattctttagagggtaaaatgggggctttgagcgctcaaatggataaaaacgatatagacgaatgggctaaattgtggcattttagaacgattaaagagggttga

SEQ ID NO: 2173 - DNA (genomic), 921 bp, Helicobacter pylori; double-stranded, circular
  misc_feature (B) LOCATION 1...921
  hypothetical: NO
  anti-sense: NO
atgagttctgtccaaatcctatctaatttcaattatcctattagcaaagtgattaacgaagggctaagaaattctttagacactcatattgcagttgcttttttaaaatacagtggggttgagattattcaagatgtcttgattaattttttagaaaagggggcagaatttgagattattgtaggacttgattttaaaacaaccgactcaaaatccatacgattttttctagacttaaataaaacttataaaaaattaaaattttactgctacggcgacaaagaaaataacaaaacagatattgtattccaccctaaaatttatatgtttgacaacggaaaagaaaaaacttccattataggtagcgctaatttaaccaaaggagggttggagaataattttgaagtcaataccatttttacagaaaaggaaccattatattactcacaactaaacgctatctacaattctataaaatatgcagatagtctgttcactcctaatgaagagtatttagaaagctatgatgaagtttttagcgccattattaaaaatgaacaaaaagtctcaaaagataaaagcattcaagaaaagattaaaaagattgaaaaacaagaaaaattgcttcctggaactatcccctctatcaaggcaatgatagtggaatttattttcgcttgtgagaaaaaaggcgttaaacaagtagcattacaagatatttatcaggcattagaagagagaataaaaaaagaagagtggggatacaaatacaaaagcgatacttttaaaaatagcattaggggcgaactcaaccaccatcaaaaagatagccattcaaaacattgctttggactctttgagagattgcaaaaaggtttttatgctctaacaccaaaagggcgttcgtataaaggacgctaa

SEQ ID NO: 2174 - DNA (genomic), 942 bp, Helicobacter pylori; double-stranded, circular
  misc_feature (B) LOCATION 1...942
  hypothetical: NO
  anti-sense: NO
cctaaaaaattattaaggttcttgatgagttctgtccaaatcctatctaatttcaattatcctattagcaaagtgattaacgaagggctaagaaattctttagacactcatattgcagttgcttttttaaaatacagtggggttgagattattcaagatgtcttgattaattttttagaaaagggggcagaatttgagattattgtaggacttgattttaaaacaaccgactcaaaatccatacgattttttctagacttaaataaaacttataaaaaattaaaattttactgctacggcgacaaagaaaataacaaaacagatattgtattccaccctaaaatttatatgtttgacaacggaaaagaaaaaacttccattataggtagcgctaatttaaccaaaggagggttggagaataattttgaagtcaataccatttttacagaaaaggaaccattatattactcacaactaaacgctatctacaattctataaaatatgcagatagtctgttcactcctaatgaagagtatttagaaagctatgatgaagtttttagcgccattattaaaaatgaacaaaaagtctcaaaagataaaagcattcaagaaaagattaaaaagattgaaaaacaagaaaaattgcttcctggaactatcccctctatcaaggcaatgatagtggaatttattttcgcttgtgagaaaaaaggcgttaaacaagtagcattacaagatatttatcaggcattagaagagagaataaaaaaagaagagtggggatacaaatacaaaagcgatacttttaaaaatagcattaggggcgaactcaaccaccatcaaaaagatagccattcaaaacattgctttggactctttgagagattgcaaaaaggtttttatgctctaacaccaaaagggcgttcgtataaaggacgc

SEQ ID NO: 2175 - DNA (genomic), 180 bp, Helicobacter pylori; double-stranded, circular
  misc_feature (B) LOCATION 1...180
  hypothetical: NO
  anti-sense: NO
ttgagagtgggggcggctattggagtggggcagttggatagggctgaaatgttagttaaagcgggggtggatgcgttggtgttagacagcgcgcatgggcattcagccaatattttacacactttagaagagattaaaaaaagcttggtagtggatgtgattgtggggaatgtggatact

SEQ ID NO: 2176 - DNA (genomic), 201 bp, Helicobacter pylori; double-stranded, circular
  misc_feature (B) LOCATION 1...201
  hypothetical: NO
  anti-sense: NO
ggcaataaagatgattttgggaggttgagagtgggggcggctattggagtggggcagttggatagggctgaaatgttagttaaagcgggggtggatgcgttggtgttagacagcgcgcatgggcattcagccaatattttacacactttagaagagattaaaaaaagcttggtagtggatgtgattgtggggaatgtggat

SEQ ID NO: 2177 - DNA (genomic), 225 bp, Helicobacter pylori; double-stranded, circular
  misc_feature (B) LOCATION 1...225
  hypothetical: NO
  anti-sense: NO
tggtggcctagaaaatccagcgttttacccaaagatgtgagcttaaagtctcgcctaaccaaaaacattggtttgaatatcccttttattagtgcggctatggatacggttacagagcataaaaccgctatcgctatggcgcgccttgggggtataggcatcggcataaaaacatggatattcacacgaagtcaaagaatcactaaagttaaagcgagagcggcg

SEQ ID NO: 2178 - DNA (genomic), 291 bp, Helicobacter pylori; double-stranded, circular
  misc_feature (B) LOCATION 1...291
  hypothetical: NO
  anti-sense: NO
gtgcctgtggtagatgataaggggttgttgattgggattttaaccaacagagacgtgcgttttgaaaccgatttgagtaaaaaagtgggcgatgtgatgactaaaatgcctttagttaccgctcatgtgggcattagcttagatgaagcgagcgatttgatgcacaagcataagattgaaaaattgcccattgtggataaagataatgtttttaaaggcttgatcacgatcaaagacattcaaaaacgcattgaataccctgaggcaataaagatgattttgggaggttga

SEQ ID NO: 2179 - DNA (genomic), 306 bp, Helicobacter pylori; double-stranded, circular
  misc_feature (B) LOCATION 1...306
  hypothetical: NO
  anti-sense: NO
atgggcagcattggggctatgactaaagggagctctgataggtattttcaagagggcgtggcgagtgaaaaattagtcccagaaggcattgaggggcgtgtgccttatcgtggtaaggtttcggatatgattttccaattagtagggggcgtgcgttcttctatggggtatcagggggcgaagaatattttggaattgtatcaaaacgctgaatttgtagaaatcactagcgcggggttaaaaaaaagccatgtgcatggcgtggatattactaaagaagcccctaatattatgggtgaattttaa

SEQ ID NO: 2180 - DNA (genomic), 333 bp, Helicobacter pylori; double-stranded, circular
  misc_feature (B) LOCATION 1...333
  hypothetical: NO
  anti-sense: NO
tcctatttttatccatgcgcacaggacgtagcggacgctaaagtcataacggataattataagatttcaggcgtgcctgtggtagatgataaggggttgttgattgggattttaaccaacagagacgtgcgttttgaaaccgatttgagtaaaaaagtgggcgatgtgatgactaaaatgcctttagttaccgctcatgtgggcattagcttagatgaagcgagcgatttgatgcacaagcataagattgaaaaattgcccattgtggataaagataatgtttttaaaggcttgatcacgatcaaagacattcaaaaacgcattgaatacccc

SEQ ID NO: 2181 - DNA (genomic), 342 bp, Helicobacter pylori; double-stranded, circular
  misc_feature (B) LOCATION 1...342
  hypothetical: NO
  anti-sense: NO
gcggccccgcttccctttgtgaaaagccggttcttactgaagggcatgggcagccttggggctataactaaagggagctctgataggtattttcaagagggcgtggcgagtgaaaaattagtcccagaaggcattgaggggcgtgtgccttatcgtggtaaggtttcggatatgatcttccaattagtagggggctcgcgttgttttatgtggtatcagggggcgaagaatattttggaattgtatcaaaacgctgaatttgtagaaatcactagcgcggggttaaaagaaagccatgtgcatggtgtggatattattaaagaagcccctaatttttatggg

SEQ ID NO: 2182 - DNA (genomic), 1446 bp, Helicobacter pylori; double-stranded, circular
  misc_feature (B) LOCATION 1...1446
  hypothetical: NO
  anti-sense: NO
atgagaattttacaaagggctttgacttttgaagacgtgttgatggtgcctagaaaatccagcgttttacctaaagatgtgagcttaaagtctcgcctaaccaaaaacattggtttgaatatcccttttattagtgcggctatggatacggttacagagcataaaaccgctatcgctatggcgcgccttgggggtattggcatcgtgcataaaaacatggatattcaaacgcaagtcaaagaaatcactaaagttaaaaaaagcgagagcggggtgattaatgatcctatttttatccatgcgcacaggacgctagcggacgctaaagtcataacggataattataagatttcaggcgtgcctgtggtagatgataaggggttgttgattgggattttaaccaacagagacgtgcgttttgaaaccgatttgagtaaaaaagtgggcgatgtgatgactaaaatgcctttagttaccgctcatgtgggcattagcttagatgaagcgagcgatttgatgcacaagcataagattgaaaaattgcccattgtggataaagataatgttttaaaaggcttgatcacgatcaaagacattcaaaaacgcattgaataccctgaggccaataaagatgattttgggaggttgagagtgggggcggctattggagtggggcagttggatagggctgaaatgttagttaaagcgggggtggatgcgttggtgttagacagcgcgcatgggcattcagccaatattttacacactttagaagagattaaaaaaagcttggtagtggatgtgattgtggggaatgtggttactaaagaagccacaagcgatttgattagcgcgggagcggacgctgttaaagtgggtattgggccaggaagcatttgcaccactaggattgtggccggggtgggaatgccccaagtgagcgcaattgataattgcgtggaagtggcgtctaaatttgatattcctgtgattgccgatggagggatccgctattcaggcgatgtggctaaggctctagctttaggagcatcaagcgtgatgataggctctttactcgctggcacagaagaatctccaggggattttatgatttaccaagggaggcaatataaaagctataggggcatgggcagcattggggctatgactaaagggagctctgataggtattttcaagagggcgtggcgagtgaaaaattagtcccagaaggcattgaggggcgtgtgccttatcgtggtaaggtttcggatatgattttccaattagtagggggcgtgcgttcttctatggggtatcagggggcgaagaatattttggaattgtatcaaaacgctgaatttgtagaaatcactagcgcggggttaaaagaaagccatgtgcatggcgtggatattactaaagaagcccctaattattatgggtga

SEQ ID NO: 2183 - DNA (genomic), 831 bp, Helicobacter pylori; double-stranded, circular
  misc_feature (B) LOCATION 1...831
  hypothetical: NO
  anti-sense: NO
atgaaaacttctaacacaaaaacccctaaacccgttttaatcgccgggccatgcgtcattgagagtttagaaaatctaagaagtatcgctattaaattacaacccctagccaacaacgagcggttggatttttattttaaagcgagttttgataaggctaaccgcacgagtttggagagttacagaggacctggtttagaaaaaggcttagaaatgttacaaactatcaaagatgaatttggttataaaattttaaccgatgtgcatgagagctatcaagcaagcgtggcagccaaggtagcggatattttacaaatcccggcgtttttgtgccgccaaacggatctgattgtagaagtgagccaaactaacgccattgtcaatatcaaaaaagggcaattcatgaacccaaaagacatgcaatattccgttctaaaagcccttaaaacaagggatagtagcattcaaagccccacttatgaaacagcgttaaaaaatggcgtgtggctgtgtgaaagggggagcagctttgggtatgggaatttagtggtggatatgcgctctttaaaaatcatgcgagaatttgcccctgtgatttttgacgctacccatagcgtgcaaatgccagggggagcgaacgggaaaagttcaggagacagctcttttccccctattttacccagagcggcggcggcggtggggattgatgggctgttcgctgaaacgcatattgatcctaaaaacgccctaagcgatggagcaaacatgctaaaacctgacgagctagaacacttagtaaccgacatgttaaaaatccaaaatttattttaa

SEQ ID NO: 2184 - DNA (genomic), 831 bp, Helicobacter pylori; double-stranded, circular
  misc_feature (B) LOCATION 1...831
  hypothetical: NO
  anti-sense: NO
gtcatgaaaacttctaacacaaaaacccctaaacccgttttaatcgccgggccatgcgtcattgagagtttagaaaatctaagaagtatcgctattaaattacaacccctagccaacaacgagcggttggatttttattttaaagcgaattttgataatgctaaccgcacgagtttggaaagttacaaagaacctggtttagaaaaaggcttagaaatgttacaaactatcaaagatgaatttggttataaaattttaaccgatgtgcatgagagctatcaagcaagcgtggcagccaaggtagcggatattttacaaatcccggcgtttttgtgccgccaaacggatctgattgtagaagtgagccaaactaacgccattgtcaatatcaaaaaagggcaattcatgaacccaaaagacatgcaatattccgttctaaaagcccttaaaacaagggatagtagcattcaaagccccacttatgaaacagcgttaaaaaatggcgtgtggctgtgtgaaagggggagcagctttgggtatgggaatttagtggtggatatgcgctctttaaaaatcatgcgagaatttgcccctgtgatttttgacgctacccatagcgtgcaaatgccagggggagcgaacgggaaaagttcaggagacagctcttttccccctattttacccagagcggcggcggcggtggggattgatgggctgttcgctgaaacgcatattgatcctaaaaacgccctaagcgatggagcaaacatgctaaaacctgacgagctagaacacttagtaaccaacatgttaaaaatccaaaatttattt

SEQ ID NO: 2185 - DNA (genomic), 609 bp, Helicobacter pylori; double-stranded, circular
  misc_feature (B) LOCATION 1...609
  hypothetical: NO
  anti-sense: NO
accccggtggtggttttagaagaaagcgtgcgtaagcgtttgcccgaaacagcgatcaaggccgctaaatacatcggctatgtgggggcggggacttttgaatttttgcttgattctaacatgaaagatttttatttcatggagatgaacactcgtttgcaagtggaacacaccattagcgaaatggtgagcgggttaaacctcattgagtggatgattaaaatcgctcaaggcgaagaattgcccaagcaagaaagcttttctctcaaagggcatgcgatagaatgccgaatcacagcagaagatcctaaaaaattctacccaagcccgggcaaaatcaccgaatggatcgcccctggtggggtgaatgtgcgccttgattcgcatgcgcatgccaattatgtcgtgcctacgaactatgattccatgataggcaagctcattgtgtggggtgaaaacagagaaagagcgatcgctaagatgaaaagggctttaaaggaatttaaagtagaaggcattaaaacgaccattccttttcatattgaaatgcttgaaaatgcggatttcaggcaagcaaaaatccacacgaagtatttagaagaaaatttt

SEQ ID NO: 2186 - DNA (genomic), 606 bp, Helicobacter pylori; double-stranded, circular
  misc_feature (B) LOCATION 1...606
  hypothetical: NO
  anti-sense: NO
ccggtggtggttttagaagaaagcgtgcgtaagcgtttgcccgaaacagcgatcaaggccgctaaatacatcggctatgtgggggcggggacttttgaatttttgcttgattctaacatgaaagatttttatttcatggagatgaacactcgtttgcaagtggaacacaccattagcgaaatggtgagcgggttaaacctcattgagtggatgattaaaatcgctcaaggcgaagaattgcccaagcaagaaagcttttctctcaaagggcatgcgatagaatgccgaatcacagcagaagatcctaaaaaattctacccaagcccgggcaaaatcaccgaatggatcgcccctggtggggtgaatgtgcgccttgattcgcatgcgcatgccaattatgtcgtgcctacgaactatgattccatgataggcaagctcattgtgtggggtgaaaacagagaaagagcgatcgctaagatgaaaagggctttaaaggaatttaaagtagaaggcattaaaacgaccattccttttcatattgaaatgcttgaaaatgcggatttcaggcaagcaaaaatccacacgaagtatttagaagaaaatttt

SEQ ID NO: 2187 - DNA (genomic), 1083 bp, Helicobacter pylori; double-stranded, circular
  misc_feature (B) LOCATION 1...1083
  hypothetical: NO
  anti-sense: NO
ttgagtgaaaatcaaaactttgtagagatttgctcgcaccattctttagagtttattggcccaagcgcaaaagtcatggctttaatgagcgataaagctaaagccaaaatcgtgatgaaagaagccggcatgcctgtgattgagggcagtgatgggttgcttaaaagctatcaagaagctgaagaaatcgctgataaaatcggttatcctgtcatcattaaagcggccgctggtgggggcggaaggggaatgcgcgtcgtaggagataaatccaagcttaaaaacctctatctagccgcagaaacggaagctttgagcgcgtttggcgatgggagcgtgtatttagaaaaatttatcaacaagcccaagcacattgaagtccaaattttagccgacaagcatggcaatgtcattcatgtaggcgaaagggattgttcggtgcaaagacgccagcaaaagctcattgaagaaaccccggcggtggttttagaagaaagcgtgcgtaagcgtttgctagaaacagcgatcaaggccgctaaatacatcggctatgtgggggcggggacttttgaatttttgcttgattctaacatgaaagatttttatttcatggagatgaacactcgtttgcaagtggaacacaccattagcgaaatggtgagcgggttaaacctcattgagtggatgattaaaatcgctcaaggcgaagaattgcccaagcaagaaagcttttctctcaaagggcatgcgatagaatgccgaatcacagcagaagatcctaaaaaattctacccaagcccgggcaaaatcaccgaatggatcgcccctggtggggtgaatgtgcgccttgattcgcatgcgcatgccaattatgtcgtgcctacgaactatgattccatgataggcaagctcattgtgtggggtgaaaacagagaaagagcgatcgctaagatgaaaagggctttaaaggaatttaaagtagaaggcattaaaacgaccattccttttcatattgaaatgcttgaaaatgcggatttcaggcaagcaaaaatccacacgaagtatttagaagaaaatttttaa

SEQ ID NO: 2188 - DNA (genomic), 1266 bp, Helicobacter pylori; double-stranded, circular
  misc_feature (B) LOCATION 1...1266
  hypothetical: NO
  anti-sense: NO
atgggtaaagaatccatagccatttattctatcgctgacaaggacgcccactatctcaatacggctaacgcaaaagtgtgtatagggggggcaaaatccagcgagagttacttgaatatccctgcgatcatcagcgcggcggaattgtttgaagccgatgcgattttccctgggtatgggtttttgagtgaaaatcaaaactttgtagagatttgctcgcaccattctttagagtttattggcccaagcgcaaaagtcatggctttaatgagcgataaagctaaagccaaaatcgtgatgaaagaagccggcatgcctgtgattgagggcagtgatgggttgcttaaaagctatcaagaagctgaagaaatcgctgataaaatcggttatcctgtcatcattaaagcggccgctggtgggggcggaaggggaatgcgcgtcgtaggagataaatccaagcttaaaaacctctatctagccgcagaaacggaagctttgagcgcgtttggcgatgggagcgtgtatttagaaaaatttatcaacaagcccaagcacattgaagtccaaattctagccgacaagcatggcaatgtcattcatgtaggcgaaagggattgttcggtgcaaagacgccagcaaaagctcattgaagaaaccccggcggtggttttagaagaaagcgtgcgtaagcgtttgctagaaacagcgatcaaggccgctaaatacatcggctatgtgggggcggggacttttgaatttttgcttgattctaacatgaaagatttttatttcatggagatgaacactcgtttgcaagtggaacacaccattagcgaaatggtgagcgggttaaacctcattgagtggatgattaaaatcgctcaaggcgaagaattgcccaagcaagaaagcttttctctcaaagggcatgcgatagaatgccgaatcacagcagaagatcctaaaaaattctacccaagcccgggcaaaatcaccgaatggatcgcccctggtggggtgaatgtgcgccttgattcgcatgcgcatgccaattatgtcgtgcctacgaactatgattccatgataggcaagctcattgtgtggggtgaaaacagagaaagagcgatcgctaagatgaaaagggctttaaaggaatttaaagtagaaggcattaaaacgaccattccttttcatattgaaatgcttgaaaatgcggatttcaggcaagcaaaaatccacacgaagtatttagaagaaaatttttaa

SEQ ID NO: 2189 - DNA (genomic), 516 bp, Helicobacter pylori; double-stranded, circular
  misc_feature (B) LOCATION 1...516
  hypothetical: NO
  anti-sense: NO
aggataatcatgcaatacgcgctattatttccagggcaaggctcgcaatgtataggaatggggaaatcgttctatgagagccacaccctagctaaagaattgtttgaaagggcttctaacgtgcttaaagtggatatgaaaaaaacgctttttgaagaaaacgagcttttaaaagagagcgcttacacccagcctgccatttatttagtgagctatatcgcttaccaactgctcaacaagcaagcaaatggggggttaaaacccgtttttgctttagggcattcgctcggcgaagtgagcgcggtgtctttgagtggggcgttagattttgaaaaagcccttaaactcacgcaccaaagaggcaaaatgatgcaagaagcgtgcgcgaataaagacgcttccatgatggtcgttttgggcgtttttgaagaaagctctttgagtttgtgccaaaggaccaaaaattttttgttgcgcgaatttcaatggcggcatgcaagtggttttagccggggt

SEQ ID NO: 2190 - DNA (genomic), 930 bp, Helicobacter pylori; double-stranded, circular
  misc_feature (B) LOCATION 1...930
  hypothetical: NO
  anti-sense: NO
atgcaatacgcgctattatttccagggcaaggctcgcaatgtataggaatggggaaatcgttctatgagagccacaccctagctaaagaattgtttgaaagggcttctaacgtgcttaaagtggatatgaaaaaaacgctttttgaagaaaacgagcttttaaaagagagcgcttacacccagcctgccatttatttagtgagctatatcgcttaccaactgctcaacaagcaagcaaatggggggttaaaacccgtttttgctttagggcattcgctcggcgaagtgagcgcggtgtctttgagtggggcgttagattttgaaaaagcccttaaactcacgcaccaaagaggcaaaatgatgcaagaagcgtgcgcgaataaagacgcttccatgatggtcgttttgggcgtttctgaagaaagccttttgagtttgtgccaaagaaccaaaaatgtgtggtgcgcgaatttcaatggcggcatgcaagtggttttagccggggttaaagacgatttgaaagccctagagccgactttaaaggaaatgggggctaaaagagtggtttttttagaaatgagcgtggcgagtcattgcccttttttagagcctatgatttttaaattccaggaattgctagaaaaaagcctgaaagataaattccattttgaaatcatctccaatgcgactaacgaagcgtatcacaacaaatcaaaagccgttgaattattgagcttgcaactcactcagccggtgcgttatcaagactgcgtgaaatctaacaacgaccgagtggatgttttttttgaattaggctgtgggagtgtgttaaaggggcttaacaagcgattgagcaataagcccaccataagcgtgggggataataaagggcttgatgaagccattgagtttttagaagaatacgtgtga

SEQ ID NO: 2191 - DNA (genomic), 777 bp, Helicobacter pylori; double-stranded, circular
  misc_feature (B) LOCATION 1...777
  hypothetical: NO
  anti-sense: NO
atgagtcttgctccaagcgttatggcgggcttcttgttttgtgccggctcttgctcgcttcgcttccctaattattctaaaatcatttccatagatgtggatacggtgtttttaggcgatgttgcaagcgcttattttgcgctggataatgaacccactaaattgcttggcatggtgagagacactttttcccaccttccttttgaagccttttgtgatttttgcgaacgcacatgcaagaattttaaaattgatcttttgcgctttagccaaaacgaattaaaacgcatccatcagggctttaacatgggctttttggtggcgaatttagatttatggcgcgaaaatgggtttgaaaaaatcgctttagagtttttgaaaactaggggaaaggatcttttctaccctgagcagtgtttaatcaatatggtgtttttagagcgtattttagaattgcctattcattataattgctattctgattttttcaaagagcactaccctaaaagtatcatcatgctccatttcatcaaatacaagccgtggcgttctgtcagttctttgaacgggcgtttgatttgctatgaagctgaagcgagtttttggctcgccaaccttttttgcaccccttttaaaaacgatttttttaaagaacgccttgaaatggctaaagaccaacaaatgcaatcttttaaaacccacatccgatcaaaaacgattagggattatttttattttaggataaaaaatattttgaaaaaagttttcgaactctct

SEQ ID NO: 2192 - DNA (genomic), 966 bp, Helicobacter pylori; double-stranded, circular
  misc_feature (B) LOCATION 1...966
  hypothetical: NO
  anti-sense: NO
ccccttaaatcaaaggcaagcaaacttttaggcgctaacatcgtgtataaaatccattgtttggttaaaggggtaactttagagcagcaaaacaagcttttaaaaaccattgagccttttaaaaaattcgcttcattagagtttatagacatcaattcgctagattattccatagaaagctatcttaatgagtcttgctccaagcgttatggcgggcttcttgttttgtgccggctcttgctcgcttcgctcttccctaattattctaaaatcatttccatagatgtggatacggtgtttttaggcgatgttgcaagcgcttattttgcgctggataatgaacccactaaattgcttggcatggtgagagacactttttcccaccttccttttgaagccttttgtgatttttgcgaacgcacatgcaagaattttaaaattgatcttttgcgctttagccaaaacgaattaaaacgcatccatcagggctttaacatgggctttttggtggcgaatttagatttatggcgcgaaaatgggtttgaaaaaatcgctttagagtttttgaaaactaggggaaaggatcttttctaccctgagcagtgtttaatcaatatggtgtttttagagcgtattttagaattgcctattcattataattgctattctgattttttcaaagagcactaccctaaaagtatcatcatgctccatttcatcaaatacaagccgtggcgttctgtcagttctttgaacgggcgtttgatttgctatgaagctgaagcgagtttttggctcgccaaccttttttgcaccccttttaaaaacgatttttttaaagaacgccttgaaatggctaaagaccaacaaatgcaatcttttaaaacccacatccgatcaaaaacgattagggattatttttattttaggataaaaaatattttgaaaaaagttttcgaactctct

SEQ ID NO: 2193 - DNA (genomic), 1104 bp, Helicobacter pylori; double-stranded, circular
  misc_feature (B) LOCATION 1...1104
  hypothetical: NO
  anti-sense: NO
atggatacgcaaaacttatccgatcaaattatccctatttttatgagttttgataagaattacgcgctaggggcaggcgtgagcctttattctttactctcccatgcgagcaggcacacaagcatgatagattttagccccttaaatcaaagcaacaaacttttaggcgctaacatcgtgtataaaatccattgtttggttaaaggggtaactttagagcagcaaaacaagcttttaaaaaccattgagccttttaaaaaattcgcttcattagagtttatagacatcaattcgctagatcattccatagaaagctatcttaatgagtcttgctccaagcgttatggcgggcttcttgttttgtgccggctcttgctcgcttcgctcttccctaattattctaaaatcatttccatagatgtggatacggtgtttttaggcgatgttgcaagcgcttattttgcgctggataatgaacccactaaattgcttggcatggtgagagacactttttcccaccttccttttgaagccttttgtgatttttgcgaacgcacatgcaagaattttaaaattgatcttttgcgctttagccaaaacgaattaaaacgcatccatcagggctttaacatgggctttttggtggcgaatttagatttatggcgcgaaaatgggtttgaaaaaatcgctttagagtttttgaaaactaggggaaaggatcttttctaccctgagcagtgtttaatcaatatggtgtttttagagcgtattttagaattgcctattcattataattgctattctgattttttcaaagagcactaccctaaaagtatcatcatgctccatttcatcaaatacaagccgtggcgttctgtcagttctttgaacgggcgtttgatttgctatgaagctgaagcgagtttttggctcgccaaccttttttgcaccccttttaaaaacgatttttttaaagaacgccttgaaatggctaaagaccaacaaatgcaatcttttaaaacccacatccgatcaaaaacgattagggattatttttattttaggataaaaaatattttgaaaaaagttttcgaactctcttaa

SEQ ID NO: 2194 - DNA (genomic), 1083 bp, Helicobacter pylori; double-stranded, circular
  misc_feature (B) LOCATION 1...1083
  hypothetical: NO
  anti-sense: NO
atgcccacgattttagtgagcgctttagaagcgagctctaatattcatttagaggagttacggcacaatttgcctaaagattatcgtttcattggcgtgtttgaaagcaaagaggcgctctatagccctagggaattttctatcatgggttttagagatgtgataggccgtttggggtttttactcaaagcccataaagaaatggtccaattagccaaacaagcggatatggtacttttaatggattcttcttcttttaatatccccttagccaaaaaaatcaaaaaacaagaccctcataaaaaaatcatgtattatattttaccgcaagtttgggcatggaaaaaatggcgcgctaaaagccttgaaaaatactgcgactttttgggggcgattttgccttttgaagtgggctattaccaaaaaaaagcccaatatgtgggacaccctttattagatgaaattaaatattataaaaaagatattaagggcgaaactctggtgtttatgccagggagtcgaaaaagcgaaatcgctaaaatgttccctttgtttgtcaaagcggctcaaattttagaacaaaacgaagggtttaaaaggcgtgtgttggtcgtgccgagtttctttaaggggttggatttgaaagctctttatggagaagacatcaaactatttgaaatttcttatgatgcgcataagagtttgtttgaagcggagtttgcgttcatttgcagcggcacagcgactttagaggccgctttgattggcacgccttttgcgctagcgtatagggctaaaacgatggattttttgatcgctagaatgttggtcaatttgcattatatagggctcgctaacattttttataacgccttaaataatgaaactccagggcttggggagagccaattgcacccagaattgatccagcattttttgagcgtagagggtttgttaaaagcgtatgaagaaatggatagggaacgctattttaaagaaagtttgagattaagggaatatttaaaacatgggagcgcgagaaaaatcgccgaagagatggcttttttgctgaatttaacttaa

SEQ ID NO: 2195 - DNA (genomic), 1125 bp, Helicobacter pylori; double-stranded, circular
  misc_feature (B) LOCATION 1...1125
  hypothetical: NO
  anti-sense: NO
agaaatcaagctctatcaagtccaaaaccttttgaaagacaaataatgcccacgattttagtgagcgctttagaagcgagctctaatattcatttagaggagttacggcacaatttgcctaaagattatcgtttcattggcgtgtttgaaagcaaagaggcgctctatagccctagggaattttctatcatgggttttagagatgtgataggccgtttggggtttttactcaaagcccataaagaaatggtccaattagccaaacaagcggatatggtacttttaatggattcttcttcttttaatatccccttagccaaaaaaatcaaaaaacaagaccctcataaaaaaatcatgtattatattttaccgcaagtttgggcatggaaaaaatggcgcgctaaaagccttgaaaaatactgcgactttttgggggcgattttgccttttgaagtgggctattaccaaaaaaaagcccaatatgtgggacaccctttattagatgaaattaaatattataaaaaagatattaagggcgaaactctggtgtttatgccagggagtcgaaaaagcgaaatcgctaaaatgttccctttgtttgtcaaagcggctcaaattttagaacaaaacgaagggtttaaaaggcgtgtgttggtcgtgccgagtttctttaaggggttggatttgaaagctctttatggagaagacatcaaactatttgaaatttcttatgatgcgcataagagtttgtttgaagcggagtttgcgttcatttgcagcggcacagcgactttagaggccgctttgattggcacgccttttgcgctagcgtatagggctaaaacgatggattttttgatcgctagaatgttggtcaatttgcattatatagggctcgctaacattttttataacgccttaaataatgaaactccagggcttggggagagccaattgcacccagaattgatccagcattttttgagcgtagagggtttgttaaaagcgtatgaagaaatggatagggaacgctattttaaagaaagtttgagattaagggaatatttaaaacatgggagcgcgagaaaaatcgccgaagagatggcttttttgctgaatttaact

SEQ ID NO: 2196 - DNA (genomic), 735 bp, Helicobacter pylori; double-stranded, circular
  misc_feature (B) LOCATION 1...735
  hypothetical: NO
  anti-sense: NO
atgaaaaaagcgggttttctttttttggcggcgatggctatcattgttgtgagtttaaacgccaaagatccgaatgtgttgcgtaagattgtttttgagaaatgtttgcctaattatgagaaaaatcaaaatccttcaccatgcatagaagtcaaacccgacgccggctatgtggttttaaaagatattaacggtccgttgcaatatttgttgatgccaacgactcacattagtggcattgaaaaccctttgttgcttgatccttctacgcctaactttttttacttgtcatggcaagcgcgcgattttatgagtaaaaaatacggaaaacccattcctgattatgcgatctctttgacgatcaattctaaaaaagggcgatcgcaaaaccattttcacatccatatttcttgcattagccttgatgtgcgcaaacagctggataataatctaaaaaatatcaacagccgttggtcgccattatcaggtggcttgaacgggcataaatatttggcgcgtcgggtaacagagagcgaattagcgcaaaaaagcccgtttgtcatgcttgctaaagaagtgcctaacgcgcacaaacgcatgggagactatggcttggcggtggtgcaacagagcgataactcctttgtcttgttagcgacacaatttaacccattgactttaaatcgcgcttcagccgaagagattcaagatcatgaatgcgcgattttgcgttaa

SEQ ID NO: 2197 - DNA (genomic), 894 bp, Helicobacter pylori; double-stranded, circular
  misc_feature (B) LOCATION 1...894
  hypothetical: NO
  anti-sense: NO
ttagtattcaaaaagcccttttttaaaaataggttactaaacgttactaataagttaaaattcgtgaaaataaccataatgattaaagattttaaccactattgtagaaaaataacgagagggtttgtaaaaattcccaccaaaaaacaaggagcaaaaaagatgaaaaaagcgggttttctttttttggcggcgatggctatcattgttgtgagtttaaacgccaaagatccgaatgtgttgcgtaagattgtttttgagaaatgtttgcctaattatgagaaaaatcaaaatccttcaccatgcatagaagtcaaacccgacgccggctatgtggttttaaaagatattaacggtccgttgcaatatttgttgatgccaacgactcacattagtggcattgaaaaccctttgttgcttgatccttctacgcctaactttttttacttgtcatggcaagcgcgcgattttatgagtaaaaaatacggaaaacccattcctgattatgcgatctctttgacgatcaattctaaaaaagggcgatcgcaaaaccattttcacatccatatttcttgcattagccttgatgtgcgcaaacagctggataataatctaaaaaatatcaacagccgttggtcgccattatcaggtggcttgaacgggcataaatatttggcgcgtcgggtaacagagagcgaattagcgcaaaaaagcccgtttgtcatgcttgctaaagaagtgcctaacgcgcacaaacgcatgggagactatggcttggcggtggtgcaacagagcgataactcctttgtcttgttagcgacacaatttaacccattgactttaaatcgcgcttcagccgaagagattcaagatcatgaatgcgcgattttgcgt

SEQ ID NO: 2198 - DNA (genomic), 879 bp, Helicobacter pylori; double-stranded, circular
  misc_feature (B) LOCATION 1...879
  hypothetical: NO
  anti-sense: NO
atgaaacgaagggattttattaaaacgactgctttaggcgctacaggtgctgttttaggagcacagattttgcaggcagaagaaagcaaagggagtgttgcaaaaaaatataaaatagaggctgagtacagcattgattttgattctgcagaacacacttcgcttttcattcccatgccgagcgttgcagcgagcaatgtgcatttacaaggcaatcatgctagctatgaaagcatgctcaattttggagtgccttatttgcaagtggaatttttaaaaagcactcaaaaaaaacgagtccatttgtcgtatgagatcgctagctatcaattgaatgagcgtttgtttgatgcgagcgattttgtagcaatggggcgttatgaaagagacgatgcgagcgtggctaatattgccaaccagctcaagggagcaacccctaaagaaagcgtccgtaatttttatgcgttcatcaagcatgatatgcctaagagacaaaaggctttagagggtaaagaaaatttacctaaacgagatagtttgccctggtttgcaaccatttcacaagagagcatgtttgtgtccttatgccatgcgtgcgggattaaaagcgctgaagtgcaaggcttgaaattggctcaaaacagcgtggtggaaaacgcttctagagtggaagtgtatttgaaagattccttgttagcgtttgattttcaaaataatcacaaggaagtctttatcccgttgaaccgccataaagacatgcaattagatactgccttgttggcgacttttggcgatgcctttgcccttgtagatggtagggatttaggcaattacgagagcaaactttttgaaaaaagagtgtcctatacgattgtctaa

SEQ ID NO: 2199 - DNA (genomic), 888 bp, Helicobacter pylori; double-stranded, circular
  misc_feature (B) LOCATION 1...888
  hypothetical: NO
  anti-sense: NO
agagttatagttatgaaacgaagggattttattaaaacgactgctttaggcgctacaggtgctgttttaggagcacagattttgcaggcagaagaaagcaaagggagtgttgcaaaaaaatataaaatagaggctgagtacagcattgattttgattctgcagaacacacttcgcttttcattcccatgccgagcgttgcagcgagcaatgtgcatttacaaggcaatcatgctagctatgaaagcatgctcaattttggagtgccttatttgcaagtggaatttttaaaaagcactcaaaaaaaacgagtccatttgtcgtatgagatcgctagctatcaattgaatgagcgtttgtttgatgcgagcgattttgtagcaatggggcgttatgaaagagacgatgcgagcgtggctaatattgccaaccagctcaagggagcaacccctaaagaaagcgtccgtaatttttatgcgttcatcaagcatgatatgcctaagagacaaaaggctttagagggtaaagaaaatttacctaaacgagatagtttgccctggtttgcaaccatttcacaagagagcatgtttgtgtccttatgccatgcgtgcgggattaaaagcgctgaagtgcaaggcttgaaattggctcaaaacagcgtggtggaaaacgcttctagagtggaagtgtatttgaaagattccttgttagcgtttgattttcaaaataatcacaaggaagtctttatcccgttgaaccgccataaagacatgcaattagatactgccttgttggcgacttttggcgatgcctttgcccttgtagatggtagggatttaggcaattacgagagcaaactttttgaaaaaagagtgtcctatacgattgtc

SEQ ID NO: 2200 - DNA (genomic), 153 bp, Helicobacter pylori; double-stranded, circular
  misc_feature (B) LOCATION 1...153
  hypothetical: NO
  anti-sense: NO
gtgaatttttacctttcgcccaaagattaccaccactaccacgccccttgcgatttagaaattttagaggctcgttattttgcggggaaattactaccagtcaataagccctcattacacaaaaaacaaaatctgtttgtgggcaatgaaagg

SEQ ID NO: 2201 - DNA (genomic), 381 bp, Helicobacter pylori; double-stranded, circular
  misc_feature (B) LOCATION 1...381
  hypothetical: NO
  anti-sense: NO
aggctcgttattttgcggggaaattactaccagtcaataagccctcattacacaaaaacaaaaatctgtttgtgggcaatgaaagggtcgcgcttgttgcaaaagacgattcaaggcaataagttgtattttgtagcggtgggagcgttaaatgtgggtaaaatgcgttttaattttgataagaatatccaaactaacgctaaagcccgtttcatgcaaacctattcttacaacccgccgattaaagtgaaaaagggggataatttagggaattttgaaatgggctctactatcgttttattcattcaaaacaccgcttttaaagatttgaaagaaaaaagcgtgaagtttggggaaagtataggggaatttcatgccaac

SEQ ID NO: 2202 - DNA (genomic), 579 bp, Helicobacter pylori; double-stranded, circular
  misc_feature (B) LOCATION 1...579
  hypothetical: NO
  anti-sense: NO
gggcgaggtggaatttatattgaacatggcagggttaaaatggtagctttaagcaacgctctttcaagggtttttggttctgtggctggctataaattcccttcttttatccaaaaaagcatcaacgctctttatgttaagatctttaaaattgatttgagcgagtttgagcctttagaaaattataagagtttgaacgctcttttcatgcgctctttaaaaaaagaacgcccctttgacaaagcccctaatatttgcattgcgccttgcgatgctttaatcactgaatgcgcttttttagacaacgatagcgctttacaaattaaaggcatgccctataaagcgcatgaattagtgggcgaaatcaaccccttaagcccttcttttttctatgtgaatttttacctttcgcccaaagattaccaccactaccacgccccttgcgatttagaaattttagaggctcgttattttgcggggaaattactaccagtcaataagccctcattacacaaaaacaaaaatctgtttgtgggcaatgaaagggtcgcgcttgttgcaaaagacgattcaaggcaa

SEQ ID NO: 2203 - DNA (genomic), 804 bp, Helicobacter pylori; double-stranded, circular
  misc_feature (B) LOCATION 1...804
  hypothetical: NO
  anti-sense: NO
atggtagctttaagcaacgctctttcaagggtttttggttctgtggctggctataaattcccttcttttatccaaaaaagcatcaacgctctttatgttaagatctttaaaattgatttgagcgagtttgagcctttagaaaattataagagtttgaacgctcttttcatgcgctctttaaaaaaagaacgcccctttgacaaagcccctaatatttgcattgcgccttgcgatgctttaatcactgaatgcgcttttttagacaacgatagcgctttacaaattaaaggcatgccctataaagcgcatgaattagtgggcgaaatcaaccccttaagcccttcttttttctatgtgaatttttacctttcgcccaaagattaccaccactaccacgccccttgcgatttagaaattttagaggctcgttattttgcggggaaattactaccagtcaataagccctcattacacaaaaacaaaaatctgtttgtgggcaatgaaagggtcgcgcttgttgcaaaagacattcaaggcaataagttgtattttgtagcggtgggagcgttaaatgtgggtaaaatgcgttttaattttgataagaatatccaaactaacgctaaagcccgtttcatgcaaacctattcttacaacccgccgattaaagtgaaaaagggggataatttagggaattttgaaatgggctctactatcgttttattcattcaaaacaccgcttttaaagatttgaaagaaaaaagcgtgaagtttggggaaagtataggggaatttcatgccaactga

SEQ ID NO: 2204 - DNA (genomic), 228 bp, Helicobacter pylori; double-stranded, circular
  misc_feature (B) LOCATION 1...228
  hypothetical: NO
  anti-sense: NO
atggaattttacgcctctcttaaatccattgcgatgcatgttccaagcgagcgtgtgaaaaatgcagagttccagcaatttttggataccagcgatgaatggatagaaaaaaggaccggtatcaaagagcgccgtttcgctaacgatgaagaaaaaagcagcgatttaggggtaatagcggctaagcaggccatagagagagcgcatttgactccacaagacatttga

SEQ ID NO: 2205 - DNA (genomic), 429 bp, Helicobacter pylori; double-stranded, circular
  misc_feature (B) LOCATION 1...429
  hypothetical: NO
  anti-sense: NO
gtggaaatgatccacacgcaagattacattaaaatggaagaagccgccactgaggcgattaagcgtaaggaatcttccatttacttgggcatggatattttaaaaaatggggctgacgctttgatttcagcggggcatagcggggcgactatgggtttagcgaccttgcgtttagggcgtatcaagggggttgaaaggcctgctatttgcactttaatgcctagcgttggcaaacgccctagcgtgctattagacgcaggagcgaacacggattgcaagcctgaatatttgattgattttgctctcatggggtatgaatacgctaaaagcgtgttgcattatgacagccctaaagtgggtcttttgagtaatggtgaagaagatattaaggggggaatacgctcgttaaagaaacgcataaaatgttga

SEQ ID NO: 2206 - DNA (genomic), 1020 bp, Helicobacter pylori; double-stranded, circular
  misc_feature (B) LOCATION 1...1020
  hypothetical: NO
  anti-sense: NO
atgaaaattgtaatagacttaatgggggctgaccatggggttttacccattattgagggagtctcaagggctttagagaataagagttttagcgtggttttagtgggggataaagacaaagcgaccccttttatttctaaagagttagccagcaaagtggaaatgatccacacgcaagattacattaaaatggaagaagccgccactgaggcgattaagcgtaaggaatcttccatttacttgggcatggatattttaaaaaatggggctgacgctttgatttcagcggggcatagcggggcgactatgggtttagcgaccttgcgtttagggcgtatcaagggggttgaaaggcctgctatttgcactttaatgcctagcgttggcaaacgccctagcgtgctattagacgcaggagcgaacacggattgcaagcctgaatatttgattgattttgctctcatggggtatgaatacgctaaaagcgtgttgcattatgacagccctaaagtgggtcttttgagtaatggtgaagaagatattaaggggaatacgctcgttaaagaaacgcataaaatgttgaaagcttatgactttttttatggcaatgtggaggggagcgatattttcaaaggggttgtggatgtagtggtttgcgatggctttatggggaatgtggtcttaaagacaactgaaggggtcgctagtgcgataggctctatttttaaagatgaaattaaaagctcttttaaatctaaaatgggggctttgatgcttaagaacgcgtttggtattttaaaacaaaaaaccgattacgctgaatatgggggagcaccgcttttgggcgtgaataaaagcgtgatcattagccatggcaagagcaacgctagagcggttgaatgcgcgatttatcaggctattagcgctgttgaaagtcaggtttgtttgaggattactcaagcgtttgagagtttgaaatctcaatcttttgagagccaaagcgatcaacaagacgcttaa

SEQ ID NO: 2207 - DNA (genomic), 1026 bp, Helicobacter pylori; double-stranded, circular
  misc_feature (B) LOCATION 1...1026
  hypothetical: NO
  anti-sense: NO
ggacgcatgatgaaaattgtaatagacttaatgggggctgaccatggggttttacccattattgagggagtctcaagggctttagagaataagagttttagcgtggttttagtgggggataaagacaaagcgaccccttttatttctaaagagttagccagcaaagtggaaatgatccacacgcaagattacattaaaatggaagaagccgccactgaggcgattaagcgtaaggaatcttccatttacttgggcatggatattttaaaaaatggggctgacgctttgatttcagcggggcatagcggggcgactatgggtttagcgaccttgcgtttagggcgtatcaagggggttgaaaggcctgctatttgcactttaatgcctagcgttggcaaacgccctagcgtgctattagacgcaggagcgaacacggattgcaagcctgaatatttgattgattttgctctcatggggtatgaatacgctaaaagcgtgttgcattatgacagccctaaagtgggtcttttgagtaatggtgaagaagatattaaggggaatacgctcgttaaagaaacgcataaaatgttgaaagcttatgactttttttatggcaatgtggaggggagcgatattttcaaaggggttgtggatgtagtggtttgcgatggctttatggggaatgtggtcttaaagacaactgaaggggtcgctagtgcgataggctctatttttaaagatgaaattaaaagctcttttaaatctaaaatgggggctttgatgcttaagaacgcgtttggtattttaaaacaaaaaaccgattacgctgaatatgggggagcaccgcttttgggcgtgaataaaagcgtgatcattagccatggcaagagcaacgctagagcggttgaatgcgcgatttatcaggctattagcgctgttgaaagtcaggtttgtttgaggattactcaagcgtttgagagtttgaaatctcaatcttttgagagccaaagcgatcaacaagacgct

SEQ ID NO: 2208 - DNA (genomic), 222 bp, Helicobacter pylori; double-stranded, circular
  misc_feature (B) LOCATION 1...222
  hypothetical: NO
  anti-sense: NO
gtgctagttaggggcttaagggtggtgagcgattttgaatacgaattgcaaatgggctatgcgaacaaatccttaaaccacgaattagagaccttgtatttcatgcccactttacaaaacgctttcatcagctcttctatcgtgcgatccattatcgcgcataagggcgatgcgagccatttagtgcctaaagaaatttacccttttatttcaaaggtttaa

SEQ ID NO: 2209 - DNA (genomic), 237 bp, Helicobacter pylori; double-stranded, circular
  misc_feature (B) LOCATION 1...237
  hypothetical: NO
  anti-sense: NO
atgcaaaaaatcggcatttacccgggcacttttgatccggtcactaacgggcatatagacatcatccaccgatccagcgaattgtttgaaaagctcattgtggctgtggcgcactcaagcgctaaaaaccccatgtttagtttagatgagcgcttaaaaatgatgcaactggccactaaaagttttaaaaatgtagaatgcgttgcgtttgaggggctattaagccgatctggctaa

SEQ ID NO: 2210 - DNA (genomic), 249 bp, Helicobacter pylori; double-stranded, circular
  misc_feature (B) LOCATION 1...249
  hypothetical: NO
  anti-sense: NO
gccgatctggctaaagagtatcattgcaaagtgctagttaggggcttaagggtggtgagcgattttgaatacgaattgcaaatgggctatgcgaacaaatccttaaaccacgaattagagaccttgtatttcatgcccactttacaaaacgctttcatcagctcttctatcgtgcgatccattatcgcgcataagggcgatgcgagccatttagtgcctaaagaaatttacccttttatttcaaaggtt

SEQ ID NO: 2211 - DNA (genomic), 261 bp, Helicobacter pylori; double-stranded, circular
  misc_feature (B) LOCATION 1...261
  hypothetical: NO
  anti-sense: NO
cttatacccaccatggggaatgaactgatgcaaaaaatcggcatttacccgggcacttttgatccggtcactaacgggcatatagacatcatccaccgatccagcgaattgtttgaaaagctcattgtggctgtggcgcactcaagcgctaaaaaccccatgtttagtttagatgagcgcttaaaaatgatgcaactggccactaaaagttttaaaaatgtagaatgcgttgcgtttgaggggctattaagccgatctggc

SEQ ID NO: 2212 - DNA (genomic), 180 bp, Helicobacter pylori; double-stranded, circular
  misc_feature (B) LOCATION 1...180
  hypothetical: NO
  anti-sense: NO
atgtgtatgcggcatttccctaataagcccattttcccgggcgttttgatcgtagagggcatggcgcaaacgggagggtttttagctttcactagcttgtgggggtttgaccctgaaatagccaaacaaaaaaaatccgtgtatttcatgacgattgacaaggttaaattccgcattcct

SEQ ID NO: 2213 - DNA (genomic), 480 bp, Helicobacter pylori; double-stranded, circular
  misc_feature (B) LOCATION 1...480
  hypothetical: NO
  anti-sense: NO
atggaacaaagccatcaaaacttacaatctcaattttttatagagcatatcttacagattttacctcaccgctaccccatgctcttagtggataggattatagagttacaagccaatcaaaaaattgtcgcttataagaatatcacttttaatgaagatgtgtttaacgggcatttccctaataagcccattttcccgggcgttttgatcgtagagggcatggcgcaaacgggagggtttttagctttcactagcttgtgggggtttgaccctgaaatagccaaaacaaaaatcgtgtatttcatgacgattgacaaggttaaattccgcattcctgtaaccccaggcgacagattagaataccatttagaagtcttaaagcataagggcatgatctggcaagtgggcggcacggctcaagtggatggcaaagtggtcgctgaagccgaattaaaagccatgatcgcagagagagaataa

SEQ ID NO: 2214 - DNA (genomic), 315 bp, Helicobacter pylori; double-stranded, circular
  misc_feature (B) LOCATION 1...315
  hypothetical: NO
  anti-sense: NO
gtgaaacgctttgaaatgaggtttttagagcgttttttatcaccaagcgagattgttttatgcaaggataaatccagcagtatcgctgggtttttcgcgcttaaagaggcttgctctaaagcccttcaagtgggcattggtaaggaattgagctttttagatatgcgtatttctaaaagccctaaaaatgcccccttaatcaccctttccaaagaaaaaatggactattttaacatccaaagcttgagcgcgagcatcagccatgacgctggttttgcgatagcggttgtaatggtttcttcgtcaaatttataa

SEQ ID NO: 2215 - DNA (genomic), 360 bp, Helicobacter pylori; double-stranded, circular
  misc_feature (B) LOCATION 1...360
  hypothetical: NO
  anti-sense: NO
atgattggcatagatattgtctctattgctaggatagaaaagtgcgtgaaacgctttgaaatgaggtttttagagcgttttttatcaccaagcgagattgttttatgcaaggataaatccagcagtatcgctgggtttttcgcgcttaaagaggcttgctctaaagcccttcaagtgggcattggtaaggaattgagctttttagatatgcgtatttctaaaagccctaaaaatgcccccttaatcaccctttccaaagaaaaaatggactattttaacatccaaagcttgagcgcgagcatcagccatgacgctggttttgcgatagcggttgtaatggtttcttcgtcaaatttataa

SEQ ID NO: 2216 - DNA (genomic), 357 bp, Helicobacter pylori; double-stranded, circular
  misc_feature (B) LOCATION 1...357
  hypothetical: NO
  anti-sense: NO
atgattggcatagatattgtctctattgctaggatagaaaagtgcgtgaaacgctttgaaatgaggtttttagagcgttttttatcaccaagcgagattgttttatgcaaggataaatccagcagtatcgctgggtttttcgcgcttaaagaggcttgctctaaagcccttcaagtgggcattggtaaggaattgagctttttagatatgcgtatttctaaaagccctaaaaatgcccccttaatcaccctttccaaagaaaaaatggactattttaacatccaaagcttgagcgcgagcatcagccatgacgctggttttgcgatagcggttgtaatggtttcttcgtcaaattta

SEQ ID NO: 2217 - DNA (genomic), 870 bp, Helicobacter pylori; double-stranded, circular
  misc_feature (B) LOCATION 1...870
  hypothetical: NO
  anti-sense: NO
atgggatttgcagatttctttaaaaattttaagatcaataaattgcggacaacaccaagtaaggaagaacagccaagccattgggtgaaatgccctaaatgttatgcgttaatgtattataaagaagtgtttggcaaatacagcgtgtgcttgaaatgccattaccatttccgcatgaacgcgactgaaaggattgaatttttatgcgatgtggggagttttgaagagtttgacaaacacttacggcctaatgatcctttaaattttgtggataaagagagctataaacaacgcattaaaaaatacgaaaaaaggactaaccgcccaagttcagtgatcagcggtgaggctaaaatcaaccgcatgcctttgcagatcgtggtgtttgattttagctttatgggggggagtttaggctctgtggaaggcgaaaagatcgtaagagcgatcaatcgtgcggtcgctaaaaaagaagcgttgttgatcgtttcagcgagtgggggggctaggatgcaagaatccacttattcgctcatgcaaatggctaaaacgagcgcggctttgaaccgattgagtgaggccaaactccctttcatttcgctcttaagcgatcccacttatgggggcgttagcgcgtcttttgcttttttaggggatctcatcatcgcagagccaggggcgatgataggttttgcagggcctagggtgattaagcaaactataggggcggatttgcctgagggctttcaaacggcggaatttttattagagcatggcttgattgatatgattgtgcataggaaggatttgaaaaagactttgagcgatctcatcgctatgatgacgcataagacttcaaagattttttaa

SEQ ID NO: 2218 - DNA (genomic), 915 bp, Helicobacter pylori; double-stranded, circular
  misc_feature (B) LOCATION 1...915
  hypothetical: NO
  anti-sense: NO
gcaaaacttggatacaatcctaataaaactgcaaaattaaggaaaaacatgggatttgcagatttctttaaaaattttaagatcaataaattgcggacaacaccaagtaaggaagaacagccaagccattgggtgaaatgccctaaatgttatgcgttaatgtattataaagaagtgtttggcaaatacagcgtgtgcttgaaatgccattaccatttccgcatgaacgcgactgaaaggattgaatttttatgcgatgtggggagttttgaagagtttgacaaacacttacggcctaatgatcctttaaattttgtggataaagagagctataaacaacgcattaaaaaatacgaaaaaaggactaaccgcccaagttcagtgatcagcggtgaggctaaaatcaaccgcatgcctttgcagatcgtggtgtttgattttagctttatgggggggagtttaggctctgtggaaggcgaaaagatcgtaagagcgatcaatcgtgcggtcgctaaaaaagaagcgttgttgatcgtttcagcgagtgggggggctaggatgcaagaatccacttattcgctcatgcaaatggctaaaacgagcgcggctttgaaccgattgagtgaggccaaactccctttcatttcgctcttaagcgatcccacttatgggggcgttagcgcgtcttttgcttttttaggggatctcatcatcgcagagccaggggcgatgataggttttgcagggcctagggtgattaagcaaactataggggcggatttgcctgagggctttcaaacggcggaatttttattagagcatggcttgattgatatgattgtgcataggaaggatttgaaaaagactttgagcgatctcatcgctatgatgacgcataagacttcaaagattttt

SEQ ID NO: 2219 - DNA (genomic), 1473 bp, Helicobacter pylori; double-stranded, circular
  misc_feature (B) LOCATION 1...1473
  hypothetical: NO
  anti-sense: NO
atgagggcggggatcaaacgacaatccaaggaaaagcgcgtattccgtaacgataacacccaaagggtgatccaaagcgcgattgcaatccctgaagaagtgcgcgtctatgaattcgcgcaaaaagcgaatttgaatttagccgatgtgattaaaaccctcttcaatttagggcttatggtaactaaaaacgactttttggataaggatagcatagagattttagccgaagagtttcatttagaaatttctgttcaaaacaccttagaagaatttgaagtagaagaggtgctagagggggtgaaaaaagagcgcccgcctgtggttactatcatggggcatgttgatcatggtaatacctcactactggataaaatccgtgataagagagtcgcccacactgaagccggggggatcactcagcacattggtgcttacatggtggaaaaaaataacaaatgggtgtctttcattgacaccccagggcatgaagccttcagccagatgcgtaatcgtggggctcaagttacagatattgcagtgattgtgatagcggctgatgatggcgtgaagcaacagactattgaagctttagagcatgcaaaggcggctaatgtgcctgtgatttttgcgatgaataaaatggataagcctaacgtgaatccggacaaactcaaagccgaatgcgctgagcttggttataatcctgtggattggggtggagagcatgagttcatccctgtttcggctaaaacgggcgatggcattgacaatttattagaaaccattctcattcaagcggatattatggaattaaaagccatagaagagggcagcgctagagcggttgttttagaagggagcgtggaaaaagggcgtggggcagtagccacggtgattgtccaaagcgggactttgagcgtgggggatagtttttttgctgaaacggcgtttggtaaagtaagaaccatgactgacgatcaaggcaagagcattcaaaatttaaaaccctctatggtggctctcatcacaggcttgagcgaagtgccgcctgcgggatctgttttaataggggtagaaaacgattctatcgcgcgcttgcaagctcaaaagagggcgacttatttacgccaaaaagcactgagtaaaagcactaaagtgtcttttgatgagctttcagaaatggtcgctaataaggaattaaaaaatattcctgtaatcattaaagcggatacgcaaggaagcctagaagccattaaaaacagcttgttggagcttaataacgaagaggtggcgattcaagtgatccactcaggggtggggggcattactgagaatgatttgagcctggtttctagcagtgagcatgccgtgattttaggctttaatatccgccccaccggtaacgtgaaaaataaggctaaagaatacaactcagcatcaattacacggatttatgtcttgtttgagaaa

SEQ ID NO: 2220 - DNA (genomic), 1818 bp, Helicobacter pylori; double-stranded, circular
  misc_feature (B) LOCATION 1...1818
  hypothetical: NO
  anti-sense: NO
atgagggcggggatcaaacgacaatccaagaaaaagcgcgtattccgtaacgataacagccaaaaagtgatccaaagcgcgattgcaatccctgaagaagtgcgcgtctatgaattcgcgcaaaaagcgaatttgaatttagccgatgtgattaaaaccctcttcaatttagggcttatggtaactaaaaacgactttttggataaggatagcatagagattttagccgaagagtttcatttagaaatttctgttcaaaacaccttagaagaatttgaagtagaagaggtgctagagggggtgaaaaaagagcgcccgcctgtggttactatcatggggcatgttgatcatggtaaaacctcactactggataaaatccgtgataaaagagtcgcccacactgaagccggggggatcactcagcacattggtgcttacatggtggaaaaaaataacaaatgggtgtctttcattgacaccccagggcatgaagccttcagccagatgcgtaatcgtggggctcaagttacagatattgcagtgattgtgatagcggctgatgatggcgtgaagcaacagactattgaagctttagagcatgcaaaggcggctaatgtgcctgtgatttttgcgatgaataaaatggataagcctaacgtgaatccggacaaactcaaagccgaatgcgctgagcttggttataatcctgtggattggggtggagagcatgagttcatccctgtttcggctaaaacgggcgatggcattgacaatttattagaaaccattctcattcaagcggatattatggaattaaaagccatagaagagggcagcgctagagcggttgttttagaagggagcgtggaaaaagggcgtggggcagtagccacggtgattgtccaaagcgggactttgagcgtgggggatagtttttttgctgaaacggcgtttggtaaagtaagaaccatgactgacgatcaaggcaagagcattcaaaatttaaaaccctctatggtggctctcatcacaggcttgagcgaagtgccgcctgcgggatctgttttaataggggtagaaaacgattctatcgcgcgcttgcaagctcaaaagagggcgacttatttacgccaaaaagcactgagtaaaagcactaaagtgtcttttgatgagctttcagaaatggtcgctaataaggaattaaaaaatattcctgtaatcattaaagcggatacgcaaggaagcctagaagccattaaaaacagcttgttggagcttaataacgaagaggtggcgattcaagtgatccactcaggggtggggggcattactgagaatgatttgagcctggtttctagcagtgagcatgccgtgattttaggctttaatatccgccccaccggtaacgtgaaaaataaggctaaagaatacaatgtgagcatcaaaacttacacggtgatttatgccttgattgagggaatgcgatcgctactattaggcttgatgagtcctatcattgaagaagagcatactgggcaagcggaagtgagggaaacttttaatatccctaaagtaggcacgatagccgggtgtgtggtgagcgatggggagatcgctcgtggcattaaggcgcgtttgattagggatggcgtggtggttcataccggcgaaatcctctctttgaaacgctttaaagacgatgtgaaagaagtttctaagggctatgagtgcgggatcatgctagacaattataatgagattaaagtgggcgatgtgtttgaaacctataaagaaatccataaaaaaagaaccctctaa

SEQ ID NO: 2221 - DNA (genomic), 228 bp, Helicobacter pylori; double-stranded, circular
  misc_feature (B) LOCATION 1...228
  hypothetical: NO
  anti-sense: NO
gcgtggggcaagaaatttgatgtgaagatcattgacattgatcctaaaaaccgtcgcttaagggtttctttaaaacaactcactaacaggccttttgatgtttttgaatccaaacaccaagtgggggatattgtagagggcaaagtggcgactttaacggattttggggcgttttttgaatctgggtggggtggatggcttgctccacaatcacgacgctttttggga

SEQ ID NO: 2222 - DNA (genomic), 246 bp, Helicobacter pylori; double-stranded, circular
  misc_feature (B) LOCATION 1...246
  hypothetical: NO
  anti-sense: NO
cggattttggggcgttttttgaatctgggtggggtggatggcttgctccacaatcacgacgctttttgggataaagataaaaagtgcaaagaccactataaaattggcgatgtgatcaaagtgaaaatccttaaaatcaataaaaaagataaaaagatttctttgagcgcgaagcacttggtgacttcccctacagaagaattcgctcaaaagcataaaacagacagcgtgattcaaggcaagtgg

SEQ ID NO: 2223 - DNA (genomic), 537 bp, Helicobacter pylori; double-stranded, circular
  misc_feature (B) LOCATION 1...537
  hypothetical: NO
  anti-sense: NO
gtcaaaaaaggatacaatccccctaaggaattttatatttattttatagtaaggcagtcaatgagcaagatagcagacgatcagtattttaatgacgaggaggaagacttcgcaaaactcttagaaaaagaagaaactctagaaaaaggcactatcaaagaagggttaatcgtttccatcaatgagaatgatgggtatgccatggtgagcgtgggcggtaagacagaaggtcgtttggccttgaatgagatcaccgatgaaaaggggcaattgatgtatcaaaaaaatgaccccattgtcgtgcatgtgtccgaaaaaggcgaacaccctagcgtttcttacaaaaaggccatttcccaacaaaagattcaggctaaaattgaagaattgggcgaaaactatgaaaacgccattattgagggcaagattgtaggcaagaataaagggggctatatcgtggagtctcaaggcgtggagtatttcctctcccgctcgcactcttctttaaagaatgacgcaaaccatatcggcaaacgc

SEQ ID NO: 2224 - DNA (genomic), 1431 bp, Helicobacter pylori; double-stranded, circular
  misc_feature (B) LOCATION 1...1431
  hypothetical: NO
  anti-sense: NO
atgagcaagatagcagacgatcagtattttaatgacgaggaggaagacttcgcaaaactcttagaaaaagaagaaactctagaaaaaggcactatcaaagaagggttaatcgtttccatcaatgagaatgatgggtatgccatggtgagcgtgggcggtaagacagaaggtcgtttggccttgaatgagatcaccgatgaaaaggggcaattgatgtatcaaaaaaatgaccccattgtcgtgcatgtgtccgaaaaaggcgaacaccctagcgtttcttacaaaaaggccatttcccaacaaaagattcaggctaaaattgaagaattgggcgaaaactatgaaaacgccattattgagggcaagattgtaggcaagaataaagggggctatatcgtggagtctcaaggcgtggagtatttcctctcccgctcgcactcttctttaaagaatgacgcaaaccatatcggcaaacgcattaaagcgtgcatcattcgtgtggataaggaaaaccactctatcaatatttctcgcaaacgattctttgaagtcaatgacaaacgacagcttgagatttctaaagaattgttagaagccacagagccggtgttaggggttgtgcgccaaatcaccccttttggtatttttgtaaaatttaaggggattgacggcttggtccattattctgaaatcagccataaaggaccggtaaaccctgagaaatactacaaagagggcgatgaagtctatgtcaaagccatcgcttatgatgaggaaaaaagacgcctttcactctccataaaagcgaccatagaagacccatgggaagagattcaagacaagctaaaacccggatacgccattaaggtggtagtgagcaatattgaacattatggggtgtttgtggatattggtaatgatattgaaggctttttgcatgtttctgaaatctcttgggataaaaatgtcagccaccctagccattacttgagcgtggggcaagaaattgatgtgaagatcattgacattgatcctaaaaaccgtcgcttaagggtttctttaaaacaactcactaacaggccttttgatgtttttgaatccaaacaccaagtgggggatattgtagagggcaaagtggcgactttaacggattttggggcgtttttgaatctgggtggggtggatggcttgctccacaatcacgacgctttttgggataaagataaaaagtgcaaagaccactataaaattggcgatgtgatcaaagtgaaaatccttaaaatcaataaaaaagataaaaagatttctttgagcgcgaagcacttggtgacttcccctacagaagaattcgctcaaaagcataaaacagacagcgtgattcaaggcaaagtggtgagtatcaaggattttggcgttttcatttcatgctga

SEQ ID NO: 2225 - DNA (genomic), 1659 bp, Helicobacter pylori; double-stranded, circular
  misc_feature (B) LOCATION 1...1659
  hypothetical: NO
  anti-sense: NO
atgagcaagatagcagacgatcagtattttaatgacgaggaggaagacttcgcaaaactcttagaaaaagaagaaactctagaaaaaggcactatcaaagaagggttaatcgtttccatcaatgagaatgatgggtatgccatggtgagcgtgggcggtaagacagaaggtcgtttggccttgaatgagatcaccgatgaaaaggggcaattgatgtatcaaaaaaatgaccccattgtcgtgcatgtgtccgaaaaaggcgaacaccctagcgtttcttacaaaaaggccatttcccaacaaaagattcaggctaaaattgaagaattgggcgaaaactatgaaaacgccattattgagggcaagattgtaggcaagaataaagggggctatatcgtggagtctcaaggcgtggagtatttcctctcccgctcgcactcttctttaaagaatgacgcaaaccatatcggcaaacgcattaaagcgtgcatcattcgtgtggataaggaaaaccactctatcaatatttctcgcaaacgattctttgaagtcaatgacaaacgacagcttgagatttctaaagaattgttagaagccacagagccggtgttaggggttgtgcgccaaatcaccccttttggtatttttgtaaaatttaaggggattgacggcttggtccattattctgaaatcagccataaaggaccggtaaaccctgagaaatactacaaagagggcgatgaagtctatgtcaaagccatcgcttatgatgaggaaaaaagacgcctttcactctccataaaagcgaccatagaagacccatgggaagagattcaagacaagctaaaacccggatacgccattaaggtggtagtgagcaatattgaacattatggggtgtttgtggatattggtaatgatattgaaggctttttgcatgtttctgaaatctcttgggataaaaatgtcagccaccctagccattacttgagcgtggggcaagaaattgatgtgaagatcattgacattgatcctaaaaaccgtcgcttaagggtttctttaaaacaactcactaacaggccttttgatgtttttgaatccaaacaccaagtgggggatattgtagagggcaaagtggcgactttaacggattttggggcgtttttgaatctgggtggggtggatggcttgctccacaatcacgacgctttttgggataaagataaaaagtgcaaagaccactataaaattggcgatgtgatcaaagtgaaaatccttaaaatcaataaaaaagataaaaagatttctttgagcgcgaagcacttggtgacttcccctacagaagaattcgctcaaaagcataaaacagacagcgtgattcaaggcaaagtggtgagtatcaaggattttggcgttttcattcatgctgatggcattgatgtgctgatcaaaaatgaagatttgaaccccttgaaaaaagatgaaattaaaatagggcaagaaatcacatgcgtggttgttgcgattgaaaaatccaacaacaaggtgcgcgcttctgtgcacaggttagagcgtaaaaaagaaaaagaagaattgcaagcctttaacacgagcgatgataaaatgactttaggggatattcttaaagaaaaactctaa

SEQ ID NO: 2226 - DNA (genomic), 1308 bp, Helicobacter pylori; double-stranded, circular
  misc_feature (B) LOCATION 1...1308
  hypothetical: NO
  anti-sense: NO
atgaacgatcctaagcatgtggtgtatgtttggctggacgctttattgaattatgcgagcgcgttagggtatttgaacggtttagacaataaaatggcgcattttgaacgcgctaggcatattgtgggtaaggatattttacgcttccatgccatttattggccagcctttttgatgagtttgaatttgcccttattcaaacagctctgtgtgcatgggtggtggacgatagagggcgtgaaaatgagtaagagcttgggtaatgttttagacgctcaaaagctcgccatggagtatgggattgaagaattacgctattttttattgcgtgaggtgccttttgggcaagatggggatttttctaaaaaagcgttagtagaacggattaatgcgaatttgaataacgatttggggaatttgttgaatcgtttgctaggcatggctaaaaagtatttcaattattctctaaaaagcaccaaaatcactgcgtattatcctaaagagctagaaaaagcacatcaaattttagataacgctaattcttttgtgcctaaaatgcaattgcataaggctttagaggaattgtttaatatttatgattttttgaataaactcatcgctaaagaagagccgtgggtcttgcacaaaaacaacgaatcagaaaaattagaagccttattgagtttgatcgcaaacacgctactacaatcaagcttcttgctctatgcgttcatgccaaagagcgctatgaaattagcgagcgcttttcgtgtagaaatcacgcccaataattacgaacgcttttttaaggctaaaaaattacaagatatggttttacaagacaccgagcctttattttccaaaattgagaaaattgaaaagattgaaaagattgaaaagattgaaaagattgaaaaaggggaggaagccctagcagaaaaagcagaaaaaaaagaaaaagaaaaagccccaccaacacaagaaaattatattagtattgaggatttcaagaaagtagagattaaagtggggcttatcaaagaagctcaaaggattgaaaaatccaataaattactgcgcttaaaagtggatttaggcgaaaatcgtttgaggcagatcatctcagggatcgctttggattatgagcctgaaagcttggtgggtcaaatggtgtgcgtggtggctaatttaaaacccgcaaagcttatgggtgaaatgagtgagggcatgattttagcggtgcgagataatgataatctggctttaatcagccctaccagagaaaaaattgcaggaagtttgatcagc

SEQ ID NO: 2227 - DNA (genomic), 1971 bp, Helicobacter pylori; double-stranded, circular
  misc_feature (B) LOCATION 1...1971
  hypothetical: NO
  anti-sense: NO
atgcaaaaatcactgatcacaacccccatttattatgtgaatgacatccctcatattggccatgcttatacgactttgattgcggacactttaaagaagtattacacgcttcaaggcgaagaagtcttttttttaaccggcaccgacgagcatgggcaaaagatcgaacaaagtgcgagactgaggaatcaaagccccaaagcttacgccgatagcattagcgcgatttttaaaaaccagtgggattttttcaatttagattatgatggttttatccgcaccacagacagcgagcatcaaaaatgcgtgcaaaacgcctttgaaatcatgtttgaaaaaggggatatttataaaggcacttatagcgggtattattgcgtgagctgtgagagttattgcgcggtctctaaagtggataatacagatagtaaagtcctatgccctgattgcttgagagagaccacgcttttagaagaagagagttattttttcaaattgagtgcgtatgaaaagcctttattggagttttacgctaaaaaccctgaagcgattttgcccatttatcgtaaaaacgaggtaacttcttttattgagcagggtttattggatctgtctatcacgcgcacgagctttgaatggggtattcctttgcctaaaaagatgaacgatcctaagcatgtggtgtatgtttggctggacgctttattgaattatgcgagcgcgttagggtatttgaacggtttagacaataaaatggcgcattttgaacgcgctaggcatattgtgggtaaggatattttacgcttccatgccatttattggccagcctttttgatgagtttgaatttgcccttattcaaacagctctgtgtgcatgggtggtggacgatagagggcgtgaaaatgagtaagagcttgggtaatgttttagacgctcaaaagctcgccatggagtatgggattgaagaattacgctattttttattgcgtgaggtgccttttgggcaagatggggatttttctaaaaaagcgttagtagaacggattaatgcgaatttgaataacgatttggggaatttgttgaatcgtttgctaggcatggctaaaaagtatttcaattattctctaaaaagcaccaaaatcactgcgtattatcctaaagagctagaaaaagcacatcaaattttagataacgctaattcttttgtgcctaaaatgcaattgcataaggctttagaggaattgtttaatatttatgattttttgaataaactcatcgctaaagaagagccgtgggtcttgcacaaaaacaacgaatcagaaaaattagaagccttattgagtttgatcgcaaacacgctactacaatcaagcttcttgctctatgcgttcatgccaaagagcgctatgaaattagcgagcgcttttcgtgtagaaatcacgcccaataattacgaacgcttttttaaggctaaaaaattacaagatatggttttacaagacaccgagcctttattttccaaaattgagaaaattgaaaagattgaaaagattgaaaagattgaaaagattgaaaaaggggaggaagccctagcagaaaaagcagaaaaaaaagaaaaagaaaaagccccaccaacacaagaaaattatattagtattgaggatttcaagaaagtagagattaaagtggggcttatcaaagaagctcaaaggattgaaaaatccaataaattactgcgcttaaaagtggatttaggcgaaaatcgtttgaggcagatcatctcagggatcgctttggattatgagcctgaaagcttggtgggtcaaatggtgtgcgtggtggctaatttaaaacccgcaaagcttatgggtgaaatgagtgagggcatgattttagcggtgcgagataatgataatctggctttaatcagccctaccagagaaaaaattgcaggaagtttgatcagctaa

SEQ ID NO: 2228 - DNA (genomic), 1986 bp, Helicobacter pylori; double-stranded, circular
  misc_feature (B) LOCATION 1...1986
  hypothetical: NO
  anti-sense: NO
ggtaacacgattataaagatgcaaaaatcactgatcacaacccccatttattatgtgaatgacatccctcatattggccatgcttatacgactttgattgcggacactttaaagaagtattacacgcttcaaggcgaagaagtcttttttttaaccggcaccgacgagcatgggcaaaagatcgaacaaagtgcgagactgaggaatcaaagccccaaagcttacgccgatagcattagcgcgatttttaaaaaccagtgggattttttcaatttagattatgatggttttatccgcaccacagacagcgagcatcaaaaatgcgtgcaaaacgcctttgaaatcatgtttgaaaaaggggatatttataaaggcacttatagcgggtattattgcgtgagctgtgagagttattgcgcggtctctaaagtggataatacagatagtaaagtcctatgccctgattgcttgagagagaccacgcttttagaagaagagagttattttttcaaattgagtgcgtatgaaaagcctttattggagttttacgctaaaaaccctgaagcgattttgcccatttatcgtaaaaacgaggtaacttcttttattgagcagggtttattggatctgtctatcacgcgcacgagctttgaatggggtattcctttgcctaaaaagatgaacgatcctaagcatgtggtgtatgtttggctggacgctttattgaattatgcgagcgcgttagggtatttgaacggtttagacaataaaatggcgcattttgaacgcgctaggcatattgtgggtaaggatattttacgcttccatgccatttattggccagcctttttgatgagtttgaatttgcccttattcaaacagctctgtgtgcatgggtggtggacgatagagggcgtgaaaatgagtaagagcttgggtaatgttttagacgctcaaaagctcgccatggagtatgggattgaagaattacgctattttttattgcgtgaggtgccttttgggcaagatggggatttttctaaaaaagcgttagtagaacggattaatgcgaatttgaataacgatttggggaatttgttgaatcgtttgctaggcatggctaaaaagtatttcaattattctctaaaaagcaccaaaatcactgcgtattatcctaaagagctagaaaaagcacatcaaattttagataacgctaattcttttgtgcctaaaatgcaattgcataaggctttagaggaattgtttaatatttatgattttttgaataaactcatcgctaaagaagagccgtgggtcttgcacaaaaacaacgaatcagaaaaattagaagccttattgagtttgatcgcaaacacgctactacaatcaagcttcttgctctatgcgttcatgccaaagagcgctatgaaattagcgagcgcttttcgtgtagaaatcacgcccaataattacgaacgcttttttaaggctaaaaaattacaagatatggttttacaagacaccgagcctttattttccaaaattgagaaaattgaaaagattgaaaagattgaaaagattgaaaagattgaaaaaggggaggaagccctagcagaaaaagcagaaaaaaaagaaaaagaaaaagccccaccaacacaagaaaattatattagtattgaggatttcaagaaagtagagattaaagtggggcttatcaaagaagctcaaaggattgaaaaatccaataaattactgcgcttaaaagtggatttaggcgaaaatcgtttgaggcagatcatctcagggatcgctttggattatgagcctgaaagcttggtgggtcaaatggtgtgcgtggtggctaatttaaaacccgcaaagcttatgggtgaaatgagtgagggcatgattttagcggtgcgagataatgataatctggctttaatcagccctaccagagaaaaaattgcaggaagtttgatcagc

SEQ ID NO: 2229 - DNA (genomic), 432 bp, Helicobacter pylori; double-stranded, circular
  misc_feature (B) LOCATION 1...432
  hypothetical: NO
  anti-sense: NO
atgcaagaaattgaaattttttgcgatggctcttctttaggcaatcccgggccaggcgggtatgcggcgattttacgctataaagataaagaaaaaaccatcagtgggggcgaaaatttcaccacgaataaccgcatggaattaagagcgctcaatgaagccttaaaaattttgaaacgcccatgccatatcacgctttatagcgattcgcaatacgtgtgccaagcgatcaatgtgtggctagttaactggcaaaaaaagaattttgctaaagtcaaaaatgtggatttatggaaagaatttgtaaaagtctctaaagggcattctattgtggctgtttggatcaaggggcataacgggcatgccgagaatgaacgatgcaatagcctcgctaaattagaggcgcaaaaacgggtcaaaacgaccacttaa

SEQ ID NO: 2230 - DNA (genomic), 489 bp, Helicobacter pylori; double-stranded, circular
  misc_feature (B) LOCATION 1...489
  hypothetical: NO
  anti-sense: NO
cgtttatggatatggtgcttaaaatctctaaaaaaacgcatgctatgggagtggattaagatgcaagaaattgaaattttttgcgatggctcttctttaggcaatcccgggccaggcgggtatgcggcgattttacgctataaagataaagaaaaaaccatcagtgggggcgaaaatttcaccacgaataaccgcatggaattaagagcgctcaatgaagccttaaaaattttgaaacgcccatgccatatcacgctttatagcgattcgcaatacgtgtgccaagcgatcaatgtgtggctagttaactggcaaaaaaagaattttgctaaagtcaaaaatgtggatttatggaaagaatttgtaaaagtctctaaagggcattctattgtggctgtttggatcaaggggcataacgggcatgccgagaatgaacgatgcaatagcctcgctaaattagaggcgcaaaaacgggtcaaaacgaccact

SEQ ID NO: 2231 - DNA (genomic), 2223 bp, Helicobacter pylori; double-stranded, circular
  misc_feature (B) LOCATION 1...2223
  hypothetical: NO
  anti-sense: NO
agatttggccgcttaggcttagaagtggagagctgtatcccttgtatcgctcctaaaaatgtggttgtgggtaaggttttagaaaaagccccccataaaaacgccgaaaaactcagcgtgtgtcaagtggatgtgggtaaagaagtgttaccagtcgtgtgcggggctaaaaatgtcgcgccaaaccaatttgcgccagtcgctctcaaaggagcgatcataggctcaaccacaatcgctaaaacggagcttagaggagttgaaagccatggcatgatttgctctagcattgaattaggcttccctaaaatcaatgatggcatcttggaattagatgaaagcgttggggagttggttttagggaaggaattacatgaatacgcccctttcaacacgcatgttttggaaatttcattgacccctaatcgtggggattgcttgagcgttttaggtattgctagagaaattagcgccttttatcacacgcccctaaaacccattaaagctttaaattttacgccaacaagcgatttgatcacgcttagtgcagatgaaaatattgagtcgcatctggcttattatttgatttgcaaccattctttaaaaacccctttaaatatcaagctttcgctcgctcacaataatgccttaagtgagaacgacctgaacaatttcatagaattcagtgcgcattttagtggggtaatattgaacgcttatagcctgaataaaacccctattgatttgatcatcaaaaacgatgaaaacaaccttgaaagcgtttatattaaccatcaaaaacgctccactatcgttataaagcatcaagatcaaaaagatttgagcgagtgtttgcttttagaggcaagttatactgatcctgtaagcctgtctttaaaattacacgctctaaaagataaaacgcttcaaaaagacaacgcccttgtttataggagcactagggggagcaaccctaatctatcagacggcttgaattttttaagcgctcatttgaaagcggcaattttagaaagcaaacaaactgagcattctttaaaggattgtgcccttacattccaacttgaagacattaccgaaattttggggcttgttatagaagcagaaaaaattcaaaacattttaaaaaatttaggctttaaagttagcacaaaagagccaaactcaaaaccccaaattttagaggttatcgttcccaatttcaggcatgacattaaaacgatccaagatattgccgaagaaatcttgcgctttgtagggattgataatctagtctcaaagcctcttcactgtgtcagcagtaaaaattcaaacccccattatgacacgcaccgcttttttgaaaaccttaaacacaaggctctcgcttgcggttttaaagaagtcattcattacgtgttttattctaaagaaaagcagcaaaaactgggctttgaagttttagaagatcccctagaattgcaaaaccctatcacaacggaattaaacaccctaagaacgagccttgtttgcgggcttttagacgccagcttaaggaataaaaatttagggtttaaaagcatcgccctttatgaaaaagggagcgtgtataactctaaaagagaagagattcaaaaactaggctttttagtaagcggcttacaaaaaaaagaaagctaccctcacgctaagggcaaggcttgggatttttattctttcgctgaatgcgtttcaagaattataggggattttagcttggaaaaactaaccactcaaacccccattaaccacccctaccagagcgctaaaatcattcaaaacaatgaaatcataggtgtgatcgctaaaatccaccccaaagtgatccaagaattagatttgtttgaaagctattacgctgagatagacgcttctaaactcaaacgccctgccatgctgttaaaaccctttagcatttaccctagcagtgtgagggatttgactctcatcattgatgaaaataccgcttttagcaagattaaaaaagccctaaaagacgctcaaatccctaatttaagcgaaattctaccccttgatatttttaaagaaagcggtaacaccatagccttaagcgtgcgttgcgtgatccattctttagaaaaaaccttaaatgatgaagaggtcaattcagccgtgcaaaaagcgcttgaaattttagaaaaagaatttaacgcccgccttaaggga

SEQ ID NO: 2232 - DNA (genomic), 2295 bp, Helicobacter pylori; double-stranded, circular
  misc_feature (B) LOCATION 1...2295
  hypothetical: NO
  anti-sense: NO
atgaaactgagcgtcaatgatttgaatgtttttgtcaatacgcctaaagatatagccaaactctgtgaagatttgagccgcttaggcttagaagtggagagctgtatcccttgtatcgctcctaaaaatgtggttgtgggtaaggttttagaaaaagccccccataaaaacgccgaaaaactcagcgtgtgtcaagtggatgtgggtaaagaagtgttaccagtcgtgtgcggggctaaaaatgtcgcgccaaaccaatttgcgccagtcgctctcaaaggagcgatcataggctcaaccacaatcgctaaaacggagcttagaggagttgaaagccatggcatgatttgctctagcattgaattaggcttccctaaaatcaatgatggcatcttggaattagatgaaagcgttggggagttggttttagggaaggaattacatgaatacgcccctttcaacacgcatgttttggaaatttcattgacccctaatcgtggggattgcttgagcgttttaggtattgctagagaaattagcgccttttatcacacgcccctaaaacccattaaagctttaaattttacgccaacaagcgatttgatcacgcttagtgcagatgaaaatattgagtcgcatctggcttattatttgatttgcaaccattctttaaaaacccctttaaatatcaagctttcgctcgctcacaataatgccttaagtgagaacgacctgaacaatttcatagaattcagtgcgcattttagtggggtaatattgaacgcttatagcctgaataaaacccctattgatttgatcatcaaaaacgatgaaaacaaccttgaaagcgtttatattaaccatcaaaaacgctccactatcgttataaagcatcaagatcaaaaagatttgagcgagtgtttgcttttagaggcaagttatactgatcctgtaagcctgtctttaaaattacacgctctaaaagataaaacgcttcaaaaagacaacgcccttgtttataggagcactagggggagcaaccctaatctatcagacggcttgaattttttaagcgctcatttgaaagcggcaattttagaaagcaaacaaactgagcattctttaaaggattgtgcccttacattccaacttgaagacattaccgaaattttggggcttgttatagaagcagaaaaaattcaaaacattttaaaaaatttaggctttaaagttagcacaaaagagccaaactcaaaaccccaaattttagaggttatcgttcccaatttcaggcatgacattaaaacgatccaagatattgccgaagaaatcttgcgctttgtagggattgataatctagtctcaaagcctcttcactgtgtcagcagtaaaaattcaaacccccattatgacacgcaccgcttttttgaaaaccttaaacacaaggctctcgcttgcggttttaaagaagtcattcattacgtgttttattctaaagaaaagcagcaaaaactgggctttgaagttttagaagatcccctagaattgcaaaaccctatcacaacggaattaaacaccctaagaacgagccttgtttgcgggcttttagacgccagcttaaggaataaaaatttagggtttaaaagcatcgccctttatgaaaaagggagcgtgtataactctaaaagagaagagattcaaaaactaggctttttagtaagcggcttacaaaaaaaagaaagctaccctcacgctaagggcaaggcttgggatttttattctttcgctgaatgcgtttcaagaattataggggattttagcttggaaaaactaaccactcaaacccccattaaccacccctaccagagcgctaaaatcattcaaaacaatgaaatcataggtgtgatcgctaaaatccaccccaaagtgatccaagaattagatttgtttgaaagctattacgctgagatagacgcttctaaactcaaacgccctgccatgctgttaaaaccctttagcatttaccctagcagtgtgagggatttgactctcatcattgatgaaaataccgcttttagcaagattaaaaaagccctaaaagacgctcaaatccctaatttaagcgaaattctaccccttgatatttttaaagaaagcggtaacaccatagccttaagcgtgcgttgcgtgatccattctttagaaaaaaccttaaatgatgaagaggtcaattcagccgtgcaaaaagcgcttgaaattttagaaaaagaatttaacgcccgccttaagggataa

SEQ ID NO: 2233 - DNA (genomic), 987 bp, Helicobacter pylori; double-stranded, circular
  misc_feature (B) LOCATION 1...987
  hypothetical: NO
  anti-sense: NO
ttgcacaccttaatagagcgattagaaaaggttactaatagcaaagagttagaagaagcacgtttgaatgctttgggtaaaaaaggggtttttgcggataaattcaaccaactcaaaaatctaaacggcgaagaaaaaaacgcctttgctaaagaaatccaccattataaacaagcgtttgaaaaagcctttgaattgaaaaaaaaggctattatggagcttgaattagaagaacgcttgaaaaaagaaaaaattgatgtgagcttgtttaacgctattaaaacaagctcttctcaccctttgaattatactaaaaataaaatcattgaattttttaccccattaggatacaagcttgaaatcggctctttagtggaagatgatttccataatttcagtgctttaaacttgcccccttaccaccctgcaagagacatgcaagacactttctattttaaagatcacaagcttttaaggacccacacttcgcccgttcaaatccacaccatgcaagaacaaaccccacccattaagatgatctgtttaggcgaaacctttaggtgcgattatgacttgacccacacgcccatgttccaccaaattgaagggcttgtcgtggatcaaaaagggaatatccgtttcacgcacttaaaaggcgtgatcgaagactttttgcattatttctttggtggcgtgaaattaaggtggcgctctagctttttccctttcacagagccaagcgctgaagtggatattagctgcgtgttttgcaaacaggaaggctgtagggtttgctcgcacacaggctggctggaagtgttgggctgtggcatggtcaataatgcggtgtttgaagccatagggtatgagaatgtgagcgggtttgcctttggcatggggattgaaagattggccatgctgacttgtcaaatcaatgatttacgcagtttctttgaaactgatttgagagtgttggagagtttttaa

SEQ ID NO: 2234 - DNA (genomic), 993 bp, Helicobacter pylori; double-stranded, circular
  misc_feature (B) LOCATION 1...993
  hypothetical: NO
  anti-sense: NO
ggatcgttattgcacaccttaatagagcgattagaaaaggttactaatagcaaagagttagaagaagcacgtttgaatgctttgggtaaaaaaggggtttttgcggataaattcaaccaactcaaaaatctaaacggcgaagaaaaaaacgcctttgctaaagaaatccaccattataaacaagcgtttgaaaaagcctttgaattgaaaaaaaaggctattatggagcttgaattagaagaacgcttgaaaaaagaaaaaattgatgtgagcttgtttaacgctattaaaacaagctcttctcaccctttgaattatactaaaaataaaatcattgaattttttaccccattaggatacaagcttgaaatcggctctttagtggaagatgatttccataatttcagtgctttaaacttgcccccttaccaccctgcaagagacatgcaagacactttctattttaaagatcacaagcttttaaggacccacacttcgcccgttcaaatccacaccatgcaagaacaaaccccacccattaagatgatctgtttaggcgaaacctttaggtgcgattatgacttgacccacacgcccatgttccaccaaattgaagggcttgtcgtggatcaaaaagggaatatccgtttcacgcacttaaaaggcgtgatcgaagactttttgcattatttctttggtggcgtgaaattaaggtggcgctctagctttttccctttcacagagccaagcgctgaagtggatattagctgcgtgttttgcaaacaggaaggctgtagggtttgctcgcacacaggctggctggaagtgttgggctgtggcatggtcaataatgcggtgtttgaagccatagggtatgagaatgtgagcgggtttgcctttggcatggggattgaaagattggccatgctgacttgtcaaatcaatgatttacgcagtttctttgaaactgatttgagagtgttggagagtttt

SEQ ID NO: 2235 - DNA (genomic), 450 bp, Helicobacter pylori; double-stranded, circular
  misc_feature (B) LOCATION 1...450
  hypothetical: NO
  anti-sense: NO
atgaaagttctgttattagaagatgtgaaaaatttaggcaaagcgggtgaagtgtgtgaggttaaagatggctatgggaataactttttaatcgctaaccaaaaagccaaactcgccactaacgaagtgatcaacaaatataaagctgaagttaaaaagaaagcggaaaaagaagccttagaaaaggcgcaaaaattgcaaatggtagaaaccttacaaaccatcacgctgactatccataaaaaagtcggcgcgaacggctctttatttggagcgatcacgaaagaagagatcacggagcgtttgaaagaacagcatgcgagtttaaatttagataaaaaagacattgagctcaaacacccgattaaaagcacagggatttatgagattgaagtcaagcttggatcggggattgcgggcgtgtttaaaattgatgtggtggctgagtag

SEQ ID NO: 2236 - DNA (genomic), 516 bp, Helicobacter pylori; double-stranded, circular
  misc_feature (B) LOCATION 1...516
  hypothetical: NO
  anti-sense: NO
gcaataaaaacccaacttgttaaaataaagagtataattacaaattacttacaacttaaaggggatatgatgaaagttctgttattagaagatgtgaaaaatttaggcaaagcgggtgaagtgtgtgaggttaaagatggctatgggaataactttttaatcgctaaccaaaaagccaaactcgccactaacgaagtgatcaacaaatataaagctgaagttaaaaagaaagcggaaaaagaagccttagaaaaggcgcaaaaattgcaaatggtagaaaccttacaaaccatcacgctgactatccataaaaaagtcggcgcgaacggctctttatttggagcgatcacgaaagaagagatcacggagcgtttgaaagaacagcatgcgagtttaaatttagataaaaaagacattgagctcaaacacccgattaaaagcacagggatttatgagattgaagtcaagcttggatcggggattgcgggcgtgtttaaaattgatgtggtggctgag

SEQ ID NO: 2237 - DNA (genomic), 336 bp, Helicobacter pylori; double-stranded, circular
  misc_feature (B) LOCATION 1...336
  hypothetical: NO
  anti-sense: NO
aacgattttagagcatgtgccaagccctgcgggagcgttgatgagcctttgcaaatgcaaattttcacgcttgattatgacaattatgtaggcaaaatcggtatcgctagagtgtttaatggctcggttaaaaagaatgaaagcgtgctgttgatgaaaagcgatgggagtaaagaaaatggccgtatcactaaacttataggttttttagggctggctaggactgagattgaaaacgcttatgcgggcgatattgtagcgcttgctgggtttaacgcgatggatgtgggtgatagcgtcgttgatcccactaaccccatgcctttagatcccatg

SEQ ID NO: 2238 - DNA (genomic), 693 bp, Helicobacter pylori; double-stranded, circular
  misc_feature (B) LOCATION 1...693
  hypothetical: NO
  anti-sense: NO
tattgtgttatacttctaatttcaattttgcttgttaggacattcatgaaaaatattagaaatatcgctgtaatcgcgcatgttgatcatgggaaaaccactttagtagatggcttactttctcaatctggcacatttagtgagagggaaaaagtggatgaaagggtgatggatagcaatgatttagagaaagaaagagggatcactattctgtctaaaaacaccgctatttattacaaagacactaaaatcaatatcattgacactcccgggcatgctgattttgggggcgaagtggagcgcgttttaaaaatggtggatggggtgttgcttttagtggatgctcaagaaggagtcatgcctcaaactaaattcgtggttaaaaaggctttgagttttgggatttgccctattgtggtggtgaataaaattgataagcctgccgctgaaccggatagggtggtggatgaagtttttgacttgttcgtggcgatgggggctagcgataaacaattggatttccctgtcgtgtatgctgctgctagagatggctatgcgatgaaaagtttagacgatgaaaagaagaatttagagcctttgtttgaaacgattttagagcatgtgccaagccctgcgggagcgttgatgagcctttgcaaatgcaaattttcacgcttgattatgacaattatg

SEQ ID NO: 2239 - DNA (genomic), 915 bp, Helicobacter pylori; double-stranded, circular
  misc_feature (B) LOCATION 1...915
  hypothetical: NO
  anti-sense: NO
accaagcttaaatatccaagatttggaagggcctggaatgaggtgtatttgctttcaagattcgccttagccgggttagaaggaaagcatgttactgccaataaattgaaagacaggctcttaaaagaaatgcaaaccaatatcgctatgaaatgcgaagaaatgggagaaggcaagtttaaagtgagcgggcgtggggaattgcaaatcactattttagctgaaaacttgcgccgtgaagggtttgagtttagcatttcacgccctgaagtcatcattaaagaagaaaatggcgttaaatgcgagccttttgagcatttagtgattgacacgccccaagattttagcggggctatcattgagagattaggcaaaagaaaagccgagatgaaagcgatgaatcccatgagtgatggctatacaagattagaatttgaaattcctgcaagagggcttatcggttataggagcgagtttttaaccgacactaaaggcgaaggcgtgatgaatcatagctttttggaattccgcccttttagcgggagcgtggaatcgcgcaaaaatggggcgctcattagcatggaaaatggcgaagcgaccgctttttcccttttcaatatccaagaaagaggcgcactttttatcaatccccaaactaaggtttatgtgggcatggttattggcgaacacagccgggataatgatttagatgtcaatcctatcaaatccaagcacttaaccaacatgagagcgagcgggagcgatgatgcgatcaaactcaccccgcctaggactatggtgctagaaagggcgttagaatggattgaagaagatgaaattttagaagttacccccttgaatttaaggatcaggaaaaagattttagaccccaacatgaggaaaagggcgaaaaaa

SEQ ID NO: 2240 - DNA (genomic), 1800 bp, Helicobacter pylori; double-stranded, circular
  misc_feature (B) LOCATION 1...1800
  hypothetical: NO
  anti-sense: NO
atgaaaaatattagaaatatcgctgtaatcgcgcatgttgatcatgggaaaaccactttagtagatggcttactttctcaatctggcacatttagtgagagggaaaaagtggatgaaagggtgatggatagcaatgatttagagaaagaaagagggatcactattctgtctaaaaacaccgctatttattacaaagacactaaaatcaatatcattgacactcccgggcatgctgattttgggggcgaagtggagcgcgttttaaaaatggtggatggggtgttgcttttagtggatgctcaagaaggagtcatgcctcaaactaaattcgtggttaaaaaggctttgagttttgggatttgccctattgtggtggtgaataaaattgataagcctgccgctgaaccggatagggtggtggatgaagtttttgacttgttcgtggcgatgggggctagcgataaacaattggatttccctgtcgtgtatgctgctgctagagatggctatgcgatgaaaagtttagacgatgaaaagaagaatttagagcctttgtttgaaacgattttagagcatgtgccaagccctagcgggagcgttgatgagcctttgcaaatgcaaattttcacgcttgattatgacaattatgtaggcaaaatcggtatcgctagagtgtttaatggctcggttaaaaagaatgaaagcgtgctgttgatgaaaagcgatgggagtaaagaaaatggccgtatcactaaacttataggttttttagggctggctaggactgagattgaaaacgcttatgcgggcgatattgtagcgcttgctgggtttaacgcgatggatgtgggtgatagcgtcgttgatcccactaaccccatgcctttagatcccatgcatttagaagagcctacgatgagcgtgtattttgccgtcaatgattcgcccttagccgggttagaaggaaagcatgttactgccaataaattgaaagacaggctcttaaaagaaatgcaaaccaatatcgctatgaaatgcgaagaaatgggagaaggcaagtttaaagtgagcgggcgtggggaattgcaaatcactattttagctgaaaacttgcgccgtgaagggtttgagtttagcatttcacgccctgaagtcatcattaaagaagaaaatggcgttaaatgcgagccttttgagcatttagtgattgacacgccccaagattttagcggggctatcattgagagattaggcaaaagaaaagccgagatgaaagcgatgaatcccatgagcgatggctatacaagattagaatttgaaattcctgcaagagggcttatcggttataggagcgagtttttaaccgacactaaaggcgaaggcgtgatgaatcatagctttttggaattccgcccttttagcgggagcgtggaatcgcgcaaaaatggggcgctcattagcatggaaaatggcgaagcgaccgctttttcccttttcaatatccaagaaagaggcgcactttttatcaatccccaaactaaggtttatgtgggcatggttattggcgaacacagccgggataatgatttagatgtcaatcctatcaaatccaagcacttaaccaacatgagagcgagcgggagcgatgatgcgatcaaactcaccccgcctaggactatggtgctagaaagggcgttagaatggattgaagaagatgaaattttagaagttacccccttgaatttaaggatcaggaaaaagattttagaccccaacatgaggaaaagggcgaaaaaataa

SEQ ID NO: 2241 - DNA (genomic), 189 bp, Helicobacter pylori; double-stranded, circular
  misc_feature (B) LOCATION 1...189
  hypothetical: NO
  anti-sense: NO
atggcaaaaagatgtgctttaacttttaaagggcctatgataggcaatcatgtcagtcatgcgaacaacaaaaacaagcgtcgcttgctccctaacttgcgatcgattaagatccaattagacgacggcacgaccaaacgcattaaggtggctgcttccactttaagaaccatgcgtaaaggggcttag

SEQ ID NO: 2242 - DNA (genomic), 195 bp, Helicobacter pylori; double-stranded, circular
  misc_feature (B) LOCATION 1...195
  hypothetical: NO
  anti-sense: NO
ggatacacaatggcaaaaagatgtgctttaacttttaaagggcctatgataggcaatcatgtcagtcatgcgaacaacaaaaacaagcgtcgcttgctccctaacttgcgatcgattaagatccaattagacgacggcacgaccaaacgcattaaggtggctgcttccactttaagaaccatgcgtaaaggggct

SEQ ID NO: 2243 - DNA (genomic), 303 bp, Helicobacter pylori; double-stranded, circular
  misc_feature (B) LOCATION 1...303
  hypothetical: NO
  anti-sense: NO
gatgaaaaggtcatgcaagcggcgttaaaatccggtgctaaagggattaaggtgcgcgtttctgaccgtttagcaggggctgaaatcgctcgcaccgaatggtatatggaagggcgcgtgcctttacacactttaagggctaagattgattatggctttgctgaagcgatgacagtatatggtattattggcgtgaaagtgtggattttcaaaggggaagttttacaaaaaggtatccaatttgagaaaaaagaagaggctaaagaagaaagagagcctagaagaagcagaagagggaggcaa

SEQ ID NO: 2244 - DNA (genomic), 300 bp, Helicobacter pylori; double-stranded, circular
  misc_feature (B) LOCATION 1...300
  hypothetical: NO
  anti-sense: NO
gaaaaggtcatgcaagcggcgttaaaatccggtgctaaagggattaaggtgcgcgtttctgaccgtttagcaggggctgaaatcgctcgcaccgaatggtatatggaagggcgcgtgcctttacacactttaagggctaagattgattatggctttgctgaagcgatgacagtatatggtattattggcgtgaaagtgtggattttcaaaggggaagttttacaaaaaggtatccaatttgagaaaaaagaagaggctaaagaagaaagagagcctagaagaagcagaagagggaggcaa

SEQ ID NO: 2245 - DNA (genomic), 705 bp, Helicobacter pylori; double-stranded, circular
  misc_feature (B) LOCATION 1...705
  hypothetical: NO
  anti-sense: NO
atgggacaaaaagttaatccggtaggtttgagattaggtattaataggaattggacttccagatggttccctagcactcgcaccgctccaagcaatattgatgaggacaataagattaggaaattccttaaaaaagagctttattatgccggcgtgagcgagattgtgattgaaagagcggctaaaaaactgcgcgttacggtcgtagcggctcgcccagggcttatcattggtaaaaaaggcgtggatattgagaaggtcaaagaaggcttaaaaacgctcatcaaaaaagaagtctccattaatatcaaagaagtcaaacgcccccaagctgacgcccaattagccgcagaaaatgtagccacccaattagaaaaaagggtcgctttccgccgcgcgatgaaaaaggtcatgcaagcggcgttaaaatccggtgctaaagggattaaggtgcgcgtttctggccgtttagcaggggctgaaatcgctcgcaccgaatggtatatggaagggcgcgtgcctttacacactttaagggctaagattgattatggctttgctgaagcgatgacagtatatggtattattggcgtgaaagtgtggattttcaaaggggaagttttacaaaaaggtatccaatttgagaaaaaagaagaggctaaagaagaaagagagcctagaagaagcagaagagggaggcaataa

SEQ ID NO: 2246 - DNA (genomic), 426 bp, Helicobacter pylori; double-stranded, circular
  misc_feature (B) LOCATION 1...426
  hypothetical: NO
  anti-sense: NO
atgttaatgccaaaaagaacaaaatacagaaagcaaatgaaagggcgcaatcgtgggaaagcccatcgtggtaattctattgcgtttggggatattgcgattaaagccatagagcatgggaggattgattcacgccagattgaatccgcaagggtggctatgacaagacacattaaaagagcgggtaaggtgtggattagagtgtttcctgataagcctttgaccgctaaacctttagaaacgaggatgggtaaaggtaaaggctctgtggaaaaatgggtgatgaatatcaagccgggcaggatcgtttatgaaatgctaggcattgaagaaggactagcgagagaagctttagcgttatctcagagcaaacttccttttaaaaccaaaattgtaacttgtgagagcgaaaatgaaatatactga

SEQ ID NO: 2247 - DNA (genomic), 168 bp, Helicobacter pylori; double-stranded, circular
  misc_feature (B) LOCATION 1...168
  hypothetical: NO
  anti-sense: NO
aaaatggcagacatcatggatataaagtcaattctttacactgaaaagtcattaggattgcaagaaaaaggtgttttagtggtccaaacggctcaaaatgtaaccaaaaaccagctcaaagaagtgttaaaacttactttggctttgaaccctttaaaatcaattctt

SEQ ID NO: 2248 - DNA (genomic), 282 bp, Helicobacter pylori; double-stranded, circular
  misc_feature (B) LOCATION 1...282
  hypothetical: NO
  anti-sense: NO
atggcagacatcatggatataaagtcaattctttacactgaaaagtcattaggattgcaagaaaaaggtgttttagtggtccaaacggctcaaaatgtaaccaaaaaccagctcaaagaagtgtttaaaacttactttggctttgaacctttgaaaatcaattctttgaaacaagagggtaaggtgaaacgctttagagggaagcttggacaaagaaagtcgtttaagaaattttatgtgaaagttccagagggcgctagcattgccgcccttggcgcgtag

SEQ ID NO: 2249 - DNA (genomic), 207 bp, Helicobacter pylori; double-stranded, circular
  misc_feature (B) LOCATION 1...207
  hypothetical: NO
  anti-sense: NO
atgatacagagttttacaagattgaatgtcgctgacaatagcggcgctaaagaaatcatgtgcattaaggtgttaggaggcagccacaaacgctatgcgagcgtgggtagcgtgatcgtggcttccgtgaaaaaagctatccccaatggtaaggtgaaattcggtctagtcgtcaaaaccgtcgtggtgtctacaccaccgggttgg

SEQ ID NO: 2250 - DNA (genomic), 282 bp, Helicobacter pylori; double-stranded, circular
  misc_feature (B) LOCATION 1...282
  hypothetical: NO
  anti-sense: NO
atgtctaggtcaattaaaaagggtccttttatagacgaccacttgatgaaaaaaacgctcaaggcaaaagagggtaaggataaccgcccgattaaaacatggtctagaagaagcaccattttgcctgaaatgattggttttacctataatgtgcataatggcagggtttttgtccctgtgtatatcacagaaaaccatgtgggttataagttaggggaattcgctcctacaagaacttttaaagggcacaaaggcagtgtccaaaaaaagattggcaagtaa

SEQ ID NO: 2251 - DNA (genomic), 486 bp, Helicobacter pylori; double-stranded, circular
  misc_feature (B) LOCATION 1...486
  hypothetical: NO
  anti-sense: NO
aagttccagagggcgctagcattgccgcccttggctctttatacacgaaactaccttattgccattataacttataagccctacacccccagcagacacttcatgtccgtgttggactctacagacattaccgcaaaaagcagtgtcaaaggcttactcactaagcttaaagcgacagcagggaggaacaataacgggcgaatcaccagccgccacaaagagagaggggctaaaaaactctaccgcattattgatttcaaacgcaacaaatacaacattgaggggaaagtggctgcgattgagtatgatccttacagaaacgcacgcatcgctcttgtagtctatcctgatggggacaaacgctatattttacagccaagcggtttgaaagtgggcgatagcgttatcgctgctgaaggcggtttggatattaaagtggggctttgcgatgaagttaaaaaatatccccataggaacggtggtgca

SEQ ID NO: 2252 - DNA (genomic), 831 bp, Helicobacter pylori; double-stranded, circular
  misc_feature (B) LOCATION 1...831
  hypothetical: NO
  anti-sense: NO
atggcgattaaaacttataagccctacaccccaagcagacgcttcatgtcggtgttggactctaaagacattaccgcaaaaagcagtgtcaaaggcttactcactaagcttaaagcgacagcagggaggaacaataacgggcgaatcaccagccgccacaaagagagaggggctaaaaaactctaccgcattattgatttcaaacgcaacaaatacaacattgaggggaaagtggctgcgattgagtatgatccttacagaaacgcacgcatcgctcttgtagtctatcctgatggggacaaacgctatattttacagccaagcggtttgaaagtgggcgatagcgttatcgctgctgaaggcggtttggatattaaagtgggctttgcgatgaagttaaaaaatatccccataggaacggtggtgcataatattgaaatgcatccgggggctggcgggcaattagccagaagcgcaggaatgagtgctcaaatcatgggtagggaaaataaatacactatccttagaatgccaagctctgaaatgcgctacattttgagcgaatgcatggcgagtgttggcgtggtagggaatgaggattttatcaatgtctctatcggtaaggcagggcgtaaccgccacagagggattcgcccacaaactcgtgggagcgcgatgaacccagtggatcacccgcatggtgggggtgagggtaaaacagggacaagcggccatcctgtatcgccttggggtactccagctaagggctataaaactagaaagaaaaaagctagcgacaagctcatcatttccagaaagaaacataaataa

SEQ ID NO: 2253 - DNA (genomic), 369 bp, Helicobacter pylori; double-stranded, circular
  misc_feature (B) LOCATION 1...369
  hypothetical: NO
  anti-sense: NO
atgagcaaagcgttattaaaatttgtgcgtttatctcctactaaagccagattgattgcaagacagattcaaggcatgaacgctgaattagcgatcgctagtttggaatttacgcccaataaagcggctagagtgctttcaaaagtggtagcttctgcggtcgctaacggctcattggacgccaagagcgctttaattgtttcttgcagagtggatgctggccctgtgcttaggcgctccattccaagggctaaaggtagggccacagccattagaaagccaacatctcatgtatttgtagaagtagcagaagggaaagaaatgaaatcttctaaaagccataaaaaaaatcaagcagaaggtaagtag

SEQ ID NO: 2254 - DNA (genomic), 375 bp, Helicobacter pylori; double-stranded, circular
  misc_feature (B) LOCATION 1...375
  hypothetical: NO
  anti-sense: NO
gggggtagaatgagcaaagcgttattaaaatttgtgcgtttatctcctactaaagccagattgattgcaagacagattcaaggcatgaacgctgaattagcgatcgctagtttggaatttacgcccaataaagcggctagagtgctttcaaaagtggtagcttctgcggtcgctaacggctcattggacgccaagagcgctttaattgtttcttgcagagtggatgctggccctgtgcttaggcgctccatttcaagggctaaaggtagggccacagccattagaaagtcaacatctcatgtacttgtagaagtagcagaagggaaagaaatgaaatcttctaaaagccataaaaaaaatcaagcagaaggtaag

SEQ ID NO: 2255 - DNA (genomic), 432 bp, Helicobacter pylori; double-stranded, circular
  misc_feature (B) LOCATION 1...432
  hypothetical: NO
  anti-sense: NO
atggggtgctatgggataggcattagccggttgctcagcgtgattttagagcaaaaaagcgatgatctagrctgtgtgtggacgaaaaataccgctccttttgatgtggtgatcgtggtttctaacctgaaagatgaagcgcaaaaaaaactcgcttttgaagtgtatgaaagactgctccaaaagggcgttgatgcgctgttagatgacagagacgctcgttttggggcgaagatgagggattttgaattgattggggaacgattagccttgattgttgggaagcaaactttagagagtaaggaatttgaatgcatcaaacgcgctaatttagaaaagcaaacgatcaaagacataggaattagaagaaaaaattttagaaatgttagcgagcgaataaggggagggaatggaaaaaytagtgattggctc

SEQ ID NO: 2256 - DNA (genomic), 1731 bp, Helicobacter pylori; double-stranded, circular
  misc_feature (B) LOCATION 1...1731
  hypothetical: NO
  anti-sense: NO
atgctattttcaaaactttttgccccaacgctcaaagaacccccaaaagacgccgtgttaaaaagccctaagcaccccgggaaagcaggatacatttatcaaataggcagtgggatttataatttcctacccttagctaaaaaagtgctagacaaaatagaaaacgtcacgcacaaacgcatgcaagagcatggggcgcaaaatattttaatgagttttgtggttttggcgagtttgtgggaaaaatcaggccgtttggataaatacggcaaggaattattggtttttaaagaccgaaaagacaatgattttgttttaagtcccactttagaagaaaatatcaccgaaattgccgctaatttcatcaaaagctacaagcaattacccgtgcatctctatcaaatccacacgaaattccgtgatgaaatccgcccaagattcgggttggtgagagcgagggaatttatcatgaaagatggttatagctttcatgaagacgctgaaagcttggataaggaatttttaaacacgcaaagcgcttataaagagattttaagcgatttgggtttggattttcgcattgtggaagcggatagcggggcgattggggggagtaaaagcagggaatttgtcgttttaacagaatgcggggaagacacgatcgtggtgtgtcaaaattgcgattatgccgccaatattgaaatcgctaaacgctctaaaagaactgagcctttaatgtccccaagcgcattagcgaaattccccacccctaataccaccagcgctccaagcgtggcggagttttttaaaacagagccttattttgtcttaaaagcgcttgttaacaaagtgatccataaagataaagaaaccctagcgtgcttttttgttaggggcgatgacaatttagaagagactaaagccctaaacactttgaatcttttgggggcgaacgctttagaattaagagaggccaatgaagaagatttaaataaagcagggttaatagcgggctttatagggccttatggcttgaaaaagcatgtttgttatattatttttgatgaagatttaaaagagggcgattgcttgatcgttggggctaatgaaaaggattttcatgcggtgggcgtggatttaaaagggtttgaaaaccttgtttatgcggatattgtccaggttaaagagagcgattgttgccctaattgtcaaggagcgttgaaataccataagagtttggaagtggggcatattttcaaactcgggcaaagctatgctaaaagcttgaaggctagtttcttggataagaatggcaaagagcggttttttgaaatggggtgctatgggataggcattagccggttgctcagcgtgattttagagcaaaaaagcgatgatctaggctgtgtgtggacgaaaaataccgctccttttgatgtggtgatcgtggtttctaacctgaaagatgaagcgcaaaaaaaactcgcttttgaagtgtatgaaagactgctccaaaagggcgttgatgcgctgttagatgacagagacgctcgttttggggcgaagatgagggattttgaattgattggggaacgattagccttgattgttgggaagcaaactttagagagtaaggaatttgaatgcatcaaacgcgctaatttagaaaagcaaacgatcaaagacatagaattagaagaaaaaattttagaaatgttagcgagcgaataa

SEQ ID NO: 2257 - DNA (genomic), 1731 bp, Helicobacter pylori; double-stranded, circular
  misc_feature (B) LOCATION 1...1731
  hypothetical: NO
  anti-sense: NO
tgcatgctattttcaaaactttttgccccaacgctcaaagaacccccaaaagacgccgtgttaaaaagccctaagcaccccgggaacgggggacacccccttcaaataggcagtgggatttataatttcctacccttagctaaaaaagtgctagacaaaatagaaaacgtcacgcacaaacgcatgcaagagcatggggcgcaaaatattttaatgagttttgtggttttggcgagtttgtgggaaaaatcaggccgtttggataaatacggcaaggaattattggtttttaaagaccgaaaagacaatgattttgttttaagtcccactttagaagaaaatatcaccgaaattgccgctaatttcatcaaaagctacaagcaattacccgtgcatctctatcaaatccacacgaaattccgtgatgaaatccgcccaagattcgggttggtgagagcgagggaatttatcatgaaagatggttatagctttcatgaagacgctgaaagcttggataaggaaattttaaacacgcaaagcgcttataaagagattttaagcgatttgggtttggattttcgcattgtggaagcggatagcggggcgattggggggagtaaaagcagggaatttgtcgttttaacagaatgcggggaagacacgatcgtggtgtgtcaaaattgcgattatgccgccaatattgaaatcgctaaacgctctaaaagaactgagcctttaatgtccccaagcgcattagcgaaattccccacccctaataccaccagcgctccaagcgtggcggagttttttaaaacagagccttattttgtcttaaaagcgcttgttaacaaagtgatccataaagataaagaaaccctagcgtgcttttttgttaggggcgatgacaatttagaagagactaaagccctaaacactttgaatcttttgggggcgaacgctttagaattaagagaggccaatgaagaagatttaaataaagcagggttaatagcgggctttatagggccttatggcttgaaaaagcatgtttgttatattatttttgatgaagatttaaaagagggcgattgcttgatcgttggggctaatgaaaaggattttcatgcggtgggcgtggatttaaaagggtttgaaaaccttgtttatgcggatattgtccaggttaaagagagcgattgttgccctaattgtcaaggagcgttgaaataccataagagtttggaagtggggcatattttcaaactcgggcaaagctatgctaaaagcttgaaggctagtttcttggataagaatggcaaagagcggttttttgaaatggggtgctatgggataggcattagccggttgctcagcgtgattttagagcaaaaaagcgatgatctaggctgtgtgtggacgaaaaataccgctccttttgatgtggtgatcgtggtttctaacctgaaagatgaagcgcaaaaaaaactcgcttttgaagtgtatgaaagactgctccaaaagggcgttgatgcgctgttagatgacagagacgctcgttttggggcgaagatgagggattttgaattgattggggaacgattagccttgattgttgggaagcaaactttagagagtaaggaatttgaatgcatcaaacgcgctaatttagaaaagcaaacgatcaaagacatagaattagaagaaaaaattttagaaatgttagcgagcgaa

SEQ ID NO: 2258 - DNA (genomic), 1392 bp, Helicobacter pylori; double-stranded, circular
  misc_feature (B) LOCATION 1...1392
  hypothetical: NO
  anti-sense: NO
atgagtttgatcgttacgcgcttcgctccatcgcccactggctacctccacataggaggcttaaggacagccatttttaattatctttttgcacgagccaatcaaggaaagttttttttacgcattgaagacacggatttgagccgtaactccatagaagcggctaacgccattgtagaagctttcaaatgggtggggctagaacacgatggcgaaatcctctaccaatccaaacgctttgagatttataaagaatacatccaaaaactcttagacgaagacaaagcctattattgttacatgagtaaagaagagttggacgctttgagagaagaacaaaaagccaggaaagaaaccccacgctatgacaatcgctatcgtgattttaaaggcacgccccctaaaggcatagagcctgtggtaaggattaaagtcccccaaaatgaggtgattggttttaatgacggggttaaaggcgaagtgaaagtgaacactaacgaaatagacgattttattatcgcacgaagtgatgggacgcccacttataattttgtggttaccattgatgacgctttaatggggattactgatgtgattagaggcgatgatcacctttctaacacccctaaacaaatcgtgctttataaggctttgaattttaaaatccctaattttttccatgtgccgatgattttgaacgaagaagggcaaaaactaagcaaacgccatggggccactaatgtgatggactatcaagaaatgggctatcttaaggaagctttagtgaattttttagcgcgtttggggtggagctatcaagataaagaggtttttagcatgcaagaattattggaatggtttaaccctaaagatttaaattcttcgcccagttgctttagctggcacaagctcaattggctcaacgctcattatttgaaaaaccaaagcgtgcaggaattattaaaacttttaaagccttttagttttagcgatctttctcatttaaaccccgctcaattggatcgcttgttggacgctctcaaagaaagatctcaaaccctaaaagaattagcccttaaaatagatgaggttttaaccgctcctatagagtatgaagaaaaggtttttaaaaaactcaatcaagcgctcgtcatgcccttgttagaaaaatttaaactagcgttagataaaactgatttcaacgatgaaagcgcgctagaaaacgccatgcaccaaatcattgaagaagaaaagattaaagcgggtcatttcatgcagcctttaagattagcccttttgggtaaggggggcgggataggccttaaagaagcgctttttattttaggcaaagcagagagcatcaaaagaatagaagagtttttgaaaaactaa

SEQ ID NO: 2259 - DNA (genomic), 1416 bp, Helicobacter pylori; double-stranded, circular
  misc_feature (B) LOCATION 1...1416
  hypothetical: NO
  anti-sense: NO
gaacattttattattaaggttagaataatgagtttgatcgttacgcgcttcgctccatcgcccactggctacctccacataggaggcttaaggacagccatttttaattatctttttgcacgagccaatcaaggaaagttttttttacgcattgaagacacggatttgagccgtaactccatagaagcggctaacgccattgtagaagctttcaaatgggtggggctagaacacgatggcgaaatcctctaccaatccaaacgctttgagatttataaagaatacatccaaaaactcttagacgaagacaaagcctattattgttacatgagtaaagaagagttggacgctttgagagaagaacaaaaagccaggaaagaaaccccacgctatgacaatcgctatcgtgattttaaaggcacgccccctaaaggcatagagcctgtggtaaggattaaagtcccccaaaatgaggtgattggttttaatgacggggttaaaggcgaagtgaaagtgaacactaacgaaatagacgattttattatcgcacgaagtgatgggacgcccacttataattttgtggttaccattgatgacgctttaatggggattactgatgtgattagaggcgatgatcacctttctaacacccctaaacaaatcgtgctttataaggctttgaattttaaaatccctaattttttccatgtgccgatgattttgaacgaagaagggcaaaaactaagcaaacgccatggggccactaatgtgatggactatcaagaaatgggctatcttaaggaagctttagtgaattttttagcgcgtttggggtggagctatcaagataaagaggtttttagcatgcaagaattattggaatggtttaaccctaaagatttaaattcttcgcccagttgctttagctggcacaagctcaattggctcaacgctcattatttgaaaaaccaaagcgtgcaggaattattaaaacttttaaagccttttagttttagcgatctttctcatttaaaccccgctcaattggatcgcttgttggacgctctcaaagaaagatctcaaaccctaaaagaattagcccttaaaatagatgaggttttaaccgctcctatagagtatgaagaaaaggtttttaaaaaactcaatcaagcgctcgtcatgcccttgttagaaaaatttaaactagcgttagataaaactgatttcaacgatgaaagcgcgctagaaaacgccatgcaccaaatcattgaagaagaaaagattaaagcgggtcatttcatgcagcctttaagattagcccttttgggtaaggggggcgggataggccttaaagaagcgctttttattttaggcaaagcagagagcatcaaaagaatagaagagtttttgaaaaac

SEQ ID NO: 2260 - DNA (genomic), 1245 bp, Helicobacter pylori; double-stranded, circular
  misc_feature (B) LOCATION 1...1245
  hypothetical: NO
  anti-sense: NO
atggcgatcttacgcgcaaaccttagccctaaaaacaaattaaacgctactttaaaagggtggctccccattttacaaagcgagcttgaagatttagaagaagtgttgaaacaaaacgctttagataaccccttaatcaaaattgaaaacaaacgcatcaaaaattttagcgatcgctttaatactaaaaagagcagcgatcatttagaaaattgtgcaaccgcttctaaaagcctttttgaaactttagaatctcaaatcattccccctctctttcccactgaaacctctcaaaaaatcgctatggatattatcagtgggttgaataatgaggggtattttgaagaaaacattgaagaaagggctaaagttttaggggtagagagcgaagtttatgagaaagtacgcaagcgttttagttaccttaatcccgctggcattggcgctaaagacgtgaaagagggctttttattccagttagatggtagggaattggacaataacgagctttatgaagaaacgcgaaaaatcattttaaatttagaaaaacaccatgaattttctaaagatttttattatgaaaaggctttaaagattttaaaatcctttaaaaaccccccagccattgaatttttagaaaaagaaatagaagtcattcctgagctttttattttagaagtggataatgaaatgattgtgcgtttgaatgatgagagctacccaacaatcagtttagaagaaaatcgctttaaggatagcgattatttaaaagaaaaactaaaagaagccaaagatttgattgacgcgttaaatttgagaaaagccacgatttataaaatcggtctgatgctcttagaataccaatacgatttttttaaaggtaaggaattacgccctttaaaattactggatttagccaatgagtttaaccactctgtaagcacgatttcaagggctatttctaataaatatttggcatgcgaaaggggggttttccccattaaacatttctttagcatcgccttagacaatagcgagacttcaaacgctgtgattaaagactatcttttagaattgattaaaaacgaggacaaaaaagagcctttgagcgacgctaagattttagaactcattgaagagaaattccatttgaaaatggtaagaagaacgatcaccaaataccgccaactgctcaacatcgcttcttcaagcgaaaggaaaaggctctatttgatgcgcgcttga

SEQ ID NO: 2261 - DNA (genomic), 1251 bp, Helicobacter pylori; double-stranded, circular
  misc_feature (B) LOCATION 1...1251
  hypothetical: NO
  anti-sense: NO
ggtatagacatggcgatcttacgcgcaaaccttagccctaaaaacaaattaaacgctactttaaaagggtggctccccattttacaaagcgagcttgaagatttagaagaagtgttgaaacaaaacgctttagataaccccttaatcaaaattgaaaacaaacgcatcaaaaattttagcgatcgctttaatactaaaaagagcagcgatcatttagaaaattgtgcaaccgcttctaaaagcctttttgaaactttagaatctcaaatcattccccctctctttcccactgaaacctctcaaaaaatcgctatggatattatcagtgggttgaataatgaggggtattttgaagaaaacattgaagaaagggctaaagttttaggggtagagagcgaagtttatgagaaagtacgcaagcgttttagttaccttaatcccgctggcattggcgctaaagacgtgaaagagggctttttattccagttagatggtagggaattggacaataacgagctttatgaagaaacgcgaaaaatcattttaaatttagaaaaacaccatgaattttctaaagatttttattatgaaaaggctttaaagattttaaaatcctttaaaaaccccccagccattgaatttttagaaaaagaaatagaagtcattcctgagctttttattttagaagtggataatgaaatgattgtgcgtttgaatgatgagagctacccaacaatcagtttagaagaaaatcgctttaaggatagcgattatttaaaagaaaaactaaaagaagccaaagatttgattgacgcgttaaatttgagaaaagccacgatttataaaatcggtctgatgctcttagaataccaatacgatttttttaaaggtaaggaattacgccctttaaaattactggatttagccaatgagtttaaccactctgtaagcacgatttcaagggctatttctaataaatatttggcatgcgaaaggggggttttccccattaaacatttctttagcatcgccttagacaatagcgagacttcaaacgctgtgattaaagactatcttttagaattgattaaaaacgaggacaaaaaagagcctttgagcgacgctaagattttagaactcattgaagagaaattccatttgaaaatggtaagaagaacgatcaccaaataccgccaactgctcaacatcgcttcttcaagcgaaaggaaaaggctctatttgatgcgcgct

SEQ ID NO: 2262 - DNA (genomic), 273 bp, Helicobacter pylori; double-stranded, circular
  misc_feature (B) LOCATION 1...273
  hypothetical: NO
  anti-sense: NO
atggctttgaatctggagaaaaaacaagaaatcattaaggcgtttgccactaaagcaaacgatacgggttcttgtgaggtgcaagtggcgttgttgaatgaaaggatcaagcttttaaccgagcatttgaaaactaaccctaaagatcattccagtcgtttagggcttttaaaattagtcgctcaaagacgcaatctgttgaaatacatcaaacgcaccgatcatgtgcgttatgtggttttgattgaaaagctaggcattaaagacagatag

SEQ ID NO: 2263 - DNA (genomic), 279 bp, Helicobacter pylori; double-stranded, circular
  misc_feature (B) LOCATION 1...279
  hypothetical: NO
  anti-sense: NO
gaggtcgttatggctttgaacctggagaaaaaacaagaaatcattaaggcgtttgccactaaagcaaatgatacgggttcttgtgaggtgcaagtggcgttgttgaatgaaaggatcaagcttttaaccgagcatttgaaaactaaccctaaagatcattccagtcgtttagggcttttaaaattagtcgctcaaagacgcaatctgttgaaatacatcaaacgcaccgatcatgtgcgttatgtggttttgattgaaaagctaggcattaaagacaga

SEQ ID NO: 2264 - DNA (genomic), 252 bp, Helicobacter pylori; double-stranded, circular
  misc_feature (B) LOCATION 1...252
  hypothetical: NO
  anti-sense: NO
ttttctaaagtgtttagcgcaaaccttttgcctgaaattttattagagagcgattttgatgagggggttggggttttagatgttttaaaacagattggcttttgcccatccacttcacaagccaggcgcgatattcaaggaggaggggtaaagattaatcaagaagtggtaaaagatgagagttatcgttttgttaaaggaaattatgttatacagcttggtaagaaaagatttatgaaattaaatattaac

SEQ ID NO: 2265 - DNA (genomic), 840 bp, Helicobacter pylori; double-stranded, circular
  misc_feature (B) LOCATION 1...840
  hypothetical: NO
  anti-sense: NO
gggataaacatggaacaaaaaatcagtgtggccttaaaagagatcaaaagaggcgctaatgaaatcattggattagtatacattgaaaagctggtgaggaaattttatgaaaccaatgtacgttttatcgttaaggccggttttgatcctaccgctcccgatttgcatttagggcatacggtattgatccaaaaattagctttattgcagcagtatggggctagagttaagtttttgattggggattttaccgctatgataggcgatcctacgggtaaaaatgaaacgaggaagcccctaaaccgggagcaagtcttagaaaacgctaaaacttataaagagcaaatctataagattttagatcaaaaacacaccgaagtgtgctttaattccgcttggttggatgctttaggcgcaaagggcatgatagaattgtgcgcgaagttttcagtcgctagaatgctagaaagggacgattttgctaaacgctacaaagaaaaccgccccattagcatcgtggaatttttataccctttgctgcaaggctatgattcagtggcgatgggtgcggatattgagcttgggggcaatgatcaaaagtttaatttgctggtggggcgctttttgcaacgagcttatggtttgaataaagagcaatctatcatcaccatgcctttattagaagggcttgatggggtgcaaaaaatgagtaaaagcttggggaattatgtggggatcactgaagagcctaacgcgatgtttgggaagatcatgagcgtgagcgatgatctcatgtggcgctattacacccttttgagcgctaagactttagaagaaact

SEQ ID NO: 2266 - DNA (genomic), 1209 bp, Helicobacter pylori; double-stranded, circular
  misc_feature (B) LOCATION 1...1209
  hypothetical: NO
  anti-sense: NO
atggaacaaaaaatcagtgtggccttaaaagagatcaaaagaggcgctaatgaaatcattggattagaatacattgaaaagctggtgaggaaatattatgaaaccaatgaacgctttatcgttaaggccggttttgatcctaccgctcccgatttgcatttagggcatacggtattgatccaaaaattagctttattgcagcagtatggggctagagttaagtttttgattggggattttaccgctatgataggcgatcctacgggtaaaaatgaaacgaggaagcccctaaaccgggagcaagtcttagaaaacgctaaaacttataaagagcaaatctataagattttagatcaaaaacacaccgaagtgtgctttaattccgcttggttggatgctttaggcgcaaagggcatgatagaattgtgcgcgaagttttcagtcgctagaatgctagaaagggacgattttgctaaacgctacaaagaaaaccgccccattagcatcgtggaatttttataccctttgctgcaaggctatgattcagtggcgatgggtgcggatattgagcttgggggcaatgatcaaaagtttaatttgctggtggggcgctttttgcaacgagcttatggtttgaataaagagcaatctatcatcaccatgcctttattagaagggcttgatggggtgcaaaaaatgagtaaaagcttggggaattatgtggggatcactgaagagcctaacgcgatgtttgggaagatcatgagcgtgagcgatgatctcatgtggcgctattacacccttttgagcgctaagactttagaagaaattgaagacttaaaacatggtattttacaccaaaccctgcaccctaaagccgttaaagaggatctcgctagtgaaatcgtggctcgttattacgacaatgatcaagcattcaaggctaaagagcaattttctaaagtgtttagcgcaaaccttttgcctgaaattttattagagagcgattttgatgagggggttggggttttagatgttttaaaacagattggcttttgcccatccacttcacaagccaggcgcgatattcaaggaggaggggtaaagattaatcaagaagtggtaaaagatgagagttatcgttttgttaaaggaaattatgttatacagcttggtaagaaaagatttatgaaattaaatattaactaa

SEQ ID NO: 2267 - DNA (genomic), 1209 bp, Helicobacter pylori; double-stranded, circular; identical to SEQ ID NO: 2266
  misc_feature (B) LOCATION 1...1209
  hypothetical: NO
  anti-sense: NO

SEQ ID NO: 2268 - DNA (genomic), 657 bp, Helicobacter pylori; double-stranded, circular
  misc_feature (B) LOCATION 1...657
  hypothetical: NO
  anti-sense: NO
aaagctttgaaaatttgggccaaactcactgaagaaattgaaaataaggtgttttctttaaaagaagacgcgattttagaataccaggagatgagtttatggactcgaggtttgagatatttgggttttaaaaccaatgttttgaattttttaacccccaaccggcaatggcagtgtaaggaattggagcattttagcgtttggtcaagtaacgctttagaaatcaaacaggtgttattgaatgattgttgttaccctaaatatggcgatgaaatcattgcgattgtaacggatttgaaagatccaaaggcgattgcacaccataaattttgcaaaaaagcgatagcggaagtggatgctaaagtgcctatggtttatatagaatggcacaagcgggatcgaacgatttataaaatgatgttttatttaggagagaaaaagtcggttttagcgagtttactgacttttttaaacagaaatgaatgcaatattgtgggcgtgtcttacttaggctataaggacaaatattctagccattgcgaagtgagttttgaaatagccacggataaggcggattggatgagggctttaatcaatcgcaaatatcaggataggattgtagaattatccagtctggatgacgcttatgagctacaa

SEQ ID NO: 2269 - DNA (genomic), 1581 bp, Helicobacter pylori; double-stranded, circular
  misc_feature (B) LOCATION 1...1581
  hypothetical: NO
  anti-sense: NO
atgaacgaaattgacaaatccgttgatatcggattcttacggattctggatgttattaaaaaagttaaaaccccaaagggtggtattgaggttttaaggactttaattgatttcacgcccaaaattgaaaacgccctaaatttagcgaccaaaagccataaggggcaatacagaaagagcggtgagccttatattgtccatcctatttgcgtggcgagcgtggtggcgttttgtgggggcgatgaggcgatggtgtgcgccgcgcttttgcatgatgtggtagaagacacgccttgtgagattgaaacgattgagcgagaatttgggcaagatgtggctaatttagtggatgcgctcaccaaaatcactgaaatcaggaaagaagagttaggcgtgagttctcaagatcccagaatggtggtttcagccctcacttttagaaagatccttattagcgcgatacaagatccaagagccttagtggtaaagattagcgacaggttgcacaacatgctcaccttagacgccttgcctcatgacaagcaggtgcgtatttctaaagaaactctagcggtgtatgcccccatagcgagtcgattgggcatgtcttcaatcaaaaacgaattagaagacaagagcttttattatatttatccagaagagtataaaaatattaaggagtatttgcacaaaaacaaacagtctttactcttaaaactcaacgcttttgcgagcaagttagaaaaaaagctttttgacagcgggtttagccattcggattttaaactcgttacaagggtgaaacgcccttattctatttatcttaagatgcaacgaaaaggggcggttaatattgatgaaattttggacttgttagccattaggattttattgaaaaacccgattgattgctacaaggttttagggattattcatttgaatttcaaacccattgtttctcgttttaaagattacatcgctttgcccaaagaaaatggctataagacaatacacacgacgatttttgatgaatcttctgtttatgaagtgcagatccgcacttttgatatgcacatgggggcggagtatggtaattcagcccattggaagtataaagccgggggcgtggatcatgaagaacatcatgagggcatgcggtggttgcaaaattttaaataccatgacagcgatttgaaaaacgaccctaaggaattttacgaactcgctaagaacgatttgtatcgtgaagatattgtcgttttttcgccccatggggacacttacactttaccggtgggcgcgatcgctttagatttcgcttacatggtgcatagtgatttgggcgataaagccacggacgcttatatcaatagtaaaaaagccttactcaatcaagaattaaggagtggggatgtggttaaaatcattaaaggcgataaagtaatacctcgtttcatttggatggatcagcttaaaacttctaaggctaaaaaccatttgcgcatccaaagaagaaaccgcttgaaagaaattgacactaagagcatgatcaatatcttagcgacttttttttgggcgctc

SEQ ID NO: 2270 - DNA (genomic), 1704 bp, Helicobacter pylori; double-stranded, circular
  misc_feature (B) LOCATION 1...1704
  hypothetical: NO
  anti-sense: NO
atgaacgaaattgacaaatccgttgatatcggattcttacggattctggatgttattaaaaaagttaaaaccccaaagggtggtattgaggttttaaggactttaattgatttcacgcccaaaattgaaaacgccctaaatttagcgaccaaaagccataaggggcaatacagaaagagcggtgagccttatattgtccatcctatttgcgtggcgagcgtggtggcgttttgtgggggcgatgaggcgatggtgtgcgccgcgcttttgcatgatgtggtagaagacacgccttgtgagattgaaacgattgagcgagaatttgggcaagatgtggctaatttagtggatgcgctcaccaaaatcactgaaatcaggaaagaagagttaggcgtgagttctcaagatcccagaatggtggtttcagccctcacttttagaaagatccttattagcgcgatacaagatccaagagccttagtggtaaagattagcgacaggttgcacaacatgctcaccttagacgccttgcctcatgacaagcaggtgcgtatttctaaagaaactctagcggtgtatgcccccatagcgagtcgattgggcatgtcttcaatcaaaaacgaattagaagacaagagcttttattatatttatccagaagagtataaaaatattaaggagtatttgcacaaaaacaaacagtctttactcttaaaactcaacgcttttgcgagcaagttagaaaaaaagctttttgacagcgggtttagccattcggattttaaactcgttacaagggtgaaacgcccttattctatttatcttaagatgcaacgaaaaggggcggttaatattgatgaaattttggacttgttagccattaggattttattgaaaaacccgattgattgctacaaggttttagggattattcatttgaatttcaaacccattgtttctcgttttaaagattacatcgctttgcccaaagaaaatggctataagacaatacacacgacgatttttgatgaatcttctgtttatgaagtgcagatccgcacttttgatatgcacatgggggcggagtatggtaattcagcccattggaagtataaagccgggggcgtggatcatgaagaacatcatgagggcatgcggtggttgcaaaattttaaataccatgacagcgatttgaaaaacgaccctaaggaattttacgaactcgctaagaacgatttgtatcgtgaagatattgtcgttttttcgccccatggggacacttacactttaccggtgggcgcgatcgctttagatttcgcttacatggtgcatagtgatttgggcgataaagccacggacgcttatatcaatagtaaaaaagccttactcaatcaagaattaaggagtggggatgtggttaaaatcattaaaggcgataaagtaatacctcgtttcatttggatggatcagcttaaaacttctaaggctaaaaaccatttgcgcatccaaagaagaaaccgcttgaaagaaattgacactaagagcatgatcaatatcttagcgactttttttgggcgctctgtttttgaagatgcggatttgaaagattataaaaactttgaagaaaaattaacagattgtggggtggagaccaccttaacagaagcgatgaaaagctttgaaaatttgggccaaactcactga

SEQ ID NO: 2271 - DNA (genomic), 1704 bp, Helicobacter pylori; double-stranded, circular; identical to SEQ ID NO: 2270
  misc_feature (B) LOCATION 1...1704
  hypothetical: NO
  anti-sense: NO

SEQ ID NO: 2272 - DNA (genomic), 1701 bp, Helicobacter pylori; double-stranded, circular
  misc_feature (B) LOCATION 1...1701
  hypothetical: NO
  anti-sense: NO
atgaacgaaattgacaaatccgttgatatcggattcttacggattctggatgttattaaaaaagttaaaaccccaaagggtggtattgaggttttaaggactttaattgatttcacgcccaaaattgaaaacgccctaaatttagcgaccaaaagccataaggggcaatacagaaagagcggtgagccttatattgtccatcctatttgcgtggcgagcgtggtggcgttttgtgggggcgatgaggcgatggtgtgcgccgcgcttttgcatgatgtggtagaagacacgccttgtgagattgaaacgattgagcgagaatttgggcaagatgtggctaatttagtggatgcgctcaccaaaatcactgaaatcaggaaagaagagttaggcgtgagttctcaagatcccagaatggtggtttcagccctcacttttagaaagatccttattagcgcgatacaagatccaagagccttagtggtaaagattagcgacaggttgcacaacatgctcaccttagacgccttgcctcatgacaagcaggtgcgtatttctaaagaaactctagcggtgtatgcccccatagcgagtcgattgggcatgtcttcaatcaaaaacgaattagaagacaagagcttttattatatttatccagaagagtataaaaatattaaggagtatttgcacaaaaacaaacagtctttactcttaaaactcaacgcttttgcgagcaagttagaaaaaaagctttttgacagcgggtttagccattcggattttaaactcgttacaagggtgaaacgcccttattctatttatcttaagatgcaacgaaaaggggcggttaatattgatgaaattttggacttgttagccattaggattttattgaaaaacccgattgattgctacaaggttttagggattattcatttgaatttcaaacccattgtttctcgttttaaagattacatcgctttgcccaaagaaaatggctataagacaatacacacgacgatttttgatgaatcttctgtttatgaagtgcagatccgcacttttgatatgcacatgggggcggagtatggtaattcagcccattggaagtataaagccgggggcgtggatcatgaagaacatcatgagggcatgcggtggttgcaaaattttaaataccatgacagcgatttgaaaaacgaccctaaggaattttacgaactcgctaagaacgatttgtatcgtgaagatattgtcgttttttcgccccatggggacacttacactttaccggtgggcgcgatcgctttagatttcgcttacatggtgcatagtgatttgggcgataaagccacggacgcttatatcaatagtaaaaaagccttactcaatcaagaattaaggagtggggatgtggttaaaatcattaaaggcgataaagtaatacctcgtttcatttggatggatcagcttaaaacttctaaggctaaaaaccatttgcgcatccaaagaagaaaccgcttgaaagaaattgacactaagagcatgatcaatatcttatcgactttttttgggcgctctgtttttgaagatgcggatttgaaagattataaaaactttgaagaaaaattaacagattgtggggtggagaccaccttaacagaagcgatgaaaagctttgaaaatttgggccaaactcac

SEQ ID NO: 2273 - DNA (genomic), 2331 bp, Helicobacter pylori; double-stranded, circular
  misc_feature (B) LOCATION 1...2331
  hypothetical: NO
  anti-sense: NO
atgaacgaaattgacaaatccgttgatatcggattcttacggattctggatgttattaaaaaagttaaaaccccaaagggtggtattgaggttttaaggactttaattgatttcacgcccaaaattgaaaacgccctaaatttagcgaccaaaagccataaggggcaatacagaaagagcggtgagccttatattgtccatcctatttgcgtggcgagcgtggtggcgttttgtgggggcgatgaggcgatggtgtgcgccgcgcttttgcatgatgtggtagaagacacgccttgtgagattgaaacgattgagcgagaatttgggcaagatgtggctaatttagtggatgcgctcaccaaaatcactgaaatcaggaaagaagagttaggcgtgagttctcaagatcccagaatggtggtttcagccctcacttttagaaagatccttattagcgcgatacaagatccaagagccttagtggtaaagattagcgacaggttgcacaacatgctcaccttagacgccttgcctcatgacaagcaggtgcgtatttctaaagaaactctagcggtgtatgcccccatagcgagtcgattgggcatgtcttcaatcaaaaacgaattagaagacaagagcttttattatatttatccagaagagtataaaaatattaaggagtatttgcacaaaaacaaacagtctttactcttaaaactcaacgcttttgcgagcaagttagaaaaaaagctttttgacagcgggtttagccattcggattttaaactcgttacaagggtgaaacgcccttattctatttatcttaagatgcaacgaaaaggggcggttaatattgatgaaattttggacttgttagccattaggattttattgaaaaacccgattgattgctacaaggttttagggattattcatttgaatttcaaacccattgtttctcgttttaaagattacatcgctttgcccaaagaaaatggctataagacaatacacacgacgatttttgatgaatcttctgtttatgaagtgcagatccgcacttttgatatgcacatgggggcggagtatggtaattcagcccattggaagtataaagccgggggcgtggatcatgaagaacatcatgagggcatgcggtggttgcaaaattttaaataccatgacagcgatttgaaaaacgaccctaaggaattttacgaactcgctaagaacgatttgtatcgtgaagatattgtcgttttttcgccccatggggacacttacactttaccggtgggcgcgatcgctttagatttcgcttacatggtgcatagtgatttgggcgataaagccacggacgcttatatcaatagtaaaaaagccttactcaatcaagaattaaggagtggggatgtggttaaaatcattaaaggcgataaagtaatacctcgtttcatttggatggatcagcttaaaacttctaaggctaaaaaccatttgcgcatccaaagaagaaaccgcttgaaagaaattgacactaagagcatgatcaatatcttagcgactttttttgggcgctctgtttttgaagatgcggatttgaaagattataaaaactttgaagaaaaattaacagattgtggggtggagaccaccttaacagaagcgatgaaaagctttgaaaatttggccaaactcactgaagaaattgaaaataaggtgttttctttaaaagaagacgcgattttagaataccaggagatgagtttatggactcgaggtttgagatatttgggttttaaaaccaatgttttgaattttttaacccccaaccggcaatggcagtgtaaggaattggagcattttagcgtttgttcaagtaacgctttagaaatcaaacaggtgttattgaatgattgttgttaccctaaatatggcgatgaaatcattgcgattgtaacggatttgaaagatccaaaggcgattgcacaccataaattttgcaaaaaagcgatagcggaagtggatgctaaagtgcctatggtttatatagaatggcacaagcgggatcgaacgatttataaaatgatgttttatttaggagagaaaaagtcggttttagcgagtttactgacttttttaaacagaaatgaatgcaatattgtgggcgtgtcttacttaggctataaggacaaatattctagccattgcgaagtgagttttgaaatagccacggataaggcggattggatgagggctttaatcaatcgcaaatatcaggataggattgtagaattatccagtctggatgacgcttatgagctacaataa

SEQ ID NO: 2274 - DNA (genomic), 468 bp, Helicobacter pylori; double-stranded, circular
  misc_feature (B) LOCATION 1...468
  hypothetical: NO
  anti-sense: NO
atgagaagaagaaaagcacccgttagggaggttttgggcgatcctgtttatgggaacaaagtggttactaagtttatcaataagatgatgttcgacggcaagaaaagcgtagcggaaaaaatcatctataaagcttttaataagattgaagaaaaaagcggtgaaaaagggattgaagtgtttgaaaaagccctagaaagagtgcgtcctttagtggaagtgcgtagcagaagagtgggtggggctacctatcaagtgccggtagaagtgagagcgagccgccagcagtcgctatctattcgttggattttagaagccactagaaaacgcaatgaaagaatgatggtggatagattggctaacgaacttatggatgcggctagcgataaaggtgcggcttttaagaaaaaagaagatgtgcataaaatggcagaagcgaataaagcgttcgcgcactatcgctggtaa

SEQ ID NO: 2275 - DNA (genomic), 489 bp, Helicobacter pylori; double-stranded, circular
  misc_feature (B) LOCATION 1...489
  hypothetical: NO
  anti-sense: NO
agcaaccgacaagaaagcaacagacaacaagaaaaattaagaggaaaacaaaagcatgagaagaagaaaagcacccttagaggttttgggcgatcctttttatgggaacaaagtgttactaagtttatcaataagatgatgttcgacggcaagaaaagcgtagcggaaaaaatcatctataaagcttttaataagattgaagaaaaaagcggtgaaaaagggattgaagtgtttgaaaaagccctagaaagagtgcgtcctttagtggaagtgcgtagcagaagagtgggtggggctacctatcaagtgccggtagaagtgagagcgagccgccagcagtcgctatctattcgttggattttagaagccactagaaaacgcaatgaaagaatgatggtggatagattggctaacgaacttatggatgcggctagcgataaaggtgcggcttttaagaaaaagaagatgtgcgtaaaatggcagaagcga

SEQ ID NO: 2276 - DNA (genomic), 516 bp, Helicobacter pylori; double-stranded, circular
  misc_feature (B) LOCATION 1...516
  hypothetical: NO
  anti-sense: NO
aatgtagaaaaccagatcaagcaacgcttgaaagctaatcctgtgcctattaatatccctattggggctgaagacactttcattggcgtgattgatttagtccaaatgaaagcgattgtttggaataatgaaaccatgggagccaaatacgatgtggaagaaatccctagcgatttgttagaaaaggctaaacaataccgagaaaagcttgtagaagccgtagccgagcaagatgaagccttgatggaaaagtatttaaacggtgaagaattggatattgaagaaatcaaaaaaggcattaaaacgggttgtttgaacatgagctttgtccccatgctttgtggttcttcttttaaaaataagggcgtgcagactttattggatgctgtcattgattacttgccagcgcccacagaggttgtggatattaaggggattgatccaaaaactgaagaagaggtttttgtgaaatcgaccatggtccgcccgcatgcgccgattcgctcaatttcagtc

SEQ ID NO: 2277 - DNA (genomic), 513 bp, Helicobacter pylori; double-stranded, circular
  misc_feature (B) LOCATION 1...513
  hypothetical: NO
  anti-sense: NO
gtagaaaaccagatcaagcaacgcttgaaagctaatcctgtgcctattaatatccctattggggctgaagacactttcattggcgtgattgatttagtccaaatgaaagcgattgtttggaataatgaaaccatgggagccaaatacgatgtggaagaaatccctagcgatttgttagaaaaggctaaacaataccgagaaaagcttgtagaagccgtagccgagcaagatgaagccttgatggaaaagtatttaaacggtgaagaattggatattgaagaaatcaaaaaaggcattaaaacgggttgtttgaacatgagctttgtccccatgctttgtggttcttcttttaaaaataagggcgtgcagactttattggatgctgtcattgattacttgccagcgcccacagaggttgtggatattaaggggattgatccaaaaactgaagaagaggtttttgtgaaatcgaccatggtccgcccgcatgcgccgattcgctcaatttcagtc

SEQ ID NO: 2278 - DNA (genomic), 996 bp, Helicobacter pylori; double-stranded, circular
  misc_feature (B) LOCATION 1...996
  hypothetical: NO
  anti-sense: NO
aataaaaggaagaacattaaagaagtttatgcgggcgagatttgcgcgttcgtgggcttgaaagacacgctgactggggacacgctttgcgatgaaaagaatgcggtggttttagagagaatggaatttcctgagccggtcattcacatcgctgtggagcctaaaacgaaagcagaccaggaaaaaatgggcgtagcgttaggcaagcttgctgaagaagatccaagctttagggtgatgactcaagaagaaaccggtcaaacccttattggtggtatgggtgaattgcacctagaaatcatcgtggatagattgaagagagaatttaaggtggaagctgaaatcggtcagccgcaagtcgcctttagagagactatccgctcaagcgtgagcaaagagcataaatacgctaagcaaagtggtggccgtgggcaatacgggcatgtgtttatcaagcttgagcctaaagagcctggcagtgggtatgaatttgtgaatgaaatttctgggggcgtgatccctaaagaatatatccctgcggtggataagggtatccaagaagcgatgcaaaatggcgttttggcaggctatccggtggtggattttaaagttaccctttatgatgggagctaccatgatgtggattcttcagaaatggcgtttaaaatcgctggctctatggcgtttaaagaagcgagtcgtgcggctaacccggttttactagagcctatgatgaaagtggaagtggaagtccctgaagaatacatgggcgatgtgattggcgatttaaacagaagaagagggcaaatcaattctatggacgatagattaggtttgaaaatcgtgaatgctttcgtgccgttagtggaaatgtttggttattctacggatttgcgatcagccactcaagggcgtgggacttactctatggagtttgaccactatggcgaagtgcctagcaatatcgctaaggaaatcgtggaaaaacgcaaaggc

SEQ ID NO: 2279 - DNA (genomic), 993 bp, Helicobacter pylori; double-stranded, circular
  misc_feature (B) LOCATION 1...993
  hypothetical: NO
  anti-sense: NO
aaaaggaagaacattaaagaagtttatgcgggcgagatttgcgcgttcgtgggcttgaaagacacgctgactggggacacgctttgcgatgaaaagaatgcggtggttttagagagaatggaatttcctgagccggtcattcacatcgctgtggagcctaaaacgaaagcagaccaggaaaaaatgggcgtagcgttaggcaagcttgctgaagaagatccaagctttagggtgatgactcaagaagaaaccggtcaaacccttattggtggtatgggtgaattgcacctagaaatcatcgtggatagattgaagagagaatttaaggtggaagctgaaatcggtcagccgcaagtcgcctttagagagactatccgctcaagcgtgagcaaagagcataaatacgctaagcaaagtggtggccgtgggcaatacgggcatgtgtttatcaagcttgagcctaaagagcctggcagtgggtatgaatttgtgaatgaaatttctgggggcgtgatccctaaagaatatatccctgcggtggataagggtatccaagaagcgatgcaaaatggcgttttggcaggctatccggtggtggattttaaagttaccctttatgatgggagctaccatgatgtggattcttcagaaatggcgtttaaaatcgctggctctatggcgtttaaagaagcgagtcgtgcggctaacccggttttactagagcctatgatgaaagtggaagtggaagtccctgaagaatacatgggcgatgtgattggcgatttaaacagaagaagagggcaaatcaattctatggacgatagattaggtttgaaaatcgtgaatgctttcgtgccgttagtggaaatgtttggttattctacggatttgcgatcagccactcaagggcgtgggacttactctatggagtttgaccactatggcgaagtgcctagcaatatcgctaaggaaatcgtggaaaaacgcaaaggc

SEQ ID NO: 2280 - DNA (genomic), 2022 bp, Helicobacter pylori; double-stranded, circular
  misc_feature (B) LOCATION 1...2022
  hypothetical: NO
  anti-sense: NO
atgtctgggaaaaccaccacttctgaaaggattttattctatacaggcgtgagccataagattggcgaagtgcatgacggtgcggcgacaatggattggatggagcaagaaaaagaaagagggatcacgatcacttctgcggcaacgacttgcttttggaaggatcaccaaatcaatttgattgacactccagggcatgtggatttcactattgaagtggaacgatccatgcgtgtgctagatggcgcggtttcggtgttttgctcggttgggggcgtgcagcctcaaagcgagaccgtgtggcgtcaagcgaataaatacggcgtgcctaggattgtttttgtcaataaaatggataggattggggcgaatttctataatgtagaaaaccagatcaagcaacgcttgaaagctaatcctgtgcctattaatatccctattggggctgaagacactttcattggcgtgattgatttagtccaaatgaaagcgattgtttggaataatgaaaccatgggagccaaatacgatgtggaagaaatccctagcgatttgttagaaaaggctaaacaataccgagaaaagcttgtagaagccgtagccgagcaagatgaagccttgatggaaaagtatttaggcggtgaagaattggatattgaagaaatcaaaaaaggcattaaaacgggttgtttgaacatgagctttgtccccatgctttgtggttcttcttttaaaaataagggcgtgcagactttattggatgctgtcattgattacttgccagcgcccacagaggttgtggatattaaggggattgatccaaaaactgaagaagaggtttttgtgaaatccagcgatgatggcgagtttgccggtttggcgtttaaaatcatgacggatccttttgtggggcaattgacttttgtgcgcgtgtatcgtggcaagctagagtccggtagctatgtgtataattccaccaaagacaagaaagagcgcgtgggaagactccttaaaatgcactccaataagagggaagacattaaagaagtttatgcgggcgagatttgcgcgttcgtgggcttgaaagacacgctgactggggacacgctttgcgatgaaaagaatgcggtggttttagagagaatggaatttcctgagccggtcattcacatcgctgtggagcctaaaacgaaagcagaccaggaaaaaatgggcgtagcgttaggcaagcttgctgaagaagatccaagctttagggtgatgactcaagaagaaaccggtcaaacccttattggtggtatgggtgaattgcacctagaaatcatcgtggatagattgaagagagaatttaaggtggaagctgaaatcggtcagccgcaagtcgcctttagagagactatccgctcaagcgtgagcaaagagcataaatacgctaagcaaagtggtggccgtgggcaatacgggcatgtgtttatcaagcttgagcctaaagagcctggcagtgggtatgaatttgtgaatgaaatttctgggggcgtgatccctaaagaatatatccctgcggtggataagggtatccaagaagcgatgcaaaatggcgttttggcaggctatccggtggtggattttaaagttaccctttatgatgggagctaccatgatgtggattcttcagaaatggcgtttaaaatcgctggctctatggcgtttaaagaagcgagtcgtgcggctaacccggttttactagagcctatgatgaaagtggaagtggaagtccctgaagaatacatgggcgatgtgattggcgatttaaacagaagaagagggcaaatcaattctatggacgatagattaggtttgaaaatcgtgaatgctttcgtgccgttagtggaaatgtttggttattctacggatttgcgatcagccactcaagggcgtgggacttactctatggagtttgaccactatggcgaagtgcctagcaatatcgctaaggaaatcgtggaaaaacgcaaaggctga

SEQ ID NO: 2281 - DNA (genomic), 2025 bp, Helicobacter pylori; double-stranded, circular
  misc_feature (B) LOCATION 1...2025
  hypothetical: NO
  anti-sense: NO
ttgatgtctgggaaaaccaccacttctgaaaggattttattctatacaggcgtgagccataagattggcgaagtgcatgacggtgcggcgacaatggattggatggagcaagaaaaagaaagagggatcacgatcacttctgcggcaacgacttgcttttggaaggatcaccaaatcaatttgattgacactccagggcatgtggatttcactattgaagtggaacgatccatgcgtgtgctaaatggcgcggtttcggtgttttgctcggttgggggcgtgcagcctcaaagcgagaccgtgtggcgtcaagcgaataaatacggcgtgcctaggattgtttttgtcaataaaatggataggattggggcgaatttctataatgtagaaaaccagatcaagcaacgcttgaaagctaatcctgtgcctattaatatccctattggggctgaagacactttcattggcgtgattgatttagtccaaatgaaagcgattgtttggaataatgaaaccatgggagccaaatacgatgtggaagaaatccctagcgatttgttagaaaaggttaaacaataccgagaaaagcttgtagaagccgtagccgagcaagatgaagccttgatggaaaagtatttaggcggtgaagaattggatattgaagaaatcaacaaaggcattaaaacgggttgtttgaacatgagctttgtccccatgctttgtggttcttcttttaaaaataagggcgtgcagactttattggatgctgtcattgattacttgccagcgcccacagaggttgtggatattaaggggattgatccaaaaactgaagaagaggtttttgtgaaatccagcgatgatggcgagtttgccggtttggcgtttaaaatcatgacggatccttttgtggggcaattgacttttgtgcgcgtgtatcgtggcaagctagagtccggtagctatgtgtataattccaccaaagacaagaaagagcgcgtgggaagactccttaaaatgcactccaataagagggaagacattaaagaagtttatgcgggcgagatttgcgcgttcgtgggcttgaaagacacgctgactggggacacgctttgcgatgaaaagaatgcggtggttttagagagaatggaatttcctgagccggtcattcacatcgctgtggagcctaaaacgaaagcagaccaggaaaaaatgggcgtagcgttaggcaagcttgctgaagaagatccaagctttagggtgatgactcaagaagaaaccggtcaaacccttattggtggtatgggtgaattgcacctagaaatcatcgtggatagattgaagagagaatttaaggtggaagctgaaatcggtcagccgcaagtcgcctttagagagactatccgctcaagcgtgagcaaagagcataaatacgctaagcaaagtggtggccgtgggcaatacgggcatgtgtttatcaagcttgagcctaaagagcctggcagtgggtatgaatttgtgaatgaaatttctgggggcgtgatccctaaagaatatatccctgcggtggataagggtatccaagaagcgatgcaaaatggcgttttggcaggctatccggtggtggattttaaagttaccctttatgatgggagctaccatgatgtggattcttcagaaatggcgtttaaaatcgctggctctatggcgtttaaagaagcgagtcgtgcggctaacccggttttactagagcctatgatgaaagtggaagtggaagtccctgaagaatacatgggcgatgtgattggcgatttaaacagaagaagagggcaaatcaattctatggacgatagattaggtttgaaaatcgtgaatgctttcgtgccgttagtggaaatgtttggttattctacggatttgcgatcagccactcaagggcgtgggacttactctatggagtttgaccactatggcgaagtgcctagcaatatcgctaaggaaatcgtggaaaaacgcaaaggctga

SEQ ID NO: 2282 - DNA (genomic), 414 bp, Helicobacter pylori; double-stranded, circular
  misc_feature (B) LOCATION 1...414
  hypothetical: NO
  anti-sense: NO
aattttagcatacaaatacaaggaaatggaatgattacccctaaagtgttgagcgggtttaaagaccgcttgcctaaagatgcgatacaaaaagcccagttgctcgctaaagtttcagtcgtgtttcaaagttttggttttgtgccgattgaaaccccccatttggaatacgctcaaacgttattgcctgatgcgagcagtgatattcaaaaagaaatttatcgttttaaagaccatggggatagggatgtggctttaaggtttgatttgaccgtgccattagcccgctttgtctctttgcaccaccaaatattaggcatgccctttaaacgctacgccataggaatgtctttaggggtgaaagggcgcaaaaagggcgttatagggaatttacgcaatgcgattttgatttta

SEQ ID NO: 2283 - DNA (genomic), 1026 bp, Helicobacter pylori; double-stranded, circular
  misc_feature (B) LOCATION 1...1026
  hypothetical: NO
  anti-sense: NO
acgctacgccataggaatgtctttaggggtgaaagggcgcaaaaagggcgttatagggaatttacgcaatgcgattttgattttatagggagcgagagtttggtgtgcgatgctgagatcattcaagtgatcatcgcttccttaaaagctttggatttagaagatttttgcgtctctatcaaccacagaaaaattttgaatggcatatgcgaatattttggcattgctcaagtgaatgaagtgttgcgcattgtggataaattagaaaagattggcttgaatggggttgaagaagaactaaaaaaagagtgcgatttggattcaaacaccattaaagatcttttagaaatggttcaaatcaaacaaaacgatttaagccatgcggaattttttgaaaaaattgcttatttgaaagactacaatgaaaatctgaaaaagggcatacaggatttagaaaggctataccagttgctaggggatttacaaatttctcaaaacttgtataaaattgatttttctatcgctagggggttagggtattatacagggattgtgtatgaaaccacgcttaatgacatgaagtctttagggagcgtgtgttcaggggggcgttacgatcatttgactaaaaatttttctaaagaaaatttacaaggagtgggggcttctattgggattgaccgattgattgtggctttaagtgaaatgcaattattagacgagcgttccacccaagctaaagtcttaatcgcttgcatgcatgaagagtatttttcttacgccaaccgcttagcggagtctttaagacaaagcggtatttttagcgaagtctatccagaagctcaaaaaatcaaaaaacccttttcttacgctaaccacaaggggcatgagtttgtggctgtcattggcgaagaagaatttaaaagcgaaactttaagcttgaaaaacatgcattcaggcatgcaattgaattgcttgagttttttaaaagcccttgaaatcattggagaaaacgatgaagactta

SEQ ID NO: 2284 - DNA (genomic), 1329 bp, Helicobacter pylori; double-stranded, circular
  misc_feature (B) LOCATION 1...1329
  hypothetical: NO
  anti-sense: NO
atgattacccctaaagtgttgagcgggtttaaagaccgcttgcctaaagatgcgatacaaaaagcccagttgctcgctaaagtttcagtcgtgtttcaaagttttggttttgtgccgattgaaaccccccatttggaatacgctcaaacgttattgcctgatgcgagcagtgatattcaaaaagaaatttatcgttttaaagaccatggggatagggatgtggctttaaggtttgatttgaccgtgccattagcccgctttgtctctttgcaccaccaaatattaggcatgccctttaaacgctacgccataggcaatgtctttaggggtgaaagggcgcaaaaagggcgttatagggaatttacgcaatgcgattttgattttatagggagcgagagtttggtgtgcgatgctgagatcattcaagtgatcatcgcttccttaaaagctttggatttagaagatttttgcgtctctatcaaccacagaaaaattttgaatggcatatgcgaatattttggcattgctcaagtgaatgaagtgttgcgcattgtggataaattagaaaagattggcttgaatggggttgaagaagaactaaaaaaagagtgcgatttggattcaaacaccattaaagatcttttagaaatggttcaaatcaaacaaaacgatttaagccatgcggaattttttgaaaaaattgcttatttgaaagactacaatgaaaatctgaaaaagggcatacaggatttagaaaggctataccagttgctaggggatttacaaatttctcaaaacttgtataaaattgatttttctatcgctagggggttagggtattatacagggattgtgtatgaaaccacgcttaatgacatgaagtctttagggagcgtgtgttcaggggggcgttacgatcatttgactaaaaatttttctaaagaaaatttacaaggagtgggggcttctattgggattgaccgattgattgtggctttaagtgaaatgcaattattagacgagcgttccacccaagctaaagtcttaatcgcttgcatgcatgaagagtatttttcttacgccaaccgcttagcggagtctttaagacaaagcggtatttttagcgaagtctatccagaagctcaaaaaatcaaaaaacccttttcttacgctaaccacaaggggcatgagtttgtggctgtcattggcgaagaagaatttaaaagcgaaactttaagcttgaaaaacatgcattcaggcatgcaattgaattgcttgagttttttaaaagcccttgaaatcattggagaaaacgatgaagacttataa

SEQ ID NO: 2285 - DNA (genomic), 300 bp, Helicobacter pylori; double-stranded, circular
  misc_feature (B) LOCATION 1...300
  hypothetical: NO
  anti-sense: NO
gggtttatacgactacccctaaaaaaccctaactcggctttaagaaaggtcgctaaggtccgtttgaccagtaaatttgaagtgatcagttacatccctggtgaaaggcataacttacaagagcactccattgtgttagtgcgtgggggtagggttaaggatttacccggtgtgaaataccacatcgttcgtggtgctttagacactgcaggggtcaataaaagaccggtttcacgctctaaatacgggactaaaaagcctaaagcaaccgacaagaaagcaacagacaacaagaaaaat

SEQ ID NO: 2286 - DNA (genomic), 408 bp, Helicobacter pylori; double-stranded, circular
  misc_feature (B) LOCATION 1...408
  hypothetical: NO
  anti-sense: NO
gtgcctactatcaatcagttgattagaaaagaaaggaaaaaggtggttaaaaaaacgaaatcacctgcattagtggaatgccctcaaagaagaggggtttgtactagggtttatacgactacccctaaaaagcctaactcggctttaagaaaggtcgctaaggtccgtttgaccagtaaatttgaagtgatcagttacatccctggtgaagggcataacttacaagagcactccattgtgttagtgcgtgggggtagggttaaggatttacccggtgtgaaataccacatcgttcgtggtgctttagacactgcaggggtcaataaaagaacggtttcacgctctaaatacgggactaaaaaagctaaagcaaccgacaagaaagcaacagacaacaagaaaaaataa

SEQ ID NO: 2287 - DNA (genomic), 846 bp, Helicobacter pylori; double-stranded, circular
  misc_feature (B) LOCATION 1...846
  hypothetical: NO
  anti-sense: NO
ttggcccaagaattggacgctgaaatcttttctttggattctttgagtatttatgaagacatcaatatcgcttcggcaaaacccagcctaaaagagcgaaaaaatatcaagcattacgccctagactaccttaacattgatgaaaaaaataacgcttctctttttaaaacccttttagaggacgccatgagagtgtcttctaaagagattttactcattgtgggagggagcagtttttacctcaaatccattttagaaggtttgagcggcatgccaaaactgagcgatgaagaggttgtaaaaatagagcgagaaattgccactctttctaacccttatatatttttaaaatccattgaccctaacatggcttttaaaatccatccaaacgacacttaccgcatccataaggctttagaaatcttttatgccacccacacgcccccaagcgagtattttaaggctaaccctaaaaaaccctttgagcatgctatctcgttattcgctctgtctgttgaaaaaaacgcgcttgcaaacaacatcaaacagcgcaccaaaagcatgcttgattgcgggcttattgaagaaatcaaagccctttatattaaataccctaaagattcgcagccttttaaagccataggcgttaaagagagcgttctttatttagaaaaacgactcactttaaaggagctagaagaagcgattatctctaacaccatgaaattagccaagcgccaaaacactttcaataaaacccaattcaataacctttatatggggagcgttggagagattaggcatgcgattttaaaacactcaaaaagcgatacaagggagcgataa

SEQ ID NO: 2288 - DNA (genomic), 867 bp, Helicobacter pylori; double-stranded, circular
  misc_feature (B) LOCATION 1...867
  hypothetical: NO
  anti-sense: NO
cgggagcgcaaacctctttcgattgattggcccagaattggcgctgaaatcttttctttggattctttgagtggttgtggagacatcaatatcgcttcggcaaaacccagcctaaaagagcgaaaaaatatcaagcattacgccctagactaccttaacattgatgaaaaaaataacgcttctctttttaaaacccttttagaggacgccatgagagtgtcttctaaagagattttactcattgtgggagggagcagtttttacctcaaatccattttagaaggtttgagcggcatgccaaaactgagcgatgaagaggttgtaaaaatagagcgagaaattgccactctttctaacccttatatatttttaaaatccattgaccctaacatggcttttaaaatccatccaaacgacacttaccgcatccataaggctttagaaatcttttatgccacccacacgcccccaagcgagtattttaaggctaaccctaaaaaaccctttgagcatgctatctcgttattcgctctgtctgttgaaaaaaacgcgcttgcaaacaacatcaaacagcgcaccaaaagcatgcttgattgcgggcttattgaagaaatcaaagccctttatattaaataccctaaagattcgcagccttttaaagccataggcgttaaagagagcgttctttatttagaaaaacgactcactttaaaggagctagaagaagcgattatctctaacaccatgaaattagccaagcgccaaaacactttcaataaaacccaattcaataacctttatatggggagcgttggagaggttaggcatgcgattttaaaacactcaaaaagcgatacaagggagcga

SEQ ID NO: 2289 - DNA (genomic), 189 bp, Helicobacter pylori; double-stranded, circular
  misc_feature (B) LOCATION 1...189
  hypothetical: NO
  anti-sense: NO
catttgtgcgagaaattgcgagcgaggttaagggcggaaaaaaagccttttcaattagaattggtagaaaaagacgctctttttttaaaagaagttgggccttattttttgatttctaatttgccttattatatcgctaccaggcttgttttaaacgcgctcaaagccctaaatgcaggggcttattgg

SEQ ID NO: 2290 - DNA (genomic), 192 bp, Helicobacter pylori; double-stranded, circular
  misc_feature (B) LOCATION 1...192
  hypothetical: NO
  anti-sense: NO
ggaattttagaagcgcttcttatggtagtagctaaaaagtctttaggacagcattttttaatggacgagtcgtttttagacagaattgttaatgctttgccccccttaaattcattaagattgattgaaatcggcgtggggctaggggatttgactctcaagttgttggatcgctatcctttaaagagctta

SEQ ID NO: 2291 - DNA (genomic), 264 bp, Helicobacter pylori; double-stranded, circular
  misc_feature (B) LOCATION 1...264
  hypothetical: NO
  anti-sense: NO
aaggaaaaggcgttggcttcattagctcaagcgccattttttgaagaagccctacaaaaagggtttgaaacattagaagattttttgaaagcttgtttctcatctcctaggaagacgctttcaaacaatcttaaaaaaagcgtttcttataaagaaaagcttgataaggtgttagattttttagcgctagaaaaccaaccaacaagcgtgagggcgtctgaggtaaaagattatctcaagctcttaaaatccgttttaaaaggc

SEQ ID NO: 2292 - DNA (genomic), 816 bp, Helicobacter pylori; double-stranded, circular
  misc_feature (B) LOCATION 1...816
  hypothetical: NO
  anti-sense: NO
atggtagtagctaaaaagtctttaggacagcattttttaatggacgagtcgtttttagacagaattgttaatgctttgccccccttaaattcattaagattgattgaaatcggcgtggggctaggggatttgactctcaagttgttggatcgctatcctttaaagacttatgagatagatagcaatttgtgcgagaaaatgcgagcgaggttaagggcagaaaaaaagccttttcaattagaattggtagaaaaagacgctctttttttaaaagaagaagagccttattttttgatttctaatttgccttattatatcgctaccaggcttgttttaaacgcgctcaaagaccctaaatgcaggggcttattggtgatgacgcaaaaggaagtggcgctcaaattttgcgctaaagattcacagaatgcgttgagcgttttggctcacacaatagggaatgctacccttttgtttgatgtgccgcctagcgcgtttagcccgcctccaaaggtgttttctagcgtgtttgaagtgatcaaagagccgctgaaagaaaaggcgttggcttcattagctcaagcgccattttttgaagaagccctacaaaaagggtttgaaacattagaagattttttgaaagcttgtttctcatctcctaggaagacgctttcaaacaatcttaaaaaaagcgtttcttataaagaaaagcttgataaggtgttagattttttagcgctagaaaaccaaccaacaagcgtgagggcgtctgaggtaaaagattatctcaagctcttaaaatccgttttaaaaggctag

SEQ ID NO: 2293 - DNA (genomic), 186 bp, Helicobacter pylori; double-stranded, circular
  misc_feature (B) LOCATION 1...186
  hypothetical: NO
  anti-sense: NO
ggggtggtttcaaagctcgctttaatcggttgtgttttaaataatcaagccccttttaaaaaggtcattacgcatggatttatcgtcgatgaaaaggcgaaaaaaatgagcaaatctaagggcaatgtggtgtctttggacaacttactcaagaagcatggggagcgatgtggtgcgtttgtgggt

SEQ ID NO: 2294 - DNA (genomic), 243 bp, Helicobacter pylori; double-stranded, circular
  misc_feature (B) LOCATION 1...243
  hypothetical: NO
  anti-sense: NO
ctatcaaaacaatctaagggtctctcaacctttttcattcaaacagaacagcattataaaaaattccgcaacacccttaaattcttactcgccaattttagcgatatggatctcaagaatttagaacgcccccatgactttagccctttagatcattttatattagaggctttagaaacgataagcgctggagtcaatagcgcgtttgaagagcatgatttggtgaagggcttgaatatttta

SEQ ID NO: 2295 - DNA (genomic), 240 bp, Helicobacter pylori; double-stranded, circular
  misc_feature (B) LOCATION 1...240
  hypothetical: NO
  anti-sense: NO
ctatcaaaacaatctaagggtctctcaacctttttcattcaaacagaacagcattataaaaaattccgcaacacccttaaattcttactcgccaattttagcgatatggatctcaagaatttagaacgcccccatgactttagccctttagatcattttatattagaggctttagaaacgataagcgctggagtcaatagcgcgtttgaagagcatgatttggtgaagggcttgaatatt

SEQ ID NO: 2296 - DNA (genomic), 363 bp, Helicobacter pylori; double-stranded, circular
  misc_feature (B) LOCATION 1...363
  hypothetical: NO
  anti-sense: NO
tttagaggcattagcgttttagaaaaactccaccttaaagagtttaaaaagccagaaaattttgaagccgttttggccttgcgctctgcctttaatgaagagttagaccgattgaaaaaagaaggcgtggttaaaaattcgttggaatgcgctattgaagtgaaagaaaaagcgttgtgtgaaaatttagtagaagaattgctgatggtgagctttgtgggggttgcaaaagaaaaattgagcgaaacgccagcattcacgctctttaaggcccccttttataaatgccccaggtgttggcgttttaaaagcgagttagaaaacaccccttgcaagcgctgcgaagaggttttaaaagagcga

SEQ ID NO: 2297 - DNA (genomic), 405 bp, Helicobacter pylori; double-stranded, circular
  misc_feature (B) LOCATION 1...405
  hypothetical: NO
  anti-sense: NO
atgaaagaatacaaagacaccttaaacttaaacgaaaccaccttttctatgaaagggaatttgagcgttaatgagcctaaaacttacgccaaatggcaagaacaacaagcgttcaaacgcatgcaaaataggaaagataaccatggggatttcactttgcatgatgggccgccttatgcgaacgggcatttgcatttagggcatgccttaaataagattttaaaagacattgttattaaaagggaatattttaaggggaagaaaatctattacacgcccggttgggattgccatggcttacccattgagcaacaaattttagaacaattggaaaaagaaaaaacgagcctagaaaaccccacgctgtttagagaaaatgccgagaacatgcggagaagtttttag

SEQ ID NO: 2298 - DNA (genomic), 477 bp, Helicobacter pylori; double-stranded, circular
  misc_feature (B) LOCATION 1...477
  hypothetical: NO
  anti-sense: NO
aaaatgtgccgcgaaaagacacgcacctttatatcgctcctaaaacaaaagaataataaagcaaaggataatataatgaaagaatacaaagacaccttaaacttaaacgaaaccaccttttctatgaaagggaatttgagcgttaatgagcctaaaacttacgccaaatggcaagaacaacaagcgttcaaacgcatgcaaaataggaaagataaccatggggatttcactttgcatgatgggccgccttatgcgaacgggcatttgcatttagggcatgccttaaataagattttaaaagacattgttattaaaagggaatattttaaggggaagaaaatctattacacgcccggttgggattgccatggcttacccattgagcaacaaattttagaacaattggaaaaagaaaaaacgagcctagaaaaccccacgctgtttagagaaaatgccgagaacatgcggagaagtttt

SEQ ID NO: 2299 - DNA (genomic), 1227 bp, Helicobacter pylori; double-stranded, circular
  misc_feature (B) LOCATION 1...1227
  hypothetical: NO
  anti-sense: NO
agtatttatagggctttagtgggagtggctaaaaaagggcttttgaaagaacgccacaagcctatttattggagttatgcatgcgagagtgctttagcggaagctgaagtggaatacaagatgaaaaaatcgccctccattttcgtggcgattgatttgaaaaaggaggggttagaaaaattaaaagtcaaaaaagcgagcttggtgatttggacgaccacgccttggactttgtatgcgaatgtggcgatcgctttgaaaaaagacgctgtttatgcgctcacccaaaaaggctatttagtcgctaaagccttgcatgaaaaattagccgctttaggggtggtggataatgcgatcacgcatgaatttaattccaatgatttagaatatttagtggctacaaacccgctcaatcaaagggattcgctggtggttttaggggatcatgtgagtttagaagacggcacaggagccgtgcataccgcgcccgggcatggtgaagaggactactatctgggcttaaaataccatttagaagtgttgatgtctgtagatgaaaagggttgctatgatgagggcattatccataaccaattattggataaaagctatctgggcgaacacatttttaaggctcaaaaacgcattatagagcaattgggcgattctttattgttggagcgagagattgagcattcctacccgcattgctggaggacgcacaagcctgtgatttatagagcgaccacgcaatggtttattttaatggatgagccttttatccaaaatgatggctctcaaaaaaccttaagagaagtggctttagatgcgattgaaaaggtggaatttgtgccaagcagcgggaaaaaccgcctaaaaaccatgatagaaaaccgccctgattggtgcttgagccgtcaaagaaaatggggcgtgccactggcctttttcatagacaaacgcaccaataagccatgttttgagagcgaagttttagaacatgtggccaatctttttgaagagaaaggttgcgatgtgtggtgggaatataacataaaagatttattaccccctagctatcaagataacgccaagcattacgaaaaagtcatgcacattttagacgtgtggtttgatagcggtagcacctttaaggcggttttagaagactatcatggggaaaaagggcaaagccagcgatgtggttttagaagggagcgatcagca

SEQ ID NO: 2300 - DNA (genomic), 1233 bp, Helicobacter pylori; double-stranded, circular
  misc_feature (B) LOCATION 1...1233
  hypothetical: NO
  anti-sense: NO
gaagtgagtatttatagggctttagtgggagtggctaaaaaagggcttttgaaagaacgccacaagcctatttattggagttatgcatgcgagagtgctttagcggaagctgaagtggaatacaagatgaaaaaatcgccctccattttcgtggcgattgatttgaaaaaggaggggttagaaaaattaaaagtcaaaaaagcgagcttggtgatttggacgaccacgccttggactttgtatgcgaatgtggcgatcgctttgaaaaaagacgctgtttatgcgctcacccaaaaaggctatttagtcgctaaagccttgcatgaaaaattagccgctttaggggtggtggataatgcgatcacgcatgaatttaattccaatgatttagaatatttagtggctacaaacccgctcaatcaaagggattcgctggtggttttaggggatcatgtgagtttagaagacggcacaggagccgtgcataccgcgcccgggcatggtgaagaggactactatctgggcttaaaataccatttagaagtgttgatgtctgtagatgaaaagggttgctatgatgagggcattatccataaccaattattggataaaagctatctgggcgaacacatttttaaggctcaaaaacgcattatagagcaattgggcgattctttattgttggagcgagagattgagcattcctacccgcattgctggaggacgcacaagcctgtgatttatagagcgaccacgcaatggtttattttaatggatgagccttttatccaaaatgatggctctcaaaaaaccttaagagaagtggctttagatgcgattgaaaaggtggaatttgtgccaagcagcgggaaaaaccgcctaaaaaccatgatagaaaaccgccctgattggtgcttgagccgtcaaagaaaatggggcgtgccactggcctttttcatagacaaacgcaccaataagccatgttttgagagcgaagttttagaacatgtggccaatctttttgaagagaaaggttgcgatgtgtggtgggaatataacataaaagatttattaccccctagctatcaagataacgccaagcattacgaaaaagtcatgcacattttagacgtgtggtttgatagcggtagcacctttaaggcggttttagaagactatcatggggaaaaagggcaaagccagcgatgtggttttagaagggagcgatcagca

SEQ ID NO: 2301 - DNA (genomic), 1845 bp, Helicobacter pylori; double-stranded, circular
  misc_feature (B) LOCATION 1...1845
  hypothetical: NO
  anti-sense: NO
atgaaagaatacaaagacaccttaaacttaaacgaaaccaccttttctatgaaagggaatttgagcgttaatgagcctaaaacttacgccaaatggcaagaacaacaagcgttcaaacgcatgcaaaataggaaagataaccatggggatttcactttgcatgatgggccgccttatgcgaacgggcatttgcatttagggcatgccttaaataagattttaaaagacattgttattaaaagggaatattttaaggggaagaaaatctattacacgcccggttgggattgccatggcttacccattgagcaacaaattttagaacaattggaaaaagaaaaaacgagcctagaaaaccccacgctgtttagagaaaagtgccgagatcatgcgaagaagtttttagaaatccaaaagaacgagtttttgcaattaggcgttttgggagattttgaagatccttataaaaccatggattttaaatttgaagcgagcatttatagggctttagtgggagtggctaaaaaagggcttttgaaagaacgccacaagcctatttattggagttatgcatgcgagagtgctttagcggaagctgaagtggaatacaagatgaaaaaatcgccctccattttcgtggcgtttgatttgaaaaaggagggtttagaaaaattaaaagtcaaaaaagcgagcttggtgatttggacgaccacgccttggactttgtatgcgaatgtggcgatcgctttgaaaaaagacgctgtttatgcgctcacccaaaaaggctatttagtcgctaaagccttgcatgaaaaattagccgctttaggggtggtggataatgcgatcacgcatgaatttaattccaatgatttagaatatttagtggctacaaacccgctcaatcaaagggattcgctggtggttttaggggatcatgtgagtttagaagacggcacaggagccgtgcataccgcgcccgggcatggtgaagaggactactatctgggcttaaaataccatttagaagtgttgatgtctgtagatgaaaagggttgctatgatgagggcattatccataaccaattattggataaaagctatctgggcgaacacatttttaaggctcaaaaacgcattatagagcaattgggcgattctttattgttggagcgagagattgagcattcctacccgcattgctggaggacgcacaagcctgtgatttatagagcgaccacgcaatggtttattttaatggatgagccttttatccaaaatgatggctctcaaaaaaccttaagagaagtggctttagatgcgattgaaaaggtggaatttgtgccaagcagcgggaaaaaccgcctaaaaaccatgatagaaaaccgccctgattggtgcttgagccgtcaaagaaaatggggcgtgccactggcctttttcatagacaaacgcaccaataagccatgttttgagagcgaagttttagaacatgtggccaatctttttgaagagaaaggttgcgatgtgtggtgggaatataacataaaagatttattaccccctagctatcaagataacgccaagcattacgaaaaagtcatgcacattttagacgtgtggtttgatagcggtagcacctttaaggcggttttagaagactatcatggggaaaaagggcaaagccctagcgatgtggttttagaagggagcgatcagcatagggggtggtttcaaagctcgcttttaatcggttgtgttttaaataatcaagccccttttaaaaaggtcattacgcatggatttatcgtcgatgaaaagggcgaaaaaaatgagcaaatctaa

SEQ ID NO: 2302 - DNA (genomic), 2835 bp, Helicobacter pylori; double-stranded, circular
  misc_feature (B) LOCATION 1...2835
  hypothetical: NO
  anti-sense: NO
atgtgccgcgaaaagacacgcacctttatatcgctcctaaaacaaaagaataataaagcaaaggataatataatgaaagaatacaaagacaccttaaacttaaacgaaaccaccttttctatgaaagggaatttgagcgttaatgagcctaaaacttacgccaaatggcaagaacaacaagcgttcaaacgcatgcaaaataggaaagataaccatggggatttcactttgcatgatgggccgccttatgcgaacgggcatttgcatttagggcatgccttaaataagattttaaaagacattgttattaaaagggaatattttaaggggaagaaaatctattacacgcccggttgggattgccatggcttacccattgagcaacaaattttagaacaattggaaaaagaaaaaacgagcctagaaaaccccacgctgtttagagaaaagtgccgagatcatgcgaagaagtttttagaaatccaaaagaacgagtttttgcaattaggcgttttgggagattttgaagatccttataaaaccatggattttaaatttgaagcgagcatttatagggctttagtgggagtggctaaaaaagggcttttgaaagaacgccacaagcctatttattggagttatgcatgcgagagtgctttagcggaagctgaagtggaatacaagatgaaaaaatcgccctccattttcgtggcgtttgatttgaaaaaggagggtttagaaaaattaaaagtcaaaaaagcgagcttggtgatttggacgaccacgccttggactttgtatgcgaatgtggcgatcgctttgaaaaaagacgctgtttatgcgctcacccaaaaaggctatttagtcgctaaagccttgcatgaaaaattagccgctttaggggtggtggataatgcgatcacgcatgaatttaattccaatgatttagaatatttagtggctacaaacccgctcaatcaaagggattcgctggtggttttaggggatcatgtgagtttagaagacggcacaggagccgtgcataccgcgcccgggcatggtgaagaggactactatctgggcttaaaataccatttagaagtgttgatgtctgtagatgaaaagggttgctatgatgagggcattatccataaccaattattggataaaagctatctgggcgaacacatttttaaggctcaaaaacgcattatagagcaattgggcgattctttattgttggagcgagagattgagcattcctacccgcattgctggaggacgcacaagcctgtgatttatagagcgaccacgcaatggtttattttaatggatgagccttttatccaaaatgatggctctcaaaaaaccttaagagaagtggctttagatgcgattgaaaaggtggaatttgtgccaagcagcgggaaaaaccgcctaaaaaccatgatagaaaaccgccctgattggtgcttgagccgtcaaagaaaatggggcgtgccactggcctttttcatagacaaacgcaccaataagccatgttttgagagcgaagttttagaacatgtggccaatctttttgaagagaaaggttgcgatgtgtggtgggaatataacataaaagatttattaccccctagctatcaagataacgccaagcattacgaaaaagtcatgcacattttagacgtgtggtttgatagcggtagcacctttaaggcggttttagaagactatcatggggaaaaagggcaaagccctagcgatgtggttttagaagggagcgatcagcatagggggtggtttcaaagctcgcttttaatcggttgtgttttaaataatcaagccccttttaaaaaggtcattacgcatggatttatcgtcgatgaaaagggcgaaaaaatgagcaaatctaagggcaatgtggtgtctttggacaacttactcaaaaagcatgggagcgatgtggtgcgtttgtgggtagcgtttaatgactatcaaaacgatctaagggtctctcaaacctttttcattcaaacagaacagcattataaaaaattccgcaacacccttaaattcttactcgccaattttagcgatatggatctcaagaatttagaacgcccccatgactttagccctttagatcattttatattagaggctttagaaacgataagcgctggagtcaatagcgcgtttgaagagcatgatttggtgaagggcttgaatattttaatggcgtttgttaccaacgaattgagcgggatttatttagacgcttgtaaggatagcttgtattgcgatagcaaaaataatgaaaaacgccaagccattcaaatggtcttactcgctgtggctagtcaattgtgctactttttagccccgattttaacgcacacgattgaagaagttttagagcatagccaagtgttgcgcgcgtttttacaagccaaagatgtgtttgatttaaaaggcattagcgttttagaaaaactccaccttaaagagtttaaaaagccagaaaattttgaagccgttttggccttgcgctctgcctttaatgaagagttagaccgattgaaaaaagaaggcgtggttaaaaattcgttggaatgcgctattgaagtgaaagaaaaagcgttgtgtgaaaatttagtagaagaattgctgatggtgagctttgtgggggttgcaaaagaaaaattgagcgaaacgccagcattcacgctctttaaggcccccttttataaatgccccaggtgttggcgttttaaaagcgagttagaaaacaccccttgcaagcgctgcgaagaggttttaaaagagcgatga

SEQ ID NO: 2303 - DNA (genomic), 168 bp, Helicobacter pylori; double-stranded, circular
  misc_feature (B) LOCATION 1...168
  hypothetical: NO
  anti-sense: NO
gtgagcgagagcgaaaaacaagaaattgaaaacaagatagaagaaagaaaacgtgccaaagaacaaaaagattttttaaaagccgatagcatcagagaagagcttttacaacaaaaaatcgctttgatggacaccccacaaggcacgatttgggagaagcttttttaa

SEQ ID NO: 2304 - DNA (genomic), 312 bp, Helicobacter pylori; double-stranded, circular
  misc_feature (B) LOCATION 1...312
  hypothetical: NO
  anti-sense: NO
aaagccatgctttcttctacgaatgacatacggtatcaaaaccctaaaaacaaggctttgaaaggcgaaatattagcgaatctgaaattcataaaaaaactgcttggtattgggtgtaaagaccctagcgcgtatgtccaattaggcgtgagcaagagcgaaaaacaagaaattgaaaacaagatagaagaaagaaaacgtgccaaagaacaaaaagattttttaaaagccgatagcatcagagaagagcttttacaacaaaaaatcgctttgatggacaccccacaaggcacgatttgggagaagcttttt

SEQ ID NO: 2305 - DNA (genomic), 1107 bp, Helicobacter pylori; double-stranded, circular
  misc_feature (B) LOCATION 1...1107
  hypothetical: NO
  anti-sense: NO
atgttcatttatgataccaaattaaaacaaaaagtcccttttgagcctttagtccacaataaggcgaatatttatgtgtgtgggcctacggtgtatgatgacgctcatttagggcatgccaggagcgcgattgcttttgatttgttgaggcgcacgcttgaattgagcggctatgaagtggtgctagtaaggaatttcacggatattgacgataagattatcaataaagccttcaaagaaaacaaaagcattcaagaattaagcagcatttacattgaatcttacacgagggatctaaacgctttgaacgtgaaacaacccagcctagagcctaaagcgagcgagtatttagacgctatggtgcgcatgattgaaacgcttttagaaaaaaatttcgcttatagagtttctaatggggatatttatttagacacgagcaaggacaaagattacggctctttgagcatgcataatagcagcgtggaatttagccgtatcggtttggtgcaagaaaaacggcttgagcaggattttgtgttatggaaaagctataagggggataatgatgtgggctttgatagccctttaggcaaagggcgccctggctggcacatagaatgctctagcatggtttttgaaactttagcgctcgctaacgccccttatcaaattgatattcatgctggcggaacggatttgttattcccccaccatgaaaatgaagcgtgccaaacccgttgtgcctttggcgtggagatcgctaaatactggatgcacaatggctttgtgaatatcaataacgaaaaaatgtctaaaagtttagggaatagctttttcattaaagacgccctcaaaaactatgatggcgagattttgcgtaattacttactaggggtgcattaccgctctgttttgaatttcaatgaagaagacttgttaatgagtaaaaaacgcttggataaaatctatcgtttgaaacagcgcgttttagggactttaggaggaataaatccaaactttaaaaaagaaattttagaatgcatgcaagatgatttaaacgtttctaaagcgttgagcgttttagaaagccatgctttcttctacgaa

SEQ ID NO: 2306 - DNA (genomic), 1227 bp, Helicobacter pylori; double-stranded, circular
  misc_feature (B) LOCATION 1...1227
  hypothetical: NO
  anti-sense: NO
atgttcatttatgataccaaattaaaacaaaaagtcccttttgagcctttagtccacaataaggcgaatatttatgtgtgtgggcctacggtgtatgatgacgctcatttagggcatgccaggagcgcgattgcttttgatttgttgaggcgcacgcttgaattgagcggctatgaagtggtgctagtaaggaatttcacggatattgacgataagattatcaataaagccttcaaagaaaacaaaagcattcaagaattaagcagcatttacattgaatcttacacgagggatctaaacgctttgaacgtgaaacaacccagcctagagcctaaagcgagcgagtatttagacgctatggtgcgcatgattgaaacgcttttagaaaaaaatttcgcttatagagtttctaatggggatatttatttagacacgagcaaggacaaagattacggctctttgagcatgcataatagcagcgtggaatttagccgtatcggtttggtgcaagaaaaacggcttgagcaggattttgtgttatggaaaagctataagggggataatgatgtgggctttgatagccctttaggcaaagggcgccctggctggcacatagaatgctctagcatggtttttgaaactttagcgctcgctaacgccccttatcaaattgatattcatgctggcggaacggatttgttattcccccaccatgaaaatgaagcgtgccaaacccgttgtgcctttggcgtggagatcgctaaatactggatgcacaatggctttgtgaatatcaataacgaaaaaatgtctaaaagtttagggaatagctttttcattaaagacgccctcaaaaactatgatggcgagattttgcgtaattacttactaggggtgcattaccgctctgttttgaatttcaatgaagaagacttgttaatgagtaaaaaacgcttggataaaatctatcgtttgaaacagcgcgttttagggactttaggaggaataaatccaaactttaaaaaagaaattttagaatgcatgcaagatgatttaaacgtttctaaagcgttgagcgttttagaaagcatgctttcttctacgaatgaaaaactggatcaaaaccctaaaaacaaggctttgaaaggcgaaattttagcgaatctgaaattcatagaagaactgcttggtattgggtttaaagacctagcgcgtatttccaattag

SEQ ID NO: 2307 - DNA (genomic), 1398 bp, Helicobacter pylori; double-stranded, circular
  misc_feature (B) LOCATION 1...1398
  hypothetical: NO
  anti-sense: NO
atgttcatttatgataccaaattaaaacaaaaagtcccttttgagcctttagtccacaataaggcgaatatttatgtgtgtgggcctacggtgtatgatgacgctcatttagggcatgccaggagcgcgattgcttttgatttgttgaggcgcacgcttgaattgagcggctatgaagtggtgctagtaaggaatttcacggatattgacgataagattatcaataaagccttcaaagaaaacaaaagcattcaagaattaagcagcatttacattgaatcttacacgagggatctaaacgctttgaacgtgaaacaacccagcctagagcctaaagcgagcgagtatttagacgctatggtgcgcatgattgaaacgcttttagaaaaaaatttcgcttatagagtttctaatggggatatttatttagacacgagcaaggacaaagattacggctctttgagcatgcataatagcagcgtggaatttagccgtatcggtttggtgcaagaaaaacggcttgagcaggattttgtgttatggaaaagctataagggggataatgatgtgggctttgatagccctttaggcaaagggcgccctggctggcacatagaatgctctagcatggtttttgaaactttagcgctcgctaacgccccttatcaaattgatattcatgctggcggaacggatttgttattcccccaccatgaaaatgaagcgtgccaaacccgttgtgcctttggcgtggagatcgctaaatactggatgcacaatggctttgtgaatatcaataacgaaaaaatgtctaaaagtttagggaatagctttttcattaaagacgccctcaaaaactatgatggcgagattttgcgtaattacttactaggggtgcattaccgctctgttttgaatttcaatgaagaagacttgttaatgagtaaaaaacgcttggataaaatctatcgtttgaaacagcgcgttttagggactttaggaggaataaatccaaactttaaaaaagaaattttagaatgcatgcaagatgatttaaacgtttctaaagcgttgagcgttttagaaagcatgctttcttctacgaatgaaaaactggatcaaaaccctaaaaacaaggctttgaaaggcgaaattttagcgaatctgaaattcatagaagaactgcttggtattgggtttaaagaccctagcgcgtatttccaattaggcgtgagcgagagcgaaaaacaagaaattgaaaacaagatagaagaaagaaaacgtgccaaagaacaaaaagattttttaaaagccgatagcatcagagaagagcttttacaacaaaaaatcgctttgatggacaccccacaaggcacgatttgggagaagcttttttaa

SEQ ID NO: 2308 - DNA (genomic), 495 bp, Helicobacter pylori; double-stranded, circular
  misc_feature (B) LOCATION 1...495
  hypothetical: NO
  anti-sense: NO
atgaataaagaacctatgagcatgcatggatacaataagatttgtgcggaattgaagcaattaaaagaggtggaacggcctaatattgtgaaagaaattgatattgctagagggcatggggatttgaaagaaaacgctgaataccatgccgctaaagaaaaacaacgcttcattgaagcgaggatcgtggatttaagcgaaattgttgctaacgctcaagtgattgatccgagcgctttagcccacaataaagtgagttttggcagcacgattaaaatccttaatttagacaacgataaagagttttcttacacgatagtagggagcgtggagagtgatccggctaaagggttgatctcttttggttcgccgatcgctaagagtttgataggcaagagcaagggcgatgcggtgagtattcaattacccaatggcgagagcgattttgaaattttagacatttactataaagagatttgttttgatgaaaattaa

SEQ ID NO: 2309 - DNA (genomic), 492 bp, Helicobacter pylori; double-stranded, circular
  misc_feature (B) LOCATION 1...492
  hypothetical: NO
  anti-sense: NO
atgaataaagaacctatgagcatgcatggatacaataagatttgtgcggaattgaagcaattaaaagaggtggaacggcctaatattgtgaaagaaattgatattgctagagggcatggggatttgaaagaaaacgctgaataccatgccgctaaagaaaaacaacgcttcattgaagcgaggatcgtggatttaagcgaaattgttgctaacgctcaagtgattgatccgagcgctttagcccacaataaagtgagttttggcagcacgattaaaatccttaatttagacaacgataaagagttttcttacacgatagtagggagcgtggagagtgatccggctaaagggttgatctcttttggttcgccgatcgctaagagtttgataggcaagagcaagggcgatgcggtgagtattcaattacccaatggcgagagcgattttgaaattttagacatttactataaagagatttgttttgatgaaaat

SEQ ID NO: 2310 - DNA (genomic), 579 bp, Helicobacter pylori; double-stranded, circular
  misc_feature (B) LOCATION 1...579
  hypothetical: NO
  anti-sense: NO
ccggcccaacaacaacctttttgccattatccagggcggaacgatttgaaaatgcgcagccttagcgtggggttaacgcatgagggttttgatggctatgctataggcggtttagcggtgggggaaagtgtagatgaaatgctagaaaccatcgcgcacaccgcccccttgctccccaaagacaagcctcgctacttaatgggcgtaggcacgcctgaaaatatcctagacgctatcagtttgggggtggatatgtttgattgcgtgatgcccaccagaaacgccagaaacgccacccttttcacgcattctggaaagatttctatcaaaaacgcgccctataaattggatgatacccctattgaagaaaattgtgcttgttatgcttgcaaacgctattctaaagcctatttgcaccatttgtttagagctaaagaactcacttacgctcgtttggccagcttgcacaatttgcatttttatttagagctggttaaaaacgccagaaacgccattttagaaaagcggtttttgagttttaaaaaagaatttttagaaaaataccactcttgttcgcat

SEQ ID NO: 2311 - DNA (genomic), 582 bp, Helicobacter pylori; double-stranded, circular
  misc_feature (B) LOCATION 1...582
  hypothetical: NO
  anti-sense: NO
acgatggattttcaactccaagctgttgatgataacgcgcgagctggcgttttgaatttagctcattctcaagtagagacacccgttttcatgcccgtaggcacgcaaggctgtatcaaatctttagacgctatggatgcgcaagaaattttaggcgctaaactcattttagccaacacttatcacatgtatttacgaccgggcgagaaagtggttgaacaattagggggcttgcatcgtttcgctcaatttcaggggagttttttaaccgatagcggagggtttcaagcctttagtttgagcgataatgtcaaattgcaagaagatgggatcgtttttaaatcccatattgatgggagcaagcatttattcacgcccattaaagttttggacattcaatattctttgaatagcgatattatgatggttttagacgatttagtgggcttgcccgctcccttaaaacgccttgaagaatccattaaaagaagcgccaaatgggcgaatatgagcctagaataccacaaagaaaataaccggcccaacaacaacctttttgccattatccagggcggaacgatt

SEQ ID NO: 2312 - DNA (genomic), 1116 bp, Helicobacter pylori; double-stranded, circular
  misc_feature (B) LOCATION 1...1116
  hypothetical: NO
  anti-sense: NO
atggattttcaactccaagctgttgatgataacgcgcgagctggcgttttgaatttagctcattctcaagtagagacacccgttttcatgcccgtaggcacgcaaggctgtatcaaatctttagacgctatggatgcgcaagaaattttaggcgctaaactcattttagccaacacttatcacatgtatttacgaccgggcgagaaagtggttgaacaattagggggcttgcatcgtttcgctcaatttcaggggagttttttaaccgatagcggagggtttcaagcctttagtttgagcgataatgtcaaattgcaagaagatgggatcgtttttaaatcccatattgatgggagcaagcatttattcacgcccattaaagttttggacattcaatattctttgaatagcgatattatgatggttttagacgatttagtgggcttgcccgctcccttaaaacgccttgaagaatccattaaaagaagcgccaaatgggcgaatatgagcctagaataccacaaagaaaataaccgccccaacaacaacctttttgccattatccagggcggaacgcatttgaaaatgcgcagccttagcgtggggttaacgcatgagggttttgatggctatgctataggcggtttagcggtgggggaaagtgtagatgaaatgctagaaaccatcgcgcacaccgcccccttgctccccaaagacaagcctcgctacttaatgggcgtaggcacgcctgaaaatatcctagacgctatcagtttgggggtggatatgtttgattgcgtgatgcccaccagaaacgccagaaacgccacccttttcacgcattctggaaagatttctatcaaaaacgcgccctataaattggatgatacccctattgaagaaaattgtgcttgttatgcttgcaaacgctattctaaagcctatttgcaccatttgtttagagctaaagaactcacttacgctcgtttggccagcttgcacaatttgcatttttatttagagctggttaaaaacgccagaaacgccattttagaaaagcggtttttgagttttaaaaaagaatttttagaaaaataccactcttgttcgcattga

SEQ ID NO: 2313 - DNA (genomic), 267 bp, Helicobacter pylori; double-stranded, circular
  misc_feature (B) LOCATION 1...267
  hypothetical: NO
  anti-sense: NO
atggcacacaagaaaggtcaagggagcacgcagaataacagagattctgcaggaagacgcttaggcgtgaaaaaatttggctcagaatttgtgagggctgggaatattatcgtgcgccaaagaggcactaaaatccatcccggtaataatgtgggcatggggaaagaccataccttatacgcgctcatagatggcgttgtgaagtttgagcataaagacagaagccgcaaaaaggtttctgtaattagtgggaattttggggagtag

SEQ ID NO: 2314 - DNA (genomic), 267 bp, Helicobacter pylori; double-stranded, circular
  misc_feature (B) LOCATION 1...267
  hypothetical: NO
  anti-sense: NO
acaatggcacacaagaaaggtcaagggagcacgcagaataacagagattctgcaggaagacgcttaggcgtgaaaaaatttggctcagaatttgtgagggctgggaatattatcgtgcgccaaagaggcactaaaatccatcccggtaataatgtgggcatggggaaagaccataccttatacgcgctcatagatggcgttgtgaagtttgagcataaagacagaagccgcaaaaaggtttctgtaattagtgggaattttggggag

SEQ ID NO: 2315 - DNA (genomic), 1626 bp, Helicobacter pylori; double-stranded, circular
  misc_feature (B) LOCATION 1...1626
  hypothetical: NO
  anti-sense: NO
atgcacactctcattaagggcgttttagaagagattttagaagctgaagtcattattgaataccctaaagacagagagcatgggcattacgctacgccgatcgcctttaatctcgccaaagtttttaaaaaatcgcccttagccatcgctgaagagttggcccttaaaatcggctcacatgaaaaaactcaagggttttttgaccgcgtagtggcttgtaagggctatatcaatttcacgctttctttagactttttggagcgtttcacccaaaaagctttggaattgaaagaacaatttggctctcaagttaaaagcgaacgttctcaaaaaatctttttagaatttgtgagcgctaaccccacagggcctttacacatagggcatgctaggggtgcggtgtttggcgatagtttggctaaaatcgctcgctttttagggcatgaagttttgtgcgagtattatgtcaatgacatgggatctcaaatccgcttgttaggggtttctgtatggctcgcttacaaagaacatgttttaaaagagagcgttacttacccagaagtcttttacaagggcgaatacatcattgaaatcgccaaaaaggctcacaacgatttagagccaagcctttttaaagaaaacgaagaaactatcattgaagttttaagcgactacgctaaagatttaatgcttttagaaattaagggtaatttagacgctttagacattcattttgattcttatgcgagcgaaaaagaagtttttaaacataaagatgcggtgtttgaccgattagaaaaagcgaacgccctttatgaaaaggactctaaaacctggctcaaatcttcactctaccaagatgaaagcgatcgggtgctgattaaagaagataaaagctacacttatttagccggcgatattgtctatcatgatgaaaaattccaacaaaattacaccaaatacatcaacatttggggggcagaccaccacggctatatcgctagagtgaaagccagccttgagtttttaggctatgattctagcaagcttgaagtcttgctcgctcaaatggtacgcttgcttaaagataacgagccttacaagatgagtaaaagagcgggtaattttattttgattaaagatgtgattgatgatgtgggtaaagacgctttaaggtttatttttttgagcaaacggcttgacacccatttagaattcgatgtcaatactttaaaaaagcaggacagctcaaaccctatttattatatccattacgctaattcgcgcatccacaccatgctagaaaaatcgcccttttctaaagaagaaatcttgcaaacccctttaaaaaatttaaacgccgaagaaaaatacctgctttttagcgctttaagcttgcctaaggcggttgaatcttcttttgaagaatacggcttgcaaaaaatgtgcgaatacgcaaaaaccctcgcctcagaattccaccgcttctataacgccggtaagatcttagacacccctaaagcgaaagagcttttaaaaatttgtttaatggtgagcttgagtttaactaacgctttcaaacttttaggcatagaaatcaaaaccaaaatttcctctaaagattga

SEQ ID NO: 2316 - DNA (genomic), 1644 bp, Helicobacter pylori; double-stranded, circular
  misc_feature (B) LOCATION 1...1644
  hypothetical: NO
  anti-sense: NO
aagcaaacaagaaagttaagcatgcacactctcattaagggcgttttagaagagattttagaagctgaagtcattattgaataccctaaagacagagagcatgggcattacgctacgccgatcgcctttaatctcgccaaagtttttaaaaaatcgcccttagccatcgctgaagagttggcccttaaaatcggctcacatgaaaaaactcaagggttttttgaccgcgtagtggcttgtaagggctatatcaatttcacgctttctttagactttttggagcgtttcacccaaaaagctttggaattgaaagaacaatttggctctcaagttaaaagcgaacgttctcaaaaaatctttttagaatttgtgagcgctaaccccacagggcctttacacatagggcatgctaggggtgcggtgtttggcgatagtttggctaaaatcgctcgctttttagggcatgaagttttgtgcgagtattatgtcaatgacatgggatctcaaatccgcttgttaggggtttctgtatggctcgcttacaaagaacatgttttaaaagagagcgttacttacccagaagtcttttacaagggcgaatacatcattgaaatcgccaaaaaggctcacaacgatttagagccaagcctttttaaagaaaacgaagaaactatcattgaagttttaagcgactacgctaaagatttaatgcttttagaaattaagggtaatttagacgctttagacattcattttgattcttatgcgagcgaaaaagaagtttttaaacataaagatgcggtgtttgaccgattagaaaaagcgaacgccctttatgaaaaggactctaaaacctggctcaaatcttcactctaccaagatgaaagcgatcgggtgctgattaaagaagataaaagctacacttatttagccggcgatattgtctatcatgatgaaaaattccaacaaaattacaccaaatacatcaacatttggggggcagaccaccacggctatatcgctagagtgaaagccagccttgagtttttaggctatgattctagcaagcttgaagtcttgctcgctcaaatggtacgcttgcttaaagataacgagccttacaagatgagtaaaagagcgggtaattttattttgattaaagatgtgattgatgatgtgggtaaagacgctttaaggtttatttttttgagcaaacggcttgacacccatttagaattcgatgtcaatactttaaaaaagcaggacagctcaaaccctatttattatatccattacgctaattcgcgcatccacaccatgctagaaaaatcgcccttttctaaagaagaaatcttgcaaacccctttaaaaaatttaaacgccgaagaaaaatacctgctttttagcgctttaagcttgcctaaggcggttgaatcttcttttgaagaatacggcttgcaaaaaatgtgcgaatacgcaaaaaccctcgcctcagaattccaccgcttctataacgccggtaagatcttagacacccctaaagcgaaagagcttttaaaaatttgtttaatggtgagcttgagtttaactaacgctttcaaacttttaggcatagaaatcaaaaccaaaatttcctctaaagat

SEQ ID NO: 2317 - DNA (genomic), 315 bp, Helicobacter pylori; double-stranded, circular
  misc_feature (B) LOCATION 1...315
  hypothetical: NO
  anti-sense: NO
atgtcatacgcaatattcaagcatggcggtaagcaatataaagtcgttgagggcgatattgttttactggataaaatgaataaagagcctaaggctttagtggaattagtggaagtgttagccgtatctaaagagggcaagctttcttgtgggaaaccctttgtgaatggggctaaaattgaagcggaagtgatcaatgaagggcgtagcaaaaaagtcatcactttcaaaaaacgccgccgaaaagacagcaaaaccaagcgtggttttagaagagatttcactcgtgtgagaatcactaaaattgtagcataa

SEQ ID NO: 2318 - DNA (genomic), 321 bp, Helicobacter pylori; double-stranded, circular
  misc_feature (B) LOCATION 1...321
  hypothetical: NO
  anti-sense: NO
ggaatagaaatgtcatacgcaatattcaagcatggcggtaagcaatataaagtcgttgagggcgatattgttttactggataaaatgaataaagagcctaaggctttagtggaattagtggaagtgttagccgtatctaaagagggcaagctttcttgtgggaaaccctttgtgaatggggctaaaattgaagcggaagtgatcaatgaagggcgtagcaaaaaagtcatcactttcaaaaaacgccgccgaaaagacagcaaaaccaagcgtggttttagaagagatttcactcgtgtgagaatcactaaaattgtagca

(The sequence listing continues in the following parts.)
